United States Patent Application Publication US 2011/0183924 A1 - sequence listing, part 149

SEQ ID NO: 385180 - DNA, 3551 bp, Homo sapiens
gaagctggggacaggtagacggaactttccgcgtggagatctttggccaagagaatgagcctcagctctgttctgtgggctgcactgagtttctcggtgtgagctggagaatgtggaggctgtggacccacgaggtcgaacattattgcatcttgctgtttccttgggacatttggaatctgctcgagtcttactccgacataaagcagatgtgacaaaagaaaatcgccagggatggacagttttacatgaggctgtgagcactggcgatcctgagatggtgtacacagttctccaacatcgagactaccacaacacatccatggcccttgagggagttcctgagctgctccaaaaaattctcgaggctccggatttctatgtgcagatgaaatgggaattcaccagctgggtgcccttggtttctagaatatgcccaaatgatgtctgtcgcatctggaaaagtggtgccaaactgcgcgtcgatatcacattgctgggatttgaaaacatgagctggataagagggaggcgtagttttatatttaagggagaagacaactgggcggagttaatggaagtcaaccatgatgacaaagtggtcaccaccgaacgcttcgacctttcccaagaaatggagcgcctcactctggacttgatgaagccaaaaagcagggaagttgagcggcggctcacaagccctgtcattaacaccagcctcgatactaaaaatattgcttttgaaagaactaaatccggattctggggctggaggacagataaagcagaagttgttaatggttacgaagcaaaggtttacacagtaaacaatgtgaatgtgatcaccaaaatacgcacagaacatctgaccgaggaggaaaaaaagagatataaagcagacaggaacccgctggaatctttgctgggaactgtggaacaccaatttggtgcacaagggggacctcaccacggaatgtgctactgcaaacaaccccacagccatcacgcctgatgagtacttcaatgaagagtttgatctgaaagacagggacattggaaggccgaaagagctgacgattagaacacagaagtttaaagcaatgttgtggatgtgtgaagagtttcccctctctctggtggagcaggtcattcccatcattgacctaatggctcgaacgagtgctcattttgcaagactgagagatttcatcaaattggaattcccacctggatttcctgtcaaaatagcttcccacatcacaaactttgaggttgatcaatctgtgtttgaaattcccgaatcttactatgttcaagacaatggcagaaatgtgcatttgcaagatgaagattacgagataatgcagtttgccatccagcaaagtctgctggagtccagcaggagccaggaactttcaggaccagcttcgaatggagggatcagccagacaaacacctatgacgcccagtatgagagggccatccaggagagcctcctcaccagcacagaaggcctgtgccccagcgccctgagcgagacaagccgttttgataatgacttgcagctagccatggagctctctgccaaagagctggaggaatgggagctccggctccaggaggaagaggctgagctccagcaagtcttacagctgtcactcactgacaaatagacctttcagcctgtgagcctctgcacaaagcagaggctgtgggctgtcacagatgctgtgtcaaccagggccctagggctaagggcctgcaccttgcgtgcatgcagcaggcaacaactgccccttctttatgcagaggtgcagaaccagggactcctgggcccatccaggctgctccctggggtggagaagggaccagggattgcaggccccatctccaggctaaggggaggagagcatcatcactttccattagctgtattggcttgcaggtcacatttttactaccagctttagacaaaaccccaatccccgcaggtttgtagataaatttttatcaaggagtgataacaagacaagttattgcagagtcagggtgcttttatatataagagcagcagccgcctttgtaaagtgtgatctatgagaattggagacacttctttactgttcaccaaagaaatgggtaatctgtgctgatctccttatttttacctttttacagggtttctaggacattgtcattattcttcctccatctatctgattccattccttccacacccagctaaagttagaggagatacatatagaatctattttagattattgttaactatttgcatcaaattaagatacacaaatggccatggatgttgccttagccttaaacattactaatagtttcacatcacctcactgcacgcatcgaaggatctgatttgaatttgtaaaggcaattcttttgagagcaggattctccaggctaaatcaaaggcagctaatcctgtccctgaaggagcagctaggggaacctgaggcttgttcttgaagtgggcaagctggccaaaatattggaacacacagaaccaaaccaggtgtgttctacacctgcatgagtgaaggatttccacgtagacacctaggaagagcccgcatgccctagactcactccagaggaaggattgatttgcaaccagaaagggagctgaaaaccacggagctccatggctcttcattcaaaagggaaaataatgattccacgttgctttttagagttcaaatcaacatctttctggataaatctattttttaacaatctttttattatttgtaaaagatataaaaacaactcccatcagtagcaatacaaggttatacattttaaccagattttctcaggccttttttggatacctttagtagttaactctcttttgtcaaaccctcttgtatataaccatcgcacaacatacagaaccctggggaatacagccaagggcactgctcactgtggcccgtgtattcattcccacaggctgcactgaaataacctggtaaacaacaccctcctccattttgcgtctatttcttctattgtgcttctttggggataggaagagaaacataactactgttccaggtaacgtctgtatcatacagttagtgttgccagtgaaacgttcccagatacaaagaattgtgcttttaattccatttcacaatctgttttgttttttttttttgtcattgtctgaccaaaattccttctgcacatgaggccagtataggcaacgtcacatttgtttgtttcaaatatgcagtgtggtattttgtttactttgcatttaccgtgagcaaagatacttcttggaatggctgcagtgaggccgtgtcattggctcacaaaagtgactcataggtaatttctgtgtttgcattccactgctctgctccctaaggtccttgactttctccccaggaattcacttaaaaagggactgagcattgtgtcaacctgttgcagtgtttttcatatatgtgttcactctaaaaatgcaaataaagactgcttccttagagggtgctcatacaaaa

SEQ ID NO: 385181 - DNA, 3653 bp, Homo sapiens
cgcagaagtctgtccgcgagctgtcagcgcgggcgggaacgccgcggggcgcggggtgggcgcggccgacctggtccctgagccggccggcgaccccggacctcccgcgcgccccgcacccgaccggctcagccggccggcagcgtaacacgccctacgctcgcttgctcgccggcctcagggcaggcaggcgggcgcgggagaccccgccggggccgagacttggggcgggcgacgaggaccaggttacggcctcctcgccatgtcctcggcctgcgacgcgggcgaccactaccccctgcacctcctagtctggaaaaacgactaccggcagctcgagaaggagctgcagggccagaatgtggaggctgtggacccacgaggtcgaacattattgcatcttgctgtttccttgggacatttggaatctgctcgagtcttactccgacataaagcagatgtgacaaaagaaaatcgccagggatggacagttttacatgaggctgtgagcactggcgatcctgagatggtgtacacagttctccaacatcgagactaccacaacacatccatggcccttgagggagttcctgagctgctccaaaaaattctcgaggctccggatttctatgtgcagatgaaatgggaattcaccagctgggtgcccttggtttctagaatatgcccaaatgatgtctgtcgcatctggaaaagtggtgccaaactgcgcgtcgatatcacattgctgggatttgaaaacatgagctggataagagggaggcgtagttttatatttaagggagaagacaactgggcggagttaatggaagtcaaccatgatgacaaagtggtcaccaccgaacgcttcgacctttcccaagaaatggagcgcctcactctggacttgatgaagccaaaaagcagggaagttgagcggcggctcacaagccctgtcattaacaccagcctcgatactaaaaatattgcttttgaaagaactaaatccggattctggggctggaggacagataaagcagaagttgttaatggttacgaagcaaaggtttacacagtaaacaatgtgaatgtgatcaccaaaatacgcacagaacatctgaccgaggaggaaaaaaagagatataaagcagacaggaacccgctggaatctttgctgggaactgtggaacaccaatttggtgcacaagggggacctcaccacggaatgtgctactgcaaacaaccccacagccatcacgcctgatgagtacttcaatgaagagtttgatctgaaagacagggacattggaaggccgaaagagctgacgattagaacacagaagtttaaagcaatgttgtggatgtgtgaagagtttcccctctctctggtggagcaggtcattcccatcattgacctaatggctcgaacgagtgctcattttgcaagactgagagatttcatcaaattggaattcccacctggatttcctgtcaaaatagaaattcccttgtttcatgtcttaaatgcacggattacatttggaaatgttaatggctgtagcactgccgaagaatctgtatctcaaaatgtggaagggacccaggctgattcagcttcccacatcacaaactttgaggttgatcaatctgtgtttgaaattcccgaatcttactatgttcaagacaatggcagaaatgtgcatttgcaagatgaagattacgagataatgcagtttgccatccagcaaatcttacagctgtcactcactgacaaatagacctttcagcctgtgagcctctgcacaaagcagaggctgtgggctgtcacagatgctgtgtcaaccagggccctagggctaagggcctgcaccttgcgtgcatgcagcaggcaacaactgccccttctttatgcagaggtgcagaaccagggactcctgggcccatccaggctgctccctggggtggagaagggaccagggattgcaggccccatctccaggctaaggggaggagagcatcatcactttccattagctgtattggcttgcaggtcacatttttactaccagctttagacaaaaccccaatccccgcaggtttgtagataaatttttatcaaggagtgataacaagacaagttattgcagagtcagggtgcttttatatataagagcagcagccgcctttgtaaagtgtgatctatgagaattggagacacttctttactgttcaccaaagaaatgggtaatctgtgctgatctccttatttttacctttttacagggtttctaggacattgtcattattcttcctccatctatctgattccattccttccacacccagctaaagttagaggagatacatatagaatctattttagattattgttaactatttgcatcaaattaagatacacaaatggccatggatgttgccttagccttaaacattactaatagtttcacatcacctcactgcacgcatcgaaggatctgatttgaatttgtaaaggcaattcttttgagagcaggattctccaggctaaatcaaaggcagctaatcctgtccctgaaggagcagctaggggaacctgaggcttgttcttgaagtgggcaagctggccaaaatattggaacacacagaaccaaaccaggtgtgttctacacctgcatgagtgaaggatttccacgtagacacctaggaagagcccgcatgccctagactcactccagaggaaggattgatttgcaaccagaaagggagctgaaaaccacggagctccatggctcttcattcaaaagggaaaataatgattccacgttgctttttagagttcaaatcaacatctttctggataaatctattttttaacaatctttttattatttgtaaaagatataaaaacaactcccatcagtagcaatacaaggttatacattttaaccagattttctcaggccttttttggatacctttagtagttaactctcttttgtcaaaccctcttgtatataaccatcgcacaacatacagaaccctggggaatacagccaagggcactgctcactgtggcccgtgtattcattcccacaggctgcactgaaataacctggtaaacaacaccctcctccattttgcgtctatttcttctattgtgcttctttggggataggaagagaaacataactactgttccaggtaacgtctgtatcatacagttagtgttgccagtgaaacgttcccagatacaaagaattgtgcttttaattccatttcacaatctgttttgttttttttttttgtcattgtctgaccaaaattccttctgcacatgaggccagtataggcaacgtcacatttgtttgtttcaaatatgcagtgtggtattttgtttactttgcatttaccgtgagcaaagatacttcttggaatggctgcagtgaggccgtgtcattggctcacaaaagtgactcataggtaatttctgtgtttgcattccactgctctgctccctaaggtccttgactttctccccaggaattcacttaaaaagggactgagcattgtgtcaacctgttgcagtgtttttcatatatgtgttcactctaaaaatgcaaataaagactgcttccttagagggtgctcatacaaaa

SEQ ID NO: 385182 - DNA, 3787 bp, Homo sapiens
gtaacgtggctaacctgctgctgttccctgagcttcctgcatgacatcccaaccactcagtggtcagagcagaagtcaggctgttgccgtagccagggccaagaggagctgggatgtgatgtcctagacaaagggtagggctggtcagggatcccctgtgagagggagcgtttcccagggcaagctgctttgaaaaagaatcagagcctcctggctgcttttggttcctaaatacattttttttcaggagtatgttgagttgaataactgagattttgggcatattaccaatgctgcatctgccactggaatgctgggctactttaaaaggagttccacagagatggaattaacagctgggctaaaaaaatctgtttttcacatcctttgccctgctgcaccaaacctgcccaaacatgtgactcagctattttgcagacctaatggcatctccaagcagctcaccacagtgatgagttcctggcccacctgctcttttgtaaggagcaggatggtctgtgcctcattgttctaagaattcctcgagtgagatgtggctacttgtggagatcccaccattgacatgcatgtccccagttaagatgacccagataaatgctctgacctggttaccaccttgtggcaagcccttggatgctggtcatcttcagtcacttctttgggactgctgtccaataaatgtcaccacctttgtcctcaatgctggcagttttgtaaagaagccaagattggaggctttctatgcctggggtgaggcaaattgattaataactgtgggaggagggtggagggtgcataagccatctgtcattgctaaccgcctcctgtggacaataggaccatgatttccaagtgtccttcactaacttaagctgggggggaaaaaaactataaaggctacagatataaatctgaatggcatattgtacatgtagaaatttgtggtgttcactttttatcagaactaaatccggattctggggctggaggacagataaagcagaagttgttaatggttacgaagcaaaggtttacacagtaaacaatgtgaatgtgatcaccaaaatacgcacagaacatctgaccgaggaggaaaaaaagagatataaagcagacaggaacccgctggaatctttgctgggaactgtggaacaccaatttggtgcacaagggggacctcaccacggaatgtgctactgcaaacaaccccacagccatcacgcctgatgagtacttcaatgaagagtttgatctgaaagacagggacattggaaggccgaaagagctgacgattagaacacagaagtttaaagcaatgttgtggatgtgtgaagagtttcccctctctctggtggagcaggtcattcccatcattgacctaatggctcgaacgagtgctcattttgcaagactgagagatttcatcaaattggaattcccacctggatttcctgtcaaaatagcttcccacatcacaaactttgaggttgatcaatctgtgtttgaaattcccgaatcttactatgttcaagacaatggcagaaatgtgcatttgcaagatgaagattacgagataatgcagtttgccatccagcaaagtctgctggagtccagcaggagccaggaactttcaggaccagcttcgaatggagggatcagccagacaaacacctatgacgcccagtatgagagggccatccaggagagcctcctcaccagcacagaaggcctgtgccccagcgccctgagcgagacaagccgttttgataatgacttgcagctagccatggagctctctgccaaagagctggaggaatgggagctccggctccaggaggaagaggctgagctccagcaagtcttacagctgtcactcactgacaaatagacctttcagcctgtgagcctctgcacaaagcagaggctgtgggctgtcacagatgctgtgtcaaccagggccctagggctaagggcctgcaccttgcgtgcatgcagcaggcaacaactgccccttctttatgcagaggtgcagaaccagggactcctgggcccatccaggctgctccctggggtggagaagggaccagggattgcaggccccatctccaggctaaggggaggagagcatcatcactttccattagctgtattggcttgcaggtcacatttttactaccagctttagacaaaaccccaatccccgcaggtttgtagataaatttttatcaaggagtgataacaagacaagttattgcagagtcagggtgcttttatatataagagcagcagccgcctttgtaaagtgtgatctatgagaattggagacacttctttactgttcaccaaagaaatgggtaatctgtgctgatctccttatttttacctttttacagggtttctaggacattgtcattattcttcctccatctatctgattccattccttccacacccagctaaagttagaggagatacatatagaatctattttagattattgttaactatttgcatcaaattaagatacacaaatggccatggatgttgccttagccttaaacattactaatagtttcacatcacctcactgcacgcatcgaaggatctgatttgaatttgtaaaggcaattcttttgagagcaggattctccaggctaaatcaaaggcagctaatcctgtccctgaaggagcagctaggggaacctgaggcttgttcttgaagtgggcaagctggccaaaatattggaacacacagaaccaaaccaggtgtgttctacacctgcatgagtgaaggatttccacgtagacacctaggaagagcccgcatgccctagactcactccagaggaaggattgatttgcaaccagaaagggagctgaaaaccacggagctccatggctcttcattcaaaagggaaaataatgattccacgttgctttttagagttcaaatcaacatctttctggataaatctattttttaacaatctttttattatttgtaaaagatataaaaacaactcccatcagtagcaatacaaggttatacattttaaccagattttctcaggccttttttggatacctttagtagttaactctcttttgtcaaaccctcttgtatataaccatcgcacaacatacagaaccctggggaatacagccaagggcactgctcactgtggcccgtgtattcattcccacaggctgcactgaaataacctggtaaacaacaccctcctccattttgcgtctatttcttctattgtgcttctttggggataggaagagaaacataactactgttccaggtaacgtctgtatcatacagttagtgttgccagtgaaacgttcccagatacaaagaattgtgcttttaattccatttcacaatctgttttgttttttttttttgtcattgtctgaccaaaattccttctgcacatgaggccagtataggcaacgtcacatttgtttgtttcaaatatgcagtgtggtattttgtttactttgcatttaccgtgagcaaagatacttcttggaatggctgcagtgaggccgtgtcattggctcacaaaagtgactcataggtaatttctgtgtttgcattccactgctctgctccctaaggtccttgactttctccccaggaattcacttaaaaagggactgagcattgtgtcaacctgttgcagtgtttttcatatatgtgttcactctaaaaatgcaaataaagactgcttccttagagggtgctcatacaaaa

SEQ ID NO: 385183 - DNA, 3719 bp, Homo sapiens
  misc_feature (3571)..(3571): n is a, c, g, or t
  misc_feature (3579)..(3579): n is a, c, g, or t
cgcagaagtctgtccgcgagctgtcagcgcgggcgggaacgccgcggggcgcggggtgggcgcggccgacctggtccctgagccggccggcgaccccggacctcccgcgcgccccgcacccgaccggctcagccggccggcagcgtaacacgccctacgctcgcttgctcgccggcctcagggcaggcaggcgggcgcgggagaccccgccggggccgagacttggggcgggcgacgaggaccaggttacggcctcctcgccatgtcctcggcctgcgacgcgggcgaccactaccccctgcacctcctagtctggaaaaacgactaccggcagctcgagaaggagctgcagggccagaatgtggaggctgtggacccacgaggtcgaacattattgcatcttgctgtttccttgggacatttggaatctgctcgagtcttactccgacataaagcagatgtgacaaaagaaaatcgccagggatggacagttttacatgaggctgtgagcactggcgatcctgagatggtgtacacagttctccaacatcgagactaccacaacacatccatggcccttgagggagttcctgagctgctccaaaaaattctcgaggctccggatttctatgtgcagatgaaatgggaattcaccagctgggtgcccttggtttctagaatatgcccaaatgatgtctgtcgcatctggaaaagtggtgccaaactgcgcgtcgatatcacattgctgggatttgaaaacatgagctggataagagggaggcgtagttttatatttaagggagaagacaactgggcggagttaatggaagtcaaccatgatgacaaagtggtcaccaccgaacgcttcgacctttcccaagaaatggagcgcctcactctggacttgatgaagccaaaaagcagggaagttgagcggcggctcacaagccctgtcattaacaccagcctcgatactaaaaatattgcttttgaaagaactaaatccggattctggggctggaggacagataaagcagaagttgttaatggttacgaagcaaaggtttacacagtaaacaatgtgaatgtgatcaccaaaatacgcacagaacatctgaccgaggaggaaaaaaagagatataaagcagacaggaacccgctggaatctttgctgggaactgtggaacaccaatttggtgcacaagggggacctcaccacggaatgtgctactgcaaacaaccccacagccatcacgcctgatgagtacttcaatgaagagtttgatctgaaagacagggacattggaaggccgaaagagctgacgattagaacacagaagtttaaagcaatgttgtggatgtgtgaagagtttcccctctctctggtggagcaggtcattcccatcattgacctaatggctcgaacgagtgctcattttgcaagactgagagatttcatcaaattggaattcccacctggatttcctgtcaaaatagaaattcccttgtttcatgtcttaaatgcacggattacatttggaaatgttaatggctgtagcactgccgaagaatctgtatctcaaaatgtggaagggacccaggctgattcagcttcccacatcacaaactttgaggttgatcaatctgtgtttgaaattcccgaatcttactatgttcaagacaatggcagaaatgtgcatttgcaagatgaagattacgagataatgcagtttgccatccagcaaagtctgctggagtccagcaggagccaggaactttcaggaccagcttcgaatggagggatcagccagacaaacacctatgacgcccagtatgagagggccatccaggagagcctcctcaccagcacagaaggcctgtgccccagcgccctgagcgagacaagccgttttgataatgacttgcagctagccatggagctctctgccaaagagctggaggaatgggagctccggctccaggaggaagaggctgagctccagcaagtcttacagctgtcactcactgacaaatagacctttcagcctgtgagcctctgcacaaagcagaggctgtgggctgtcacagatgctgtgtcaaccagggccctagggctaagggcctgcaccttgcgtgcatgcagcaggcaacaactgccccttctttatgcagaggtgcagaaccagggactcctgggcccatccaggctgctccctggggtggagaagggaccagggattgcaggccccatctccaggctaaggggaggagagcatcatcactttccattagctgtattggcttgcaggtcacatttttactaccagctttagacaaaaccccaatccccgcaggtttgtagataaatttttatcaaggagtgataacaagacaagttattgcagagtcagggtgcttttatatataagagcagcagccgcctttgtaaagtgtgatctatgagaattggagacacttctttactgttcaccaaagaaatgggtaatctgtgctgatctccttatttttacctttttacagggtttctaggacattgtcattattcttcctccatctatctgattccattccttccacacccagctaaagttagaggagatacatatagaatctattttagattattgttaactatttgcatcaaattaagatacacaaatggccatggatgttgccttagccttaaacattactaatagtttcacatcacctcactgcacgcatcgaaggatctgatttgaatttgtaaaggcaattcttttgagagcaggattctccaggctaaatcaaaggcagctaatcctgtccctgaaggagcagctaggggaacctgaggcttgttcttgaagtgggcaagctggccaaaatattggaacacacagaaccaaaccaggtgtgttctacacctgcatgagtgaaggatttccacgtagacacctaggaagagcccgcatgccctagactcactccagaggaaggattgatttgcaaccagaaagggagctgaaaaccacggagctccatggctcttcattcaaaagggaaaataatgattccacgttgctttttagagttcaaatcaacatctttctggataaatctattttttaacaatctttttattatttgtaaaagatataaaaacaactcccatcagtagcaatacaaggttatacattttaaccagattttctcaggccttttttggatacctttagtagttaactctcttttgtcaaaccctcttgtatataaccatcgcacaacatacagaaccctggggaatacagccaagggcactgctcactgtggcccgtgtattcattcccacaggctgcactgaaataacctggtaaacaacaccctcctccattttgcgtctatttcttctattgtgcttctttggggataggaagagaaacataactactgttccaggtaacgtctgtatcatacagttagtgttgccagtgaaacgttcccagatacaaagaattgtgcttttaattccatttcacaatctgttttgttttttttttttgtcattacngatctatnggaggggggccccattcttatagatcagtaggtgtggccgggtgtgtaataatcctgaattgggggggaggtcatatgggttaaatagttttcttaaattcattgagggggaatgagggtggtcttgggatatactacag

SEQ ID NO: 385184 - DNA, 665 bp, Homo sapiens
aaagtgaaaaaaagggcacgataagtttaacatattaaatatgtattataggggctcaaagtgaagagaaatccaaaattatagggactattggtccaaggtaccccccaaaattattattaaatgtatatattgaccaaataagaagaagtctatttcttctattgtgcttctttggggataggaagagaaacataactactgttccaggtaacgtctgtatcatacagttagtgttgccagtgaaacgttcccagatacaaagaattgtgcttttaattccatttcacaatctgttttgttttttttttttgtcattgtctgaccaaaattccttctgcacatgaggccagtataggcaacgtcacatttgtttgtttcaaatatgcagtgtggtattttgtttactttgcatttaccgtgagcaaagatacttcttggaatggctgcagtgaggccgtgtcattggctcacaaaagtgactcataggtaatttctgtgtttgcattccactgctctgctccctaaggtccttgactttctccccaggaattcacttaaaaagggactgagcattgtgtcaacctgttgcagtgtttttcatatatgtgttcactctaaaaatgcaaataaagactgcttccttagagggtgctcatacaaaa

SEQ ID NO: 385185 - DNA, 480 bp, Homo sapiens
gctcgtaccccgaagccactgcacagtaacgtctgtatcatacagttagtgttgccagtgaaacgttcccagatacaaagaattgtgcttttaattccatttcacaatctgttttgttttttttttttgtcattgtctgaccaaaattccttctgcacatgaggccagtataggcaacgtcacatttgtttgtttcaaatatgcagtgtggtattttgtttactttgcatttaccgtgagcaaagatacttcttggaatggctgcagtgaggccgtgtcattggctcacaaaagtgactcataggtaatttctgtgtttgcattccactgctctgctccctaaggtccttgactttctccccaggaattcacttaaaaagggactgagcattgtgtcaacctgttgcagtgtttttcatatatgtgttcactctaaaaatgcaaataaagactgcttccttagagggtgctcatacaaaa

SEQ ID NO: 385186 - DNA, 1890 bp, Homo sapiens
cgcagaagtctgtccgcgagctgtcagcgcgggcgggaacgccgcggggcgcggggtgggcgcggccgacctggtccctgagccggccggcgaccccggacctcccgcgcgccccgcacccgaccggctcagccggccggcagcgtaacacgccctacgctcgcttgctcgccggcctcagggcaggcaggcgggcgcgggagaccccgccggggccgagacttggggcgggcgacgaggaccaggttacggcctcctcgccatgtcctcggcctgcgacgcgggcgaccactaccccctgcacctcctagtctggaaaaacgactaccggcagctcgagaaggagctgcagggccagaatgtggaggctgtggacccacgaggtcgaacattattgcatcttgctgtttccttgggacatttggaatctgctcgagtcttactccgacataaagcagatgtgacaaaagaaaatcgccagggatggacagttttacatgaggctgtgagcactggcgatcctgagatggtgtacacagttctccaacatcgagactaccacaacacatccatggcccttgagggagttcctgagctgctccaaaaaattctcgaggctccggatttctatgtgcagatgaaatgggaattcaccagctgggtgcccttggtttctagaatatgcccaaatgatgtctgtcgcatctggaaaagtggtgccaaactgcgcgtcgatatcacattgctgggatttgaaaacatgagctggataagagggaggcgtagttttatatttaagggagaagacaactgggcggagttaatggaagtcaaccatgatgacaaagtggtcaccaccgaacgcttcgacctttcccaagaaatggagcgcctcactctggacttgatgaagccaaaaagcagggaagttgagcggcggctcacaagccctgtcattaacaccagcctcgatactaaaaatattgcttttgaaagaactaaatccggattctggggctggaggacagataaagcagaagttgttaatggttacgaagcaaaggtttacacagtaaacaatgtgaatgtgatcaccaaaatacgcacagaacatctgaccgaggaggaaaaaaagagatataaagcagacaggaacccgctggaatctttgctgggaactgtggaacaccaatttggtgcacaaggggtaagttgaagcaatgagctttcattgcagttagatgaaaggaaacaacttgtctgtgtctgggatggcatttactggatcctgaacagcccactctatgtaaaggccaaagatacccccaagctggaatttgagatactcttttggaagagaattagatgagtgactctttgaaaataaataaggattttagaggaggggtagtgattatagaaatcaggtgctttccctcttatccattataaacgaggggcctctttatagaaatggaacttaaaaaggattcaggactttatattgcaacagagcaccttaacaaatattttcttacttgatgctcacagtaactatatgaacttggtacagtggatgtccctgcgggtcagaaaaatgaaattacctttccactatcaaagctagacagggaaacagctagaacttcaactccaagtcttccaagtctcatgcactttcagatatttctttctttttttctttgttataatcaggagataaaaatgtaaaggagagtagagaaatattttaaaatgaagaaatccattacacttcctgtgtagtttggtgatatcctcatagattttcttgttccatgcaaaaaagttagtgaatagaacttcccggtctttagctggttaacacgtccacctcagacactgagtgcc

SEQ ID NO: 385187 - DNA, 1743 bp, Homo sapiens
  misc_feature (1191)..(1191): n is a, c, g, or t
  misc_feature (1193)..(1193): n is a, c, g, or t
  misc_feature (1501)..(1501): n is a, c, g, or t
  misc_feature (1743)..(1743): n is a, c, g, or t
cgcagaagtctgtccgcgagctgtcagcgcgggcgggaacgccgcggggcgcggggtgggcgcggccgacctggtccctgagccggccggcgaccccggacctcccgcgcgccccgcacccgaccggctcagccggccggcagcgtaacacgccctacgctcgcttgctcgccggcctcagggcaggcaggcgggcgcgggagaccccgccggggccgagacttggggcgggcgacgaggaccaggttacggcctcctcgccatgtcctcggcctgcgacgcgggcgaccactaccccctgcacctcctagtctggaaaaacgactaccggcagctcgagaaggagctgcagggccagaatgtggaggctgtggacccacgaggtcgaacattattgcatcttgctgtttccttgggacatttggaatctgctcgagtcttactccgacataaagcagatgtgacaaaagaaaatcgccagggatggacagttttacatgaggctgtgagcactggcgatcctgagatggtgtacacagttctccaacatcgagactaccacaacacatccatggcccttgagggagttcctgagctgctccaaaaaattctcgaggctccggatttctatgtgcagatgaaatgggaattcaccagctgggtgcccttggtttctagaatatgcccaaatgatgtctgtcgcatctggaaaagtggtgccaaactgcgcgtcgatatcacattgctgggatttgaaaacatgagctggataagagggaggcgtagttttatatttaagggagaagacaactgggcggagttaatggaagtcaaccatgatgacaaagtggtcaccaccgaacgcttcgacctttcccaagaaatggagcgcctcactctggacttgatgaagccaaaaagcagggaagttgagcggcggctcacaagccctgtcattaacaccagcctcgatactaaaaatattgcttttgaaaggtacaaatttagactctaaattttaatgtctaatccccatgctgccatcttgagtgacatgtatgtattaattgtaaattatggatggattgggctttttctaatatgacataataaacactagtgggttttaaaaaaaaaaaaaaaaaaaaaaaaaaaaaaaaaaaaaaaaaaaacaaaaaaaaaaaaaacaananaaaaaacaaacaaaaaaacatttgctggcgacggcctgcggcgcccctaggagaatagggtttcttaaaagaccattccggtggggccgccgcgggcccccagcgataggttatagtgtggacgacattgggccaaaggcgtgtacccagaggagaagcacccggggacatagactatagggtgctggagtttcctccacccaaatataaaacaccgccgccgggggggacacacagaggtggttttctgtgtgaacacaaatactcgaggagtgaagagctcctcgagagagggacacaattaacgnggggagcctcatattacaacagggggaggttccaaaccgaggagaggcctagggtattctaataattttacggccccttcgcctggtggtgagataaaaaggaaagagaaagtagacaacaaagacataaaaatctaaatagagaagagtaaaaagaatagaaacgagaaaacaacacagcagagagatgaataataacatagacatagcaaatgaacatcaaaaatagacgagaacaagcn

SEQ ID NO: 385188 - DNA, 1223 bp, Homo sapiens
cgcagaagtctgtccgcgagctgtcagcgcgggcgggaacgccgcggggcgcggggtgggcgcggccgacctggtccctgagccggccggcgaccccggacctcccgcgcgccccgcacccgaccggctcagccggccggcagcgtaacacgccctacgctcgcttgctcgccggcctcagggcaggcaggcgggcgcgggagaccccgccggggccgagacttggggcgggcgacgaggaccaggttacggcctcctcgccatgtcctcggcctgcgacgcgggcgaccactaccccctgcacctcctagtctggaaaaacgactaccggcagctcgagaaggagctgcagggccagaatgtggaggctgtggacccacgaggtcgaacattattgcatcttgctgtttccttgggacatttggaatctgctcgagtcttactccgacataaagcagatgtgacaaaagaaaatcgccagggatggacagttttacatgaggctgtgagcactggcgatcctgagatggtgtacacagttctccaacatcgagactaccacaacacatccatggcccttgagggagttcctgagctgctccaaaaaattctcgaggctccggatttctatgtgcagatgaaatgggaattcaccagctgggtgcccttggtttctagaatatgcccaaatgatgtctgtcgcatctggaaaagtggtgccaaactgcgcgtcgatatcacattgctgggatttgaaaacatgagctggataagagggaggcgtagttttatatttaagggagaagacaactgggcggagttaatggaagtcaaccatgatgacaaagtggtcaccaccgaacgcttcgacctttcccaagaaatggagcgcctcactctggacttgatgaagccaaaaagcagggaagttgagcggcggctcacaagccctgtcattaacaccagcctcgatactaaaaatattgcttttgaaagggttttcagagttctcaagctaactcttttgcaactgacagtgtgtagctgagagagaatttttggaagacagctgctttgttttaatggtgctcagaattaaatgtgtgcttgtcgtgcattgagcaagaattgagccactccttaggattgataccagctacgaaaagaatatagctgctcttgaatgtgaggtttgttggtataaaaagtgtgtgaatttactt

SEQ ID NO: 385189 - DNA, 1351 bp, Homo sapiens
gtaacgtggctaacctgctgctgttccctgagcttcctgcatgacatcccaaccactcagtggtcagagcagaagtcaggctgttgccgtagccagggccaagaggagctgggatgtgatgtcctagacaaagggtagggctggtcagggatcccctgtgagagggagcgtttcccagggcaagctgctttgaaaaagaatcagagcctcctggctgcttttggttcctaaatacattttttttcaggagtatgttgagttgaataactgagattttgggcatattaccaatgctgcatctgccactggaatgctgggctactttaaaaggagttccacagagatggaattaacagctgggctaaaaaaatctgtttttcacatcctttgccctgctgcaccaaacctgcccaaacatgtgactcagctattttgcagacctaatggcatctccaagcagctcaccacagtgatgagttcctggcccacctgctcttttgtaaggagcaggatggtctgtgcctcattgttctaagaattcctcgagtgagatgtggctacttgtggagatcccaccattgacatgcatgtccccagttaagatgacccagataaatgctctgacctggttaccaccttgtggcaagcccttggatgctggtcatcttcagtcacttctttgggactgctgtccaataaatgtcaccacctttgtcctcaatgctggcagttttgtaaagaagccaagattggaggctttctatgcctggggtgaggcaaattgattaataactgtgggaggagggtggagggtgcataagccatctgtcattgctaaccgcctcctgtggacaataggaccatgatttccaagtgtccttcactaacttaagctgggggggaaaaaaactataaaggctacagatataaatctgaatggcatattgtacatgtagaaatttgtggtgttcactttttatcagaactaaatccggattctggggctggaggacagataaagcagaagttgttaatggttacgaagcaaaggtaaaaggaaactcttaaaataagatttaatatagctatttagcttctatgcaaatgaggaatctgttcccatttttttcatgcatctgtgccatggagatgctctggggaatgagaactgtctaatgtgtctctcacttggatgtttgattttgtcttatttgactttcagaaaatgggatagcatgccctgaggaggtctgtagctatgctaaagagaaacaatatggtagagaaatgagtacaggtaccagttgttctggtaggaatgacaagctagtcattcccttaattatttaaa

SEQ ID NO: 385190 - DNA, 2648 bp, Homo sapiens
cgcagaagtctgtccgcgagctgtcagcgcgggcgggaacgccgcggggcgcggggtgggcgcggccgacctggtccctgagccggccggcgaccccggacctcccgcgcgccccgcacccgaccggctcagccggccggcagcgtaacacgccctacgctcgcttgctcgccggcctcagggcaggcaggcgggcgcgggagaccccgccggggccgagacttggggcgggcgacgaggaccaggttacggcctcctcgccatgtcctcggcctgcgacgcgggcgaccactaccccctgcacctcctagtctggaaaaacgactaccggcagctcgagaaggagctgcagggccagaatgtggaggctgtggacccacgaggtcgaacattattgcatcttgctgtttccttgggacatttggaatctgctcgagtcttactccgacataaagcagatgtgacaaaagaaaatcgccagggatggacagttttacatgaggctgtgagcactggcgatcctgagatggtgtacacagttctccaacatcgagactaccacaacacatccatgggccatccaggagagcctcctcaccagcacagaaggcctgtgccccagcgccctgagcgagacaagccgttttgataatgacttgcagctagccatggagctctctgccaaagagctggaggaatgggagctccggctccaggaggaagaggctgagctccagcaagtcttacagctgtcactcactgacaaatagacctttcagcctgtgagcctctgcacaaagcagaggctgtgggctgtcacagatgctgtgtcaaccagggccctagggctaagggcctgcaccttgcgtgcatgcagcaggcaacaactgccccttctttatgcagaggtgcagaaccagggactcctgggcccatccaggctgctccctggggtggagaagggaccagggattgcaggccccatctccaggctaaggggaggagagcatcatcactttccattagctgtattggcttgcaggtcacatttttactaccagctttagacaaaaccccaatccccgcaggtttgtagataaatttttatcaaggagtgataacaagacaagttattgcagagtcagggtgcttttatatataagagcagcagccgcctttgtaaagtgtgatctatgagaattggagacacttctttactgttcaccaaagaaatgggtaatctgtgctgatctccttatttttacctttttacagggtttctaggacattgtcattattcttcctccatctatctgattccattccttccacacccagctaaagttagaggagatacatatagaatctattttagattattgttaactatttgcatcaaattaagatacacaaatggccatggatgttgccttagccttaaacattactaatagtttcacatcacctcactgcacgcatcgaaggatctgatttgaatttgtaaaggcaattcttttgagagcaggattctccaggctaaatcaaaggcagctaatcctgtccctgaaggagcagctaggggaacctgaggcttgttcttgaagtgggcaagctggccaaaatattggaacacacagaaccaaaccaggtgtgttctacacctgcatgagtgaaggatttccacgtagacacctaggaagagcccgcatgccctagactcactccagaggaaggattgatttgcaaccagaaagggagctgaaaaccacggagctccatggctcttcattcaaaagggaaaataatgattccacgttgctttttagagttcaaatcaacatctttctggataaatctattttttaacaatctttttattatttgtaaaagatataaaaacaactcccatcagtagcaatacaaggttatacattttaaccagattttctcaggccttttttggatacctttagtagttaactctcttttgtcaaaccctcttgtatataaccatcgcacaacatacagaaccctggggaatacagccaagggcactgctcactgtggcccgtgtattcattcccacaggctgcactgaaataacctggtaaacaacaccctcctccattttgcgtctatttcttctattgtgcttctttggggataggaagagaaacataactactgttccaggtaacgtctgtatcatacagttagtgttgccagtgaaacgttcccagatacaaagaattgtgcttttaattccatttcacaatctgttttgttttttttttttgtcattgtctgaccaaaattccttctgcacatgaggccagtataggcaacgtcacatttgtttgtttcaaatatgcagtgtggtattttgtttactttgcatttaccgtgagcaaagatacttcttggaatggctgcagtgaggccgtgtcattggctcacaaaagtgactcataggtaatttctgtgtttgcattccactgctctgctccctaaggtccttgactttctccccaggaattcacttaaaaagggactgagcattgtgtcaacctgttgcagtgtttttcatatatgtgttcactctaaaaatgcaaataaagactgcttccttagagggtgctcatacaaaa

SEQ ID NO: 385191 - DNA, 3914 bp, Homo sapiens
cgcagaagtctgtccgcgagctgtcagcgcgggcgggaacgccgcggggcgcggggtgggcgcggccgacctggtccctgagccggccggcgaccccggacctcccgcgcgccccgcacccgaccggctcagccggccggcagcgtaacacgccctacgctcgcttgctcgccggcctcagggcaggcaggcgggcgcgggagaccccgccggggccgagacttggggcgggcgacgaggaccaggttacggcctcctcgccatgtcctcggcctgcgacgcgggcgaccactaccccctgcacctcctagtctggaaaaacgactaccggcagctcgagaaggagctgcagggccagaatgtggaggctgtggacccacgaggtcgaacattattgcatcttgctgtttccttgggacatttggaatctgctcgagtcttactccgacataaagcagatgtgacaaaagaaaatcgccagggatggacagttttacatgaggctgtgagcactggcgatcctgagatggtgtacacagttctccaacatcgagactaccacaacacatccatggcccttgagggagttcctgagctgctccaaaaaattctcgaggctccggatttctatgtgcagatgaaatgggaattcaccagctgggtgcccttggtttctagaatatgcccaaatgatgtctgtcgcatctggaaaagtggtgccaaactgcgcgtcgatatcacattgctgggatttgaaaacatgagctggataagagggaggcgtagttttatatttaagggagaagacaactgggcggagttaatggaagtcaaccatgatgacaaagtggtcaccaccgaacgcttcgacctttcccaagaaatggagcgcctcactctggacttgatgaagccaaaaagcagggaagttgagcggcggctcacaagccctgtcattaacaccagcctcgatactaaaaatattgcttttgaaagaactaaatccggattctggggctggaggacagataaagcagaagttgttaatggttacgaagcaaaggtttacacagtaaacaatgtgaatgtgatcaccaaaatacgcacagaacatctgaccgaggaggaaaaaaagagatataaagcagacaggaacccgctggaatctttgctgggaactgtggaacaccaatttggtgcacaagggggacctcaccacggaatgtgctactgcaaacaaccccacagccatcacgcctgatgagtacttcaatgaagagtttgatctgaaagacagggacattggaaggccgaaagagctgacgattagaacacagaagtttaaagcaatgttgtggatgtgtgaagagtttcccctctctctggtggagcaggtcattcccatcattgacctaatggctcgaacgagtgctcattttgcaagactgagagatttcatcaaattggaattcccacctggatttcctgtcaaaatagaaattcccttgtttcatgtcttaaatgcacggattacatttggaaatgttaatggctgtagcactgccgaagaatctgtatctcaaaatgtggaagggacccaggctgattcagcttcccacatcacaaactttgaggttgatcaatctgtgtttgaaattcccgaatcttactatgttcaagacaatggcagaaatgtgcatttgcaagatgaagattacgagataatgcagtttgccatccagcaaagtctgctggagtccagcaggagccaggaactttcaggaccagcttcgaatggagggatcagccagacaaacacctatgacgcccagtatgagagggccatccaggagagcctcctcaccagcacagaaggcctgtgccccagcgccctgagcgagacaagccgttttgataatgacttgcagctagccatggagctctctgccaaagagctggaggaatgggagctccggctccaggaggaagaggctgagctccagcaagtcttacagctgtcactcactgacaaatagacctttcagcctgtgagcctctgcacaaagcagaggctgtgggctgtcacagatgctgtgtcaaccagggccctagggctaagggcctgcaccttgcgtgcatgcagcaggcaacaactgccccttctttatgcagaggtgcagaaccagggactcctgggcccatccaggctgctccctggggtggagaagggaccagggattgcaggccccatctccaggctaaggggaggagagcatcatcactttccattagctgtattggcttgcaggtcacatttttactaccagctttagacaaaaccccaatccccgcaggtttgtagataaatttttatcaaggagtgataacaagacaagttattgcagagtcagggtgcttttatatataagagcagcagccgcctttgtaaagtgtgatctatgagaattggagacacttctttactgttcaccaaagaaatgggtaatctgtgctgatctccttatttttacctttttacagggtttctaggacattgtcattattcttcctccatctatctgattccattccttccacacccagctaaagttagaggagatacatatagaatctattttagattattgttaactatttgcatcaaattaagatacacaaatggccatggatgttgccttagccttaaacattactaatagtttcacatcacctcactgcacgcatcgaaggatctgatttgaatttgtaaaggcaattcttttgagagcaggattctccaggctaaatcaaaggcagctaatcctgtccctgaaggagcagctaggggaacctgaggcttgttcttgaagtgggcaagctggccaaaatattggaacacacagaaccaaaccaggtgtgttctacacctgcatgagtgaaggatttccacgtagacacctaggaagagcccgcatgccctagactcactccagaggaaggattgatttgcaaccagaaagggagctgaaaaccacggagctccatggctcttcattcaaaagggaaaataatgattccacgttgctttttagagttcaaatcaacatctttctggataaatctattttttaacaatctttttattatttgtaaaagatataaaaacaactcccatcagtagcaatacaaggttatacattttaaccagattttctcaggccttttttggatacctttagtagttaactctcttttgtcaaaccctcttgtatataaccatcgcacaacatacagaaccctggggaatacagccaagggcactgctcactgtggcccgtgtattcattcccacaggctgcactgaaataacctggtaaacaacaccctcctccattttgcgtctatttcttctattgtgcttctttggggataggaagagaaacataactactgttccaggtaacgtctgtatcatacagttagtgttgccagtgaaacgttcccagatacaaagaattgtgcttttaattccatttcacaatctgttttgttttttttttttgtcattgtctgaccaaaattccttctgcacatgaggccagtataggcaacgtcacatttgtttgtttcaaatatgcagtgtggtattttgtttactttgcatttaccgtgagcaaagatacttcttggaatggctgcagtgaggccgtgtcattggctcacaaaagtgactcataggtaatttctgtgtttgcattccactgctctgctccctaaggtccttgactttctccccaggaattcacttaaaaagggactgagcattgtgtcaacctgttgcagtgtttttcatatatgtgttcactctaaaaatgcaaataaagactgcttccttagagggtgctcatacaaaa

SEQ ID NO: 385192 - DNA, 3610 bp, Homo sapiens
cgcagaagtctgtccgcgagctgtcagcgcgggcgggaacgccgcggggcgcggggtgggcgcggccgacctggtccctgagccggccggcgaccccggacctcccgcgcgccccgcacccgaccggctcagccggccggcagcgtaacacgccctacgctcgcttgctcgccggcctcagggcaggcaggcgggcgcgggagaccccgccggggccgagacttggggcgggcgacgaggaccaggttacggcctcctcgccatgtcctcggcctgcgacgcgggcgaccactaccccctgcacctcctagtctggaaaaacgactaccggcagctcgagaaggagctgcagggccagaatgtggaggctgtggacccacgaggtcgaacattattgcatcttgctgtttccttgggacatttggaatctgctcgagtcttactccgacataaagcagatgtgacaaaagaaaatcgccagggatggacagttttacatgaggctgtgagcactggcgatcctgagatggtgtacacagttctccaacatcgagactaccacaacacatccatggcccttgagggagttcctgagctgctccaaaaaattctcgagacaactgggcggagttaatggaagtcaaccatgatgacaaagtggtcaccaccgaacgcttcgacctttcccaagaaatggagcgcctcactctggacttgatgaagccaaaaagcagggaagttgagcggcggctcacaagccctgtcattaacaccagcctcgatactaaaaatattgcttttgaaagaactaaatccggattctggggctggaggacagataaagcagaagttgttaatggttacgaagcaaaggtttacacagtaaacaatgtgaatgtgatcaccaaaatacgcacagaacatctgaccgaggaggaaaaaaagagatataaagcagacaggaacccgctggaatctttgctgggaactgtggaacaccaatttggtgcacaagggggacctcaccacggaatgtgctactgcaaacaaccccacagccatcacgcctgatgagtacttcaatgaagagtttgatctgaaagacagggacattggaaggccgaaagagctgacgattagaacacagaagtttaaagcaatgttgtggatgtgtgaagagtttcccctctctctggtggagcaggtcattcccatcattgacctaatggctcgaacgagtgctcattttgcaagactgagagatttcatcaaattggaattcccacctggatttcctgtcaaaatagcttcccacatcacaaactttgaggttgatcaatctgtgtttgaaattcccgaatcttactatgttcaagacaatggcagaaatgtgcatttgcaagatgaagattacgagataatgcagtttgccatccagcaaagtctgctggagtccagcaggagccaggaactttcaggaccagcttcgaatggagggatcagccagacaaacacctatgacgcccagtatgagagggccatccaggagagcctcctcaccagcacagaaggcctgtgccccagcgccctgagcgagacaagccgttttgataatgacttgcagctagccatggagctctctgccaaagagctggaggaatgggagctccggctccaggaggaagaggctgagctccagcaagtcttacagctgtcactcactgacaaatagacctttcagcctgtgagcctctgcacaaagcagaggctgtgggctgtcacagatgctgtgtcaaccagggccctagggctaagggcctgcaccttgcgtgcatgcagcaggcaacaactgccccttctttatgcagaggtgcagaaccagggactcctgggcccatccaggctgctccctggggtggagaagggaccagggattgcaggccccatctccaggctaaggggaggagagcatcatcactttccattagctgtattggcttgcaggtcacatttttactaccagctttagacaaaaccccaatccccgcaggtttgtagataaatttttatcaaggagtgataacaagacaagttattgcagagtcagggtgcttttatatataagagcagcagccgcctttgtaaagtgtgatctatgagaattggagacacttctttactgttcaccaaagaaatgggtaatctgtgctgatctccttatttttacctttttacagggtttctaggacattgtcattattcttcctccatctatctgattccattccttccacacccagctaaagttagaggagatacatatagaatctattttagattattgttaactatttgcatcaaattaagatacacaaatggccatggatgttgccttagccttaaacattactaatagtttcacatcacctcactgcacgcatcgaaggatctgatttgaatttgtaaaggcaattcttttgagagcaggattctccaggctaaatcaaaggcagctaatcctgtccctgaaggagcagctaggggaacctgaggcttgttcttgaagtgggcaagctggccaaaatattggaacacacagaaccaaaccaggtgtgttctacacctgcatgagtgaaggatttccacgtagacacctaggaagagcccgcatgccctagactcactccagaggaaggattgatttgcaaccagaaagggagctgaaaaccacggagctccatggctcttcattcaaaagggaaaataatgattccacgttgctttttagagttcaaatcaacatctttctggataaatctattttttaacaatctttttattatttgtaaaagatataaaaacaactcccatcagtagcaatacaaggttatacattttaaccagattttctcaggccttttttggatacctttagtagttaactctcttttgtcaaaccctcttgtatataaccatcgcacaacatacagaaccctggggaatacagccaagggcactgctcactgtggcccgtgtattcattcccacaggctgcactgaaataacctggtaaacaacaccctcctccattttgcgtctatttcttctattgtgcttctttggggataggaagagaaacataactactgttccaggtaacgtctgtatcatacagttagtgttgccagtgaaacgttcccagatacaaagaattgtgcttttaattccatttcacaatctgttttgttttttttttttgtcattgtctgaccaaaattccttctgcacatgaggccagtataggcaacgtcacatttgtttgtttcaaatatgcagtgtggtattttgtttactttgcatttaccgtgagcaaagatacttcttggaatggctgcagtgaggccgtgtcattggctcacaaaagtgactcataggtaatttctgtgtttgcattccactgctctgctccctaaggtccttgactttctccccaggaattcacttaaaaagggactgagcattgtgtcaacctgttgcagtgtttttcatatatgtgttcactctaaaaatgcaaataaagactgcttccttagagggtgctcatacaaaa

SEQ ID NO: 385193 - DNA, 4476 bp, Homo sapiens
  misc_feature (3924)..(3924): n is a, c, g, or t
  misc_feature (3926)..(3926): n is a, c, g, or t
  misc_feature (4234)..(4234): n is a, c, g, or t
  misc_feature (4476)..(4476): n is a, c, g, or t
cgcagaagtctgtccgcgagctgtcagcgcgggcgggaacgccgcggggcgcggggtgggcgcggccgacctggtccctgagccggccggcgaccccggacctcccgcgcgccccgcacccgaccggctcagccggccggcagcgtaacacgccctacgctcgcttgctcgccggcctcagggcaggcaggcgggcgcgggagaccccgccggggccgagacttggggcgggcgacgaggaccaggttacggcctcctcgccatgtcctcggcctgcgacgcgggcgaccactaccccctgcacctcctagtctggaaaaacgactaccggcagctcgagaaggagctgcagggccagaatgtggaggctgtggacccacgaggtcgaacattattgcatcttgctgtttccttgggacatttggaatctgctcgagtcttactccgacataaagcagatgtgacaaaagaaaatcgccagggatggacagttttacatgaggctgtgagcactggcgatcctgagatggtgtacacagttctccaacatcgagactaccacaacacatccatggcccttgagggagttcctgagctgctccaaaaaattctcgaggctccggatttctatgtgcagatgaaatgggaattcaccagctgggtgcccttggtttctagaatatgcccaaatgatgtctgtcgcatctggaaaagtggtgccaaactgcgcgtcgatatcacattgctgggatttgaaaacatgagctggataagagggaggcgtagttttatatttaagggagaagacaactgggcggagttaatggaagtcaaccatgatgacaaagtggtcaccaccgaacgcttcgacctttcccaagaaatggagcgcctcactctggacttgatgaagccaaaaagcagggaagttgagcggcggctcacaagccctgtcattaacaccagcctcgatactaaaaatattgcttttgaaagaactaaatccggattctggggctggaggacagataaagcagaagttgttaatggttacgaagcaaaggtttacacagtaaacaatgtgaatgtgatcaccaaaatacgcacagaacatctgaccgaggaggaaaaaaagagatataaagcagacaggaacccgctggaatctttgctgggaactgtggaacaccaatttggtgcacaagggggacctcaccacggaatgtgctactgcaaacaaccccacagccatcacgcctgatgagtacttcaatgaagagtttgatctgaaagacagggacattggaaggccgaaagagctgacgattagaacacagaagtttaaagcaatgttgtggatgtgtgaagagtttcccctctctctggtggagcaggtcattcccatcattgacctaatggctcgaacgagtgctcattttgcaagactgagagatttcatcaaattggaattcccacctggatttcctgtcaaaatagaaattcccttgtttcatgtcttaaatgcacggattacatttggaaatgttaatggctgtagcactgccgaagaatctgtatctcaaaatgtggaagggacccaggctgattcagcttcccacatcacaaactttgaggttgatcaatctgtgtttgaaattcccgaatcttactatgttcaagacaatggcagaaatgtgcatttgcaagatgaagattacgagataatgcagtttgccatccagcaaagtctgctggagtccagcaggagccaggaactttcaggaccagcttcgaatggagggatcagccagacaaacacctatgacgcccagtatgagagggccatccaggagagcctcctcaccagcacagaaggcctgtgccccagcgccctgagcgagacaagccgttttgataatgacttgcagctagccatggagctctctgccaaagagctggaggaatgggagctccggctccaggaggaagaggctgagctccagcaagtcttacagctgtcactcactgacaaatagacctttcagcctgtgagcctctgcacaaagcagaggctgtgggctgtcacagatgctgtgtcaaccagggccctagggctaagggcctgcaccttgcgtgcatgcagcaggcaacaactgccccttctttatgcagaggtgcagaaccagggactcctgggcccatccaggctgctccctggggtggagaagggaccagggattgcaggccccatctccaggctaaggggaggagagcatcatcactttccattagctgtattggcttgcaggtcacatttttactaccagctttagacaaaaccccaatccccgcaggtttgtagataaatttttatcaaggagtgataacaagacaagttattgcagagtcagggtgcttttatatataagagcagcagccgcctttgtaaagtgtgatctatgagaattggagacacttctttactgttcaccaaagaaatgggtaatctgtgctgatctccttatttttacctttttacagggtttctaggacattgtcattattcttcctccatctatctgattccattccttccacacccagctaaagttagaggagatacatatagaatctattttagattattgttaactatttgcatcaaattaagatacacaaatggccatggatgttgccttagccttaaacattactaatagtttcacatcacctcactgcacgcatcgaaggatctgatttgaatttgtaaaggcaattcttttgagagcaggattctccaggctaaatcaaaggcagctaatcctgtccctgaaggagcagctaggggaacctgaggcttgttcttgaagtgggcaagctggccaaaatattggaacacacagaaccaaaccaggtgtgttctacacctgcatgagtgaaggatttccacgtagacacctaggaagagcccgcatgccctagactcactccagaggaaggattgatttgcaaccagaaagggagctgaaaaccacggagctccatggctcttcattcaaaagggaaaataatgattccacgttgctttttagagttcaaatcaacatctttctggataaatctattttttaacaatctttttattatttgtaaaagatataaaaacaactcccatcagtagcaatacaaggttatacattttaaccagattttctcaggccttttttggatacctttagtagttaactctcttttgtcaaaccctcttgtatataaccatcgcacaacatacagaaccctggggaatacagccaagggcactgctcactgtggcccgtgtattcattcccacaggctgcactgaaataacctggtaaacaacaccctcctccattttgcgtctatttcttctattgtgcttctttggggataggaagagaaacataactactgttccaggtaacgtctgtatcatacagttagtgttgccagtgaaacgttcccagatacaaagaattgtgcttttaattccatttcacaatctgttttgttttttttttttgtcattgtctgaccaaaattccttctgcacatgaggccagtataggcaacgtcacatttgtttgtttcaaatatgcagtgtggtattttgtttactttgcatttaccgtgagcaaagatacttcttggaatggctgcagtgaggccgtgtcattggctcacaaaagtgactcataggtaatttctgtgtttgcattccactgctctgctccctaaggtccttgactttctccccaggaattcacttaaaaagggactgagcattgtgtcaacctgttgcagtgtttttcatatatgtgttcactctaaaaatgcaaataaagactgcttccttagagggtgctcatacaaaaaaaaaacaananaaaaaacaaacaaaaaaacatttgctggcgacggcctgcggcgcccctaggagaatagggtttcttaaaagaccattccggtggggccgccgcgggcccccagcgataggttatagtgtggacgacattgggccaaaggcgtgtacccagaggagaagcacccggggacatagactatagggtgctggagtttcctccacccaaatataaaacaccgccgccgggggggacacacagaggtggttttctgtgtgaacacaaatactcgaggagtgaagagctcctcgagagagggacacaattaacgnggggagcctcatattacaacagggggaggttccaaaccgaggagaggcctagggtattctaataattttacggccccttcgcctggtggtgagataaaaaggaaagagaaagtagacaacaaagacataaaaatctaaatagagaagagtaaaaagaatagaaacgagaaaacaacacagcagagagatgaataataacatagacatagcaaatgaacatcaaaaatagacgagaacaagcn

SEQ ID NO: 385194 - DNA, 4091 bp, Homo sapiens
cgcagaagtctgtccgcgagctgtcagcgcgggcgggaacgccgcggggcgcggggtgggcgcggccgacctggtccctgagccggccggcgaccccggacctcccgcgcgccccgcacccgaccggctcagccggccggcagcgtaacacgccctacgctcgcttgctcgccggcctcagggcaggcaggcgggcgcgggagaccccgccggggccgagacttggggcgggcgacgaggaccaggttacggcctcctcgccatgtcctcggcctgcgacgcgggcgaccactaccccctgcacctcctagtctggaaaaacgactaccggcagctcgagaaggagctgcagggccagaatgtggaggctgtggacccacgaggtcgaacattattgcatcttgctgtttccttgggacatttggaatctgctcgagtcttactccgacataaagcagatgtgacaaaagaaaatcgccagggatggacagttttacatgaggctgtgagcactggcgatcctgagatggtgtacacagttctccaacatcgagactaccacaacacatccatggcccttgagggagttcctgagctgctccaaaaaattctcgaggctccggatttctatgtgcagatgaaatgggaattcaccagctgggtgcccttggtttctagaatatgcccaaatgatgtctgtcgcatctggaaaagtggtgccaaactgcgcgtcgatatcacattgctgggatttgaaaacatgagctggataagagggaggcgtagttttatatttaagggagaagacaactgggcggagttaatggaagtcaaccatgatgacaaagtggtcaccaccgaacgcttcgacctttcccaagaaatggagcgcctcactctggacttgatgaagccaaaaagcagggaagttgagcggcggctcacaagccctgtcattaacaccagcctcgatactaaaaatattgcttttgaaagaactaaatccggattctggggctggaggacagataaagcagaagttgttaatggttacgaagcaaaggtttacacagtaaacaatgtgaatgtgatcaccaaaatacgcacagaacatctgaccgaggaggaaaaaaagagatataaagcagacaggaacccgctggaatctttgctgggaactgtggaacaccaatttggtgcacaagggggacctcaccacggaatgtgctactgcaaacaaccccacagccatcacgcctgatgagtacttcaatgaagagtttgatctgaaagacagggacattggaaggccgaaagagctgacgattagaacacagaagtttaaagcaatgttgtggatgtgtgaagagtttcccctctctctggtggagcaggtcattcccatcattgacctaatggctcgaacgagtgctcattttgcaagactgagagatttcatcaaattggaattcccacctggatttcctgtcaaaatagaaattcccttgtttcatgtcttaaatgcacggattacatttggaaatgttaatggctgtagcactgccgaagaatctgtatctcaaaatgtggaagggacccaggctgattcagcttcccacatcacaaactttgaggttgatcaatctgtgtttgaaattcccgaatcttactatgttcaagacaatggcagaaatgtgcatttgcaagatgaagattacgagataatgcagtttgccatccagcaaagtctgctggagtccagcaggagccaggaactttcaggaccagcttcgaatggagggatcagccagacaaacacctatgacgcccagtatgagagggccatccaggagagcctcctcaccagcacagaaggcctgtgccccagcgccctgagcgagacaagccgttttgataatgacttgcagctagccatggagctctctgccaaagagctggaggaatgggagctccggctccaggaggaagaggctgagctccagcaagtcttacagctgtcactcactgacaaatagacctttcagcctgtgagcctctgcacaaagcagaggctgtgggctgtcacagatgctgtgtcaaccagggccctagggctaagggcctgcaccttgcgtgcatgcagcaggcaacaactgccccttctttatgcagaggtgcagaaccagggactcctgggcccatccaggctgctccctggggtggagaagggaccagggattgcaggccccatctccaggctaaggggaggagagcatcatcactttccattagctgtattggcttgcaggtcacatttttactaccagctttagacaaaaccccaatccccgcaggtttgtagataaatttttatcaaggagtgataacaagacaagttattgcagagtcagggtgcttttatatataagagcagcagccgcctttgtaaagtgtgatctatgagaattggagacacttctttactgttcaccaaagaaatgggtaatctgtgctgatctccttatttttacctttttacagggtttctaggacattgtcattattcttcctccatctatctgattccattccttccacacccagctaaagttagaggagatacatatagaatctattttagattattgttaactatttgcatcaaattaagatacacaaatggccatggatgttgccttagccttaaacattactaatagtttcacatcacctcactgcacgcatcgaaggatctgatttgaatttgtaaaggcaattcttttgagagcaggattctccaggctaaatcaaaggcagctaatcctgtccctgaaggagcagctaggggaacctgaggcttgttcttgaagtgggcaagctggccaaaatattggaacacacagaaccaaaccaggtgtgttctacacctgcatgagtgaaggatttccacgtagacacctaggaagagcccgcatgccctagactcactccagaggaaggattgatttgcaaccagaaagggagctgaaaaccacggagctccatggctcttcattcaaaagggaaaataatgattccacgttgctttttagagttcaaatcaacatctttctggataaatctattttttaacaatctttttattatttgtaaaagatataaaaacaactcccatcagtagcaatacaaggttatacattttaaccagattttctcaggccttttttggatacctttagtagttaactctcttttgtcaaaccctcttgtatataaccatcgcacaacatacagaaccctggggaatacagccaagggcactgctcactgtggcccgtgtattcattcccacaggctgcactgaaataacctggtaaacaacaccctcctccattttgcgtctatttcttctattgtgcttctttggggataggaagagaaacataactactgttccaggtaacgtctgtatcatacagttagtgttgccagtgaaacgttcccagatacaaagaattgtgcttttaattccatttcacaatctgttttgttttttttttttgtcattgtctgaccaaaattccttctgcacatgaggccagtataggcaacgtcacatttgtttgtttcaaatatgcagtgtggtattttgtttactttgcatttaccgtgagcaaagatacttcttggaatggctgcagtgaggccgtgtcattggctcacaaaagtgactcataggtaatttctgtgtttgcattccactgctctgctccctaaggtccttgactttctccccaggaattcacttaaaaagggactgagcattgtgtcaacctgttgcagtgtttttcatatatgtgttcactctaaaaatgcaaataaagactgcttccttagagggtgctcatacaaaaaattccagtctttgagtctttttccttttcagttttttctagtcactggatgtacccacacttcctgttacgtatgtcagtagaacattagaatgcctcacttcgctcagttcatcactgcaaaggtggcatgctcctcccagccttcctgcccaggttaacaagccccatgctgct

SEQ ID NO: 385195 - DNA, 1875 bp, Homo sapiens
cgcagaagtctgtccgcgagctgtcagcgcgggcgggaacgccgcggggcgcggggtgggcgcggccgacctggtccctgagccggccggcgaccccggacctcccgcgcgccccgcacccgaccggctcagccggccggcagcgtaacacgccctacgctcgcttgctcgccggcctcagggcaggcaggcgggcgcgggagaccccgccggggccgagacttggggcgggcgacgaggaccaggttacggcctcctcgccatgtcctcggcctgcgacgcgggcgaccactaccccctgcacctcctagtctggaaaaacgactaccggcagctcgagaaggagctgcagggccagaatgtggaggctgtggacccacgaggtcgaacattattgcatcttgctgtttccttgggacatttggaatctgctcgagtcttactccgacataaagcagatgtgacaaaagaaaatcgccagggatggacagttttacatgaggctgtgagcactggcgatcctgagatggtgtacacagttctccaacatcgagactaccacaacacatccatggcccttgagggagttcctgagctgctccaaaaaattctcgaggctccggatttctatgtgcagatgaaatgggaattcaccagctgggtgcccttggtttctagaatatgcccaaatgatgtctgtcgcatctggaaaagtggtgccaaactgcgcgtcgatatcacattgctgggatttgaaaacatgagctggataagagggaggcgtagttttatatttaagggagaagacaactgggcggagttaatggaagtcaaccatgatgacaaagtggtcaccaccgaacgcttcgacctttcccaagaaatggagcgcctcactctggacttgatgaagccaaaaagcagggaagttgagcggcggctcacaagccctgtcattaacaccagcctcgatactaaaaatattgcttttgaaagaactaaatccggattctggggctggaggacagataaagcagaagttgttaatggttacgaagcaaaggtttacacagtaaacaatgtgaatgtgatcaccaaaatacgcacagaacatctgaccgaggaggaaaaaaagagatataaagcagacaggaacccgctggaatctttgctgggaactgtggaacaccaatttggtgcacaagggggacctcaccacggaatgtgctactgcaaacaaccccacagccatcacgcctgatgagtacttcaatgaagagtttgatctgaaagacagggacattggaaggccgaaagagctgacgattagaacacagaagtttaaagcaatgttgtggatgtgtgaagagtttcccctctctctggtggagcaggtcattcccatcattgacctaatggctcgaacgagtgctcattttgcaagactgagagatttcatcaaattggaattcccacctggatttcctgtcaaaatagaaattcccttgtttcatgtcttaaatgcacggattacatttggaaatgttaatggctgtagcactgccgaagaatctgtatctcaaaatgtggaagggacccaggctgattcagcaacaaagttgggtgagatgtgttcatgaggttgtgcagctaaggaacactcgtgcactcttggctggaagaggagattggtatagttccttgaataaaacattcggcattactgtataaactgaagatgtggatgacctagcaattcctagatgtgtaccctaaagaaagttatgcacatgagcatctggagaccccagtactgggcagcagcatccattcataacagcagaaacctggaaacgacccaaatgtcccgagatg

SEQ ID NO: 385196 - DNA, 1364 bp, Homo sapiens
cgcagaagtctgtccgcgagctgtcagcgcgggcgggaacgccgcggggcgcggggtgggcgcggccgacctggtccctgagccggccggcgaccccggacctcccgcgcgccccgcacccgaccggctcagccggccggcagcgtaacacgccctacgctcgcttgctcgccggcctcagggcaggcaggcgggcgcgggagaccccgccggggccgagacttggggcgggcgacgaggaccaggttacggcctcctcgccatgtcctcggcctgcgacgcgggcgaccactaccccctgcacctcctagtctggaaaaacgactaccggcagctcgagaaggagctgcagggccagaatgtggaggctgtggacccacgaggtcgaacattattgcatcttgctgtttccttgggacatttggaatctgctcgagtcttactccgacataaagcagatgtgacaaaagaaaatcgccagggatggacagttttacatgaggctgtgagcactggcgatcctgagatggtgtacacagttctccaacatcgagactaccacaacacatccatggcccttgagggagttcctgagctgctccaaaaaattctcgaggctccggatttctatgtgcagatgaaatgggaattcaccagctgggtgcccttggtttctagaatatgcccaaatgatgtctgtcgcatctggaaaagtggtgccaaactgcgcgtcgatatcacattgctgggatttgaaaacatgagctggataagagggaggcgtagttttatatttaagggagaagacaactgggcggagttaatggaagtcaaccatgatgacaaagtggtcaccaccgaacgcttcgacctttcccaagaaatggagcgcctcactctggacttgatgaagccaaaaagcagggaagttgagcggcggctcacaagccctgtcattaacaccagcctcgatactaaaaatattgcttttgaaagaactaaatccggattctggggctggaggacagataaagcagaagttgttaatggttacgaagcaaaggtaaaaggaaactcttaaaataagatttaatatagctatttagcttctatgcaaatgaggaatctgttcccatttttttcatgcatctgtgccatggagatgctctggggaatgagaactgtctaatgtgtctctcacttggatgtttgattttgtcttatttgactttcagaaaatgggatagcatgccctgaggaggtctgtagctatgctaaagagaaacaatatggtagagaaatgagtacaggtaccagttgttctggtaggaatgacaagctagtcattcccttaattatttaaa

SEQ ID NO: 385197 - DNA, 1341 bp, Homo sapiens
cgcagaagtctgtccgcgagctgtcagcgcgggcgggaacgccgcggggcgcggggtgggcgcggccgacctggtccctgagccggccggcgaccccggacctcccgcgcgccccgcacccgaccggctcagccggccggcagcgtaacacgccctacgctcgcttgctcgccggcctcagggcaggcaggcgggcgcgggagaccccgccggggccgagacttggggcgggcgacgaggaccaggttacggcctcctcgccatgtcctcggcctgcgacgcgggcgaccactaccccctgcacctcctagtctggaaaaacgactaccggcagctcgagaaggagctgcagggccagaatgtggaggctgtggacccacgaggtcgaacattattgcatcttgctgtttccttgggacatttggaatctgctcgagtcttactccgacataaagcagatgtgacaaaagaaaatcgccagggatggacagttttacatgaggctgtgagcactggcgatcctgagatggtgtacacagttctccaacatcgagactaccacaacacatccatggcccttgagggagttcctgagctgctccaaaaaattctcgaggctccggatttctatgtgcagatgaaatgggaattcaccagctgggtgcccttggtttctagaatatgcccaaatgatgtctgtcgcatctggaaaagtggtgccaaactgcgcgtcgatatcacattgctgggatttgaaaacatgagctggataagagggaggcgtagttttatatttaagggagaaggtgagtgacttctcttgtagtaatcactgctcaagcaaaattacagggtgatttttaaccaagaaaatgctttcacattcatgtgacttttctgtctgatccttcctagggcatgtttttttggttattcttattaattattcagctctccatccctgtcttcgttcttgtctggctagctctccttcatgtgtcctttaccacccagcagttacccttgtgatgtgtctgcttcactttcctgagcctttgagcacaggccttctgtgtgtatctctgtataaccctccataatcaggcatgagaaatggcattgctcacccaatgttgtgcatacataatttctgtgaattctgtaataatatattttataaaggacattgatggaatatattgctaataagaatgcagattattaagaaaaattccgcacctttggggaagatggctcagagcttcctatgtgttgtggaaagctggtcagataatccctgtgcaaataggtagtcgataatcagtacactgtaggttttac

SEQ ID NO: 385198 - DNA, 375 bp, Homo sapiens
  misc_feature (370)..(370): n is a, c, g, or t
ggattgagtcctagaacagagtacagagaaactatgaagactgataccagccaagttacacaaaaccctaagaaaacacaaattgggagcccaaatccagtccctgctggcaaaactcattcagcaaatcctttctgttgtaaattaacctgtcatctgttttcccttccttgtgattcagatgaactattcttcctttctttgtttctaggtctcatgattcttaaacatgtatagttctttttttcttcttaaagctagtcaagtgaagcagtgtgagtggaaaaggaacaaagaaattcataattggtacagtggtacaaacaccactgtactcagatcaagcctgggcaacaagagcgaaactccnatcac

SEQ ID NO: 385199 - DNA, 441 bp, Homo sapiens
cagccgccagcagacagccgactccctcaccagtaaacaccgcggcttaggtgttgcccaccggacacggaaaggcggcccccttctcgctctccagtgaatgttcctaaaacaactgcggggtccaagagcacagggagaacagcgcccctgacgcaggctgcgcacccgcccggaggaggcagtgcgtcagtcctgaggtcaccgccacccgctcccgggggacggccgcctgggcaggtgaggaggcgaccacctcccagacgcctgccggagctgcggcgcaccgactccctgcttctccgagcggcgaacgccacctggaggctccctcgagatctgcatttaggaggcgacgggtcctttcatcgttttattcattaaacatttatcgaggcctggagcgatggttcaagcctgtaatcccagcactttgggaga

SEQ ID NO: 385200 - DNA, 356 bp, Homo sapiens
cacatgttctccctctttcaattttagcagtaatgtgatcctcaaaaatgcattaatactagttgaagtaaataaacggaagagctccaaaatgcctgcattaaatgcatttttccacactaatgccaatcatccaaagctattttcaacaagtcaggtattcaaagctattcacaccacttgaaagagtaattaccatttactgaagcacttatctgtcctacactgatgggagtaaatgcttctcataggttatctcatgtacattatgccacttcacttaaaatgatcacaaattaagtgctatagattttggttaatgctttccccaggggagttgttaaaacatgcatttc

SEQ ID NO: 385201 - DNA, 6612 bp, Homo sapiens
  misc_feature (5031)..(5031): n is a, c, g, or t
aggatgtcggcaacctaaattcatgtaccctatctgtacagttgttgtggatggtttgccatctgaaagctcctcaagttcttatccaggccctgtgtctgtttctgaaatgtctctgcttcatgctttgggtccagtgcagacctggctgggacaagagctcgagaaatgtggcattgatgccatgatttacactcggtatgtcctcagtcttctgctgcatgacagctatgactacgacctgcaggaacaggagaatgacatcttcctgggctgggaaaaaggagcttataagaaatggggaaagagtaagaaaaaatgttcagatctaactctagaagaaatgaaaaaacagaatgctgtccagtgtcttcgatctgcttctgatgaaagctctggtatcgagactttagtggaggagctctgctccagactgaaagaccttcagagtaagcaagaagagaagattcacaaaaagttagaggggtctccctctccagaggcagaattatcccctccagcaaaggatcaagtggaaatgtactatgaagcatttccaccactttctgagaaaccagtttgcctgcaagaaatcatgactgtgtggaacaagtctaaagtctgttcttactctagctcttcttcatcatccacagccccaccagctagcacagatacttcctctcctaaggactgcaacagtgaaagtgaagtcaccaaggaaagaagcagtgaagtacccaccactgtgcatgagaaaacccagagcaaaagcaaaaacgagaaggaaaacaaatttagtaatggcacaattgaagaaaagcctgctttgtacaaaaagcaaatccgacataaacctgaaggaaagattcgccctcgctcgtggtcttctggctccagtgaagcaggctcaagttccagtgggaatcagggagaattaaaagcatccatgaagtatgttaaagtaagacacaaggcacgagagattcgaaacaaaaaagggcggaatgggcaaagcaggctttctttgaagcacggtgaaaaggctgaaaggaacattcatactggaagtagtagcagtagcagcagtggttctgtcaaacagctgtgcaagcggggtaagagacctttaaaagaaatagggagaaaagatcctgggagcactgaaggaaaagacctgtacatggagaatagaaaggacacagagtataaagaggagcccttgtggtacaccgagccaattgctgaatattttgttcctctgagcagaaaaagtaaactagagaccacataccgaaacagacaggatacaagtgatctgacatcagaggcagtggaagaattgtctgaatcagtgcatggtctttgtatcagcaacaataatcttcataaaacatacctcgcagcaggtactttcattgatggtcattttgtagaaatgcctgcagttataaatgaggatattgacctcactgggacctcattatgttctctaccagaggacaataaatacctggatgatattcatctatcagaattaacgcacttctatgaagtggatattgatcaatccatgttggatcctggtgcctcagaaacaatgcaaggagaaagtcggattttgaatatgattcgacagaaaagcaaagagaacacagattttgaggcagaatgttgcatagtgttagatggtatggagttgcaaggggaacgtgcaatatggacagattctaccagctccgtaggtgctgagggcttattcctgcaggaccttggcaatctggctcagttttgggagtgctgttcatccagctccggtgatgctgatggggagagttttggaggagactctccagttagactctctcccatcttagacagcacagtgctcaattcacacctgcttgctggcaatcaagagctcttttcagatattaatgaaggatctggtataaactcttgtttttcagtgtttgaagtgcaatgcagtaattctgttttaccattttcttttgaaacactcaacttgggaaatgaaaatacagattctagtgctaatatgcttgggaaaacacagtctagattgctaatatggaccaaaaatagtgcctttgaagaaaatgaacactgttctaatctttcaacaagaacttgtagtccatggtcccattcagaagaaacacgttcagacaatgaaacattaaatattcagtttgaagaatccacacagtttaatgccgaagatattaattatgtagttcctagagtctcgtcaaattatgtagatgaagaacttctagattttttgcaagatgaaacttgccagcaaaacagtagaactttaggtgagattcctacattagttttcaaaaaaacatctaaactagaatccgtctgtggtattcagctagaacaaaaaacagaaaacaaaaattttgaaactacacaagtatgtaatgaaagtccacatggagatggctacagctcaggggttattaaagacatttggacaaagatggcagacacaaattctgtggctacagtagaaatagaaagaactgatgctgagttgttttcggcagatgtaaataactactgctgctgtctagatgctgaagctgaactggagacccttcaggagcctgataaggctgtgcggaggtcagagtaccatctgtgggagggacagaaagagagcctggagaaaagagcatttgcttctagtgagctatcaaacgtggatggtggtgattatacaacaccctctaaaccctgggatgtagcccaagataaagaaaacacattcattcttggaggagtttatggagaactcaaaaccttcaatagtgatggggagtgggcagtcgtaccacctagtcacacaaaaggaagtctgttacagtgtgcagcttctgatgttgtgacgatagctggtacagatgtctttatgaccccaggaaacagttttgctcctgggcacaggcagttatggaaacccttcgtgtcatttgaacagaatgatcagccgaagagtggggaaaatgggttaaataagggattttcttttatcttccatgaagacttactaggagcttgtggcaactttcaagtcgaagatcctggacttgaatactcattttcttcctttgacttaagcaatccattttcacaagttcttcatgtagaatgctcatttgaacctgaagggattgcatctttcagccccagttttaaaccgaaatcaatcctctgttctgattcagacagtgaagtgtttcaccccaggatatgtggtgttgacagaacacaatacagggctattcggatctctcctcggactcactttcgcccaatttctgcatccgaactgtccccaggaggaggaagcgagtcagaatttgaatctgagaaagatgaagcaaatattcccattccttctcaagttgatatatttgaagatccgcaggcagatctcaaacctttggaagaagatgcagagaaagaaggccattactatggaaaatcagagcttgagtctggaaaattccttcccaggttaaaaaaatctgggatggaaaagagtgctcagacatcactggattcccaggaggaatcaactgggattctttcagtaggaaagcaaaatcagtgtttggaatgtagcatgaatgaatccctggaaatagatttagaaagctcagaagcaaattgtaaaataatggcacaatgcgaggaagaaattaataatttttgtggttgcaaagcaggttgtcagtttcctgcttatgaagataatccagtttcttcgggacagctggaagagttccctgtattgaacactgatatacaaggaatgaatagaagtcaagaaaaacagacctggtgggaaaaagccttgtactctcctctttttcctgcatcagagtgtgaagaatgttacacaaatgccaagggagagagtggtttagaagaatatccagatgctaaagagacacccagtaatgaagagcgcctgttagattttaatagggtgtcttctgtttatgaagcaagatgtacaggagagagagattctggagcaaagtcagatggcttccgcggaaagatgtgctccagcgccagctccacctcggaagagacaggctcagaaggcggaggcgagtgggtgggccctagtgaagaggagctcttttctcgaactcatctctaaacctgcaaaatagtacaaattattgtttaaaaatgatatgtgatggaaaattactcttcagtgagacctgttaatctaaaacaacaacttaggtttcctcttcaattaactgattcagattggtaataattatctttctcttcttgcttattttagagttgaggacagctatcctgttaaagattttttttcccagctgttaaattcttggctatttgaaatagactagattgtgttgtcaaatcaagaatgggtgtgcatgtgcttgtcttagaagtatcactgctttttgcatcttaactgcagttaattttccttccgactgcggttatatcactatgaccttactagcattgcagtgtcaacaaccacttctgctcttcagagacttcagctttggagcatttaggctttgttctccaagaactgggatatccattcttaccctacagtggcttgatgcctttctgaaggcgagagggaagcctgggtgactcagcggtggtctccattcagcaaaatctcatgtacatttccagtaggaaccgcagaggtgtgcttttcaagactcaccaaatactgtgttttctctcttaggatttcttttcccctaaagtatcacggaagatactatggttcgtgactttcttgctaactgaagaagccaaggatttggggtgtggggtcgtatgcgagacacagtggggtaagggtgcataccccaccccttacctgctctcatactgcagttacatttacaccaaaaccccatgcagggttctttgtggtgagtgttccatacgtgctaaggaccttagttncagattgttactttctggtgacctatgttgaattgaaacccccaaaacttgaaattgtgaacatttgacatgcagtaaaggccacctcatcacccagagaaatctttggctgctgcagctagccgcttcttggctgtgatgtagtatagcttcgatctcattttgtgtttgagagaatgttctgggcaagttctgtgtgtggtgggttggggcgggtagagtcatgagttttccacatccctgtgtggtggttttgctgactgtcgctccgtgggactggctcccgtttctccttggtgagcccggggagccggcgcatcttgtgagtcgcgtctgtgcatggcgatccgctcctccggctctcatggcattgtgccacaggcagaggccaggaggagcagtatgtgcacagccgaaacattttacattttttacattgtttttcttttttaaccaactcattgtttaaaaaacaaaaacaaaaaaaacctaatctgtgaaatcagcgtagcatgcctggagcatcaggaatggcagaaaagtctgatgcgctctagacagcttcaccactcatttgggcaggcagtaaacacacatataatttattagctgggagctgaactggctgtgaaatctatgatttgctttgaacatttgggttttgttgcctttttcttaattgataacacagaaaagaaagtaccatcaaagactgtggagtcattgagggtctgtgtgtcctcaccgagagggacctggtgtgcccgccgggtcgatcttcccacgtgttagggtttatttttatacaacacatcttttgacactttaaggtgggtgggtgtgtgtgtgtgtgtgtgtgtgcgcgcgtgcgcgcgcgcatgtgtaaggttttatgttgctgttatttatttacgaacttcagatacgtttttatgtatttttcattcttctggagcttcctaaaaattgataagcatctgcactgaaatataatttaacagcaaaagtaaaaaaggattgaaagttgtaaattcctcatatcactacagtgacgattattctagaaatcgttgcttgtgtagcaaagaccaaataaatagatttcagacacaaccttgagcacagttgattttggacagctgctgtttattaggaaagggctccaggtggcaaaggtgcacacttcctcagacacaggtgagaagatgcagcaccttccacaggtgaatgggacggattcgaagtgagcaaagggattcacaaattatgtatttatttgttttcatagttaagtagctgaagctcagaggctttcagcaacagagatgaaagtgtggctttttagttttgtgaatggatgatcacaaagaaaaagcatttttaaaaagttggcaaacgctgaaacgcactgtggtatgaagcgcattgcatttccatagcactgaagtaccagtttccattcctgggctgagattgtttttcccgtggttgtattgttctgatttcacgtacaccagagtaactgatttttttttgtttgttttcttgtggagttaacaccaaataaaaattgtaaaaaac

SEQ ID NO: 385202 - DNA, 4467 bp, Homo sapiens
  misc_feature (2886)..(2886): n is a, c, g, or t
gctcggtaccctgatggcatttagaccagaagaaacacgttcagacaatgaaacattaaatattcagtttgaagaatccacacagtttaatgccgaagatattaattatgtagttcctagagtctcgtcaaattatgtagatgaagaacttctagattttttgcaagatgaaacttgccagcaaaacagtagaactttaggtgagattcctacattagttttcaaaaaaacatctaaactagaatccgtctgtggtattcagctagaacaaaaaacagaaaacaaaaattttgaaactacacaagtatgtaatgaaagtccacatggagatggctacagctcaggggttattaaagacatttggacaaagatggcagacacaaattctgtggctacagtagaaatagaaagaactgatgctgagttgttttcggcagatgtaaataactactgctgctgtctagatgctgaagctgaactggagacccttcaggagcctgataaggctgtgcggaggtcagagtaccatctgtgggagggacagaaagagagcctggagaaaagagcatttgcttctagtgagctatcaaacgtggatggtggtgattatacaacaccctctaaaccctgggatgtagcccaagataaagaaaacacattcattcttggaggagtttatggagaactcaaaaccttcaatagtgatggggagtgggcagtcgtaccacctagtcacacaaaaggaagtctgttacagtgtgcagcttctgatgttgtgacgatagctggtacagatgtctttatgaccccaggaaacagttttgctcctgggcacaggcagttatggaaacccttcgtgtcatttgaacagaatgatcagccgaagagtggggaaaatgggttaaataagggattttcttttatcttccatgaagacttactaggagcttgtggcaactttcaagtcgaagatcctggacttgaatactcattttcttcctttgacttaagcaatccattttcacaagttcttcatgtagaatgctcatttgaacctgaagggattgcatctttcagccccagttttaaaccgaaatcaatcctctgttctgattcagacagtgaagtgtttcaccccaggatatgtggtgttgacagaacacaatacagggctattcggatctctcctcggactcactttcgcccaatttctgcatccgaactgtccccaggaggaggaagcgagtcagaatttgaatctgagaaagatgaagcaaatattcccattccttctcaagttgatatatttgaagatccgcaggcagatctcaaacctttggaagaagatgcagagaaagaaggccattactatggaaaatcagagcttgagtctggaaaattccttcccaggttaaaaaaatctgggatggaaaagagtgctcagacatcactggattcccaggaggaatcaactgggattctttcagtaggaaagcaaaatcagtgtttggaatgtagcatgaatgaatccctggaaatagatttagaaagctcagaagcaaattgtaaaataatggcacaatgcgaggaagaaattaataatttttgtggttgcaaagcaggttgtcagtttcctgcttatgaagataatccagtttcttcgggacagctggaagagttccctgtattgaacactgatatacaaggaatgaatagaagtcaagaaaaacagacctggtgggaaaaagccttgtactctcctctttttcctgcatcagagtgtgaagaatgttacacaaatgccaagggagagagtggtttagaagaatatccagatgctaaagagacacccagtaatgaagagcgcctgttagattttaatagggtgtcttctgtttatgaagcaagatgtacaggagagagagattctggagcaaagtcagatggcttccgcggaaagatgtgctccagcgccagctccacctcggaagagacaggctcagaaggcggaggcgagtgggtgggccctagtgaagaggagctcttttctcgaactcatctctaaacctgcaaaatagtacaaattattgtttaaaaatgatatgtgatggaaaattactcttcagtgagacctgttaatctaaaacaacaacttaggtttcctcttcaattaactgattcagattggtaataattatctttctcttcttgcttattttagagttgaggacagctatcctgttaaagattttttttcccagctgttaaattcttggctatttgaaatagactagattgtgttgtcaaatcaagaatgggtgtgcatgtgcttgtcttagaagtatcactgctttttgcatcttaactgcagttaattttccttccgactgcggttatatcactatgaccttactagcattgcagtgtcaacaaccacttctgctcttcagagacttcagctttggagcatttaggctttgttctccaagaactgggatatccattcttaccctacagtggcttgatgcctttctgaaggcgagagggaagcctgggtgactcagcggtggtctccattcagcaaaatctcatgtacatttccagtaggaaccgcagaggtgtgcttttcaagactcaccaaatactgtgttttctctcttaggatttcttttcccctaaagtatcacggaagatactatggttcgtgactttcttgctaactgaagaagccaaggatttggggtgtggggtcgtatgcgagacacagtggggtaagggtgcataccccaccccttacctgctctcatactgcagttacatttacaccaaaaccccatgcagggttctttgtggtgagtgttccatacgtgctaaggaccttagttncagattgttactttctggtgacctatgttgaattgaaacccccaaaacttgaaattgtgaacatttgacatgcagtaaaggccacctcatcacccagagaaatctttggctgctgcagctagccgcttcttggctgtgatgtagtatagcttcgatctcattttgtgtttgagagaatgttctgggcaagttctgtgtgtggtgggttggggcgggtagagtcatgagttttccacatccctgtgtggtggttttgctgactgtcgctccgtgggactggctcccgtttctccttggtgagcccggggagccggcgcatcttgtgagtcgcgtctgtgcatggcgatccgctcctccggctctcatggcattgtgccacaggcagaggccaggaggagcagtatgtgcacagccgaaacattttacattttttacattgtttttcttttttaaccaactcattgtttaaaaaacaaaaacaaaaaaaacctaatctgtgaaatcagcgtagcatgcctggagcatcaggaatggcagaaaagtctgatgcgctctagacagcttcaccactcatttgggcaggcagtaaacacacatataatttattagctgggagctgaactggctgtgaaatctatgatttgctttgaacatttgggttttgttgcctttttcttaattgataacacagaaaagaaagtaccatcaaagactgtggagtcattgagggtctgtgtgtcctcaccgagagggacctggtgtgcccgccgggtcgatcttcccacgtgttagggtttatttttatacaacacatcttttgacactttaaggtgggtgggtgtgtgtgtgtgtgtgtgtgtgcgcgcgtgcgcgcgcgcatgtgtaaggttttatgttgctgttatttatttacgaacttcagatacgtttttatgtatttttcattcttctggagcttcctaaaaattgataagcatctgcactgaaatataatttaacagcaaaagtaaaaaaggattgaaagttgtaaattcctcatatcactacagtgacgattattctagaaatcgttgcttgtgtagcaaagaccaaataaatagatttcagacacaaccttgagcacagttgattttggacagctgctgtttattaggaaagggctccaggtggcaaaggtgcacacttcctcagacacaggtgagaagatgcagcaccttccacaggtgaatgggacggattcgaagtgagcaaagggattcacaaattatgtatttatttgttttcatagttaagtagctgaagctcagaggctttcagcaacagagatgaaagtgtggctttttagttttgtgaatggatgatcacaaagaaaaagcatttttaaaaagttggcaaacgctgaaacgcactgtggtatgaagcgcattgcatttccatagcactgaagtaccagtttccattcctgggctgagattgtttttcccgtggttgtattgttctgatttcacgtacaccagagtaactgatttttttttgtttgttttcttgtggagttaacaccaaataaaaattgtaaaaaac

SEQ ID NO: 385203 - DNA, 2016 bp, Homo sapiens
aggatgtcggcaacctaaattcatgtaccctatctgtacagttgttgtggatggtttgccatctgaaagctcctcaagttcttatccaggccctgtgtctgtttctgaaatgtctctgcttcatgctttgggtccagtgcagacctggctgggacaagagctcgagaaatgtggcattgatgccatgatttacactcggtatgtcctcagtcttctgctgcatgacagctatgactacgacctgcaggaacaggagaatgacatcttcctgggctgggaaaaaggagcttataagaaatggggaaagagtaagaaaaaatgttcagatctaactctagaagaaatgaaaaaacagaatgctgtccagtgtcttcgatctgcttctgatgaaagctctggtatcgagactttagtggaggagctctgctccagactgaaagaccttcagagtaagcaagaagagaagattcacaaaaagttagaggggtctccctctccagaggcagaattatcccctccagcaaaggatcaagtggaaatgtactatgaagcatttccaccactttctgagaaaccagtttgcctgcaagaaatcatgactgtgtggaacaagtctaaagtctgttcttactctagctcttcttcatcatccacagccccaccagctagcacagatacttcctctcctaaggactgcaacagtgaaagtgaagtcaccaaggaaagaagcagtgaagtacccaccactgtgcatgagaaaacccagagcaaaagcaaaaacgagaaggaaaacaaatttagtaatggcacaattgaagaaaagcctgctttgtacaaaaagcaaatccgacataaacctgaaggaaagattcgccctcgctcgtggtcttctggctccagtgaagcaggctcaagttccagtgggaatcagggagaattaaaagcatccatgaagtatgttaaagtaagacacaaggcacgagagattcgaaacaaaaaagggcggaatgggcaaagcaggctttctttgaagcacggtgaaaaggctgaaaggaacattcatactggaagtagtagcagtagcagcagtggttctgtcaaacagctgtgcaagcggggtaagagacctttaaaagaaatagggagaaaagatcctgggagcactgaaggaaaagacctgtacatggagaatagaaaggacacagagtataaagaggagcccttgtggtacaccgagccaattgctgaatattttgttcctctgagcagaaaaagtaaactagagaccacataccgaaacagacaggatacaagtgatctgacatcagaggcagtggaagaattgtctgaatcagtgcatggtctttgtatcagcaacaataatcttcataaaacatacctcgcagcaggtactttcattgatggtcattttgtagaaatgcctgcagttataaatgaggatattgacctcactgggacctcattatgttctctaccagaggacaataaatacctggatgatattcatctatcagaattaacgcacttctatgaagtggatattgatcaatccatgttggatcctggtgcctcagaaacaatgcaaggagaaagtcggattttgaatatgattcgacagaaaagcaaagagaacacagattttgaggcagaatgttgcatagtgttaggtctacctggccaggtagacctaacacaaggcgcttcctcttctcccagctcctaatttctcatttctggcaatccacttatagctccagagaacagttttggaaatagaacttaactcggaaaatgggaacagattaaaaagaagagatcagaaggagggagttggggggaaggggaggagtggaggcaagtgtgaaactcccctatgctacaggaagggtccacaacaattcggaagtcgctcccggctcctgccacatcgtgtgccttgccgtttccactgaaattgcagactgtagtggataatcctccagttaggtctacctg

SEQ ID NO: 385204 - DNA, 171 bp, Homo sapiens
ctcccttcgtcgcagaaatagacaagccgatcctaaaactcgtatggaaatgcaaggggcctttttgtgactgagtgtgtgtggtaggtggaacatagtagtgtccaagttagccctggtcatttaacctggtgcaatttcattgcaggagaatgacatcttcctgggctg

SEQ ID NO: 385205 - DNA, 322 bp, Homo sapiens
tctgcatgtttgtaactccacaggaaaacactgatgatttattatttcttctttgtatatagatagagtatctcacccttttggggaaaaaaaagtctttttgatgtgttgaaaattgttttaatcttaggtgtcttctgtttatgaagcaagatgtacaggagagagagattctggagcaaagtcagatggcttccgcggaaagatgtgctccagcgccagctccacctcggaagagacaggctcagaaggcggaggcgagtgggtgggccctagtgaagaggagctcttttctcgaactcatctctaaacctgcaaaata

SEQ ID NO: 385206 - DNA, 6178 bp, Homo sapiens
  misc_feature (4597)..(4597): n is a, c, g, or t
ggatcccgcgtacgagtaagcaagaagagaagattcacaaaaagttagaggggtctccctctccagaggcagaattatcccctccagcaaaggatcaagtggaaatgtactatgaagcatttccaccactttctgagaaaccagtttgcctgcaagaaatcatgactgtgtggaacaagtctaaagtctgttcttactctagctcttcttcatcatccacagccccaccagctagcacagatacttcctctcctaaggactgcaacagtgaaagtgaagtcaccaaggaaagaagcagtgaagtacccaccactgtgcatgagaaaacccagagcaaaagcaaaaacgagaaggaaaacaaatttagtaatggcacaattgaagaaaagcctgctttgtacaaaaagcaaatccgacataaacctgaaggaaagattcgccctcgctcgtggtcttctggctccagtgaagcaggctcaagttccagtgggaatcagggagaattaaaagcatccatgaagtatgttaaagtaagacacaaggcacgagagattcgaaacaaaaaagggcggaatgggcaaagcaggctttctttgaagcacggtgaaaaggctgaaaggaacattcatactggaagtagtagcagtagcagcagtggttctgtcaaacagctgtgcaagcggggtaagagacctttaaaagaaatagggagaaaagatcctgggagcactgaaggaaaagacctgtacatggagaatagaaaggacacagagtataaagaggagcccttgtggtacaccgagccaattgctgaatattttgttcctctgagcagaaaaagtaaactagagaccacataccgaaacagacaggatacaagtgatctgacatcagaggcagtggaagaattgtctgaatcagtgcatggtctttgtatcagcaacaataatcttcataaaacatacctcgcagcaggtactttcattgatggtcattttgtagaaatgcctgcagttataaatgaggatattgacctcactgggacctcattatgttctctaccagaggacaataaatacctggatgatattcatctatcagaattaacgcacttctatgaagtggatattgatcaatccatgttggatcctggtgcctcagaaacaatgcaaggagaaagtcggattttgaatatgattcgacagaaaagcaaagagaacacagattttgaggcagaatgttgcatagtgttagatggtatggagttgcaaggggaacgtgcaatatggacagattctaccagctccgtaggtgctgagggcttattcctgcaggaccttggcaatctggctcagttttgggagtgctgttcatccagctccggtgatgctgatggggagagttttggaggagactctccagttagactctctcccatcttagacagcacagtgctcaattcacacctgcttgctggcaatcaagagctcttttcagatattaatgaaggatctggtataaactcttgtttttcagtgtttgaagtgcaatgcagtaattctgttttaccattttcttttgaaacactcaacttgggaaatgaaaatacagattctagtgctaatatgcttgggaaaacacagtctagattgctaatatggaccaaaaatagtgcctttgaagaaaatgaacactgttctaatctttcaacaagaacttgtagtccatggtcccattcagaagaaacacgttcagacaatgaaacattaaatattcagtttgaagaatccacacagtttaatgccgaagatattaattatgtagttcctagagtctcgtcaaattatgtagatgaagaacttctagattttttgcaagatgaaacttgccagcaaaacagtagaactttaggtgagattcctacattagttttcaaaaaaacatctaaactagaatccgtctgtggtattcagctagaacaaaaaacagaaaacaaaaattttgaaactacacaagtatgtaatgaaagtccacatggagatggctacagctcaggggttattaaagacatttggacaaagatggcagacacaaattctgtggctacagtagaaatagaaagaactgatgctgagttgttttcggcagatgtaaataactactgctgctgtctagatgctgaagctgaactggagacccttcaggagcctgataaggctgtgcggaggtcagagtaccatctgtgggagggacagaaagagagcctggagaaaagagcatttgcttctagtgagctatcaaacgtggatggtggtgattatacaacaccctctaaaccctgggatgtagcccaagataaagaaaacacattcattcttggaggagtttatggagaactcaaaaccttcaatagtgatggggagtgggcagtcgtaccacctagtcacacaaaaggaagtctgttacagtgtgcagcttctgatgttgtgacgatagctggtacagatgtctttatgaccccaggaaacagttttgctcctgggcacaggcagttatggaaacccttcgtgtcatttgaacagaatgatcagccgaagagtggggaaaatgggttaaataagggattttcttttatcttccatgaagacttactaggagcttgtggcaactttcaagtcgaagatcctggacttgaatactcattttcttcctttgacttaagcaatccattttcacaagttcttcatgtagaatgctcatttgaacctgaagggattgcatctttcagccccagttttaaaccgaaatcaatcctctgttctgattcagacagtgaagtgtttcaccccaggatatgtggtgttgacagaacacaatacagggctattcggatctctcctcggactcactttcgcccaatttctgcatccgaactgtccccaggaggaggaagcgagtcagaatttgaatctgagaaagatgaagcaaatattcccattccttctcaagttgatatatttgaagatccgcaggcagatctcaaacctttggaagaagatgcagagaaagaaggccattactatggaaaatcagagcttgagtctggaaaattccttcccaggttaaaaaaatctgggatggaaaagagtgctcagacatcactggattcccaggaggaatcaactgggattctttcagtaggaaagcaaaatcagtgtttggaatgtagcatgaatgaatccctggaaatagatttagaaagctcagaagcaaattgtaaaataatggcacaatgcgaggaagaaattaataatttttgtggttgcaaagcaggttgtcagtttcctgcttatgaagataatccagtttcttcgggacagctggaagagttccctgtattgaacactgatatacaaggaatgaatagaagtcaagaaaaacagacctggtgggaaaaagccttgtactctcctctttttcctgcatcagagtgtgaagaatgttacacaaatgccaagggagagagtggtttagaagaatatccagatgctaaagagacacccagtaatgaagagcgcctgttagattttaatagggtgtcttctgtttatgaagcaagatgtacaggagagagagattctggagcaaagtcagatggcttccgcggaaagatgtgctccagcgccagctccacctcggaagagacaggctcagaaggcggaggcgagtgggtgggccctagtgaagaggagctcttttctcgaactcatctctaaacctgcaaaatagtacaaattattgtttaaaaatgatatgtgatggaaaattactcttcagtgagacctgttaatctaaaacaacaacttaggtttcctcttcaattaactgattcagattggtaataattatctttctcttcttgcttattttagagttgaggacagctatcctgttaaagattttttttcccagctgttaaattcttggctatttgaaatagactagattgtgttgtcaaatcaagaatgggtgtgcatgtgcttgtcttagaagtatcactgctttttgcatcttaactgcagttaattttccttccgactgcggttatatcactatgaccttactagcattgcagtgtcaacaaccacttctgctcttcagagacttcagctttggagcatttaggctttgttctccaagaactgggatatccattcttaccctacagtggcttgatgcctttctgaaggcgagagggaagcctgggtgactcagcggtggtctccattcagcaaaatctcatgtacatttccagtaggaaccgcagaggtgtgcttttcaagactcaccaaatactgtgttttctctcttaggatttcttttcccctaaagtatcacggaagatactatggttcgtgactttcttgctaactgaagaagccaaggatttggggtgtggggtcgtatgcgagacacagtggggtaagggtgcataccccaccccttacctgctctcatactgcagttacatttacaccaaaaccccatgcagggttctttgtggtgagtgttccatacgtgctaaggaccttagttncagattgttactttctggtgacctatgttgaattgaaacccccaaaacttgaaattgtgaacatttgacatgcagtaaaggccacctcatcacccagagaaatctttggctgctgcagctagccgcttcttggctgtgatgtagtatagcttcgatctcattttgtgtttgagagaatgttctgggcaagttctgtgtgtggtgggttggggcgggtagagtcatgagttttccacatccctgtgtggtggttttgctgactgtcgctccgtgggactggctcccgtttctccttggtgagcccggggagccggcgcatcttgtgagtcgcgtctgtgcatggcgatccgctcctccggctctcatggcattgtgccacaggcagaggccaggaggagcagtatgtgcacagccgaaacattttacattttttacattgtttttcttttttaaccaactcattgtttaaaaaacaaaaacaaaaaaaacctaatctgtgaaatcagcgtagcatgcctggagcatcaggaatggcagaaaagtctgatgcgctctagacagcttcaccactcatttgggcaggcagtaaacacacatataatttattagctgggagctgaactggctgtgaaatctatgatttgctttgaacatttgggttttgttgcctttttcttaattgataacacagaaaagaaagtaccatcaaagactgtggagtcattgagggtctgtgtgtcctcaccgagagggacctggtgtgcccgccgggtcgatcttcccacgtgttagggtttatttttatacaacacatcttttgacactttaaggtgggtgggtgtgtgtgtgtgtgtgtgtgtgcgcgcgtgcgcgcgcgcatgtgtaaggttttatgttgctgttatttatttacgaacttcagatacgtttttatgtatttttcattcttctggagcttcctaaaaattgataagcatctgcactgaaatataatttaacagcaaaagtaaaaaaggattgaaagttgtaaattcctcatatcactacagtgacgattattctagaaatcgttgcttgtgtagcaaagaccaaataaatagatttcagacacaaccttgagcacagttgattttggacagctgctgtttattaggaaagggctccaggtggcaaaggtgcacacttcctcagacacaggtgagaagatgcagcaccttccacaggtgaatgggacggattcgaagtgagcaaagggattcacaaattatgtatttatttgttttcatagttaagtagctgaagctcagaggctttcagcaacagagatgaaagtgtggctttttagttttgtgaatggatgatcacaaagaaaaagcatttttaaaaagttggcaaacgctgaaacgcactgtggtatgaagcgcattgcatttccatagcactgaagtaccagtttccattcctgggctgagattgtttttcccgtggttgtattgttctgatttcacgtacaccagagtaactgatttttttttgtttgttttcttgtggagttaacaccaaataaaaattgtaaaaaac

SEQ ID NO: 385207 - DNA, 853 bp, Homo sapiens
aggatgtcggcaacctaaattcatgtaccctatctgtacagttgttgtggatggtttgccatctgaaagctcctcaagttcttatccaggccctgtgtctgtttctgaaatgtctctgcttcatgctttgggtccagtgcagacctggctgggacaagagctcgagaaatgtggcattgatgccatgatttacactcggtatgtcctcagtcttctgctgcatgacagctatgactacgacctgcaggaacaggagaatgacatcttcctgggctgggaaaaaggagcttataagaaatggggaaagagtaagaaaaaatgttcagatctaactctagaagaaatgaaaaaacagaatgctgtccagtgtcttcgatctgcttctgatgaaagctctggtatcgagactttagtggaggagctctgctccagactgaaagaccttcagagtaagcaagaagagaagattcacaaaaagttagaggggtctccctctccagaggcagaagcaggaagcgcttcctgcttctgccaccaggaataagggaaaagacgagcaggaggctctcaagagggatccaagagaagaggctgcttttttgacctctgactcatgtgtctgccgcaggggttttgaacctaaattgccaccgaattatagcaaaccggcagctcaaacatttaagcttcaaaaggagctaaaaacaaaggttctttccttttttgagatggggaaattaaagacaggaaggtcagtgtcgctgtgaatcagggccaagaccagcacaaacccccatttctcagttcctgccgctttcagagaacactgcccttctccaccagcctcttcagc

SEQ ID NO: 385208 - DNA, 2622 bp, Homo sapiens
aattccgctgctgcctgcgtcttttgcgctcggcctcgcccgcggccctccttccccggctcccgctcgccgctcgttcactccaccgccgccgccgccgccgccgctgccgctgccgctgccgcacctccgtagctgactcggtactctctgaagatggcagaagctcaccaagctgtggcctttcagttcacggtcactccggacgggattgacctgcggctgagccatgaagctcttagacaaatctatctctctggacttcattcctggaaaaagaagttcatcagattcaagaacggcatcatcactggcgtgtacccggcaagcccctccagttggcttatcgtggtggtgggcgtgatgacaacgatgtacgccaagatcgacccctcgttaggaataattgcaaaaatcaatcggactctggaaacggccaactgcatgtccagccagacgaagaacgtggtcagcggcgtgctgtttggcaccggcctgtgggtggccctcatcgtcaccatgcgctactccctgaaagtgctgctctcctaccacgggtggatgttcactgagcacggcaagatgagtcgtgccaccaagatctggatgggtatggtcaagatcttttcaggccgaaaacccatgttgtacagcttccagacatcgctgcctcgcctgccggtcccggctgtcaaagacactgtgaacaggtatctacagtcggtgaggcctcttatgaaggaagaagacttcaaacggatgacagcacttgctcaagattttgctgtcggtcttggaccaagattacagtggtatttgaagttaaaatcctggtgggctacaaattacgtgagcgactggtgggaggagtacatctacctccgaggacgagggccgctcatggtgaacagcaactattatgccatggatctgctgtatatccttccaactcacattcaggcagcaagagccggcaacgccatccatgccatcctgctttacaggcgcaaactggaccgggaggaaatcaaaccaattcgtcttttgggatccacgattccactctgctccgctcagtgggagcggatgtttaatacttcccggatcccaggagaggagacagacaccatccagcacatgagagacagcaagcacatcgtcgtgtaccatcgaggacgctacttcaaggtctggctctaccatgatgggcggctgctgaagccccgggagatggagcagcagatgcagaggatcctggacaatacctcggagcctcagcccggggaggccaggctggcagccctcaccgcaggagacagagttccctgggccaggtgtcgtcaggcctattttggacgtgggaaaaataagcagtctcttgatgctgtggagaaagcagcgttcttcgtgacgttagatgaaactgaagaaggatacagaagtgaagacccggatacgtcaatggacagctacgccaaatctctactacacggccgatgttacgacaggtggtttgacaagtcgttcacgtttgttgtcttcaaaaacgggaagatgggcctcaacgctgaacactcctgggcagatgcgccgatcgtggcccacctttgggagtacgtcatgtccattgacagcctccagctgggctatgcggaggatgggcactgcaaaggcgacatcaatccgaacattccgtaccccaccaggctgcagtgggacatcccgggggaatgtcaagaggttatagagacctccctgaacaccgcaaatcttctggcaaacgacgtggatttccattccttcccattcgtagcctttggtaaaggaatcatcaagaaatgtcgcacgagcccagacgcctttgtgcagctggccctccagctggcgcactacaaggacatgggcaagttttgcctcacatacgaggcctccatgacccggctcttccgagaggggaggacggagaccgtgcgctcctgcaccactgagtcatgcgacttcgtgcgggccatggtggacccggcccagacggtggaacagaggctgaagttgttcaagttggcgtctgagaagcatcagcatatgtatcgcctcgccatgaccggctctgggatcgatcgtcacctcttctgcctttacgtggtgtctaaatatctcgctgtggagtcccctttccttaaggaagttttatctgagccttggagattatcaacaagccagacccctcagcagcaagtggagctgtttgacttggagaataacccagagtacgtgtccagcggagggggctttggaccggttgctgatgacggctatggtgtgtcgtacatccttgtgggagagaacctcatcaatttccacatttcttccaagttctcttgccctgagacggggattataagtcaaggaccaagttcagatacttgagacaaagtggaaagtctcagcatatggaaacaaggccttggaggagaccatggacatcaccaagttcatgtgctgggctggaaagaaaagcctgttgattttcacttgctgtgcatttattcatccattccattgcctcaatgctgagaacagtgcctgacacataaaagatgctcaataaatatgttaaaagta

SEQ ID NO: 385209 - DNA, 4568 bp, Homo sapiens
  misc_feature (3538)..(3538): n is a, c, g, or t
aattccgctgctgcctgcgtcttttgcgctcggcctcgcccgcggccctccttccccggctcccgctcgccgctcgttcactccaccgccgccgccgccgccgccgctgccgctgccgctgccgcacctccgtagctgactcggtactctctgaagatggcagaagctcaccaagctgtggcctttcagttcacggtcactccggacgggattgacctgcggctgagccatgaagctcttagacaaatctatctctctggacttcattcctggaaaaagaagttcatcagattcaagaacggcatcatcactggcgtgtacccggcaagcccctccagttggcttatcgtggtggtgggcgtgatgacaacgatgtacgccaagatcgacccctcgttaggaataattgcaaaaatcaatcggactctggaaacggccaactgcatgtccagccagacgaagaacgtggtcagcggcgtgctgtttggcaccggcctgtgggtggccctcatcgtcaccatgcgctactccctgaaagtgctgctctcctaccacgggtggatgttcactgagcacggcaagatgagtcgtgccaccaagatctggatgggtatggtcaagatcttttcaggccgaaaacccatgttgtacagcttccagacatcgctgcctcgcctgccggtcccggctgtcaaagacactgtgaacaggtatctacagtcggtgaggcctcttatgaaggaagaagacttcaaacggatgacagcacttgctcaagattttgctgtcggtcttggaccaagattacagtggtatttgaagttaaaatcctggtgggctacaaattacgtgagcgactggtgggaggagtacatctacctccgaggacgagggccgctcatggtgaacagcaactattatgccatggatctgctgtatatccttccaactcacattcaggcagcaagagccggcaacgccatccatgccatcctgctttacaggcgcaaactggaccgggaggaaatcaaaccaattcgtcttttgggatccacgattccactctgctccgctcagtgggagcggatgtttaatacttcccggatcccaggagaggagacagacaccatccagcacatgagagacagcaagcacatcgtcgtgtaccatcgaggacgctacttcaaggtctggctctaccatgatgggcggctgctgaagccccgggagatggagcagcagatgcagaggatcctggacaatacctcggagcctcagcccggggaggccaggctggcagccctcaccgcaggagacagagttccctgggccaggtgtcgtcaggcctattttggacgtgggaaaaataagcagtctcttgatgctgtggagaaagcagcgttcttcgtgacgttagatgaaactgaagaaggatacagaagtgaagacccggatacgtcaatggacagctacgccaaatctctactacacggccgatgttacgacaggtggtttgacaagtcgttcacgtttgttgtcttcaaaaacgggaagatgggcctcaacgctgaacactcctgggcagatgcgccgatcgtggcccacctttgggagtacgtcatgtccattgacagcctccagctgggctatgcggaggatgggcactgcaaaggcgacatcaatccgaacattccgtaccccaccaggctgcagtgggacatcccgggggaatgtcaagaggttatagagacctccctgaacaccgcaaatcttctggcaaacgacgtggatttccattccttcccattcgtagcctttggtaaaggaatcatcaagaaatgtcgcacgagcccagacgcctttgtgcagctggccctccagctggcgcactacaaggacatgggcaagttttgcctcacatacgaggcctccatgacccggctcttccgagaggggaggacggagaccgtgcgctcctgcaccactgagtcatgcgacttcgtgcgggccatggtggacccggcccagacggtggaacagaggctgaagttgttcaagttggcgtctgagaagcatcagcatatgtatcgcctcgccatgaccggctctgggatcgatcgtcacctcttctgcctttacgtggtgtctaaatatctcgctgtggagtcccctttccttaaggaagttttatctgagccttggagattatcaacaagccagacccctcagcagcaagtggagctgtttgacttggagaataacccagagtacgtgtccagcggagggggctttggaccggttgctgatgacggctatggtgtgtcgtacatccttgtgggagagaacctcatcaatttccacatttcttccaagttctcttgccctgagacggattctcatcgctttggaaggcacctgaaagaagcaatgactgacatcatcactttgtttggtctcagttctaattccaaaaagtaattccactggagctgctgggaaggaaaacgagctcttctgatgcaaaccaaatgaaaaataggcattaatcctgaccttagctcgggatgaaacactgctcttaaaaaaactcagttttccttccagaaaatgtgggtgttttttttttcctagaacagtatctctcccctgtgaagcataaccccactacttccagacttgccctcccttgggggacatctgataaagtctcccctgatgtctccgcatcggcttggatttattaagggatgcaaatcttgttgagttaatgaaggaattagtagggttgtggcttcacacacagtggaatggaaatggtgtgctttctcagtggcaaccgaaggcctagtgcttaagggcatttagcatcatccaagcagggtaaacttttgttttgttaaaagaaaaatgtgttattcaagttggtgtccccagttgtagctaacacatctggaatgcactaaccaaaatgctgtgctttggagacctgcttttgtcaccgtgggtaaccgttcccgtctggtccagtagcctgtgtttgcctctccacatttgaagcaagcaggatgcaaggtcttcagttttactgaccttgtatgtcttcaagtcttcacaacccagtgccttaaaaatgaaaggccctaaatgtaagggagatggagagaaagatttattttgtagagtctttgggtggaattgtgggtatactgttcccttcacaattgactgagtatggataaccgtacataagcatttgctacaccccaccagccccctccccctcagaaacaccagttccttcccaagggcagctgtgccagactcccctcccgggactgccttcttgtcatcataagcaacaaaagaaataacaggcacatgtcataaaaggggagcaagggccgtgatggtcagataattcactcaagaataaaacatgacacgtgcctcaggaggatctctttcccaaagtgacagcaaggagggcagggcatcggccaccaagcggggactagcaagtgaggaaggggagggcagnccaccgtggtgaggagagagtggctccacgaccccaaggtgctgggattacaggcatgagccaccatgcgcggcccacatgcatgttttatgtatgtatacttcatgatgtaaaaatcccacctttatgggccaaagattttttttctcctgaaagcaagaaaaaatgaaaacaaaagacaaaaaaaaaaaaaaagcgtccaggcgcgggggctcatgcgtgtaatcccagcacttggggaggccaaggcgggcggatcacgaggtcaggagatggagaccatcctggctaacacggtgaaaccccgtctctactaaaaattcaaaaaatgagccgggcgtggtaggcgggcgcctgtagtcccagctactcgggaggctgaggcaggagaatgggcgtgaacccgggaggcggagcttgcagtgagccgagatcgctccatgcactccagcctgggcgacagagcgagactccgtctaaaaaaaaaagcaaaaacaaaccaacaacaaaagcccctgactgtccgtcaagcaggcagcggggatgtagctctctctgccctgggcaagaatagcacttcccgttaaaagccagcagccggcgtcagtccctatcagagccagctagatcatgcactgttgaccactgagcaatctgtgttacactagagttcacagggcattttgagtgtagacgtgagtgcttaaacatatttgggtttctctctcaggttttaaatgtttcaaatgtaattgttgctcatcagtgcagttatcaatgcaattttatattccttgaggggagaaagaggggtcttattgtacatgtccaaggggggtgataagagtattatctgtttaatttaattggaacaaaccattgtcttaacgcagccatggtttgaatttgttatcttgggctgaccggtgcatgtaaatacagtatgctctttggatgtaaatcttagaaatgcagtgtgaatgtaggttatcattaataaaacattaaccccagtctactaaaaaaaaag

SEQ ID NO: 385210 - DNA, 3747 bp, Homo sapiens
  misc_feature (2676)..(2676): n is a, c, g, or t
gcgctctagaggtccccattgatagcggataggggtgctcatggtgaacagcactattatgcatggatctgctgtatatccttccaactcacattcaggcagcaagagccggcaacgccatccatgccatcctgctttacaggcgcaaactggaccgggaggaaatcaaaccaattcgtcttttgggatccacgattccactctgctccgctcagtgggagcggatgtttaatacttcccggatcccaggagaggagacagacaccatccagcacatgagagacagcaagcacatcgtcgtgtaccatcgaggacgctacttcaaggtctggctctaccatgatgggcggctgctgaagccccgggagatggagcagcagatgcagaggatcctggacaatacctcggagcctcagcccggggaggccaggctggcagccctcaccgcaggagacagagttccctgggccaggtgtcgtcaggcctattttggacgtgggaaaaataagcagtctcttgatgctgtggagaaagcagcgttcttcgtgacgttagatgaaactgaagaaggatacagaagtgaagacccggatacgtcaatggacagctacgccaaatctctactacacggccgatgttacgacaggtggtttgacaagtcgttcacgtttgttgtcttcaaaaacgggaagatgggcctcaacgctgaacactcctgggcagatgcgccgatcgtggcccacctttgggagtacgtcatgtccattgacagcctccagctgggctatgcggaggatgggcactgcaaaggcgacatcaatccgaacattccgtaccccaccaggctgcagtgggacatcccgggggaatgtcaagaggttatagagacctccctgaacaccgcaaatcttctggcaaacgacgtggatttccattccttcccattcgtagcctttggtaaaggaatcatcaagaaatgtcgcacgagcccagacgcctttgtgcagctggccctccagctggcgcactacaaggacatgggcaagttttgcctcacatacgaggcctccatgacccggctcttccgagaggggaggacggagaccgtgcgctcctgcaccactgagtcatgcgacttcgtgcgggccatggtggacccggcccagacggtggaacagaggctgaagttgttcaagttggcgtctgagaagcatcagcatatgtatcgcctcgccatgaccggctctgggatcgatcgtcacctcttctgcctttacgtggtgtctaaatatctcgctgtggagtcccctttccttaaggaagttttatctgagccttggagattatcaacaagccagacccctcagcagcaagtggagctgtttgacttggagaataacccagagtacgtgtccagcggagggggctttggaccggttgctgatgacggctatggtgtgtcgtacatccttgtgggagagaacctcatcaatttccacatttcttccaagttctcttgccctgagacggattctcatcgctttggaaggcacctgaaagaagcaatgactgacatcatcactttgtttggtctcagttctaattccaaaaagtaattccactggagctgctgggaaggaaaacgagctcttctgatgcaaaccaaatgaaaaataggcattaatcctgaccttagctcgggatgaaacactgctcttaaaaaaactcagttttccttccagaaaatgtgggtgttttttttttcctagaacagtatctctcccctgtgaagcataaccccactacttccagacttgccctcccttgggggacatctgataaagtctcccctgatgtctccgcatcggcttggatttattaagggatgcaaatcttgttgagttaatgaaggaattagtagggttgtggcttcacacacagtggaatggaaatggtgtgctttctcagtggcaaccgaaggcctagtgcttaagggcatttagcatcatccaagcagggtaaacttttgttttgttaaaagaaaaatgtgttattcaagttggtgtccccagttgtagctaacacatctggaatgcactaaccaaaatgctgtgctttggagacctgcttttgtcaccgtgggtaaccgttcccgtctggtccagtagcctgtgtttgcctctccacatttgaagcaagcaggatgcaaggtcttcagttttactgaccttgtatgtcttcaagtcttcacaacccagtgccttaaaaatgaaaggccctaaatgtaagggagatggagagaaagatttattttgtagagtctttgggtggaattgtgggtatactgttcccttcacaattgactgagtatggataaccgtacataagcatttgctacaccccaccagccccctccccctcagaaacaccagttccttcccaagggcagctgtgccagactcccctcccgggactgccttcttgtcatcataagcaacaaaagaaataacaggcacatgtcataaaaggggagcaagggccgtgatggtcagataattcactcaagaataaaacatgacacgtgcctcaggaggatctctttcccaaagtgacagcaaggagggcagggcatcggccaccaagcggggactagcaagtgaggaaggggagggcagnccaccgtggtgaggagagagtggctccacgaccccaagggatggccttctcctcccacccggtgaggggaaagactcaccagagggtgatggagacagtatgccggctcaccttggtgaccagccaagatgtctcaagtgacggtgctaggtgttcacccagcctgtccttcagataggagtgccttcacgaaagcgtctcatggaccacaaagcaattatgcactgagtcatcttcagtatttaatgcaaaaatgaagcatcatggaatgaaattcccactgtctgtcatgacaagcttagctgtccattgttttaaattgtgtatttatttttttgaccacttggttctagttgggcctgactccttcagagtgctgcaccccgatagtacaacagcgatggctgaactgttggagtcgatggaaggtgcttgccggagaacacgtgcctttttttttttttttttttttgagatggagttgcactccagcctgggcgacagagcgagactccgtctaaaaaaaaaagcaaaaacaaaccaacaacaaaagcccctgactgtccgtcaagcaggcagcggggatgtagctctctctgccctgggcaagaatagcacttcccgttaaaagccagcagccggcgtcagtccctatcagagccagctagatcatgcactgttgaccactgagcaatctgtgttacactagagttcacagggcattttgagtgtagacgtgagtgcttaaacatatttgggtttctctctcaggttttaaatgtttcaaatgtaattgttgctcatcagtgcagttatcaatgcaattttatattccttgaggggagaaagaggggtcttattgtacatgtccaaggggggtgataagagtattatctgtttaatttaattggaacaaaccattgtcttaacgcagccatggtttgaatttgttatcttgggctgaccggtgcatgtaaatacagtatgctctttggatgtaaatcttagaaatgcagtgtgaatgtaggttatcattaataaaacattaaccccagtctactaaaaaaaaag

SEQ ID NO: 385211 - DNA, 2272 bp, Homo sapiens
  misc_feature (1201)..(1201): n is a, c, g, or t
atcagctcggtaccgattacgctcctagacggcaagttctcttgccctgagacggattctcatcgctttggaaggcacctgaaagaagcaatgactgacatcatcactttgtttggtctcagttctaattccaaaaagtaattccactggagctgctgggaaggaaaacgagctcttctgatgcaaaccaaatgaaaaataggcattaatcctgaccttagctcgggatgaaacactgctcttaaaaaaactcagttttccttccagaaaatgtgggtgttttttttttcctagaacagtatctctcccctgtgaagcataaccccactacttccagacttgccctcccttgggggacatctgataaagtctcccctgatgtctccgcatcggcttggatttattaagggatgcaaatcttgttgagttaatgaaggaattagtagggttgtggcttcacacacagtggaatggaaatggtgtgctttctcagtggcaaccgaaggcctagtgcttaagggcatttagcatcatccaagcagggtaaacttttgttttgttaaaagaaaaatgtgttattcaagttggtgtccccagttgtagctaacacatctggaatgcactaaccaaaatgctgtgctttggagacctgcttttgtcaccgtgggtaaccgttcccgtctggtccagtagcctgtgtttgcctctccacatttgaagcaagcaggatgcaaggtcttcagttttactgaccttgtatgtcttcaagtcttcacaacccagtgccttaaaaatgaaaggccctaaatgtaagggagatggagagaaagatttattttgtagagtctttgggtggaattgtgggtatactgttcccttcacaattgactgagtatggataaccgtacataagcatttgctacaccccaccagccccctccccctcagaaacaccagttccttcccaagggcagctgtgccagactcccctcccgggactgccttcttgtcatcataagcaacaaaagaaataacaggcacatgtcataaaaggggagcaagggccgtgatggtcagataattcactcaagaataaaacatgacacgtgcctcaggaggatctctttcccaaagtgacagcaaggagggcagggcatcggccaccaagcggggactagcaagtgaggaaggggagggcagnccaccgtggtgaggagagagtggctccacgaccccaagggatggccttctcctcccacccggtgaggggaaagactcaccagagggtgatggagacagtatgccggctcaccttggtgaccagccaagatgtctcaagtgacggtgctaggtgttcacccagcctgtccttcagataggagtgccttcacgaaagcgtctcatggaccacaaagcaattatgcactgagtcatcttcagtatttaatgcaaaaatgaagcatcatggaatgaaattcccactgtctgtcatgacaagcttagctgtccattgttttaaattgtgtatttatttttttgaccacttggttctagttgggcctgactccttcagagtgctgcaccccgatagtacaacagcgatggctgaactgttggagtcgatggaaggtgcttgccggagaacacgtgcctttttttttttttttttttttgagatggagttgcactccagcctgggcgacagagcgagactccgtctaaaaaaaaaagcaaaaacaaaccaacaacaaaagcccctgactgtccgtcaagcaggcagcggggatgtagctctctctgccctgggcaagaatagcacttcccgttaaaagccagcagccggcgtcagtccctatcagagccagctagatcatgcactgttgaccactgagcaatctgtgttacactagagttcacagggcattttgagtgtagacgtgagtgcttaaacatatttgggtttctctctcaggttttaaatgtttcaaatgtaattgttgctcatcagtgcagttatcaatgcaattttatattccttgaggggagaaagaggggtcttattgtacatgtccaaggggggtgataagagtattatctgtttaatttaattggaacaaaccattgtcttaacgcagccatggtttgaatttgttatcttgggctgaccggtgcatgtaaatacagtatgctctttggatgtaaatcttagaaatgcagtgtgaatgtaggttatcattaataaaacattaaccccagtctactaaaaaaaaag

SEQ ID NO: 385212 - DNA, 1712 bp, Homo sapiens
aattccgctgctgcctgcgtcttttgcgctcggcctcgcccgcggccctccttccccggctcccgctcgccgctcgttcactccaccgccgccgccgccgccgccgctgccgctgccgctgccgcacctccgtagctgactcggtactctctgaagatggcagaagctcaccaagctgtggcctttcagttcacggtcactccggacgggattgacctgcggctgagccatgaagctcttagacaaatctatctctctggacttcattcctggaaaaagaagttcatcagattcaagaacggcatcatcactggcgtgtacccggcaagcccctccagttggcttatcgtggtggtgggcgtgatgacaacgatgtacgccaagatcgacccctcgttaggaataattgcaaaaatcaatcggactctggaaacggccaactgcatgtccagccagacgaagaacgtggtcagcggcgtgctgtttggcaccggcctgtgggtggccctcatcgtcaccatgcgctactccctgaaagtgctgctctcctaccacgggtggatgttcactgagcacggcaagatgagtcgtgccaccaagatctggatgggtatggtcaagatcttttcaggccgaaaacccatgttgtacagcttccagacatcgctgcctcgcctgccggtcccggctgtcaaagacactgtgaacaggtatctacagtcggtgaggcctcttatgaaggaagaagacttcaaacggatgacagcacttgctcaagattttgctgtcggtcttggaccaagattacagtggtatttgaagttaaaatcctggtgggctacaaattacgtgagcgactggtgggaggagtacatctacctccgaggacgagggccgctcatggtgaacagcaactattatgccatggatctgctgtatatccttccaactcacattcaggcagcaagagccggcaacgccatccatgccatcctgctttacaggcgcaaactggaccgggaggaaatcaaaccaattcgtcttttgggatccacgattccactctgctccgctcagtgggagcggatgtttaatacttcccggatcccaggagaggagacagtgcactccagcctgggcgacagagcgagactccgtctaaaaaaaaaagcaaaaacaaaccaacaacaaaagcccctgactgtccgtcaagcaggcagcggggatgtagctctctctgccctgggcaagaatagcacttcccgttaaaagccagcagccggcgtcagtccctatcagagccagctagatcatgcactgttgaccactgagcaatctgtgttacactagagttcacagggcattttgagtgtagacgtgagtgcttaaacatatttgggtttctctctcaggttttaaatgtttcaaatgtaattgttgctcatcagtgcagttatcaatgcaattttatattccttgaggggagaaagaggggtcttattgtacatgtccaaggggggtgataagagtattatctgtttaatttaattggaacaaaccattgtcttaacgcagccatggtttgaatttgttatcttgggctgaccggtgcatgtaaatacagtatgctctttggatgtaaatcttagaaatgcagtgtgaatgtaggttatcattaataaaacattaaccccagtctactaaaaaaaaag

SEQ ID NO: 385213 - DNA, 2096 bp, Homo sapiens
  misc_feature (1025)..(1025): n is a, c, g, or t
gctgatgtgttcctggtcatagctatgtcttgtttctgaccttagctcgggatgaaacactgctcttaaaaaaactcagttttccttccagaaaatgtgggtgttttttttttcctagaacagtatctctcccctgtgaagcataaccccactacttccagacttgccctcccttgggggacatctgataaagtctcccctgatgtctccgcatcggcttggatttattaagggatgcaaatcttgttgagttaatgaaggaattagtagggttgtggcttcacacacagtggaatggaaatggtgtgctttctcagtggcaaccgaaggcctagtgcttaagggcatttagcatcatccaagcagggtaaacttttgttttgttaaaagaaaaatgtgttattcaagttggtgtccccagttgtagctaacacatctggaatgcactaaccaaaatgctgtgctttggagacctgcttttgtcaccgtgggtaaccgttcccgtctggtccagtagcctgtgtttgcctctccacatttgaagcaagcaggatgcaaggtcttcagttttactgaccttgtatgtcttcaagtcttcacaacccagtgccttaaaaatgaaaggccctaaatgtaagggagatggagagaaagatttattttgtagagtctttgggtggaattgtgggtatactgttcccttcacaattgactgagtatggataaccgtacataagcatttgctacaccccaccagccccctccccctcagaaacaccagttccttcccaagggcagctgtgccagactcccctcccgggactgccttcttgtcatcataagcaacaaaagaaataacaggcacatgtcataaaaggggagcaagggccgtgatggtcagataattcactcaagaataaaacatgacacgtgcctcaggaggatctctttcccaaagtgacagcaaggagggcagggcatcggccaccaagcggggactagcaagtgaggaaggggagggcagnccaccgtggtgaggagagagtggctccacgaccccaagggatggccttctcctcccacccggtgaggggaaagactcaccagagggtgatggagacagtatgccggctcaccttggtgaccagccaagatgtctcaagtgacggtgctaggtgttcacccagcctgtccttcagataggagtgccttcacgaaagcgtctcatggaccacaaagcaattatgcactgagtcatcttcagtatttaatgcaaaaatgaagcatcatggaatgaaattcccactgtctgtcatgacaagcttagctgtccattgttttaaattgtgtatttatttttttgaccacttggttctagttgggcctgactccttcagagtgctgcaccccgatagtacaacagcgatggctgaactgttggagtcgatggaaggtgcttgccggagaacacgtgcctttttttttttttttttttttgagatggagttgcactccagcctgggcgacagagcgagactccgtctaaaaaaaaaagcaaaaacaaaccaacaacaaaagcccctgactgtccgtcaagcaggcagcggggatgtagctctctctgccctgggcaagaatagcacttcccgttaaaagccagcagccggcgtcagtccctatcagagccagctagatcatgcactgttgaccactgagcaatctgtgttacactagagttcacagggcattttgagtgtagacgtgagtgcttaaacatatttgggtttctctctcaggttttaaatgtttcaaatgtaattgttgctcatcagtgcagttatcaatgcaattttatattccttgaggggagaaagaggggtcttattgtacatgtccaaggggggtgataagagtattatctgtttaatttaattggaacaaaccattgtcttaacgcagccatggtttgaatttgttatcttgggctgaccggtgcatgtaaatacagtatgctctttggatgtaaatcttagaaatgcagtgtgaatgtaggttatcattaataaaacattaaccccagtctactaaaaaaaaag

SEQ ID NO: 385214 - DNA, 1182 bp, Homo sapiens
ctcactgcagcatctgccttgcaggttcaagcgattctcctgtctcagcctcccaagtagctgggattacacgcccaacaccatgccctgctaatttttgtatttttagtagagacggggtttcatcatattggtcaggctggtctcgaactcctgacctcaggtgatccacctgcctcagcctcccaaagtgctgggattacaggcatgagccaccatgcgcggcccacatgcatgttttatgtatgtatacttcatgatgtaaaaatcccacctttatgggccaaagattttttttctcctgaaagcaagaaaaaatgaaaacaaaagacaaaaaaaaaaaaaaagcgtccaggcgcgggggctcatgcgtgtaatcccagcacttggggaggccaaggcgggcggatcacgaggtcaggagatggagaccatcctggctaacacggtgaaaccccgtctctactaaaaattcaaaaaatgagccgggcgtggtaggcgggcgcctgtagtcccagctactcgggaggctgaggcaggagaatgggcgtgaacccgggaggcggagcttgcagtgagccgagatcgctccatgcactccagcctgggcgacagagcgagactccgtctaaaaaaaaaagcaaaaacaaaccaacaacaaaagcccctgactgtccgtcaagcaggcagcggggatgtagctctctctgccctgggcaagaatagcacttcccgttaaaagccagcagccggcgtcagtccctatcagagccagctagatcatgcactgttgaccactgagcaatctgtgttacactagagttcacagggcattttgagtgtagacgtgagtgcttaaacatatttgggtttctctctcaggttttaaatgtttcaaatgtaattgttgctcatcagtgcagttatcaatgcaattttatattccttgaggggagaaagaggggtcttattgtacatgtccaaggggggtgataagagtattatctgtttaatttaattggaacaaaccattgtcttaacgcagccatggtttgaatttgttatcttgggctgaccggtgcatgtaaatacagtatgctctttggatgtaaatcttagaaatgcagtgtgaatgtaggttatcattaataaaacattaaccccagtctactaaaaaaaaag

SEQ ID NO: 385215 - DNA, 2416 bp, Homo sapiens
aattccgctgctgcctgcgtcttttgcgctcggcctcgcccgcggccctccttccccggctcccgctcgccgctcgttcactccaccgccgccgccgccgccgccgctgccgctgccgctgccgcacctccgtagctgactcggtactctctgaagatggcagaagctcaccaagctgtggcctttcagttcacggtcactccggacgggattgacctgcggctgagccatgaagctcttagacaaatctatctctctggacttcattcctggaaaaagaagttcatcagattcaagaacggcatcatcactggcgtgtacccggcaagcccctccagttggcttatcgtggtggtgggcgtgatgacaacgatgtacgccaagatcgacccctcgttaggaataattgcaaaaatcaatcggactctggaaacggccaactgcatgtccagccagacgaagaacgtggtcagcggcgtgctgtttggcaccggcctgtgggtggccctcatcgtcaccatgcgctactccctgaaagtgctgctctcctaccacgggtggatgttcactgagcacggcaagatgagtcgtgccaccaagatctggatgggtatggtcaagatcttttcaggccgaaaacccatgttgtacagcttccagacatcgctgcctcgcctgccggtcccggctgtcaaagacactgtgaacaggtatctacagtcggtgaggcctcttatgaaggaagaagacttcaaacggatgacagcacttgctcaagattttgctgtcggtcttggaccaagattacagtggtatttgaagttaaaatcctggtgggctacaaattacgtgagcgactggtgggaggagtacatctacctccgaggacgagggccgctcatggtgaacagcaactattatgccatggatctgctgtatatccttccaactcacattcaggcagcaagagccggcaacgccatccatgccatcctgctttacaggcgcaaactggaccgggaggaaatcaaaccaattcgtcttttgggatccacgattccactctgctccgctcagtgggagcggatgtttaatacttcccggatcccaggagaggagacagacaccatccagcacatgagagacagcaagcacatcgtcgtgtaccatcgaggacgctacttcaaggtctggctctaccatgatgggcggctgctgaagccccgggagatggagcagcagatgcagaggatcctggacaatacctcggagcctcagcccggggaggccaggctggcagccctcaccgcaggagacagagttccctgggccaggtgtcgtcaggcctattttggacgtgggaaaaataagcagtctcttgatgctgtggagaaagcagcgttcttcgtgacgttagatgaaactgaagaaggatacagaagtgaagacccggatacgtcaatggacagctacgccaaatctctactacacggccgatgttacgacaggtggtttgacaagtcgttcacgtttgttgtcttcaaaaacgggaagatgggcctcaacgctgaacactcctgggcagatgcgccgatcgtggcccacctttgggagtacgtcatgtccattgacagcctccagctgggctatgcggaggatgggcactgcaaaggcgacatcaatccgaacattccgtaccccaccaggctgcagtgggacatcccgggggaatgtcaagaggttatagagacctccctgaacaccgcaaatcttctggcaaacgacgtggatttccattccttcccattcgtagcctttggtaaaggaatcatcaagaaatgtcgcacgagcccagacgcctttgtgcagctggccctccagctggcgcactacaaggacatgggcaagttttgcctcacatacgaggcctccatgacccggctcttccgagaggggaggacggagaccgtgcgctcctgcaccactgagtcatgcgacttcgtgcgggccatggtggacccggcccagacggtggaacagaggctgaagttgttcaagttggcgtctgagaagcatcagcatatgtatcgcctcgccatgaccggctctgggatcgatcgtcacctcttctgcctttacgtggtgtctaaatatctcgctgtggagtcccctttccttaaggaagttttatctgagccttggagattatcaacaagccagacccctcagcagcaagtggagctgtttgacttggagaataacccagagtacgtgtccagcggagggggctttggaccggttgctgatgacggctatggtgtgtcgtacatccttgtgggagagaacctcatcaatttccacatttcttccaagttctcttgccctgagacgacccctatccgctatccaaatggta

SEQ ID NO: 385216 - DNA, 1416 bp, Homo sapiens
aattccgctgctgcctgcgtcttttgcgctcggcctcgcccgcggccctccttccccggctcccgctcgccgctcgttcactccaccgccgccgccgccgccgccgctgccgctgccgctgccgcacctccgtagctgactcggtactctctgaagatggcagaagctcaccaagctgtggcctttcagttcacggtcactccggacgggattgacctgcggctgagccatgaagctcttagacaaatctatctctctggacttcattcctggaaaaagaagttcatcagattcaagaacggcatcatcactggcgtgtacccggcaagcccctccagttggcttatcgtggtggtgggcgtgatgacaacgatgtacgccaagatcgacccctcgttaggaataattgcaaaaatcaatcggactctggaaacggccaactgcatgtccagccagacgaagaacgtggtcagcggcgtgctgtttggcaccggcctgtgggtggccctcatcgtcaccatgcgctactccctgaaagtgctgctctcctaccacgggtggatgttcactgagcacggcaagatgagtcgtgccaccaagatctggatgggtatggtcaagatcttttcaggccgaaaacccatgttgtacagcttccagacatcgctgcctcgcctgccggtcccggctgtcaaagacactgtgaacaggtatctacagtcggtgaggcctcttatgaaggaagaagacttcaaacggatgacagcacttgctcaagattttgctgtcggtcttggaccaagattacagtggtatttgaagttaaaatcctggtgggctacaaattacgtgagcgactggtgggaggagtacatctacctccgaggacgagggccgctcatggtgaacagcaactattatgccatggatctgctgtatatccttccaactcacattcaggcagcaagagccggcaacgccatccatgccatcctgctttacaggcgcaaactggaccgggaggaaatcaaaccaattcgtcttttgggatccacgattccactctgctccgctcagtgggagcggatgtttaatacttcccggatcccaggagaggagacagacgatctgccttgatcagctgtcactgtgcatccccactgagcagtgcttaagaggacttgataaatattcgtggagtgaacgtacttcatcacatttctgtgatgtttaagcttactgaggagcttaaattactctgttttagtagtttttacggaatggcttggtttcgtaattttccactttctttctcagaacatttctcgggttctcagaaacaattatcggaatgtttctcagcatattttctaagttgccctattgtcattaattaataaaaagttactatacgga

SEQ ID NO: 385217 - DNA, 604 bp, Homo sapiens
acacacgccgagcacacctgagaatgggcacgcgttctgcctaacgccccttctgaggcgcacggttggacctggtgactgacagctgtttcttaggtgactgttgccttttcaacgtgcttgatctatcatgaaatataagctgccctgccccacggtactttcagggatccacttttaaatgatttcaaaagccacattctcagtattgctcaggcgctgagcaatctgtgttacactagagttcacagggcattttgagtgtagacgtgagtgcttaaacatatttgggtttctctctcaggttttaaatgtttcaaatgtaattgttgctcatcagtgcagttatcaatgcaattttatattccttgaggggagaaagaggggtcttattgtacatgtccaaggggggtgataagagtattatctgtttaatttaattggaacaaaccattgtcttaacgcagccatggtttgaatttgttatcttgggctgaccggtgcatgtaaatacagtatgctctttggatgtaaatcttagaaatgcagtgtgaatgtaggttatcattaataaaacattaaccccagtctactaaaaaaaaag

SEQ ID NO: 385218 - DNA, 602 bp, Homo sapiens
agcgctgtgcaatacgggtgggggtggtggttgtggtaaactttaatatgtgtaggaagcttgaataatttattgaaggagaggggtcagggttgattcgggaggatcctattggtgcgggggctttgtatgattatgggcgttgattagtagtagttactggttgaacattgtttgttggtgtatatattgtaattgagattgctcagcgctagcgctgagcaatctgtgttacactagagttcacagggcattttgagtgtagacgtgagtgcttaaacatatttgggtttctctctcaggttttaaatgtttcaaatgtaattgttgctcatcagtgcagttatcaatgcaattttatattccttgaggggagaaagaggggtcttattgtacatgtccaaggggggtgataagagtattatctgtttaatttaattggaacaaaccattgtcttaacgcagccatggtttgaatttgttatcttgggctgaccggtgcatgtaaatacagtatgctctttggatgtaaatcttagaaatgcagtgtgaatgtaggttatcattaataaaacattaaccccagtctactaaaaaaaaag

SEQ ID NO: 385219 - DNA, 649 bp, Homo sapiens
agttcactgcagcctctgctccccaggctcaagtgatcctcccatctcagctccagaataactgggactacaggtgcacaccaccacacccagctaatttttgtattttttgtagagatagggttttgccatgttgcccaggctgatcccaaactcctgggctcaagcaatcctccctccttggcctcctgaagtgctgggaatacagggtgagccactgctcctggtagcttgtcctatttttaatcatgcatttatttgtcttcctcactagacgatctgccttgatcagctgtcactgtgcatccccactgagcagtgcttaagaggacttgataaatattcgtggagtgaacgtacttcatcacatttctgtgatgtttaagcttactgaggagcttaaattactctgttttagtagtttttacggaatggcttggtttcgtaattttccactttctttctcagaacatttctcgggttctcagaaacaattatcggaatgtttctcagcatattttctaagttgccctattgtcattaattaataaaaagttactatacggatcgaatgcctatttacatgggctttacggatatcgtctcttaattcttgcacagtgcatatggggaacatatgacctccatt

SEQ ID NO: 385220 - DNA, 4609 bp, Homo sapiens
  misc_feature (3538)..(3538): n is a, c, g, or t
aattccgctgctgcctgcgtcttttgcgctcggcctcgcccgcggccctccttccccggctcccgctcgccgctcgttcactccaccgccgccgccgccgccgccgctgccgctgccgctgccgcacctccgtagctgactcggtactctctgaagatggcagaagctcaccaagctgtggcctttcagttcacggtcactccggacgggattgacctgcggctgagccatgaagctcttagacaaatctatctctctggacttcattcctggaaaaagaagttcatcagattcaagaacggcatcatcactggcgtgtacccggcaagcccctccagttggcttatcgtggtggtgggcgtgatgacaacgatgtacgccaagatcgacccctcgttaggaataattgcaaaaatcaatcggactctggaaacggccaactgcatgtccagccagacgaagaacgtggtcagcggcgtgctgtttggcaccggcctgtgggtggccctcatcgtcaccatgcgctactccctgaaagtgctgctctcctaccacgggtggatgttcactgagcacggcaagatgagtcgtgccaccaagatctggatgggtatggtcaagatcttttcaggccgaaaacccatgttgtacagcttccagacatcgctgcctcgcctgccggtcccggctgtcaaagacactgtgaacaggtatctacagtcggtgaggcctcttatgaaggaagaagacttcaaacggatgacagcacttgctcaagattttgctgtcggtcttggaccaagattacagtggtatttgaagttaaaatcctggtgggctacaaattacgtgagcgactggtgggaggagtacatctacctccgaggacgagggccgctcatggtgaacagcaactattatgccatggatctgctgtatatccttccaactcacattcaggcagcaagagccggcaacgccatccatgccatcctgctttacaggcgcaaactggaccgggaggaaatcaaaccaattcgtcttttgggatccacgattccactctgctccgctcagtgggagcggatgtttaatacttcccggatcccaggagaggagacagacaccatccagcacatgagagacagcaagcacatcgtcgtgtaccatcgaggacgctacttcaaggtctggctctaccatgatgggcggctgctgaagccccgggagatggagcagcagatgcagaggatcctggacaatacctcggagcctcagcccggggaggccaggctggcagccctcaccgcaggagacagagttccctgggccaggtgtcgtcaggcctattttggacgtgggaaaaataagcagtctcttgatgctgtggagaaagcagcgttcttcgtgacgttagatgaaactgaagaaggatacagaagtgaagacccggatacgtcaatggacagctacgccaaatctctactacacggccgatgttacgacaggtggtttgacaagtcgttcacgtttgttgtcttcaaaaacgggaagatgggcctcaacgctgaacactcctgggcagatgcgccgatcgtggcccacctttgggagtacgtcatgtccattgacagcctccagctgggctatgcggaggatgggcactgcaaaggcgacatcaatccgaacattccgtaccccaccaggctgcagtgggacatcccgggggaatgtcaagaggttatagagacctccctgaacaccgcaaatcttctggcaaacgacgtggatttccattccttcccattcgtagcctttggtaaaggaatcatcaagaaatgtcgcacgagcccagacgcctttgtgcagctggccctccagctggcgcactacaaggacatgggcaagttttgcctcacatacgaggcctccatgacccggctcttccgagaggggaggacggagaccgtgcgctcctgcaccactgagtcatgcgacttcgtgcgggccatggtggacccggcccagacggtggaacagaggctgaagttgttcaagttggcgtctgagaagcatcagcatatgtatcgcctcgccatgaccggctctgggatcgatcgtcacctcttctgcctttacgtggtgtctaaatatctcgctgtggagtcccctttccttaaggaagttttatctgagccttggagattatcaacaagccagacccctcagcagcaagtggagctgtttgacttggagaataacccagagtacgtgtccagcggagggggctttggaccggttgctgatgacggctatggtgtgtcgtacatccttgtgggagagaacctcatcaatttccacatttcttccaagttctcttgccctgagacggattctcatcgctttggaaggcacctgaaagaagcaatgactgacatcatcactttgtttggtctcagttctaattccaaaaagtaattccactggagctgctgggaaggaaaacgagctcttctgatgcaaaccaaatgaaaaataggcattaatcctgaccttagctcgggatgaaacactgctcttaaaaaaactcagttttccttccagaaaatgtgggtgttttttttttcctagaacagtatctctcccctgtgaagcataaccccactacttccagacttgccctcccttgggggacatctgataaagtctcccctgatgtctccgcatcggcttggatttattaagggatgcaaatcttgttgagttaatgaaggaattagtagggttgtggcttcacacacagtggaatggaaatggtgtgctttctcagtggcaaccgaaggcctagtgcttaagggcatttagcatcatccaagcagggtaaacttttgttttgttaaaagaaaaatgtgttattcaagttggtgtccccagttgtagctaacacatctggaatgcactaaccaaaatgctgtgctttggagacctgcttttgtcaccgtgggtaaccgttcccgtctggtccagtagcctgtgtttgcctctccacatttgaagcaagcaggatgcaaggtcttcagttttactgaccttgtatgtcttcaagtcttcacaacccagtgccttaaaaatgaaaggccctaaatgtaagggagatggagagaaagatttattttgtagagtctttgggtggaattgtgggtatactgttcccttcacaattgactgagtatggataaccgtacataagcatttgctacaccccaccagccccctccccctcagaaacaccagttccttcccaagggcagctgtgccagactcccctcccgggactgccttcttgtcatcataagcaacaaaagaaataacaggcacatgtcataaaaggggagcaagggccgtgatggtcagataattcactcaagaataaaacatgacacgtgcctcaggaggatctctttcccaaagtgacagcaaggagggcagggcatcggccaccaagcggggactagcaagtgaggaaggggagggcagnccaccgtggtgaggagagagtggctccacgaccccaagggatggccttctcctcccacccggtgaggggaaagactcaccagagggtgatggagacagtatgccggctcaccttggtgaccagccaagatgtctcaagtgacggtgctaggtgttcacccagcctgtccttcagataggagtgccttcacgaaagcgtctcatggaccacaaagcaattatgcactgagtcatcttcagtatttaatgcaaaaatgaagcatcatggaatgaaattcccactgtctgtcatgacaagcttagctgtccattgttttaaattgtgtatttatttttttgaccacttggttctagttgggcctgactccttcagagtgctgcaccccgatagtacaacagcgatggctgaactgttggagtcgatggaaggtgcttgccggagaacacgtgcctttttttttttttttttttttgagatggagttgcactccagcctgggcgacagagcgagactccgtctaaaaaaaaaagcaaaaacaaaccaacaacaaaagcccctgactgtccgtcaagcaggcagcggggatgtagctctctctgccctgggcaagaatagcacttcccgttaaaagccagcagccggcgtcagtccctatcagagccagctagatcatgcactgttgaccactgagcaatctgtgttacactagagttcacagggcattttgagtgtagacgtgagtgcttaaacatatttgggtttctctctcaggttttaaatgtttcaaatgtaattgttgctcatcagtgcagttatcaatgcaattttatattccttgaggggagaaagaggggtcttattgtacatgtccaaggggggtgataagagtattatctgtttaatttaattggaacaaaccattgtcttaacgcagccatggtttgaatttgttatcttgggctgaccggtgcatgtaaatacagtatgctctttggatgtaaatcttagaaatgcagtgtgaatgtaggttatcattaataaaacattaaccccagtctactaaaaaaaaag

SEQ ID NO: 385221 - DNA, 4055 bp, Homo sapiens
  misc_feature (2984)..(2984): n is a, c, g, or t
aaacgttaggctagtacgggccgggggtgaatcggccgaggccaagatctggatgggtatggtcaagatcttttcaggccgaaaacccatgttgtacagcttccagacatcgctgcctcgcctgccggtcccggctgtcaaagacactgtgaacaggtatctacagtcggtgaggcctcttatgaaggaagaagacttcaaacggatgacagcacttgctcaagattttgctgtcggtcttggaccaagattacagtggtatttgaagttaaaatcctggtgggctacaaattacgtgagcgactggtgggaggagtacatctacctccgaggacgagggccgctcatggtgaacagcaactattatgccatggatctgctgtatatccttccaactcacattcaggcagcaagagccggcaacgccatccatgccatcctgctttacaggcgcaaactggaccgggaggaaatcaaaccaattcgtcttttgggatccacgattccactctgctccgctcagtgggagcggatgtttaatacttcccggatcccaggagaggagacagacaccatccagcacatgagagacagcaagcacatcgtcgtgtaccatcgaggacgctacttcaaggtctggctctaccatgatgggcggctgctgaagccccgggagatggagcagcagatgcagaggatcctggacaatacctcggagcctcagcccggggaggccaggctggcagccctcaccgcaggagacagagttccctgggccaggtgtcgtcaggcctattttggacgtgggaaaaataagcagtctcttgatgctgtggagaaagcagcgttcttcgtgacgttagatgaaactgaagaaggatacagaagtgaagacccggatacgtcaatggacagctacgccaaatctctactacacggccgatgttacgacaggtggtttgacaagtcgttcacgtttgttgtcttcaaaaacgggaagatgggcctcaacgctgaacactcctgggcagatgcgccgatcgtggcccacctttgggagtacgtcatgtccattgacagcctccagctgggctatgcggaggatgggcactgcaaaggcgacatcaatccgaacattccgtaccccaccaggctgcagtgggacatcccgggggaatgtcaagaggttatagagacctccctgaacaccgcaaatcttctggcaaacgacgtggatttccattccttcccattcgtagcctttggtaaaggaatcatcaagaaatgtcgcacgagcccagacgcctttgtgcagctggccctccagctggcgcactacaaggacatgggcaagttttgcctcacatacgaggcctccatgacccggctcttccgagaggggaggacggagaccgtgcgctcctgcaccactgagtcatgcgacttcgtgcgggccatggtggacccggcccagacggtggaacagaggctgaagttgttcaagttggcgtctgagaagcatcagcatatgtatcgcctcgccatgaccggctctgggatcgatcgtcacctcttctgcctttacgtggtgtctaaatatctcgctgtggagtcccctttccttaaggaagttttatctgagccttggagattatcaacaagccagacccctcagcagcaagtggagctgtttgacttggagaataacccagagtacgtgtccagcggagggggctttggaccggttgctgatgacggctatggtgtgtcgtacatccttgtgggagagaacctcatcaatttccacatttcttccaagttctcttgccctgagacggattctcatcgctttggaaggcacctgaaagaagcaatgactgacatcatcactttgtttggtctcagttctaattccaaaaagtaattccactggagctgctgggaaggaaaacgagctcttctgatgcaaaccaaatgaaaaataggcattaatcctgaccttagctcgggatgaaacactgctcttaaaaaaactcagttttccttccagaaaatgtgggtgttttttttttcctagaacagtatctctcccctgtgaagcataaccccactacttccagacttgccctcccttgggggacatctgataaagtctcccctgatgtctccgcatcggcttggatttattaagggatgcaaatcttgttgagttaatgaaggaattagtagggttgtggcttcacacacagtggaatggaaatggtgtgctttctcagtggcaaccgaaggcctagtgcttaagggcatttagcatcatccaagcagggtaaacttttgttttgttaaaagaaaaatgtgttattcaagttggtgtccccagttgtagctaacacatctggaatgcactaaccaaaatgctgtgctttggagacctgcttttgtcaccgtgggtaaccgttcccgtctggtccagtagcctgtgtttgcctctccacatttgaagcaagcaggatgcaaggtcttcagttttactgaccttgtatgtcttcaagtcttcacaacccagtgccttaaaaatgaaaggccctaaatgtaagggagatggagagaaagatttattttgtagagtctttgggtggaattgtgggtatactgttcccttcacaattgactgagtatggataaccgtacataagcatttgctacaccccaccagccccctccccctcagaaacaccagttccttcccaagggcagctgtgccagactcccctcccgggactgccttcttgtcatcataagcaacaaaagaaataacaggcacatgtcataaaaggggagcaagggccgtgatggtcagataattcactcaagaataaaacatgacacgtgcctcaggaggatctctttcccaaagtgacagcaaggagggcagggcatcggccaccaagcggggactagcaagtgaggaaggggagggcagnccaccgtggtgaggagagagtggctccacgaccccaagggatggccttctcctcccacccggtgaggggaaagactcaccagagggtgatggagacagtatgccggctcaccttggtgaccagccaagatgtctcaagtgacggtgctaggtgttcacccagcctgtccttcagataggagtgccttcacgaaagcgtctcatggaccacaaagcaattatgcactgagtcatcttcagtatttaatgcaaaaatgaagcatcatggaatgaaattcccactgtctgtcatgacaagcttagctgtccattgttttaaattgtgtatttatttttttgaccacttggttctagttgggcctgactccttcagagtgctgcaccccgatagtacaacagcgatggctgaactgttggagtcgatggaaggtgcttgccggagaacacgtgcctttttttttttttttttttttgagatggagttgcactccagcctgggcgacagagcgagactccgtctaaaaaaaaaagcaaaaacaaaccaacaacaaaagcccctgactgtccgtcaagcaggcagcggggatgtagctctctctgccctgggcaagaatagcacttcccgttaaaagccagcagccggcgtcagtccctatcagagccagctagatcatgcactgttgaccactgagcaatctgtgttacactagagttcacagggcattttgagtgtagacgtgagtgcttaaacatatttgggtttctctctcaggttttaaatgtttcaaatgtaattgttgctcatcagtgcagttatcaatgcaattttatattccttgaggggagaaagaggggtcttattgtacatgtccaaggggggtgataagagtattatctgtttaatttaattggaacaaaccattgtcttaacgcagccatggtttgaatttgttatcttgggctgaccggtgcatgtaaatacagtatgctctttggatgtaaatcttagaaatgcagtgtgaatgtaggttatcattaataaaacattaaccccagtctactaaaaaaaaag

SEQ ID NO: 385222 - DNA, 2845 bp, Homo sapiens
gggcgtgcggtgtccgcggcggcgcagggagggggagggaggtaaacaagatggcggcggcgtgtcgggcgcggaagggggaggcggcccggggcgcccgcgagtgaggcgcggggcggcgaagggagcgcgggtggcggcacttgctgccgcggccttggatgggctgggcccccctcgccgctccgcctcctccacacgcgcggcggccgcggcgagggggacgcgccgcccggggcccggcaccttcgggaaccccccggcccggagcctgcggcctgcgccgcctcggccgccgggagccccgtggagcccccgccgccgcgccgccccgcggaccggacgctgagcggagctgttggccgcggcgggaggcctcccggacgcccccagccccccgaacgctcgcccgggccggcgggagtcggcgccccccgggaggtccgctcggtcgtccgcggcggagcgtttgctcctgggacaggcggtgggaccggggcgtcgccggagacgcccccagcgaagttgggctctccaggtgtgggggtcccggggggtagcgacgtcgcggacccggcctgtgggatgggcggcccggagaagactgcgctcggccgtgttcatacttgtccgtgggcctgaggtccccggaggatgacctagcactgaaaagccccggccggcctccccagggtccccgaggacgaagttgaccctgaccgggccgtctcccagttctgaggcccgggtcccactggaactcgcgtctgagccgccgtcccggacccccggtgcccgccggtccgcagaccctgcaccgggcttggactcgcagccgggactgacgtgtagaacaatcgtttctgttggaagaagggtttttcccttccttttggggtttttgttgccttttttttttcttttttctttgtaaaattttggagaagggaagtcggaacacaaggaaggaccgctcacccgcggactcagggctggcggcgggactccaggaccctgggtccagcatggaggtggtggacccgcagcagctgggcatgttcacggagggcgagctgatgtcggtgggtatggacacgttcatccaccgcatcgactccaccgaggtcatctaccagccgcgccgcaagcgggccaagctcatcggcaagtacctgatgggggacctgctgggggaaggctcttacggcaaggtgaaggaggtgctggactcggagacgctgtgcaggagggccgtcaagatcctcaagaagaagaagttgcgaaggatccccaacggggaggccaacgtgaagaaggaaattcaactactgaggaggttacggcacaaaaatgtcatccagctggtggatgtgttatacaacgaagagaagcagaaaatgtatatggtgatggagtactgcgtgtgtggcatgcaggaaatgctggacagcgtgccggagaagcgtttcccagtgtgccaggcccacgggtacttctgtcagctgattgacggcctggagtacctgcatagccagggcattgtgcacaaggacatcaagccggggaacctgctgctcaccaccggtggcaccctcaaaatctccgacctgggcgtggccgaggcactgcacccgttcgcggcggacgacacctgccggaccagccagggctccccggctttccagccgcccgagattgccaacggcctggacaccttctccggcttcaaggtggacatctggtcggctggggtcaccctctacaacatcaccacgggtctgtaccccttcgaaggggacaacatctacaagttgtttgagaacatcgggaaggggagctacgccatcccgggcgactgtggccccccgctctctgacctgctgaaagggatgcttgagtacgaaccggccaagaggttctccatccggcagatccggcagcacagctggttccggaagaaacatcctccggctgaagcaccagtgcccatcccaccgagcccagacaccaaggaccggtggcgcagcatgactgtggtgccgtacttggaggacctgcacggcgcggacgaggacgaggacctcttcgacatcgaggatgacatcatctacactcaggacttcacggtgcccggacaggtcccagaagaggaggccagtcacaatggacagcgccggggcctccccaaggccgtgtgtatgaacggcacagaggcggcgcagctgagcaccaaatccagggcggagggccgggcccccaaccctgcccgcaaggcctgctccgccagcagcaagatccgccggctgtcggcctgcaagcagcagtgaggctggccgcctgcagcccgtgtccaggagccccgccaggtgcccgcgccaggccctcagtcttcctgccggttccgcccgccctcccggagaggtggccgccatgcttctgtgccgaccacgccccaggacctccggagcgccctgcagggccgggcagggggacagcagggaccgggcgcagccctcccccctcggccgcccggcagtgcacgcggcttgttgacttcgcagccccgggcggagccttcccgggcgggcgtgggaggagggaggcggcctccatgcactttatgtggagactactggccccgcccgtggcctcgtgctccgcagggcgcccagcgccgtccggcggccccgccgcagaccagctggcgggtgtggagaccaggctcctgaccccgccatgcatgcagcgccacctggaagccgcgcggccgctttggttttttgtttggttggttccattttctttttttctttttttttttaagaaaaaataaaaggtggatttg

SEQ ID NO: 385223 - DNA, 384 bp, Homo sapiens
caccccaaaagcaagccccattcccattgtgtcactctccatcccctccaccagctcctggccactctgaatccacttcctggctctggattggcttgtcctggatattgcatagaaatgggatcctgtcggccgggcgcggtgactcacgagagcaagagatccagaccatcctggccaacatggtgaaaccccatctctactaaaaatacaaaaattagctgggcgtggttgcgggcacctgtagtcccagcgactcaggggctgagtcaggagaaatcgcttgaacccgggaggcagaggttgcagtgagctgagatcatgccattgcactctggcctggcgacagagtgagactccgtctccaaaaaaaaaaaaacaaga

SEQ ID NO: 385224 - DNA, 2682 bp, Homo sapiens
ggcgcctgccgggccccggcgaccaccttgggggtcgcgggccggctcggggggcgcccagtgcgggccctcgcgggcgccgggcagcgaccagccctgagcggagctgttggccgcggcgggaggcctcccggacgcccccagccccccgaacgctcgcccgggccggcgggagtcggcgccccccgggaggtccgctcggtcgtccgcggcggagcgtttgctcctgggacaggcggtgggaccggggcgtcgccggagacgcccccagcgaagttgggctctccaggtgtgggggtcccggggggtagcgacgtcgcggacccggcctgtgggatgggcggcccggagaagactgcgctcggccgtgttcatacttgtccgtgggcctgaggtccccggaggatgacctagcactgaaaagccccggccggcctccccagggtccccgaggacgaagttgaccctgaccgggccgtctcccagttctgaggcccgggtcccactggaactcgcgtctgagccgccgtcccggacccccggtgcccgccggtccgcagaccctgcaccgggcttggactcgcagccgggactgacgtgtagaacaatcgtttctgttggaagaagggtttttcccttccttttggggtttttgttgccttttttttttcttttttctttgtaaaattttggagaagggaagtcggaacacaaggaaggaccgctcacccgcggactcagggctggcggcgggactccaggaccctgggtccagcatggaggtggtggacccgcagcagctgggcatgttcacggagggcgagctgatgtcggtgggtatggacacgttcatccaccgcatcgactccaccgaggtcatctaccagccgcgccgcaagcgggccaagctcatcggcaagtacctgatgggggacctgctgggggaaggctcttacggcaaggtgaaggaggtgctggactcggagacgctgtgcaggagggccgtcaagatcctcaagaagaagaagttgcgaaggatccccaacggggaggccaacgtgaagaaggaaattcaactactgaggaggttacggcacaaaaatgtcatccagctggtggatgtgttatacaacgaagagaagcagaaaatgtatatggtgatggagtactgcgtgtgtggcatgcaggaaatgctggacagcgtgccggagaagcgtttcccagtgtgccaggcccacgggtacttctgtcagctgattgacggcctggagtacctgcatagccagggcattgtgcacaaggacatcaagccggggaacctgctgctcaccaccggtggcaccctcaaaatctccgacctgggcgtggccgaggtaggcacgtgctagggggggccctggggcgccccctcccgggcactccctgagggctgcacggcaccgccacaggcactgcacccgcactgcacccgttcgcggcggacgacacctgccggaccagccagggctccccggctttccagccgcccgagattgccaacggcctggacaccttctccggcttcaaggtggacatctggtcggctggggtcaccctctacaacatcaccacgggtctgtaccccttcgaaggggacaacatctacaagttgtttgagaacatcgggaaggggagctacgccatcccgggcgactgtggccccccgctctctgacctgctgaaagggatgcttgagtacgaaccggccaagaggttctccatccggcagatccggcagcacagctggttccggaagaaacatcctccggctgaagcaccagtgcccatcccaccgagcccagacaccaaggaccggtggcgcagcatgactgtggtgccgtacttggaggacctgcacggcgcggacgaggacgaggacctcttcgacatcgaggatgacatcatctacactcaggacttcacggtgcccggacaggtcccagaagaggaggccagtcacaatggacagcgccggggcctccccaaggccgtgtgtatgaacggcacagaggcggcgcagctgagcaccaaatccagggcggagggccgggcccccaaccctgcccgcaaggcctgctccgccagcagcaagatccgccggctgtcggcctgcaagcagcagtgaggctggccgcctgcagcccgtgtccaggagccccgccaggtgcccgcgccaggccctcagtcttcctgccggttccgcccgccctcccggagaggtggccgccatgcttctgtgccgaccacgccccaggacctccggagcgccctgcagggccgggcagggggacagcagggaccgggcgcagccctcccccctcggccgcccggcagtgcacgcggcttgttgacttcgcagccccgggcggagccttcccgggcgggcgtgggaggagggaggcggcctccatgcactttatgtggagactactggccccgcccgtggcctcgtgctccgcagggcgcccagcgccgtccggcggccccgccgcagaccagctggcgggtgtggagaccaggctcctgaccccgccatgcatgcagcgccacctggaagccgcgcggccgctttggttttttgtttggttggttccattttctttttttctttttttttttaagaaaaaataaaaggtggatttg

SEQ ID NO: 385225 - DNA, 1641 bp, Homo sapiens
gcttgggcctagctaccatctccctctaatcccaggttctctacactgccctggggttataccagtctggattggcttctggttgagaaatcaaagctgggcgtatgattgacttaacccttcaggtattgttacttgaataagtcaagtgcctgagctctcacccacctatgatctgtcctttcccagacctcgctggtagtccgtggtcaaggagatctaggatctagtcgcattacgctgctgtgcggacgaagcgtgtcccacgtgtgccaggccccacgggtacttctgtcagctgattgacggcctggagtacctgcatagccagggcattgtgcacaaggacatcaagccggggaacctgctgctcaccaccggtggcaccctcaaaatctccgacctgggcgtggccgaggcactgcacccgttcgcggcggacgacacctgccggaccagccagggctccccggctttccagccgcccgagattgccaacggcctggacaccttctccggcttcaaggtggacatctggtcggctggggtcaccctctacaacatcaccacgggtctgtaccccttcgaaggggacaacatctacaagttgtttgagaacatcgggaaggggagctacgccatcccgggcgactgtggccccccgctctctgacctgctgaaagggatgcttgagtacgaaccggccaagaggttctccatccggcagatccggcagcacagctggttccggaagaaacatcctccggctgaagcaccagtgcccatcccaccgagcccagacaccaaggaccggtggcgcagcatgactgtggtgccgtacttggaggacctgcacggcgcggacgaggacgaggacctcttcgacatcgaggatgacatcatctacactcaggacttcacggtgcccggacaggtcccagaagaggaggccagtcacaatggacagcgccggggcctccccaaggccgtgtgtatgaacggcacagaggcggcgcagctgagcaccaaatccagggcggagggccgggcccccaaccctgcccgcaaggcctgctccgccagcagcaagatccgccggctgtcggcctgcaagcagcagtgaggctggccgcctgcagcccgtgtccaggagccccgccaggtgcccgcgccaggccctcagtcttcctgccggttccgcccgccctcccggagaggtggccgccatgcttctgtgccgaccacgccccaggacctccggagcgccctgcagggccgggcagggggacagcagggaccgggcgcagccctcccccctcggccgcccggcagtgcacgcggcttgttgacttcgcagccccgggcggagccttcccgggcgggcgtgggaggagggaggcggcctccatgcactttatgtggagactactggccccgcccgtggcctcgtgctccgcagggcgcccagcgccgtccggcggccccgccgcagaccagctggcgggtgtggagaccaggctcctgaccccgccatgcatgcagcgccacctggaagccgcgcggccgctttggttttttgtttggttggttccattttctttttttctttttttttttaagaaaaaataaaaggtggatttg

SEQ ID NO: 385226 - DNA, 2421 bp, Homo sapiens
  misc_feature (2399)..(2399): n is a, c, g, or t
  misc_feature (2401)..(2401): n is a, c, g, or t
  misc_feature (2413)..(2413): n is a, c, g, or t
  misc_feature (2415)..(2415): n is a, c, g, or t
ggcgcctgccgggccccggcgaccaccttgggggtcgcgggccggctcggggggcgcccagtgcgggccctcgcgggcgccgggcagcgaccagccctgagcggagctgttggccgcggcgggaggcctcccggacgcccccagccccccgaacgctcgcccgggccggcgggagtcggcgccccccgggaggtccgctcggtcgtccgcggcggagcgtttgctcctgggacaggcggtgggaccggggcgtcgccggagacgcccccagcgaagttgggctctccaggtgtgggggtcccggggggtagcgacgtcgcggacccggcctgtgggatgggcggcccggagaagactgcgctcggccgtgttcatacttgtccgtgggcctgaggtccccggaggatgacctagcactgaaaagccccggccggcctccccagggtccccgaggacgaagttgaccctgaccgggccgtctcccagttctgaggcccgggtcccactggaactcgcgtctgagccgccgtcccggacccccggtgcccgccggtccgcagaccctgcaccgggcttggactcgcagccgggactgacgtgtagaacaatcgtttctgttggaagaagggtttttcccttccttttggggtttttgttgccttttttttttcttttttctttgtaaaattttggagaagggaagtcggaacacaaggaaggaccgctcacccgcggactcagggctggcggcgggactccaggaccctgggtccagcatggaggtggtggacccgcagcagctgggcatgttcacggagggcgagctgatgtcggtgggtatggacacgttcatccaccgcatcgactccaccgaggtcatctaccagccgcgccgcaagcgggccaagctcatcggcaagtacctgatgggggacctgctgggggaaggctcttacggcaaggtgaaggaggtgctggactcggagacgctgtgcaggagggccgtcaagatcctcaagaagaagaagttgcgaaggatccccaacggggaggccaacgtgaagaaggaaattcaactactgaggaggttacggcacaaaaatgtcatccagctggtggatgtgttatacaacgaagagaagcagaaaatgtatatggtgatggagtactgcgtgtgtggcatgcaggaaatgctggacagcgtgccggagaagcgtttcccagtgtgccaggcccacgggtacttctgtcagctgattgacggcctggagtacctgcatagccagggcattgtgcacaaggacatcaagccggggaacctgctgctcaccaccggtggcaccctcaaaatctccgacctgggcgtggccgaggcactgcacccgttcgcggcggacgacacctgccggaccagccagggctccccggctttccagccgcccgagattgccaacggcctggacaccttctccggcttcaaggtggacatctggtcggctggggtcaccctctacaacatcaccacgggtctgtaccccttcgaaggggacaacatctacaagttgtttgagaacatcgggaaggggagctacgccatcccgggcgactgtggccccccgctctctgacctgctgaaagggatgcttgagtacgaaccggccaagaggttctccatccggcagatccggcagcacagctggttccggaagaaacatcctccggctgaagcaccagtgcccatcccaccgagcccagacaccaaggaccggtggcgcagcatgactgtggtgccgtacttggaggacctgcacggcgcggacgaggacgaggacctcttcgacatcgaggatgacatcatctacactcaggacttcacggtgcccggacaggtcccagaagaggaggccagtcacaatggacagcgccggggcctccccaaggccgtgtgtatgaacggcacagaggcggcgcagctgagcaccaaatccagggcggagggccgggcccccaaccctgcccgcaaggcctgctccgccagcagcaagatccgccggctgtcggcctgcaagcagcagtgaggctggccgcctgcagcccgtgtccaggagccccgccaggtgcccgcgccaggccctcagtcttcctgccggttccgcccgccctcccggagaggtggccgccatgcttctgtgccgaccacgccccaggacctccggagcgccctgcagggccgggcagggggacagcagggaccgggcgcagccctcccccctcggccgcccggcagtgcacgcggcttgttgacttcgcagccccgggcggagccttcccgggcgggcgtgggaggagggaggcggcctccatgcactttatgtggagactactggcgcggtgggaangngtgttaaaggtnancggggg

SEQ ID NO: 385227 - DNA, 2455 bp, Homo sapiens
ggcgcctgccgggccccggcgaccaccttgggggtcgcgggccggctcggggggcgcccagtgcgggccctcgcgggcgccgggcagcgaccagccctgagcggagctgttggccgcggcgggaggcctcccggacgcccccagccccccgaacgctcgcccgggccggcgggagtcggcgccccccgggaggtccgctcggtcgtccgcggcggagcgtttgctcctgggacaggcggtgggaccggggcgtcgccggagacgcccccagcgaagttgggctctccaggtgtgggggtcccggggggtagcgacgtcgcggacccggcctgtgggatgggcggcccggagaagactgcgctcggccgtgttcatacttgtccgtgggcctgaggtccccggaggatgacctagcactgaaaagccccggccggcctccccagggtccccgaggacgaagttgaccctgaccgggccgtctcccagttctgaggcccgggtcccactggaactcgcgtctgagccgccgtcccggacccccggtgcccgccggtccgcagaccctgcaccgggcttggactcgcagccgggactgacgtgtagaacaatcgtttctgttggaagaagggtttttcccttccttttggggtttttgttgccttttttttttcttttttctttgtaaaattttggagaagggaagtcggaacacaaggaaggaccgctcacccgcggactcagggctggcggcgggactccaggaccctgggtccagcatggaggtggtggacccgcagcagctgggcatgttcacggagggcgagctgatgtcggtgggtatggacacgttcatccaccgcatcgactccaccgaggtcatctaccagccgcgccgcaagcgggccaagctcatcggcaagtacctgatgggggacctgctgggggaaggctcttacggcaaggtgaaggaggtgctggactcggagacgctgtgcaggagggccgtcaagatcctcaagaagaagaagttgcgaaggatccccaacggggaggccaacgtgaagaaggaaattcaactactgaggaggttacggcacaaaaatgtcatccagctggtggatgtgttatacaacgaagagaagcagaaaatgtatatggtgatggagtactgcgtgtgtggcatgcaggaaatgctggacagcgtgccggagaagcgtttcccagtgtgccaggcccacgggtacttctgtcagctgattgacggcctggagtacctgcatagccagggcattgtgcacaaggacatcaagccggggaacctgctgctcaccaccggtggcaccctcaaaatctccgacctgggcgtggccgaggcactgcacccgttcgcggcggacgacacctgccggaccagccagggctccccggctttccagccgcccgagattgccaacggcctggacaccttctccggcttcaaggtggacatctggtcggctggggtcaccctctacaacatcaccacgggtctgtaccccttcgaaggggacaacatctacaagttgtttgagaacatcgggaaggggagctacgccatcccgggcgactgtggccccccgctctctgacctgctgaaagggatgcttgagtacgaaccggccaagaggttctccatccggcagatccggcagcacagctggttccggaagaaacatcctccggctgaagcaccagtgcccatcccaccgagcccagacaccaaggaccggtggcgcagcatgactgtggtgccgtacttggaggacctgcacggcgcggacgaggacgaggacctcttcgacatcgaggatgacatcatctacactcaggacttcacggtgcccggacaggtcccagaagaggaggccagtcacaatggacagcgccggggcctccccaaggccgtgtgtatgaacggcacagaggcggcgcagctgagcaccaaatccagggcggagggccgggcccccaaccctgcccgcaaggcctgctccgccagcagcaagatccgccggctcacgccccaggacctccggagcgccctgcagggccgggcagggggacagcagggaccgggcgcagccctcccccctcggccgcccggcagtgcacgcggcttgttgacttcgcagccccgggcggagccttcccgggcgggcgtgggaggagggaggcggcctccatgcactttatgtggagactactggccccgcccgtggcctcgtgctccgcagggcgcccagcgccgtccggcggccccgccgcagaccagctggcgggtgtggagaccaggctcctgaccccgccatgcatgcagcgccacctggaagccgcgcggccgctttggttttttgtttggttggttccattttctttttttctttttttttttaagaaaaaataaaaggtggatttg

SEQ ID NO: 385228 - DNA, 2123 bp, Homo sapiens
ggcgcctgccgggccccggcgaccaccttgggggtcgcgggccggctcggggggcgcccagtgcgggccctcgcgggcgccgggcagcgaccagccctgagcggagctgttggccgcggcgggaggcctcccggacgcccccagccccccgaacgctcgcccgggccggcgggagtcggcgccccccgggaggtccgctcggtcgtccgcggcggagcgtttgctcctgggacaggcggtgggaccggggcgtcgccggagacgcccccagcgaagttgggctctccaggtgtgggggtcccggggggtagcgacgtcgcggacccggcctgtgggatgggcggcccggagaagactgcgctcggccgtgttcatacttgtccgtgggcctgaggtccccggaggatgacctagcactgaaaagccccggccggcctccccagggtccccgaggacgaagttgaccctgaccgggccgtctcccagttctgaggcccgggtcccactggaactcgcgtctgagccgccgtcccggacccccggtgcccgccggtccgcagaccctgcaccgggcttggactcgcagccgggactgacgtgtagaacaatcgtttctgttggaagaagggtttttcccttccttttggggtttttgttgccttttttttttcttttttctttgtaaaattttggagaagggaagtcggaacacaaggaaggaccgctcacccgcggactcagggctggcggcgggactccaggaccctgggtccagcatggaggtggtggacccgcagcagctgggcatgttcacggagggcgagctgatgtcggtgggtatggacacgttcatccaccgcatcgactccaccgaggtcatctaccagccgcgccgcaagcgggccaagctcatcggcaagtacctgatgggggacctgctgggggaaggctcttacggcaaggtgaaggaggtgctggactcggagacgctgtgcaggagggccgtcaagatcctcaagaagaagaagttgcgaaggatccccaacggggaggccaacgtgaagaaggaaattcaactactgaggaggttacggcacaaaaatgtcatccagctggtggatgtgttatacaacgaagagaagcagaaaatgtatatggtgatggagtactgcgtgtgtggcatgcaggaaatgctggacagcgtgccggagaagcgtttcccagtgtgccaggcccacgggtacttctgtcagctgattgacggcctggagtacctgcatagccagggcattgtgcacaaggacatcaagccggggaacctgctgctcaccaccggtggcaccctcaaaatctccgacctgggcgtggccgaggcactgcacccgttcgcggcggacgacacctgccggaccagccagggctccccggctttccagccgcccgagattgccaacggcctggacaccttctccggcttcaaggtggacatctggtcggctggggtcaccctctacaacatcaccacgggtctgtaccccttcgaaggggacaacatctacaagttgtttgagaacatcgggaaggggagctacgccatcccgggcgactgtggccccccgctctctgacctgctgaaagggatgcttgagtacgaaccggccaagaggttctccatccggcagatccggcagcacagctggttccggaagaaacatcctccggctgaagcaccagtgcccatcccaccgagcccagacaccaaggaccggtggcgcagcatgactgtggtgccgtacttggaggacctgcacggcgcggacgaggacgaggacctcttcgacatcgaggatgacatcatctacactcaggacttcacggtgcccggtggcgaggaggcgtctgaggcagggcttagagcggagcgcggcttgcagaagagcgagggctcagacctttcaggagaggaacgctctcggccggcgccgcagtagtgcctgaggaggagctcagggccttagcgtaggggcggcccacattggcagccagcccctccccgccatgctcccggcttggctgtgtttggccagggctgggccgtgtcataaagagttttgcagtgtatc

SEQ ID NO: 385229 - DNA, 1777 bp, Homo sapiens
ggcgcctgccgggccccggcgaccaccttgggggtcgcgggccggctcggggggcgcccagtgcgggccctcgcgggcgccgggcagcgaccagccctgagcggagctgttggccgcggcgggaggcctcccggacgcccccagccccccgaacgctcgcccgggccggcgggagtcggcgccccccgggaggtccgctcggtcgtccgcggcggagcgtttgctcctgggacaggcggtgggaccggggcgtcgccggagacgcccccagcgaagttgggctctccaggtgtgggggtcccggggggtagcgacgtcgcggacccggcctgtgggatgggcggcccggagaagactgcgctcggccgtgttcatacttgtccgtgggcctgaggtccccggaggatgacctagcactgaaaagccccggccggcctccccagggtccccgaggacgaagttgaccctgaccgggccgtctcccagttctgaggcccgggtcccactggaactcgcgtctgagccgccgtcccggacccccggtgcccgccggtccgcagaccctgcaccgggcttggactcgcagccgggactgacgtgtagaacaatcgtttctgttggaagaagggtttttcccttccttttggggtttttgttgccttttttttttcttttttctttgtaaaattttggagaagggaagtcggaacacaaggaaggaccgctcacccgcggactcagggctggcggcgggactccaggaccctgggtccagcatggaggtggtggacccgcagcagctgggcatgttcacggagggcgagctgatgtcggtgggtatggacacgttcatccaccgcatcgactccaccgaggtcatctaccagccgcgccgcaagcgggccaagctcatcggcaagtacctgatgggggacctgctgggggaaggctcttacggcaaggtgaaggaggtgctggactcggagacgctgtgcaggagggccgtcaagatcctcaagaagaagaagttgcgaaggatccccaacggggaggccaacgtgaagaaggaaattcaactactgaggaggttacggcacaaaaatgtcatccagctggtggatgtgttatacaacgaagagaagcagaaaatgtatatggtgatggagtactgcgtgtgtggcatgcaggaaatgctggacagcgtgccggagaagcgtttcccagtgtgccaggcccacgggtacttctgtcagctgattgacggcctggagtacctgcatagccagggcattgtgcacaaggacatcaagccggggaacctgctgctcaccaccggtggcaccctcaaaatctccgacctgggcgtggccgaggcactgcacccgttcgcggcggacgacacctgccagggccgggcagggggacagcagggaccgggcgcagccctcccccctcggccgcccggcagtgcacgcggcttgttgacttcgcagccccgggcggagccttcccgggcgggcgtgggaggagggaggcggcctccatgcactttatgtggagactactggccccgcccgtggcctcgtgctccgcagggcgcccagcgccgtccggcggccccgccgcagaccagctggcgggtgtggagaccaggctcctgaccccgccatgcatgcagcgccacctggaagccgcgcggccgctttggttttttgtttggttggttccattttctttttttctttttttttttaagaaaaaataaaaggtggatttg

SEQ ID NO: 385230 - DNA, 1671 bp, Homo sapiens
ggcgcctgccgggccccggcgaccaccttgggggtcgcgggccggctcggggggcgcccagtgcgggccctcgcgggcgccgggcagcgaccagccctgagcggagctgttggccgcggcgggaggcctcccggacgcccccagccccccgaacgctcgcccgggccggcgggagtcggcgccccccgggaggtccgctcggtcgtccgcggcggagcgtttgctcctgggacaggcggtgggaccggggcgtcgccggagacgcccccagcgaagttgggctctccaggtgtgggggtcccggggggtagcgacgtcgcggacccggcctgtgggatgggcggcccggagaagactgcgctcggccgtgttcatacttgtccgtgggcctgaggtccccggaggatgacctagcactgaaaagccccggccggcctccccagggtccccgaggacgaagttgaccctgaccgggccgtctcccagttctgaggcccgggtcccactggaactcgcgtctgagccgccgtcccggacccccggtgcccgccggtccgcagaccctgcaccgggcttggactcgcagccgggactgacgtgtagaacaatcgtttctgttggaagaagggtttttcccttccttttggggtttttgttgccttttttttttcttttttctttgtaaaattttggagaagggaagtcggaacacaaggaaggaccgctcacccgcggactcagggctggcggcgggactccaggaccctgggtccagcatggaggtggtggacccgcagcagctgggcatgttcacggagggcgagctgatgtcggtgggtatggacacgttcatccaccgcatcgactccaccgaggtcatctaccagccgcgccgcaagcgggccaagctcatcggcaagtacctgatgggggacctgctgggggaaggctcttacggcaaggtgaaggaggtgctggactcggagacgctgtgcaggagggccgtcaagatcctcaagaagaagaagttgcgaaggatccccaacggggaggccaacgtgaagaaggaaattcaactactgaggaggttacggcacaaaaatgtcatccagctggtggatgtgttatacaacgaagagaagcagaaaatgtatatggtgatggagtactgcgtgtgtggcatgcaggaaatgctggacagcgtgccggagaagcgtttcccagtgtgccaggcccacgggtacttctgtcagctgattgacggcctggagtacctgcatagccagggcattgtgcacaaggacatcaagccggggaacctgctgctcaccaccggtggcaccctcaaaatctccgacctgggcgtggccgaggtaggcacgtgctagggggggccctggggcgccccctcccgggcactccctgagggctgcacggcaccgccacaggcactgcacccgcagaccagctggcgggtgtggagaccaggctcctgaccccgccatgcatgcagcgccacctggaagccgcgcggccgctttggttttttgtttggttggttccattttctttttttctttttttttttaagaaaaaataaaaggtggatttgagctgtggctgtgaggggtgtttgggagctgctgggtggcaggggggctgtggggtcgg

SEQ ID NO: 385231 - DNA, 1463 bp, Homo sapiens
ggcgcctgccgggccccggcgaccaccttgggggtcgcgggccggctcggggggcgcccagtgcgggccctcgcgggcgccgggcagcgaccagccctgagcggagctgttggccgcggcgggaggcctcccggacgcccccagccccccgaacgctcgcccgggccggcgggagtcggcgccccccgggaggtccgctcggtcgtccgcggcggagcgtttgctcctgggacaggcggtgggaccggggcgtcgccggagacgcccccagcgaagttgggctctccaggtgtgggggtcccggggggtagcgacgtcgcggacccggcctgtgggatgggcggcccggagaagactgcgctcggccgtgttcatacttgtccgtgggcctgaggtccccggaggatgacctagcactgaaaagccccggccggcctccccagggtccccgaggacgaagttgaccctgaccgggccgtctcccagttctgaggcccgggtcccactggaactcgcgtctgagccgccgtcccggacccccggtgcccgccggtccgcagaccctgcaccgggcttggactcgcagccgggactgacgtgtagaacaatcgtttctgttggaagaagggtttttcccttccttttggggtttttgttgccttttttttttcttttttctttgtaaaattttggagaagggaagtcggaacacaaggaaggaccgctcacccgcggactcagggctggcggcgggactccaggaccctgggtccagcatggaggtggtggacccgcagcagctgggcatgttcacggagggcgagctgatgtcggtgggtatggacacgttcatccaccgcatcgactccaccgaggtcatctaccagccgcgccgcaagcgggccaagctcatcggcaagtacctgatgggggacctgctgggggaaggctcttacggcaaggtgaaggaggtgctggactcggagacgctgtgcaggagggccgtcaagatcctcaagaagaagaagttgcgaaggatccccaacggggaggccaacgtgaagaagtaagtatggcttgctggggtcggggccgggccgggccagtcacggtgctgatggttctgtcttccttccttctctcctccctccctcccttacttcctcttaacaccctgagctggacccgtctggcgcctgtgtcctccgtgccagggagagcgtggttgggggcctgcgttacggactttcactcaggcaaggccagttgtcgcagcggggcgtgcgtttgcatgggctcttggactccagttaaaatgccctggtagcgaaaccctcctgagaagggagcggcccccaatcccctaagactagccccttggctcccccagctgtccaaggagcagaggcgcccagtggaatcagcctgtgtttgtttgggccccgagagtttgtgtgcggccg

SEQ ID NO: 385232 - DNA, 2596 bp, Homo sapiens
ggcgcctgccgggccccggcgaccaccttgggggtcgcgggccggctcggggggcgcccagtgcgggccctcgcgggcgccgggcagcgaccagccctgagcggagctgttggccgcggcgggaggcctcccggacgcccccagccccccgaacgctcgcccgggccggcgggagtcggcgccccccgggaggtccgctcggtcgtccgcggcggagcgtttgctcctgggacaggcggtgggaccggggcgtcgccggagacgcccccagcgaagttgggctctccaggtgtgggggtcccggggggtagcgacgtcgcggacccggcctgtgggatgggcggcccggagaagactgcgctcggccgtgttcatacttgtccgtgggcctgaggtccccggaggatgacctagcactgaaaagccccggccggcctccccagggtccccgaggacgaagttgaccctgaccgggccgtctcccagttctgaggcccgggtcccactggaactcgcgtctgagccgccgtcccggacccccggtgcccgccggtccgcagaccctgcaccgggcttggactcgcagccgggactgacgtgtagaacaatcgtttctgttggaagaagggtttttcccttccttttggggtttttgttgccttttttttttcttttttctttgtaaaattttggagaagggaagtcggaacacaaggaaggaccgctcacccgcggactcagggctggcggcgggactccaggaccctgggtccagcatggaggtggtggacccgcagcagctgggcatgttcacggagggcgagctgatgtcggtgggtatggacacgttcatccaccgcatcgactccaccgaggtcatctaccagccgcgccgcaagcgggccaagctcatcggcaagtacctgatgggggacctgctgggggaaggctcttacggcaaggtgaaggaggtgctggactcggagacgctgtgcaggagggccgtcaagatcctcaagaagaagaagttgcgaaggatccccaacggggaggccaacgtgaagaaggaaattcaactactgaggaggttacggcacaaaaatgtcatccagctggtggatgtgttatacaacgaagagaagcagaaaatgtatatggtgatggagtactgcgtgtgtggcatgcaggaaatgctggacagcgtgccggagaagcgtttcccagtgtgccaggcccacgggtacttctgtcagctgattgacggcctggagtacctgcatagccagggcattgtgcacaaggacatcaagccggggaacctgctgctcaccaccggtggcaccctcaaaatctccgacctgggcgtggccgaggcactgcacccgttcgcggcggacgacacctgccggaccagccagggctccccggctttccagccgcccgagattgccaacggcctggacaccttctccggcttcaaggtggacatctggtcggctggggtcaccctctacaacatcaccacgggtctgtaccccttcgaaggggacaacatctacaagttgtttgagaacatcgggaaggggagctacgccatcccgggcgactgtggccccccgctctctgacctgctgaaagggatgcttgagtacgaaccggccaagaggttctccatccggcagatccggcagcacagctggttccggaagaaacatcctccggctgaagcaccagtgcccatcccaccgagcccagacaccaaggaccggtggcgcagcatgactgtggtgccgtacttggaggacctgcacggcgcggacgaggacgaggacctcttcgacatcgaggatgacatcatctacactcaggacttcacggtgcccggacaggtcccagaagaggaggccagtcacaatggacagcgccggggcctccccaaggccgtgtgtatgaacggcacagaggcggcgcagctgagcaccaaatccagggcggagggccgggcccccaaccctgcccgcaaggcctgctccgccagcagcaagatccgccggctgtcggcctgcaagcagcagtgaggctggccgcctgcagcccgtgtccaggagccccgccaggtgcccgcgccaggccctcagtcttcctgccggttccgcccgccctcccggagaggtggccgccatgcttctgtgccgaccacgccccaggacctccggagcgccctgcagggccgggcagggggacagcagggaccgggcgcagccctcccccctcggccgcccggcagtgcacgcggcttgttgacttcgcagccccgggcggagccttcccgggcgggcgtgggaggagggaggcggcctccatgcactttatgtggagactactggccccgcccgtggcctcgtgctccgcagggcgcccagcgccgtccggcggccccgccgcagaccagctggcgggtgtggagaccaggctcctgaccccgccatgcatgcagcgccacctggaagccgcgcggccgctttggttttttgtttggttggttccattttctttttttctttttttttttaagaaaaaataaaaggtggatttg

SEQ ID NO: 385233 - DNA, 2452 bp, Homo sapiens
gggcgtgcggtgtccgcggcggcgcagggagggggagggaggtaaacaagatggcggcggcgtgtcgggcgcggaagggggaggcggcccggggcgcccgcgagtgaggcgccggagacgcccccagcgaagttgggctctccaggtgtgggggtcccggggggtagcgacgtcgcggacccggcctgtgggatgggcggcccggagaagactgcgctcggccgtgttcatacttgtccgtgggcctgaggtccccggaggatgacctagcactgaaaagccccggccggcctccccagggtccccgaggacgaagttgaccctgaccgggccgtctcccagttctgaggcccgggtcccactggaactcgcgtctgagccgccgtcccggacccccggtgcccgccggtccgcagaccctgcaccgggcttggactcgcagccgggactgacgtgtagaacaatcgtttctgttggaagaagggtttttcccttccttttggggtttttgttgccttttttttttcttttttctttgtaaaattttggagaagggaagtcggaacacaaggaaggaccgctcacccgcggactcagggctggcggcgggactccaggaccctgggtccagcatggaggtggtggacccgcagcagctgggcatgttcacggagggcgagctgatgtcggtgggtatggacacgttcatccaccgcatcgactccaccgaggtcatctaccagccgcgccgcaagcgggccaagctcatcggcaagtacctgatgggggacctgctgggggaaggctcttacggcaaggtgaaggaggtgctggactcggagacgctgtgcaggagggccgtcaagatcctcaagaagaagaagttgcgaaggatccccaacggggaggccaacgtgaagaaggaaattcaactactgaggaggttacggcacaaaaatgtcatccagctggtggatgtgttatacaacgaagagaagcagaaaatgtatatggtgatggagtactgcgtgtgtggcatgcaggaaatgctggacagcgtgccggagaagcgtttcccagtgtgccaggcccacgggtacttctgtcagctgattgacggcctggagtacctgcatagccagggcattgtgcacaaggacatcaagccggggaacctgctgctcaccaccggtggcaccctcaaaatctccgacctgggcgtggccgaggcactgcacccgttcgcggcggacgacacctgccggaccagccagggctccccggctttccagccgcccgagattgccaacggcctggacaccttctccggcttcaaggtggacatctggtcggctggggtcaccctctacaacatcaccacgggtctgtaccccttcgaaggggacaacatctacaagttgtttgagaacatcgggaaggggagctacgccatcccgggcgactgtggccccccgctctctgacctgctgaaagggatgcttgagtacgaaccggccaagaggttctccatccggcagatccggcagcacagctggttccggaagaaacatcctccggctgaagcaccagtgcccatcccaccgagcccagacaccaaggaccggtggcgcagcatgactgtggtgccgtacttggaggacctgcacggcgcggacgaggacgaggacctcttcgacatcgaggatgacatcatctacactcaggacttcacggtgcccggacaggtcccagaagaggaggccagtcacaatggacagcgccggggcctccccaaggccgtgtgtatgaacggcacagaggcggcgcagctgagcaccaaatccagggcggagggccgggcccccaaccctgcccgcaaggcctgctccgccagcagcaagatccgccggctgtcggcctgcaagcagcagtgaggctggccgcctgcagcccgtgtccaggagccccgccaggtgcccgcgccaggccctcagtcttcctgccggttccgcccgccctcccggagaggtggccgccatgcttctgtgccgaccacgccccaggacctccggagcgccctgcagggccgggcagggggacagcagggaccgggcgcagccctcccccctcggccgcccggcagtgcacgcggcttgttgacttcgcagccccgggcggagccttcccgggcgggcgtgggaggagggaggcggcctccatgcactttatgtggagactactggccccgcccgtggcctcgtgctccgcagggcgcccagcgccgtccggcggccccgccgcagaccagctggcgggtgtggagaccaggctcctgaccccgccatgcatgcagcgccacctggaagccgcgcggccgctttggttttttgtttggttggttccattttctttttttctttttttttttaagaaaaaataaaaggtggatttg

SEQ ID NO: 385234 - DNA, 2655 bp, Homo sapiens
ggcgcctgccgggccccggcgaccaccttgggggtcgcgggccggctcggggggcgcccagtgcgggccctcgcgggcgccgggcagcgaccagccctgagcggagctgttggccgcggcgggaggcctcccggacgcccccagccccccgaacgctcgcccgggccggcgggagtcggcgccccccgggaggtccgctcggtcgtccgcggcggagcgtttgctcctgggacaggcggtgggaccggggcgtcgccggagacgcccccagcgaagttgggctctccaggtgtgggggtcccggggggtagcgacgtcgcggacccggcctgtgggatgggcggcccggagaagactgcgctcggccgtgttcatacttgtccgtgggcctgaggtccccggaggatgacctagcactgaaaagccccggccggcctccccagggtccccgaggacgaagttgaccctgaccgggccgtctcccagttctgaggcccgggtcccactggaactcgcgtctgagccgccgtcccggacccccggtgcccgccggtccgcagaccctgcaccgggcttggactcgcagccgggactgacgtgtagaacaatcgtttctgttggaagaagggtttttcccttccttttggggtttttgttgccttttttttttcttttttctttgtaaaattttggagaagggaagtcggaacacaaggaaggaccgctcacccgcggactcagggctggcggcgggactccaggaccctgggtccagcatggaggtggtggacccgcagcagctgggcatgttcacggagggcgagctgatgtcggtgggtatggacacgttcatccaccgcatcgactccaccgaggtcatctaccagccgcgccgcaagcgggccaagctcatcggcaagtacctgatgggggacctgctgggggaaggctcttacggcaaggtgaaggaggtgctggactcggagacgctgtgcaggagggccgtcaagatcctcaagaagaagaagttgcgaaggatccccaacggggaggccaacgtgaagaaggaaattcaactactgaggaggttacggcacaaaaatgtcatccagctggtggatgtgttatacaacgaagagaagcagaaaatgtatatggtgatggagtactgcgtgtgtggcatgcaggaaatgctggacagcgtgccggagaagcgtttcccagtgtgccaggcccacgggtacttctgtcagctgattgacggcctggagtacctgcatagccagggcattgtgcacaaggacatcaagccggggaacctgctgctcaccaccggtggcaccctcaaaatctccgacctgggcgtggccgaggcactgcacccgttcgcggcggacgacacctgccggaccagccagggctccccggctttccagccgcccgagattgccaacggcctggacaccttctccggcttcaaggtggacatctggtcggctggggtcaccctctacaacatcaccacgggtctgtaccccttcgaaggggacaacatctacaagttgtttgagaacatcgggaaggggagctacgccatcccgggcgactgtggccccccgctctctgacctgctgaaagggatgcttgagtacgaaccggccaagaggttctccatccggcagatccggcagcacagctggttccggaagaaacatcctccggctgaagcaccagtgcccatcccaccgagcccagacaccaaggaccggtggcgcagcatgactgtggtgccgtacttggaggacctgcacggcgcggacgaggacgaggacctcttcgacatcgaggatgacatcatctacactcaggacttcacggtgcccggacaggtcccagaagaggaggccagtcacaatggacagcgccggggcctccccaaggccgtgtgtatgaacggcacagaggcggcgcagctgagcaccaaatccagggcggagggccgggcccccaaccctgcccgcaaggcctgctccgccagcagcaagatccgccggctgtcggcctgcaagcagcagtgaggctggccgcctgcagcccgtgtccaggagccccgccaggtgcccgcgccaggccctcagtcttcctgccggttccgcccgccctcccggagaggtggccgccatgcttctgtgccgaccacgccccaggacctccggagcgccctgcagggccgggcagggggacagcagggaccgggcgcagccctcccccctcggccgcccggcagtgcacgcggcttgttgacttcgcagccccgggcggagccttcccgggcgggcgtgggaggagggaggcggcctccatgcactttatgtggagactactggccccgcccgtggcctcgtgctccgcagggcgcccagcgccgtccggcggccccgccgcagaccagctggcgggtgtggagaccaggctcctgaccccgccatgcatgcagcgccacctggaagccgcgcggccgctttggttttttgtttggttggttccattttctttttttctttttttttttaagaaaaaataaaaggtggatttgagctgtggctgtgaggggtgtttgggagctgctgggtggcaggggggctgtggggtcgg

SEQ ID NO: 385235 - DNA, 2422 bp, Homo sapiens
ggcgcctgccgggccccggcgaccaccttgggggtcgcgggccggctcggggggcgcccagtgcgggccctcgcgggcgccgggcagcgaccagccctgagcggagctgttggccgcggcgggaggcctcccggacgcccccagccccccgaacgctcgcccgggccggcgggagtcggcgccccccgggaggtccgctcggtcgtccgcggcggagcgtttgctcctgggacaggcggtgggaccggggcgtcgccggagacgcccccagcgaagttgggctctccaggtgtgggggtcccggggggtagcgacgtcgcggacccggcctgtgggatgggcggcccggagaagactgcgctcggccgtgttcatacttgtccgtgggcctgaggtccccggaggatgacctagcactgaaaagccccggccggcctccccagggtccccgaggacgaagttgaccctgaccgggccgtctcccagttctgaggcccgggtcccactggaactcgcgtctgagccgccgtcccggacccccggtgcccgccggtccgcagaccctgcaccgggcttggactcgcagccgggactgacgtgtagaacaatcgtttctgttggaagaagggtttttcccttccttttggggtttttgttgccttttttttttcttttttctttgtaaaattttggagaagggaagtcggaacacaaggaaggaccgctcacccgcggactcagggctggcggcgggactccaggaccctgggtccagcatggaggtggtggacccgcagcagctgggcatgttcacggagggcgagctgatgtcggtgggtatggacacgttcatccaccgcatcgactccaccgaggtcatctaccagccgcgccgcaagcgggccaagctcatcggcaagtacctgatgggggacctgctgggggaaggctcttacggcaaggtgaaggaggtgctggactcggagacgctgtgcaggagggccgtcaagatcctcaagaagaagaagttgcgaaggatccccaacggggaggccaacgtgaagaagtacttctgtcagctgattgacggcctggagtacctgcatagccagggcattgtgcacaaggacatcaagccggggaacctgctgctcaccaccggtggcaccctcaaaatctccgacctgggcgtggccgaggcactgcacccgttcgcggcggacgacacctgccggaccagccagggctccccggctttccagccgcccgagattgccaacggcctggacaccttctccggcttcaaggtggacatctggtcggctggggtcaccctctacaacatcaccacgggtctgtaccccttcgaaggggacaacatctacaagttgtttgagaacatcgggaaggggagctacgccatcccgggcgactgtggccccccgctctctgacctgctgaaagggatgcttgagtacgaaccggccaagaggttctccatccggcagatccggcagcacagctggttccggaagaaacatcctccggctgaagcaccagtgcccatcccaccgagcccagacaccaaggaccggtggcgcagcatgactgtggtgccgtacttggaggacctgcacggcgcggacgaggacgaggacctcttcgacatcgaggatgacatcatctacactcaggacttcacggtgcccggacaggtcccagaagaggaggccagtcacaatggacagcgccggggcctccccaaggccgtgtgtatgaacggcacagaggcggcgcagctgagcaccaaatccagggcggagggccgggcccccaaccctgcccgcaaggcctgctccgccagcagcaagatccgccggctgtcggcctgcaagcagcagtgaggctggccgcctgcagcccgtgtccaggagccccgccaggtgcccgcgccaggccctcagtcttcctgccggttccgcccgccctcccggagaggtggccgccatgcttctgtgccgaccacgccccaggacctccggagcgccctgcagggccgggcagggggacagcagggaccgggcgcagccctcccccctcggccgcccggcagtgcacgcggcttgttgacttcgcagccccgggcggagccttcccgggcgggcgtgggaggagggaggcggcctccatgcactttatgtggagactactggccccgcccgtggcctcgtgctccgcagggcgcccagcgccgtccggcggccccgccgcagaccagctggcgggtgtggagaccaggctcctgaccccgccatgcatgcagcgccacctggaagccgcgcggccgctttggttttttgtttggttggttccattttctttttttctttttttttttaagaaaaaataaaaggtggatttg

SEQ ID NO: 385236 - DNA, 2129 bp, Homo sapiens
ggcaacagcaaagcatcacgctgagcgccgggaccttctgagtgcaggcggtgggcgaagccccgagtcacacacacccacgacgccggccctgctcccacagcggccctctggggtagcgactggtattacctgcatttcacgagggaggaaactgaggcacgaactgttcagaagctgccctgaggtcaccaagtgagctaggaagaggcgtgggctcgatctctgccacatccacctcgggaaaccacaaggtcctcctaaatgtcttcccagccccttcgagagaattgtggaagtggggttgccagatcaaacacaagacacccagttaaaattcaactgtaggcaaggattcagggacatctcagagccgctggggtctcgtcggtaaagtggtggtggacggcatggaggaactttagccctggaccagaaactttaggtcagtctatgtcagccattgttgctatcagccttcaggtcgtctgggctgggaggtctcctccctcttcctccaggcaccagtgggagcaggcagtcacaccttcctgtgagtgagaaccatagcagaaccttcaaagcacctctcaagtcggggaaattcaactactgaggaggttacggcacaaaaatgtcatccagctggtggatgtgttatacaacgaagagaagcagaaaatgtatatggtgatggagtactgcgtgtgtggcatgcaggaaatgctggacagcgtgccggagaagcgtttcccagtgtgccaggcccacgggtacttctgtcagctgattgacggcctggagtacctgcatagccagggcattgtgcacaaggacatcaagccggggaacctgctgctcaccaccggtggcaccctcaaaatctccgacctgggcgtggccgaggcactgcacccgttcgcggcggacgacacctgccggaccagccagggctccccggctttccagccgcccgagattgccaacggcctggacaccttctccggcttcaaggtggacatctggtcggctggggtcaccctctacaacatcaccacgggtctgtaccccttcgaaggggacaacatctacaagttgtttgagaacatcgggaaggggagctacgccatcccgggcgactgtggccccccgctctctgacctgctgaaagggatgcttgagtacgaaccggccaagaggttctccatccggcagatccggcagcacagctggttccggaagaaacatcctccggctgaagcaccagtgcccatcccaccgagcccagacaccaaggaccggtggcgcagcatgactgtggtgccgtacttggaggacctgcacggcgcggacgaggacgaggacctcttcgacatcgaggatgacatcatctacactcaggacttcacggtgcccggacaggtcccagaagaggaggccagtcacaatggacagcgccggggcctccccaaggccgtgtgtatgaacggcacagaggcggcgcagctgagcaccaaatccagggcggagggccgggcccccaaccctgcccgcaaggcctgctccgccagcagcaagatccgccggctgtcggcctgcaagcagcagtgaggctggccgcctgcagcccgtgtccaggagccccgccaggtgcccgcgccaggccctcagtcttcctgccggttccgcccgccctcccggagaggtggccgccatgcttctgtgccgaccacgccccaggacctccggagcgccctgcagggccgggcagggggacagcagggaccgggcgcagccctcccccctcggccgcccggcagtgcacgcggcttgttgacttcgcagccccgggcggagccttcccgggcgggcgtgggaggagggaggcggcctccatgcactttatgtggagactactggccccgcccgtggcctcgtgctccgcagggcgcccagcgccgtccggcggccccgccgcagaccagctggcgggtgtggagaccaggctcctgaccccgccatgcatgcagcgccacctggaagccgcgcggccgctttggttttttgtttggttggttccattttctttttttctttttttttttaagaaaaaataaaaggtggatttg

SEQ ID NO: 385237 - DNA, 2508 bp, Homo sapiens
ggcgcctgccgggccccggcgaccaccttgggggtcgcgggccggctcggggggcgcccagtgcgggccctcgcgggcgccgggcagcgaccagccctgagcggagctgttggccgcggcgggaggcctcccggacgcccccagccccccgaacgctcgcccgggccggcgggagtcggcgccccccgggaggtccgctcggtcgtccgcggcggagcgtttgctcctgggacaggcggtgggaccggggcgtcgccggagacgcccccagcgaagttgggctctccaggtgtgggggtcccggggggtagcgacgtcgcggacccggcctgtgggatgggcggcccggagaagactgcgctcggccgtgttcatacttgtccgtgggcctgaggtccccggaggatgacctagcactgaaaagccccggccggcctccccagggtccccgaggacgaagttgaccctgaccgggccgtctcccagttctgaggcccgggtcccactggaactcgcgtctgagccgccgtcccggacccccggtgcccgccggtccgcagaccctgcaccgggcttggactcgcagccgggactgacgtgtagaacaatcgtttctgttggaagaagggtttttcccttccttttggggtttttgttgccttttttttttcttttttctttgtaaaattttggagaagggaagtcggaacacaaggaaggaccgctcacccgcggactcagggctggcggcgggactccaggaccctgggtccagcatggaggtggtggacccgcagcagctgggcatgttcacggagggcgagctgatgtcggtgggtatggacacgttcatccaccgcatcgactccaccgaggtcatctaccagccgcgccgcaagcgggccaagctcatcggcaagtacctgatgggggacctgctgggggaaggctcttacggcaaggtgaaggaggtgctggactcggagacgctgtgcaggagggccgtcaagatcctcaagaagaagaagttgcgaaggatccccaacggggaggccaacgtgaagaaggaaattcaactactgaggaggttacggcacaaaaatgtcatccagctggtggatgtgttatacaacgaagagaagcagaaaatgtatatggtgatggagtactgcgtgtgtggcatgcaggaaatgctggacagcgtgccggagaagcgtttcccagtgtgccaggcccacgggtacttctgtcagctgattgacggcctggagtacctgcatagccagggcattgtgcacaaggacatcaagccggggaacctgctgctcaccaccggtggcaccctcaaaatctccgacctgggcgtggccgaggcactgcacccgttcgcggcggacgacacctgccggaccagccagggctccccggctttccagccgcccgagattgccaacggcctggacaccttctccggcttcaaggtggacatctggtcggctggggtcaccctctacaacatcaccacgggtctgtaccccttcgaaggggacaacatctacaagttgtttgagaacatcgggaaggggagctacgccatcccgggcgactgtggccccccgctctctgacctgctgaaagggatgcttgagtacgaaccggccaagaggttctccatccggcagatccggcagcacagctggttccggaagaaacatcctccggctgaagcaccagtgcccatcccaccgagcccagacaccaaggaccggtggcgcagcatgactgtggtgccgtacttggaggacctgcacggcgcggacgaggacgaggacctcttcgacatcgaggatgacatcatctacactcaggacttcacggtgcccggacaggtcccagaagaggaggccagtcacaatggacagcgccggggcctccccaaggccgtgtgtatgaacggcacagaggcggcgcagctgagcaccaaatccagggcggagggccgggcccccaaccctgcccgcaaggcctgctccgccagcagcaagatccgccggctgtcggcctgcaagcagcagtgaggctggccgcctgcagcccgtgtccaggagccccgccaggtgcccgcgccaggccccggcagtgcacgcggcttgttgacttcgcagccccgggcggagccttcccgggcgggcgtgggaggagggaggcggcctccatgcactttatgtggagactactggccccgcccgtggcctcgtgctccgcagggcgcccagcgccgtccggcggccccgccgcagaccagctggcgggtgtggagaccaggctcctgaccccgccatgcatgcagcgccacctggaagccgcgcggccgctttggttttttgtttggttggttccattttctttttttctttttttttttaagaaaaaataaaaggtggatttgagctgtggctgtgaggggtgtttgggagctgctgggtggcaggggggctgtggggtcgg

SEQ ID NO: 385238 - DNA, 1731 bp, Homo sapiens
aatttttgtatgtttagtagagacgggggtttcaccatgttggtcaggctggtctcaaactcctaacctcatgatctgcccacctcggcctcccaaagtgctgggattacaagcgtgagccaccgcgaccggcccaaggtgcttttttaaagctagtgacttcctgtgcacatggggtgggtgtgtggcaagttctggaagctgctgagtcagccactggtccattctcggagctggggctctgcactgggcacatgagctctggggcagcccggggcggcctcccactgacttcgcccgggaggggcctcggggatggctcggcagccagtgtgttcgcggagtcctcgccaaccaccacggctcctcgcagggacagtacgtgggcagcttcctgcactttcccctgccattgtgagaacagtgtccacctgggcagggtgggcagccccaggcctgtgggtttcaccagggtgctggtgatggttggtggctagcagggactgggggcagctgggggccctggcaggctgagctctgctccccgcgtggttctgtgctggcatttcgagtgcctggcctgagcctggcccgagcctggccctcctgtgtcctcacagatgagcatgtggcggctcctgggcctctagaaccaaccatgggccagggtgccccaggggagcacgggagggtcctgccttgtcagcttgcctcctactcgtgaggttcctgcagtcagtacctgggtggggtcccacctgcggccatggcaggtgcaacagacgtggtggaggggacactcctgcccaggccatctgcgggaggctcagccccggggggtgcctcccagagctgctggggggcagcatttcaggctggatacacctgggcctgacccgggggcgggcatggcctgggcagcagctgtaagtgcgtccccgtggtgggggccagccaggtccctgtggctctggggttgcgcccctcagctcaggccacacttgccgtctccctcccaggacaggtcccagaagaggaggccagtcacaatggacagcgccggggcctccccaaggccgtgtgtatgaacggcacagaggcggcgcagctgagcaccaaatccagggcggagggccgggcccccaaccctgcccgcaaggcctgctccgccagcagcaagatccgccggctgtcggcctgcaagcagcagtgaggctggccgcctgcagcccgtgtccaggagccccgccaggtgcccgcgccaggccctcagtcttcctgccggttccgcccgccctcccggagaggtggccgccatgcttctgtgccgaccacgccccaggacctccggagcgccctgcagggccgggcagggggacagcagggaccgggcgcagccctcccccctcggccgcccggcagtgcacgcggcttgttgacttcgcagccccgggcggagccttcccgggcgggcgtgggaggagggaggcggcctccatgcactttatgtggagactactggccccgcccgtggcctcgtgctccgcagggcgcccagcgccgtccggcggccccgccgcagaccagctggcgggtgtggagaccaggctcctgaccccgccatgcatgcagcgccacctggaagccgcgcggccgctttggttttttgtttggttggttccattttctttttttctttttttttttaagaaaaaataaaaggtggatttg

SEQ ID NO: 385239 - DNA, 1697 bp, Homo sapiens
ggcgcctgccgggccccggcgaccaccttgggggtcgcgggccggctcggggggcgcccagtgcgggccctcgcgggcgccgggcagcgaccagccctgagcggagctgttggccgcggcgggaggcctcccggacgcccccagccccccgaacgctcgcccgggccggcgggagtcggcgccccccgggaggtccgctcggtcgtccgcggcggagcgtttgctcctgggacaggcggtgggaccggggcgtcgccggagacgcccccagcgaagttgggctctccaggtgtgggggtcccggggggtagcgacgtcgcggacccggcctgtgggatgggcggcccggagaagactgcgctcggccgtgttcatacttgtccgtgggcctgaggtccccggaggatgacctagcactgaaaagccccggccggcctccccagggtccccgaggacgaagttgaccctgaccgggccgtctcccagttctgaggcccgggtcccactggaactcgcgtctgagccgccgtcccggacccccggtgcccgccggtccgcagaccctgcaccgggcttggactcgcagccgggactgacgtgtagaacaatcgtttctgttggaagaagggtttttcccttccttttggggtttttgttgccttttttttttcttttttctttgtaaaattttggagaagggaagtcggaacacaaggaaggaccgctcacccgcggactcagggctggcggcgggactccaggaccctgggtccagcatggaggtggtggacccgcagcagctgggcatgttcacggagggcgagctgatgtcggtgggtatggacacgttcatccaccgcatcgactccaccgaggtcatctaccagccgcgccgcaagcgggccaagctcatcggcaagtacctgatgggggacctgctgggggaaggctcttacggcaaggtgaaggaggtgctggactcggagacgctgtgcaggagggccgtcaagatcctcaagaagaagaagttgcgaaggatccccaacggggaggccaacgtgaagaaggaaattcaactactgaggaggttacggcacaaaaatgtcatccagctggtggatgtgttatacaacgaagagaagcagaaaatgtatatggtgatggagtactgcgtgtgtggcatgcaggaaatgctggacagcgtgccggagaagcgtttcccagtgtgccaggcccacgggtgcgtgcgcggggcaggcgccctcccggagaggtggccgccatgcttctgtgccgaccacgccccaggacctccggagcgccctgcagggccgggcagggggacagcagggaccgggcgcagccctcccccctcggccgcccggcagtgcacgcggcttgttgacttcgcagccccgggcggagccttcccgggcgggcgtgggaggagggaggcggcctccatgcactttatgtggagactactggccccgcccgtggcctcgtgctccgcagggcgcccagcgccgtccggcggccccgccgcagaccagctggcgggtgtggagaccaggctcctgaccccgccatgcatgcagcgccacctggaagccgcgcggccgctttggttttttgtttggttggttccattttctttttttctttttttttttaagaaaaaataaaaggtggatttg

SEQ ID NO: 385240 - DNA, 1164 bp, Homo sapiens
ggcgcctgccgggccccggcgaccaccttgggggtcgcgggccggctcggggggcgcccagtgcgggccctcgcgggcgccgggcagcgaccagccctgagcggagctgttggccgcggcgggaggcctcccggacgcccccagccccccgaacgctcgcccgggccggcgggagtcggcgccccccgggaggtccgctcggtcgtccgcggcggagcgtttgctcctgggacaggcggtgggaccggggcgtcgccggagacgcccccagcgaagttgggctctccaggtgtgggggtcccggggggtagcgacgtcgcggacccggcctgtgggatgggcggcccggagaagactgcgctcggccgtgttcatacttgtccgtgggcctgaggtccccggaggatgacctagcactgaaaagccccggccggcctccccagggtccccgaggacgaagttgaccctgaccgggccgtctcccagttctgaggcccgggtcccactggaactcgcgtctgagccgccgtcccggacccccggtgcccgccggtccgcagaccctgcaccgggcttggactcgcagccgggactgacgtgtagaacaatcgtttctgttggaagaagggtttttcccttccttttggggtttttgttgccttttttttttcttttttctttgtaaaattttggagaagggaagtcggaacacaaggaaggaccgctcacccgcggactcagggctggcggcgggactccaggaccctgggtccagcatggaggtggtggacccgcagcagctgggcatgttcacggagggcgagctgatgtcggtgggtatggacacgttcatccaccgcatcgactccaccgaggtcatctaccagccgcgccgcaagcgggccaagctcatcggcaagtacctgatgggggacctgctgggggaaggctcttacggcaaggtgaaggaggtgctggactcggagacgctgtgcaggagggccgtcaagatcctcaagaagaagaagttgcgaaggatccccaacggggaggccaacgtgaagaagtaagtatggcttgctggggtcggggccgggccgggccagtcacggtgctgatggttctgtcttccttccttctttctctttctttcgaaagaaagag

SEQ ID NO: 385241 - DNA, 588 bp, Homo sapiens
tccagggtgggagctgagcacccctcccttcaggtgaagctgctggagctgcaagagttggtgttgccccttgtgggcaaccatgaggggcatggcaaattcctcatcgctgcccagaaccctgctgatgagcccactccaggggccccagccccccaggaacttggggctgccggtgagcaggatgttttttatgaagtgagcctggacaacaacgtggagcctgcaccaggagcggccagggagggttctccccatgacaaccccactgtacagcagatcgtgcagctgtctcctgtcatgcaggacacctaggagcacccaggcttgcccagcaaaccctgcgtgccattcttctaccaggcagccgagaacagggagataaacatcatcatcttctaagagctggtcaagaaatttaaaacaacaacaacaacaaaaagttacggggttcatctcctacacaattcatttactccatttgaatgctagagccactcacatttatttgtgtttctaatttaccgtttaaatttatttgtaaaaagttaagggagagttggtctttccctgatgttctttctggca

SEQ ID NO: 385242 - DNA, 1151 bp, Homo sapiens
acactcttaatttctaaggaagtgtagcgttcccttgatgaatcaggagagagatcattgaacttggtgtatgaggtactctggtctgtcttttcaagcttggggtaagtaggcatctgcaactaccagtcatatattttgtaacccactggcccgtgtgtgccctgattgctgaggctagacagatccatcagggcttagacagttagtgagggtcctgggagtaggcgaagggaagtccagttaatgtgtgaagctgctgggaattgtgtagttggcagagatttgagcaggtaaagcttccgatgtggaccaagtacaagtactaagatcacggcacatcctctaaaaggaagtcagatatttgggactgtccaggaaatctgggagatagtgtgatggtggcatagctctttctcatctgacactttttatgcttactcagagtacgaatgccaagtattgagacgatacagaataatatttgaattgagatattcctagaaagacaggtcaacatggctcttggtcaagaatgacttagagttccttgcctagtgctcagctggcttcatgtcatagttgaggctgggtccacaggtgggataagattccaccaaagctcaccaggctggtactgaccccagagtgtctcccaggccctaccttattttagcattcttttgaattgagtttcagaggtgattcagtagtaaatgtatggggagaagaattagaaaaacccatctctttttaagcagtcatcattcttaaacatctgaattgttttacaacagagtcagcaaacctttctagcatttctaaaagatggcagtttcttggagaccacatctttgcaaggcagtattttcaaaatataaaatagcccccaaaccaaacctttaaacatgaagggcaaatgggtaaagacttaatattctttttgtgtcaagtatacttaatgtaaatctagttgcttgtgaagtagtaatagtaatagctcctattattttgagcactgactatatgtgctcagcctctgtgcttgggatctgacatcactatctcatttccttctctcagcagttctggaaggagtacctaccctgggtatgctttgcccagggtcacagaagttactgaattagagc

SEQ ID NO: 385243 - DNA, 545 bp, Homo sapiens
tggccttttgaaactttaaattacaattgtgattctcccgtgtccacatggctggggaggcctcagaatcatggcaggaggcaaaaggcatttcttacttggtggcggcaagagaaaaatgaggtagaagcaaaagtggaaacccctgataaacccatctcagatctcgtgagacttactatcatgagaataacatgggaaagattggtccccatgattcagttacctccccccgggtcccacctacaacatgtgggaatcctgggagatagaattcaagttgagatttgggtgaggacgcagcgaaaccatgtcagagggtaagaggtcccagtggcagagtaaaagcatcattcagacaaatagaaggagactcaggaggtacgagagagaggaataaaacctctttggattatacattgtgaaggagttgcagtggaggggcggagggctgaaggaaaggttttgaagagagagggaatctatgggtggtgagcagtaaagccattaggtgttggtgacccttggcactgctcaccctcctt

SEQ ID NO: 385244 - DNA, 833 bp, Homo sapiens
agacctttacttttaatttcaggatctggagagcagaaactttcgtagttcaaaaaaattcctcatgcttagtagcttcctttcctaaaaatgcaggtgggctttacagcttcccatcagacttatttatttgtctttcttctcaatgtgttttgtatttgtatccagctgtgggagaaagctttctgagaaactccatgtaccttttttattagttgaaaataagaatgttcaaacattacctcaggtgggaatttgactttgcttctgcatttttcattttagcttagtatttcaattttaaaatagattaaggtatgtttagtatttttatagaaaagtgctgcctaatccttttgaggacacagaacggtaaattccctaattagtgcagtcagaactgaagagttcttcctgaaaagctgtattcacacaggagtttacatttttgtcagttaaattttcagattttctttcatgcagaaatttgccacagcatgatacataagaaaaaacattcaagatgatgtcacaaggcctatattttatagccccacctgcacttcaaaggcattgtgcaagagttaaaaggtttgcccaatctaaggtatttctatgtatagaaattatgtattattagatatacagagaatgtgattcattttctcattattcaatatatttagtagctcattgaagatccctgggctatgtccttgttgttgttgttgttgttcagggctcttctatatatacaatgacaaaacaataaaacctaaactttttagcctggataaaatctacccaaccaacatgaagtgcaggaaacaaga

SEQ ID NO: 385245 - DNA, 2146 bp, Homo sapiens
  misc_feature (46)..(46): n is a, c, g, or t
cggacgcgtgggctagttctagatcgcgagcggccgctcgcgatcngcataggaaagcaagaattctttgaacgcctctatgtaatgtataccgttggctactccatctcttttggttccttggctgtggctattctcatcattggttacttcagacgattgcattgcactaggaactatatccacatgcacttatttgtgtctttcatgctgagagctacaagcatctttgtcaaagacagagtagtccatgctcacataggagtaaaggagctggagtccctaataatgcaggatgacccacaaaattccattgaggcaacttctgtggacaaatcacaatatatcgggtgcaagattgctgttgtgatgtttatttacttcctggctacaaattattattggatcctggtggaaggtctctacctgcataatctcatctttgtggctttcttttcggacaccaaatacctgtggggcttcatcttgataggctgggggtttccagcagcatttgttgcagcatgggctgtggcacgagcaactctggctgatgcgaggtgctgggaacttagtgctggagacatcaagtggatttatcaagcaccgatcttagcagctattgggctgaattttattctgtttctgaatacggttagagttctagctaccaaaatctgggagaccaatgcagttgggcatgacacaaggaagcaatacaggaaactggccaaatcgacactggtcctggtcctagtctttggagtgcattacatcgtgttcgtatgcctgcctcactccttcactgggctcgggtgggagatccgcatgcactgtgagctcttcttcaactcctttcagggtttctttgtgtctatcatctactgctactgcaatggagaggttcaggcagaggtgaagaagatgtggagtcggtggaatctctccgtggactggaaaaggacaccgccatgtggcagccgcagatgcggctcagtgctcaccaccgtgacgcacagcaccagcagccagtcacaggtggcggccagcacacgcatggtgcttatctctggcaaagctgccaagatcgccagcagacagcctgacagccacatcactttacctggctatgtctggagtaactcagagcaggactgcctgccacactctttccacgaggagaccaaggaagatagtgggaggcagggagatgatattctaatggagaagccttccaggcctatggaatctaacccagacactgaaggatgccaaggagaaactgaggatgttctctgaatggacatttgtggctgactttcatgggctggtccaatggctggttgtgtgagagggcttggctgatactcctatgcttgagttcaaaggctgaaaattcagttaaggtgttacttaataatagtttttaggctccatgaattggctcctgtaaatactaacgacatgaaaatgcaagtgtcaatggagtagtttattaccttctattggcatcaagttttcctctaaattaatgtatggtatttgctctgtgattgttcatttttttctgctacttttgggtagaaaaaagattcaattgcttggctgtagctttctctcatatatatcaccctaaatataatgaagatcttttagtgtgtatcattttccttttagaaactagtattctcttatttcttactttaatgtacttctatcactgcatttattttgcctgtgcataggagcaattaggatctaaaaaaatatatgggaagataaaagatctaagaacaagtacttgctggaaaattagttggctggacattgataaaataatgcatttataacaattacatgtgtttctgggaacaaggaaaatttctcaaaaaagaatatttcacacatcccttcttttgaatggcctctttgtgaccagccagacctcaggtcttcactctttcttctttgtaaactatgtcatgtggaaagatttcctcagttagtgagcttgtgtctgcaaattgattttgtttgtaatgtattttgatagcaaatcatgctgcatctatatctttttcttgtttgagctgttactacattgtacatggcatgtgggatcaattaaaaatttgttttaaaaata

SEQ ID NO: 385246 - DNA, 2642 bp, Homo sapiens
ggccggtggcccgggcccgaccaccccagctgcgcgtcgttactggccacaagtttgctctgggccagccaagttggcaacttggaagcttctcccgggctctggaggagggtccctgcttcttcctacagccgttccgggcatggccgggctgggggcgtcgctccacgtctggggttggctaatgctcggcagctgcctcctggccagagcccagctggattctgatggcaccattactatagaggagcagattgtccttgtgctgaaagcgaaagtacaatgtgaactcaacatcacagctcaactccaggagggagaaggtaattgtttccctgaatgggatggactcatttgttggcccagaggaacagtggggaaaatatcggctgttccatgccctccttatatttatgacttcaaccataaaggagttgctttccgacactgtaaccccaatggaacatgggattttatgcacagcttaaataaaacatgggccaattattcagactgccttcgctttctgcagccagatatcagcataggaaagcaagaattctttgaacgcctctatgtaatgtataccgttggctactccatctcttttggttccttggctgtggctattctcatcattggttacttcagacgattgcattgcactaggaactatatccacatgcacttatttgtgtctttcatgctgagagctacaagcatctttgtcaaagacagagtagtccatgctcacataggagtaaaggagctggagtccctaataatgcaggatgacccacaaaattccattgaggcaacttctgtggacaaatcacaatatatcgggtgcaagattgctgttgtgatgtttatttacttcctggctacaaattattattggatcctggtggaaggtctctacctgcataatctcatctttgtggctttcttttcggacaccaaatacctgtggggcttcatcttgataggctgggggtttccagcagcatttgttgcagcatgggctgtggcacgagcaactctggctgatgcgaggtgctgggaacttagtgctggagacatcaagtggatttatcaagcaccgatcttagcagctattgggctgaattttattctgtttctgaatacggttagagttctagctaccaaaatctgggagaccaatgcagttgggcatgacacaaggaagcaatacaggaaactggccaaatcgacactggtcctggtcctagtctttggagtgcattacatcgtgttcgtatgcctgcctcactccttcactgggctcgggtgggagatccgcatgcactgtgagctcttcttcaactcctttcagggtttctttgtgtctatcatctactgctactgcaatggagaggttcaggcagaggtgaagaagatgtggagtcggtggaatctctccgtggactggaaaaggacaccgccatgtggcagccgcagatgcggctcagtgctcaccaccgtgacgcacagcaccagcagccagtcacaggtggcggccagcacacgcatggtgcttatctctggcaaagctgccaagatcgccagcagacagcctgacagccacatcactttacctggctatgtctggagtaactcagagcaggactgcctgccacactctttccacgaggagaccaaggaagatagtgggaggcagggagatgatattctaatggagaagccttccaggcctatggaatctaacccagacactgaaggatgccaaggagaaactgaggatgttctctgaatggacatttgtggctgactttcatgggctggtccaatggctggttgtgtgagagggcttggctgatactcctatgcttgagttcaaaggctgaaaattcagttaaggtgttacttaataatagtttttaggctccatgaattggctcctgtaaatactaacgacatgaaaatgcaagtgtcaatggagtagtttattaccttctattggcatcaagttttcctctaaattaatgtatggtatttgctctgtgattgttcatttttttctgctacttttgggtagaaaaaagattcaattgcttggctgtagctttctctcatatatatcaccctaaatataatgaagatcttttagtgtgtatcattttccttttagaaactagtattctcttatttcttactttaatgtacttctatcactgcatttattttgcctgtgcataggagcaattaggatctaaaaaaatatatgggaagataaaagatctaagaacaagtacttgctggaaaattagttggctggacattgataaaataatgcatttataacaattacatgtgtttctgggaacaaggaaaatttctcaaaaaagaatatttcacacatcccttcttttgaatggcctctttgtgaccagccagacctcaggtcttcactctttcttctttgtaaactatgtcatgtggaaagatttcctcagttagtgagcttgtgtctgcaaattgattttgtttgtaatgtattttgatagcaaatcatgctgcatctatatctttttcttgtttgagctgttactacattgtacatggcatgtgggatcaattaaaaatttgttttaaaaata

SEQ ID NO: 385247 - DNA, 754 bp, Homo sapiens
aaatgaggacctacagggcagaaaggtcgcctccgtccccagcacctgcaggttcccttccacacttcgtggtcctcagcagcatcttctaaatcacattccttctgattttgaaccctgatgaaaacttctagtgacatccaccacccccactgccgcctccgggatgagtccagcccctcaccctgtcctggctgccttgggctgggctggcttctgtccagctccacaccctcaccttggggggccttgctgtctcccggcctcactcttgcccctgctgcccctccctcggccgttcaggctcctcgctgtgcacgtgttcatttactcacaaatgttcacagaacatctggtcacggcactggcccactgctgggggatgctgggccaccagtccctgctcttgtggtgctcagagcctggggagggagacggagacaagccccggtaagtcctgagataaagcgtccagtgggggttgacaggatgccactctggaagccccgtctggcacgtttatttctgggctccctccatgacccccttccttgcttttttctatcacatggggtcagccccactttgtctgcttccctcttctgctctgctctcctgagcacgggactcatgtctggttgtaatctttacagcctccagggcaggtacagagcaccttgctgccttgcttgtttgttgactgagggagggagggactgatgagggagggagggaatgagtgagtgactgagtg

SEQ ID NO: 385248 - DNA, 480 bp, Homo sapiens
actacaacctctgcctctggggttcaagtgattcttatgcctcagcctcccaagtagctaggactccaggcatgtgccaccacgcctagctaatttttgtatttttagtagagacagggtttcaccatgttgcccaggctgttcttgaactcctggcttcaagtgatctgcccacctcagcctcccagagtgctgggattacaggcgtgagccactgtccccagccaaagaactgtgtctttaataagttgttgttctgccctgcagtgacacagctgttcttgcagagtccttttgtggaaactgcagtagggccaatggcagggctgggataggaggaaggagagtggacagacatgtggggcctgtggcagaggtttatggagcctccttctttcaactgcgttctcaccactccaggaaagcaactgtgcttgtctgcttgttttgattcttggttatgcttgatgagattcattt

SEQ ID NO: 385249 - DNA, 198 bp, Homo sapiens
tggctaagtttttataggggctggaaagtttataattaaggtgacatcatgtcatttattgtccaaactaggatgtctttgcctatgaaatgtctccttctccatatccccctcctcaaagacttactgtttcatatcaggaaagggtactcttacaggcaaaaatctgtatttacttgtttcggagtgttatcctcc

SEQ ID NO: 385250 - DNA, 435 bp, Homo sapiens
taaatccctatcttttttcagccacagcctgctgaaggtacttctcaactgataccatgaataagactcagtctctgacttcagaaacttgcaaccaacagtggggttcagaggtacccagtgacacccagggtgatgtgctggccaggaactcagcaaggtcaagtgtcttgcccagcatgggacttggtgggcagaaggagagggctgatatctccccaaggaaggattgggtcattagcttggcctttcacactcccaaattgttgggttaggcaaggactggcagtgtgaggggtcagaccacagcaatttctcctccttctgaagtgaaccagtgggggaaatgtcatgtatgctcatgaggtgtcactggtcaataggcaagcattgactcagcactgtctccgtgcctagcattgtgctaggtgctat

SEQ ID NO: 385251 - DNA, 610 bp, Homo sapiens
aagagtggaaacttctgaagaaaatagccatgttaccaatgtcgtcacgctgaagccacagagtcaagttagtggcaatggccgtggactgggagccaattgaactgggtttcaatcctgcctttttttttattatttttaaatgcaactgtatgcaaattgcttcttctccctgagtctccattttctcatttataatttggggagcggggtagagagtctttacttaaacatagggcattacccctccatacatccatatttatgtgccctcttaagatccttctaagatatttttaaaaacaaaggctaagctctttaaccataagaacccactgtggatgcaggacatcaatacatttccaggggggaagacattgggtcattgggtaggtgctgactgatcaaacaaggtggaggaagccacaggagacagtaacaaagaaataaatacagccatgcaccttactgaatcttggagagacttgggattctggaacaccagttataattaagcatcggagcaagccacagattgattctggactggcatgattttgccccaccctcaggggacatttgtcaatgtttggagacatcttgagtatca

SEQ ID NO: 385252 - DNA, 591 bp, Homo sapiens
aaggaaaaaatagcagaggtaaaagggagggtatcttagacaaggggagcaatgctggaaggagggaaggctctgatagtagagaagacgttggcctctgtctgagcagtgagagctgccagtttgcagcagagatcaatagaaaatagcaacagttaggcaagataaagcccaaatttggagagctttgacatctgggcatctaggtagaggaggtaaatttgcccagctggaaaatggaaacctatggacttcctgagcacctgggagtaactaagatgttcatatgatttcaaatccagccatcctcagaacccagtttgttctcccattatccatgtttatcctcccagccaaacttttaatcagtgcagatgaagttctagattttagtcccacaagctcaataatttgagattcttcaaatgttgaggatgaggccaatagtggaatggaaagccacctctctcttctttgtgaatgaccaacctttggttcacaccatggatacacttatacatacagtcattatctttggaaaatgaatgttcttttctattgattgaatcttacagtgaagtaatggacaga

SEQ ID NO: 385253 - DNA, 561 bp, Homo sapiens
caggaagactgagggggactgaacatgattacttgtctgcctagagcttcttgtaaagaagtcacaaacttagtgcctccaggggcttggcctgtgtgataatgaggatagaggattacttgtgaggcaatgtggcatggtggggattgtggcaaactagaattcacatcacccaccatatagggcttgcattaccacgaggcagaaagcacctagtgttgctgcatcttcttacgcaaaaaagacaaaatccagacttctaaaatgtaaaatcactgattttcgatattggcagcttactttttttttttaaacaaccatgcaggccaaatgacttgtaatcttgtcaccatttttaggtaaactgtgacttgaaaaagtctggagcaaacaaaccaatgctttttccttttattctgttggaaaccagttttctttgtgtcacagttctgaaacctcaatacgaatatttctcttcccaccaaatattttgaggcaattgaaaagccacagtgatttatttcttgatttggcaattttaattttgcaagacactgctta

SEQ ID NO: 385254 - DNA, 259 bp, Homo sapiens
acagatataagacagtactagctggtagtatttttccctaagaattaaatgttgtttgtttcataaacctataatatttttatagtttggcagcagtgactttggaatgaaagccaacttcagatgccaactctaccattttgaaaccgtggagacttgtgctaattgtttaatttttgagctttgtttatttgtaaaatgtgtggaacagtacttacctcaaaggctgttgagattattaaactgcttatgagaaagc

SEQ ID NO: 385255 - DNA, 439 bp, Homo sapiens
ggagatgaaaccacatctctgtgggattgaaaaggtcaattgaaactagcagccacttttcttcatgaagttccagcagcacattctgtctgctgatatttggggagacgaacaactcaaagagaaggggtcattttaaaatagaatggcctctctgtacttgactccttctcatcagtagcctctaaatggcctcttgccaaaaccaaccaagtgtggcttctgtacttcaaagccatctgcagtgacacagcagccttcagggaaggtcactgggtggacagttctccatgcagccttagtagggcccagagtactgcttcatccctccctaaaccatagtatacaacccgcagaggcaaggtgagtccgcttccatgctaccccatattagagggagggaaacaaaggctggtatctcatggtaaactccagacct

SEQ ID NO: 385256 - DNA, 378 bp, Homo sapiens
tcatacataccttggtgacttgtgtgtctagaggtaaggtctgagcttcctcctcaaggaacttaagatgtacacctgagaaacaggaggactcctccccccagacctgagccctgagactcttcccttggggcatggataaaggatccctgtggaacagggtcctgagtctacctccaagggtttgaatcataactcaggtgtgtgaaggcctgttccccaccttaggacctgatttctgaacctgccctgagggtactgtcacctcacctcagacaacttacatacaccctagtcttaggggtcatttagggacataagacttcctgcctcggggacttgggccttagactcccaactccttttggggacatgaat

SEQ ID NO: 385257 - DNA, 480 bp, Homo sapiens
tcaaaaaatgtccagaagccatataattgggtggcccagagcaggttagggaggtaactaaagtcattaaagtggattttgaggtttctggttaggtacactgaaggcacaggattgaaaataattcatctggggttacttttaatagctttgcttactgttgctatgatataagacatactgattgtaaaaatttcaagtgaagaagaaaaatatgaaaaaggaactaataaaattgcctgaaatgttaaaaatccagcgataacatttgggtgactatgcttccagattatttaattggcttttctcactgaacagtttgtccagcacactttattcaggtcaataaatgtggatgaccgggcgtggtagctcaaagctataatcccaagcactttgggaggctaaggcgaaaggatcacttaaggccaagagtttcagaccagcctgggcaacatagtgagaccctgtctctaccaa

SEQ ID NO: 385258 - DNA, 443 bp, Homo sapiens
cccctggtttaaacatttttttcatatcacagctcaagttacctcttgttggcattggtcagaacaagtcattcgccctttctttacggttggagtatggcagccatagctccagactgtatgtgtttacatccacagctaggagggacagttccagtatgtctgtcttttttttgtacgaagagtaaaagtttttccagaagctcccagctcgtatctgtttacgttctgttggcctgaattatgtaagacaggcagagaaaacaagtagccttcataatgaaggtgggtaaaggagaagggcctaggaatggctggaagtaagctggccagcaatcagacacagaatttctgctggtacaggcatgtttccatatagcatattgccaagcaagtctgcacctatcccaatcaactttttaacccattttttaaatagtgtg

SEQ ID NO: 385259 - DNA, 312 bp, Homo sapiens
caattaacagctgcagacctcaactaaacactgtggggaaggggaacctaccagcagcccagcctcttgtctctgtttgaagtgaaagtcgtatttggtctcctgctcaactgtgagataaataaccctgttcctcacactccactagaccatatgtctttctctctcttcccctccctaccagtcaatctgtggctttccaattctacaaagaattacaataaaaggcacagatgaagtaaaattttagatgagagtaaaaagacaggggcaaggagaaaagagaaaggagagaagagtggtctatctgaa

SEQ ID NO: 385260 - DNA, 153 bp, Homo sapiens
gtgatcctcccacttcagcctcctgagtagctggtactataggcgtgtgccaccgtgcctggctaattgttgcatttttctttctttctttcttttttattgagatggaatttagctctcgttgcccaggctagagtgcaatggcgtgatctc

SEQ ID NO: 385261 - DNA, 361 bp, Homo sapiens
gcgggtattcttacattataataaacttcatatgttatcaaggtagtctttattataattaggctgatttcatatttgagtttgtgtgctatatgtaaccagagtattatagctcaaataagagagcttggggagaagcaaatggctgacaccaaaagcatgagcaacaaaagcaaaagtagataagttggacttcatcaaaatttagaactttcgtgcattaaaggatattatcaagacagtgaaagacagcctacagaatggggggaagaaaaatattgcaaatcctttatctgataagcactttagaatccagaatctacaaagcactcttaaaactgcccaacaggccgggtgtgat

SEQ ID NO: 385262 - DNA, 1366 bp, Homo sapiens
agaagaggaagacaggaagggggtggggatgtgaagcgaccgtcccagccttccccgcccgccacccccaccccaactcggcagccgtcacgtgatgcctggagtgggaggtggggagaaaaggcgagacttttgtgggtgctcccgatcgccagtagttccttcagtctcagccgccaactccggaggcgcggtgctcggcccgggagcgcgagcgggaggagcagagacccgcagccgggagcccgagcgcgggcgatgcaggctccgcgagcggcacctgcggctcctctaagctacgaccgtcgtctccgcggcagcagcgcgggccccagcagcctcggcagccacagccgctgcagccggggcagcctccgctgctgtcgcctcctctgatgcgcttgccctctcccggccccgggactccgggagaatgtgggtcctaggcatcgcggcaactttttgcggattgttcttgcttccaggctttgcgctgcaaatccagtgctaccagtgtgaagaattccagctgaacaacgactgctcctcccccgagttcattgtgaattgcacggtgaacgttcaagacatgtgtcagaaagaagtgatggagcaaagtgccgggtctcactgtgtcacgaggctggagtgcagtggaacaatttcagcacactgcaacctctgcctcccaggctcaaatgatcatcccacctaagcctccggagtagctgggaccacaggcaagcgccaccatgcccagctgataccaatgtcttttaaaaaatgttgtatgtggaaataaattgagacttatagaaaagctgcaaaaatagtgcagtttctatatatccttcccccatctttggctagtgttaacaatctacataaccgcagtacgatgatcaaggctaggaaattaacattggcacagtactgttaatgaaaccatgctttgttttgagattcccacagttttgcctttttctgttccaagatcctatccaggatcccacatgcatttcattgtcatgtctccttctcctctaacctctgacaatgcatcattctttccatgtcttttgtgatgttgacacttttgaagaggactggtccagatttttgtacactgtccctcagtttgggattgtctgctgttttctcatgaacagatagaggttttgcatttttgacaagaatcctcagaagagatgcacccttctcagtgcactgtagcaaggggcgcatgctgtcaatgtcttactggtgatgttaactttgatcgcttttgattcagatagtatctgctgggtttttccactgtaaagttactattttttccattgtaattaataaataacttgaggga

SEQ ID NO: 385263 - DNA, 2052 bp, Homo sapiens
agaagaggaagacaggaagggggtggggatgtgaagcgaccgtcccagccttccccgcccgccacccccaccccaactcggcagccgtcacgtgatgcctggagtgggaggtggggagaaaaggcgagacttttgtgggtgctcccgatcgccagtagttccttcagtctcagccgccaactccggaggcgcggtgctcggcccgggagcgcgagcgggaggagcagagacccgcagccgggagcccgagcgcgggcgatgcaggctccgcgagcggcacctgcggctcctctaagctacgaccgtcgtctccgcggcagcagcgcgggccccagcagcctcggcagccacagccgctgcagccggggcagcctccgctgctgtcgcctcctctgatgcgcttgccctctcccggccccgggactccgggagaatgtgggtcctaggcatcgcggcaactttttgcggattgttcttgcttccaggctttgcgctgcaaatccagtgctaccagtgtgaagaattccagctgaacaacgactgctcctcccccgagttcattgtgaattgcacggtgaacgttcaagacatgtgtcagaaagaagtgatggagcaaagtgccgggatcatgtaccgcaagtcctgtgcatcatcagcggcctgtctcatcgcctctgccgggtaccagtccttctgctccccagggaaactgaactcagtttgcatcagctgctgcaacacccctctttgtaacgggccaaggcccaagaaaaggggaagttctgcctcggccctcaggccagggctccgcaccaccatcctgttcctcaaattagccctcttctcggcacactgctgaagctgaaggagatgccaccccctcctgcattgttcttccagccctcgcccccaaccccccacctccctgagtgagtttcttctgggtgtccttttattctgggtagggagcgggagtccgtgttctcttttgttcctgtgcaaataatgaaagagctcggtaaagcattctgaataaattcagcctgactgaattttcagtatgtacttgaaggaaggaggtggagtgaaagttcacccccatgtctgtgtaaccggagtcaaggccaggctggcagagtcagtccttagaagtcactgaggtgggcatctgccttttgtaaagcctccagtgtccattccatccctgatgggggcatagtttgagactgcagagtgagagtgacgttttcttagggctggagggccagttcccactcaaggctccctcgcttgacattcaaacttcatgctcctgaaaaccattctctgcagcagaattggctggtttcgcgcctgagttgggctctagtgactcgagactcaatgactgggacttagactggggctcggcctcgctctgaaaagtgcttaagaaaatcttctcagttctccttgcagaggactggcgccgggacgcgaagagcaacgggcgctgcacaaagcgggcgctgtcggtggtggagtgcgcatgtacgcgcaggcgcttctcgtggttggcgtgctgcagcgacaggcggcagcacagcacctgcacgaacacccgccgaaactgctgcgaggacaccgtgtacaggagcgggttgatgaccgagctgaggtagaaaaacgtctccgagaaggggaggaggatcatgtacgcccggaagtaggacctcgtccagtcgtgcttgggtttggccgcagccatgatcctccgaatctggttgggcatccagcatacggccaatgtcacaacaatcagccctgggcagacacgagcaggagggagagacagagaaaagaaaaacacagcatgagaacacagtaaataaataaaaccataaaatatttagcccctctgttctgtgcttactggccaggaaatggtaccaatttttcagtgttggacttgacagcttcttttgccacaagcaagagagaatttaacactgtttcaaacccgggggagttggctgtgttaaagaaagaccattaaatgctttagacagtgta

SEQ ID NO: 385264 - DNA, 1880 bp, Homo sapiens
aaagtcatttaagcccctttacagaccagctctgctgggaggatgcagaaataaatgatcagcgtcccggcgtgagagagctgcccccagaagtggccgggggagaaaagggtgaagaggagctaaagcttaggaggcgatttccacggaaatggatgctccctaaggatgtgcggaaaggggatgggaatgtgcggattgggggcgggggcaccaacgcactccggcgggcaagcggtctcccgcaccacctgctgcaaggctcgggaaggaaggcgaagatagcaccggggcatccccgggagtccgcaaggctttgcgctgcaaatccagtgctaccagtgtgaagaattccagctgaacaacgactgctcctcccccgagttcattgtgaattgcacggtgaacgttcaagacatgtgtcagaaagaagtgatggagcaaagtgccgggatcatgtaccgcaagtcctgtgcatcatcagcggcctgtctcatcgcctctgccgggtaccagtccttctgctccccagggaaactgaactcagtttgcatcagctgctgcaacacccctctttgtaacgggccaaggcccaagaaaaggggaagttctgcctcggccctcaggccagggctccgcaccaccatcctgttcctcaaattagccctcttctcggcacactgctgaagctgaaggagatgccaccccctcctgcattgttcttccagccctcgcccccaaccccccacctccctgagtgagtttcttctgggtgtccttttattctgggtagggagcgggagtccgtgttctcttttgttcctgtgcaaataatgaaagagctcggtaaagcattctgaataaattcagcctgactgaattttcagtatgtacttgaaggaaggaggtggagtgaaagttcacccccatgtctgtgtaaccggagtcaaggccaggctggcagagtcagtccttagaagtcactgaggtgggcatctgccttttgtaaagcctccagtgtccattccatccctgatgggggcatagtttgagactgcagagtgagagtgacgttttcttagggctggagggccagttcccactcaaggctccctcgcttgacattcaaacttcatgctcctgaaaaccattctctgcagcagaattggctggtttcgcgcctgagttgggctctagtgactcgagactcaatgactgggacttagactggggctcggcctcgctctgaaaagtgcttaagaaaatcttctcagttctccttgcagaggactggcgccgggacgcgaagagcaacgggcgctgcacaaagcgggcgctgtcggtggtggagtgcgcatgtacgcgcaggcgcttctcgtggttggcgtgctgcagcgacaggcggcagcacagcacctgcacgaacacccgccgaaactgctgcgaggacaccgtgtacaggagcgggttgatgaccgagctgaggtagaaaaacgtctccgagaaggggaggaggatcatgtacgcccggaagtaggacctcgtccagtcgtgcttgggtttggccgcagccatgatcctccgaatctggttgggcatccagcatacggccaatgtcacaacaatcagccctgggcagacacgagcaggagggagagacagagaaaagaaaaacacagcatgagaacacagtaaataaataaaaccataaaatatttagcccctctgttctgtgcttactggccaggaaatggtaccaatttttcagtgttggacttgacagcttcttttgccacaagcaagagagaatttaacactgtttcaaacccgggggagttggctgtgttaaagaaagaccattaaatgctttagacagtgta

SEQ ID NO: 385265 - DNA, 2086 bp, Homo sapiens
agaagaggaagacaggaagggggtggggatgtgaagcgaccgtcccagccttccccgcccgccacccccaccccaactcggcagccgtcacgtgatgcctggagtgggaggtggggagaaaaggcgagacttttgtgggtgctcccgatcgccagtagttccttcagtctcagccgccaactccggaggcgcggtgctcggcccgggagcgcgagcgggaggagcagagacccgcagccgggagcccgagcgcgggcgatgcaggctccgcgagcggcacctgcggctcctctaagctacgaccgtcgtctccgcggcagcagcgcgggccccagcagcctcggcagccacagccgctgcagccggggcagcctccgctgctgtcgcctcctctgatgcgcttgccctctcccggccccgggactccgggagaatgtgggtcctaggcatcgcggcaactttttgcggattgttcttgcttccaggtgagaatacccagaggccagcagccgaggccaggctttgcgctgcaaatccagtgctaccagtgtgaagaattccagctgaacaacgactgctcctcccccgagttcattgtgaattgcacggtgaacgttcaagacatgtgtcagaaagaagtgatggagcaaagtgccgggatcatgtaccgcaagtcctgtgcatcatcagcggcctgtctcatcgcctctgccgggtaccagtccttctgctccccagggaaactgaactcagtttgcatcagctgctgcaacacccctctttgtaacgggccaaggcccaagaaaaggggaagttctgcctcggccctcaggccagggctccgcaccaccatcctgttcctcaaattagccctcttctcggcacactgctgaagctgaaggagatgccaccccctcctgcattgttcttccagccctcgcccccaaccccccacctccctgagtgagtttcttctgggtgtccttttattctgggtagggagcgggagtccgtgttctcttttgttcctgtgcaaataatgaaagagctcggtaaagcattctgaataaattcagcctgactgaattttcagtatgtacttgaaggaaggaggtggagtgaaagttcacccccatgtctgtgtaaccggagtcaaggccaggctggcagagtcagtccttagaagtcactgaggtgggcatctgccttttgtaaagcctccagtgtccattccatccctgatgggggcatagtttgagactgcagagtgagagtgacgttttcttagggctggagggccagttcccactcaaggctccctcgcttgacattcaaacttcatgctcctgaaaaccattctctgcagcagaattggctggtttcgcgcctgagttgggctctagtgactcgagactcaatgactgggacttagactggggctcggcctcgctctgaaaagtgcttaagaaaatcttctcagttctccttgcagaggactggcgccgggacgcgaagagcaacgggcgctgcacaaagcgggcgctgtcggtggtggagtgcgcatgtacgcgcaggcgcttctcgtggttggcgtgctgcagcgacaggcggcagcacagcacctgcacgaacacccgccgaaactgctgcgaggacaccgtgtacaggagcgggttgatgaccgagctgaggtagaaaaacgtctccgagaaggggaggaggatcatgtacgcccggaagtaggacctcgtccagtcgtgcttgggtttggccgcagccatgatcctccgaatctggttgggcatccagcatacggccaatgtcacaacaatcagccctgggcagacacgagcaggagggagagacagagaaaagaaaaacacagcatgagaacacagtaaataaataaaaccataaaatatttagcccctctgttctgtgcttactggccaggaaatggtaccaatttttcagtgttggacttgacagcttcttttgccacaagcaagagagaatttaacactgtttcaaacccgggggagttggctgtgttaaagaaagaccattaaatgctttagacagtgta

SEQ ID NO: 385266 - DNA, 2205 bp, Homo sapiens
agaagaggaagacaggaagggggtggggatgtgaagcgaccgtcccagccttccccgcccgccacccccaccccaactcggcagccgtcacgtgatgcctggagtgggaggtggggagaaaaggcgagacttttgtgggtgctcccgatcgccagtagttccttcagtctcagccgccaactccggaggcgcggtgctcggcccgggagcgcgagcgggaggagcagagacccgcagccgggagcccgagcgcgggcgatgcaggctccgcgagcggcacctgcggctcctctaagctacgaccgtcgtctccgcggcagcagcgcgggccccagcagcctcggcagccacagccgctgcagccggggcagcctccgctgctgtcgcctcctctgatgcgcttgccctctcccggccccgggactccgggagaatgtgggtcctaggcatcgcggcaactttttgcggattgttcttgcttccaggctttgcgctgcaaatccagtgctaccagtgtgaagaattccagctgaacaacgactgctcctcccccgagttcattgtgaattgcacggtgaacgttcaagacatgtgtcagaaagaagtgatggagcaaagtgccgacactaaaagaacaaacaccttgctcttcgagatgagacattttgccaagcagttgaccacttagttctcaagaagcaactatctctttcatgtgccttctgaggaagtattcagagggggaatatcaaatgtctttcccttggactctcccaggatcatgtaccgcaagtcctgtgcatcatcagcggcctgtctcatcgcctctgccgggtaccagtccttctgctccccagggaaactgaactcagtttgcatcagctgctgcaacacccctctttgtaacgggccaaggcccaagaaaaggggaagttctgcctcggccctcaggccagggctccgcaccaccatcctgttcctcaaattagccctcttctcggcacactgctgaagctgaaggagatgccaccccctcctgcattgttcttccagccctcgcccccaaccccccacctccctgagtgagtttcttctgggtgtccttttattctgggtagggagcgggagtccgtgttctcttttgttcctgtgcaaataatgaaagagctcggtaaagcattctgaataaattcagcctgactgaattttcagtatgtacttgaaggaaggaggtggagtgaaagttcacccccatgtctgtgtaaccggagtcaaggccaggctggcagagtcagtccttagaagtcactgaggtgggcatctgccttttgtaaagcctccagtgtccattccatccctgatgggggcatagtttgagactgcagagtgagagtgacgttttcttagggctggagggccagttcccactcaaggctccctcgcttgacattcaaacttcatgctcctgaaaaccattctctgcagcagaattggctggtttcgcgcctgagttgggctctagtgactcgagactcaatgactgggacttagactggggctcggcctcgctctgaaaagtgcttaagaaaatcttctcagttctccttgcagaggactggcgccgggacgcgaagagcaacgggcgctgcacaaagcgggcgctgtcggtggtggagtgcgcatgtacgcgcaggcgcttctcgtggttggcgtgctgcagcgacaggcggcagcacagcacctgcacgaacacccgccgaaactgctgcgaggacaccgtgtacaggagcgggttgatgaccgagctgaggtagaaaaacgtctccgagaaggggaggaggatcatgtacgcccggaagtaggacctcgtccagtcgtgcttgggtttggccgcagccatgatcctccgaatctggttgggcatccagcatacggccaatgtcacaacaatcagccctgggcagacacgagcaggagggagagacagagaaaagaaaaacacagcatgagaacacagtaaataaataaaaccataaaatatttagcccctctgttctgtgcttactggccaggaaatggtaccaatttttcagtgttggacttgacagcttcttttgccacaagcaagagagaatttaacactgtttcaaacccgggggagttggctgtgttaaagaaagaccattaaatgctttagacagtgta

SEQ ID NO: 385267 - DNA, 2239 bp, Homo sapiens
agaagaggaagacaggaagggggtggggatgtgaagcgaccgtcccagccttccccgcccgccacccccaccccaactcggcagccgtcacgtgatgcctggagtgggaggtggggagaaaaggcgagacttttgtgggtgctcccgatcgccagtagttccttcagtctcagccgccaactccggaggcgcggtgctcggcccgggagcgcgagcgggaggagcagagacccgcagccgggagcccgagcgcgggcgatgcaggctccgcgagcggcacctgcggctcctctaagctacgaccgtcgtctccgcggcagcagcgcgggccccagcagcctcggcagccacagccgctgcagccggggcagcctccgctgctgtcgcctcctctgatgcgcttgccctctcccggccccgggactccgggagaatgtgggtcctaggcatcgcggcaactttttgcggattgttcttgcttccaggtgagaatacccagaggccagcagccgaggccaggctttgcgctgcaaatccagtgctaccagtgtgaagaattccagctgaacaacgactgctcctcccccgagttcattgtgaattgcacggtgaacgttcaagacatgtgtcagaaagaagtgatggagcaaagtgccgacactaaaagaacaaacaccttgctcttcgagatgagacattttgccaagcagttgaccacttagttctcaagaagcaactatctctttcatgtgccttctgaggaagtattcagagggggaatatcaaatgtctttcccttggactctcccaggatcatgtaccgcaagtcctgtgcatcatcagcggcctgtctcatcgcctctgccgggtaccagtccttctgctccccagggaaactgaactcagtttgcatcagctgctgcaacacccctctttgtaacgggccaaggcccaagaaaaggggaagttctgcctcggccctcaggccagggctccgcaccaccatcctgttcctcaaattagccctcttctcggcacactgctgaagctgaaggagatgccaccccctcctgcattgttcttccagccctcgcccccaaccccccacctccctgagtgagtttcttctgggtgtccttttattctgggtagggagcgggagtccgtgttctcttttgttcctgtgcaaataatgaaagagctcggtaaagcattctgaataaattcagcctgactgaattttcagtatgtacttgaaggaaggaggtggagtgaaagttcacccccatgtctgtgtaaccggagtcaaggccaggctggcagagtcagtccttagaagtcactgaggtgggcatctgccttttgtaaagcctccagtgtccattccatccctgatgggggcatagtttgagactgcagagtgagagtgacgttttcttagggctggagggccagttcccactcaaggctccctcgcttgacattcaaacttcatgctcctgaaaaccattctctgcagcagaattggctggtttcgcgcctgagttgggctctagtgactcgagactcaatgactgggacttagactggggctcggcctcgctctgaaaagtgcttaagaaaatcttctcagttctccttgcagaggactggcgccgggacgcgaagagcaacgggcgctgcacaaagcgggcgctgtcggtggtggagtgcgcatgtacgcgcaggcgcttctcgtggttggcgtgctgcagcgacaggcggcagcacagcacctgcacgaacacccgccgaaactgctgcgaggacaccgtgtacaggagcgggttgatgaccgagctgaggtagaaaaacgtctccgagaaggggaggaggatcatgtacgcccggaagtaggacctcgtccagtcgtgcttgggtttggccgcagccatgatcctccgaatctggttgggcatccagcatacggccaatgtcacaacaatcagccctgggcagacacgagcaggagggagagacagagaaaagaaaaacacagcatgagaacacagtaaataaataaaaccataaaatatttagcccctctgttctgtgcttactggccaggaaatggtaccaatttttcagtgttggacttgacagcttcttttgccacaagcaagagagaatttaacactgtttcaaacccgggggagttggctgtgttaaagaaagaccattaaatgctttagacagtgta

SEQ ID NO: 385268 - DNA, 2304 bp, Homo sapiens
  misc_feature (2304)..(2304): n is a, c, g, or t
agaagaggaagacaggaagggggtggggatgtgaagcgaccgtcccagccttccccgcccgccacccccaccccaactcggcagccgtcacgtgatgcctggagtgggaggtggggagaaaaggcgagacttttgtgggtgctcccgatcgccagtagttccttcagtctcagccgccaactccggaggcgcggtgctcggcccgggagcgcgagcgggaggagcagagacccgcagccgggagcccgagcgcgggcgatgcaggctccgcgagcggcacctgcggctcctctaagctacgaccgtcgtctccgcggcagcagcgcgggccccagcagcctcggcagccacagccgctgcagccggggcagcctccgctgctgtcgcctcctctgatgcgcttgccctctcccggccccgggactccgggagaatgtgggtcctaggcatcgcggcaactttttgcggattgttcttgcttccaggctttgcgctgcaaatccagtgctaccagtgtgaagaattccagctgaacaacgactgctcctcccccgagttcattgtgaattgcacggtgaacgttcaagacatgtgtcagaaagaagtgatggagcaaagtgccgggatcatgtaccgcaagtcctgtgcatcatcagcggcctgtctcatcgcctctgccgggtaccagtccttctgctccccagggaaactgaactcagtttgcatcagctgctgcaacacccctctttgtaacgggccaaggcccaagaaaaggggaagttctgcctcggccctcaggccagggctccgcaccaccatcctgttcctcaaattagccctcttctcggcacactgctgaagctgaaggagatgccaccccctcctgcattgttcttccagccctcgcccccaaccccccacctccctgagtgagtttcttctgggtgtccttttattctgggtagggagcgggagtccgtgttctcttttgttcctgtgcaaataatgaaagagctcggtaaagcattctgaataaattcagcctgactgaattttcagtatgtacttgaaggaaggaggtggagtgaaagttcacccccatgtctgtgtaaccggagtcaaggccaggctggcagagtcagtccttagaagtcactgaggtgggcatctgccttttgtaaagcctccagtgtccattccatccctgatgggggcatagtttgagactgcagagtgagagtgacgttttcttagggctggagggccagttcccactcaaggctccctcgcttgacattcaaacttcatgctcctgaaaaccattctctgcagcagaattggctggtttcgcgcctgagttgggctctagtgactcgagactcaatgactgggacttagactggggctcggcctcgctctgaaaagtgcttaagaaaatcttctcagttctccttgcagaggactggcgccgggacgcgaagagcaacgggcgctgcacaaagcgggcgctgtcggtggtggagtgcgcatgtacgcgcaggcgcttctcgtggttggcgtgctgcagcgacaggcggcagcacagcacctgcacgaacacccgccgaaactgctgcgaggacaccgtgtacaggagcgggttgatgaccgagctgaggtagaaaaacgtctccgagaaggggaggaggatcatgtacgcccggaagtaggacctcgtccagtcgtgcttgggtttggccgcagccatgatcctccgaatctggttgggcatccagcatacggccaatgtcacaacaatcagccctgggcagacacgagcaggagggagagacagagaaaagaaaaacacagcatgagaacacagtaaataaataaaaccataaaatatttaaaaaaaaaaaaaaaaaaaaaaaaagaaaaaaagtttgttggggcggcttcgggccttgggaaaagagtttttaaaaaaccacttgtgtgttggggggcgggggcccccatgttgtgtttaatgtgagacgacccgtgtcgggcaaaaaaccgggggtgccccccaaaaagaagagacatcccccggtgcggccaagacgcacacaacgagggcggctgggggagtttttctccccacaaaataataaaaaaaaaaggcgcgcgggggagggacacacgccggaggtgtgtcttggagacacaaactccaagaaggggaggtgcgagaagggcccacagggggttcaacaaccagaggagctacaaaaggcagaggcgagataaaaatacgcgaccacggggggggaggggtgn

SEQ ID NO: 385269 - DNA, 920 bp, Homo sapiens
  misc_feature (39)..(39): n is a, c, g, or t
gtatgcggcactgactctcttaatctaccaccgctacangctttgcgctgcaaatccagtgctaccagtgtgaagaattccagctgaacaacgactgctcctcccccgagttcattgtgaattgcacggtgaacgttcaagacatgtgtcagaaagaagtgatggagcaaagtgccgggtctcactgtgtcacgaggctggagtgcagtggaacaatttcagcacactgcaacctctgcctcccaggctcaaatgatcatcccacctaagcctccggagtagctgggaccacaggcaagcgccaccatgcccagctgataccaatgtcttttaaaaaatgttgtatgtggaaataaattgagacttatagaaaagctgcaaaaatagtgcagtttctatatatccttcccccatctttggctagtgttaacaatctacataaccgcagtacgatgatcaaggctaggaaattaacattggcacagtactgttaatgaaaccatgctttgttttgagattcccacagttttgcctttttctgttccaagatcctatccaggatcccacatgcatttcattgtcatgtctccttctcctctaacctctgacaatgcatcattctttccatgtcttttgtgatgttgacacttttgaagaggactggtccagatttttgtacactgtccctcagtttgggattgtctgctgttttctcatgaacagatagaggttttgcatttttgacaagaatcctcagaagagatgcacccttctcagtgcactgtagcaaggggcgcatgctgtcaatgtcttactggtgatgttaactttgatcgcttttgattcagatagtatctgctgggtttttccactgtaaagttactattttttccattgtaattaataaataacttgaggga

SEQ ID NO: 385270 - DNA, 1094 bp, Homo sapiens
agaagaggaagacaggaagggggtggggatgtgaagcgaccgtcccagccttccccgcccgccacccccaccccaactcggcagccgtcacgtgatgcctggagtgggaggtggggagaaaaggcgagacttttgtgggtgctcccgatcgccagtagttccttcagtctcagccgccaactccggaggcgcggtgctcggcccgggagcgcgagcgggaggagcagagacccgcagccgggagcccgagcgcgggcgatgcaggctccgcgagcggcacctgcggctcctctaagctacgaccgtcgtctccgcggcagcagcgcgggccccagcagcctcggcagccacagccgctgcagccggggcagcctccgctgctgtcgcctcctctgatgcgcttgccctctcccggccccgggactccgggagaatgtgggtcctaggcatcgcggcaactttttgcggattgttcttgcttccaggctttgcgctgcaaatccagtgctaccagtgtgaagaattccagctgaacaacgactgctcctcccccgagttcattgtgaattgcacggtgaacgttcaagacatgtgtcagaaagaagtgatggagcaaagtgccgggatcatgtaccgcaagtcctgtgcatcatcagcggcctgtctcatcgcctctgccgggtaccagtccttctgctccccagggaaactgaactcagtttgcatcagctgctgcaacacccctctttgtaacgggccaaggcccaagaaaaggggaagttctgcctcggccctcaggccagggctccgcaccaccatcctgttcctcaaattagccctcttctcggcacactgctgaagctgaaggagagacagagaaaagaaaaacacagcatgagaacacagtaaataaataaaaccataaaatatttagcccctctgttctgtgcttactggccaggaaatggtaccaatttttcagtgttggacttgacagcttcttttgccacaagcaagagagaatttaacactgtttcaaacccgggggagttggctgtgttaaagaaagaccattaaatgctttagacagtgta

SEQ ID NO: 385271 - DNA, 805 bp, Homo sapiens
agaagaggaagacaggaagggggtggggatgtgaagcgaccgtcccagccttccccgcccgccacccccaccccaactcggcagccgtcacgtgatgcctggagtgggaggtggggagaaaaggcgagacttttgtgggtgctcccgatcgccagtagttccttcagtctcagccgccaactccggaggcgcggtgctcggcccgggagcgcgagcgggaggagcagagacccgcagccgggagcccgagcgcgggcgatgcaggctccgcgagcggcacctgcggctcctctaagctacgaccgtcgtctccgcggcagcagcgcgggccccagcagcctcggcagccacagccgctgcagccggggcagcctccgctgctgtcgcctcctctgatgcgcttgccctctcccggccccgggactccgggagaatgtgggtcctaggcatcgcggcaactttttgcggattgttcttgcttccaggctttgcgctgcaaatccagtgctaccagtgtgaagaattccacatacggccaatgtcacaacaatcagccctgggcagacacgagcaggagggagagacagagaaaagaaaaacacagcatgagaacacagtaaataaataaaaccataaaatatttagcccctctgttctgtgcttactggccaggaaatggtaccaatttttcagtgttggacttgacagcttcttttgccacaagcaagagagaatttaacactgtttcaaacccgggggagttggctgtgttaaagaaagaccattaaatgctttagacagtgta

SEQ ID NO: 385272 - DNA, 2204 bp, Homo sapiens
agaagaggaagacaggaagggggtggggatgtgaagcgaccgtcccagccttccccgcccgccacccccaccccaactcggcagccgtcacgtgatgcctggagtgggaggtggggagaaaaggcgagacttttgtgggtgctcccgatcgccagtagttccttcagtctcagccgccaactccggaggcgcggtgctcggcccgggagcgcgagcgggaggagcagagacccgcagccgggagcccgagcgcgggcgatgcaggctccgcgagcggcacctgcggctcctctaagctacgaccgtcgtctccgcggcagcagcgcgggccccagcagcctcggcagccacagccgctgcagccggggcagcctccgctgctgtcgcctcctctgatgcgcttgccctctcccggccccgggactccgggagaatgtgggtcctaggcatcgcggcaactttttgcggattgttcttgcttccaggctttgcgctgcaaatccagtgctaccagtgtgaagaattccagctgaacaacgactgctcctcccccgagttcattgtgaattgcacggtgaacgttcaagacatgtgtcagaaagaagtgatggagcaaagtgccgggatcatgtaccgcaagtcctgtgcatcatcagcggcctgtctcatcgcctctgccgggtaccagtccttctgctccccagggaaactgaactcagtttgcatcagctgctgcaacacccctctttgtaacgggccaaggcccaagaaaaggggaagttctgcctcggccctcaggccagggctccgcaccaccatcctgttcctcaaattagccctcttctcggcacactgctgaagctgaaggagatgccaccccctcctgcattgttcttccagccctcgcccccaaccccccacctccctgagtgagtttcttctgggtgtccttttattctgggtagggagcgggagtccgtgttctcttttgttcctgtgcaaataatgaaagagctcggtaaagcattctgaataaattcagcctgactgaattttcagtatgtacttgaaggaaggaggtggagtgaaagttcacccccatgtctgtgtaaccggagtcaaggccaggctggcagagtcagtccttagaagtcactgaggtgggcatctgccttttgtaaagcctccagtgtccattccatccctgatgggggcatagtttgagactgcagagtgagagtgacgttttcttagggctggagggccagttcccactcaaggctccctcgcttgacattcaaacttcatgctcctgaaaaccattctctgcagcagaattggctggtttcgcgcctgagttgggctctagtgactcgagactcaatgactgggacttagactggggctcggcctcgctctgaaaagtgcttaagaaaatcttctcagttctccttgcagaggactggcgccgggacgcgaagagcaacgggcgctgcacaaagcgggcgctgtcggtggtggagtgcgcatgtacgcgcaggcgcttctcgtggttggcgtgctgcagcgacaggcggcagcacagcacctgcacgaacacccgccgaaactgctgcgaggacaccgtgtacaggagcgggttgatgaccgagctgaggtagaaaaacgtctccgagaaggggaggaggatcatgtacgcccggaagtaggacctcgtccagtcgtgcttgggtttggccgcagccatgatcctccgaatctggttgggcatccagcatacggccaatgtcacaacaatcagccctgggcagacacgagcaggagggagagacagagaaaagaaaaacacagcatgagaacacagtaaataaataaaaccataaaatatttagcccctctgttctgtgcttactggccaggaaatggtaccaatttttcagtgttggacttgacagcttcttttgccacaagcaagagagaatttaacactgtttcaaacccgggggagttggctgtgttaaagaaagaccattaaatgctttagacagtgtaaaaataccagttgatgtctgttaattttaaaaaaatgttttcattggtgtttgtttgcgtatccagaaagcagttcatgttatccataaatctggttttgtctttttttgttttaaagaaaaagatgtatacatacagtatagctgcattag

SEQ ID NO: 385273 - DNA, 1535 bp, Homo sapiens
agaagaggaagacaggaagggggtggggatgtgaagcgaccgtcccagccttccccgcccgccacccccaccccaactcggcagccgtcacgtgatgcctggagtgggaggtggggagaaaaggcgagacttttgtgggtgctcccgatcgccagtagttccttcagtctcagccgccaactccggaggcgcggtgctcggcccgggagcgcgagcgggaggagcagagacccgcagccgggagcccgagcgcgggcgatgcaggctccgcgagcggcacctgcggctcctctaagctacgaccgtcgtctccgcggcagcagcgcgggccccagcagcctcggcagccacagccgctgcagccggggcagcctccgctgctgtcgcctcctctgatgcgcttgccctctcccggccccgggactccgggagaatgtgggtcctaggcatcgcggcaactttttgcggattgttcttgcttccaggctttgcgctgcaaatccagtgctaccagtgtgaagaattccagctgaacaacgactgctcctcccccgagttcattgtgaattgcacggtgaacgttcaagacatgtgtcagaaagaagtgatggagcaaagtgccgggatcatgtaccgcaagtcctgtgcatcatcagcggcctgtctcatcgcctctgccgggtaccagtccttctgctccccagggaaactgaactcagtttgcatcagctgctgcaacacccctctttgtaacgggccaaggcccaagaaaaggggaagttctgcctcggccctcaggccagggctccgcaccaccatcctgttcctcaaattagccctcttctcggcacactgctgaagctgaaggagatgccaccccctcctgcattgttcttccagccctcgcccccaaccccccacctccctgattctccttgcagaggactggcgccgggacgcgaagagcaacgggcgctgcacaaagcgggcgctgtcggtggtggagtgcgcatgtacgcgcaggcgcttctcgtggttggcgtgctgcagcgacaggcggcagcacagcacctgcacgaacacccgccgaaactgctgcgaggacaccgtgtacaggagcgggttgatgaccgagctgaggtagaaaaacgtctccgagaaggggaggaggatcatgtacgcccggaagtaggacctcgtccagtcgtgcttgggtttggccgcagccatgatcctccgaatctggttgggcatccagcatacggccaatgtcacaacaatcagccctgggcagacacgagcaggagggagagacagagaaaagaaaaacacagcatgagaacacagtaaataaataaaaccataaaatatttagcccctctgttctgtgcttactggccaggaaatggtaccaatttttcagtgttggacttgacagcttcttttgccacaagcaagagagaatttaacactgtttcaaacccgggggagttggctgtgttaaagaaagaccattaaatgctttagacagtgta

SEQ ID NO: 385274 - DNA, 1519 bp, Homo sapiens
agaagaggaagacaggaagggggtggggatgtgaagcgaccgtcccagccttccccgcccgccacccccaccccaactcggcagccgtcacgtgatgcctggagtgggaggtggggagaaaaggcgagacttttgtgggtgctcccgatcgccagtagttccttcagtctcagccgccaactccggaggcgcggtgctcggcccgggagcgcgagcgggaggagcagagacccgcagccgggagcccgagcgcgggcgatgcaggctccgcgagcggcacctgcggctcctctaagctacgaccgtcgtctccgcggcagcagcgcgggccccagcagcctcggcagccacagccgctgcagccggggcagcctccgctgctgtcgcctcctctgatgcgcttgccctctcccggccccgggactccgggagaatgtgggtcctaggcatcgcggcaactttttgcggattgttcttgcttccaggctttgcgctgcaaatccagtgctaccagtgtgaagaattccagctgaacaacgactgctcctcccccgagttcattgtgaattgcacggtgaacgttcaagacatgtgtcagaaagaagtgatggagcaaagtgccgacactaaaagaacaaacaccttgctcttcgagatgagacattttgccaagcagttgaccacttagttctcaagaagcaactatctctttcatgtgccttctgaggaagtattcagagggggaatatcaaatgtctttcccttggactctcccaggtctcactgtgtcacgaggctggagtgcagtggaacaatttcagcacactgcaacctctgcctcccaggctcaaatgatcatcccacctaagcctccggagtagctgggaccacaggcaagcgccaccatgcccagctgataccaatgtcttttaaaaaatgttgtatgtggaaataaattgagacttatagaaaagctgcaaaaatagtgcagtttctatatatccttcccccatctttggctagtgttaacaatctacataaccgcagtacgatgatcaaggctaggaaattaacattggcacagtactgttaatgaaaccatgctttgttttgagattcccacagttttgcctttttctgttccaagatcctatccaggatcccacatgcatttcattgtcatgtctccttctcctctaacctctgacaatgcatcattctttccatgtcttttgtgatgttgacacttttgaagaggactggtccagatttttgtacactgtccctcagtttgggattgtctgctgttttctcatgaacagatagaggttttgcatttttgacaagaatcctcagaagagatgcacccttctcagtgcactgtagcaaggggcgcatgctgtcaatgtcttactggtgatgttaactttgatcgcttttgattcagatagtatctgctgggtttttccactgtaaagttactattttttccattgtaattaataaataacttgaggga

SEQ ID NO: 385275 - DNA, 419 bp, Homo sapiens
gtcatgagaaaattcacaaatgtaggaaaagctggtgggaatctttgcaaatatttatgggatgagaaaaaactgttcatattgaaagctggattaagagattcagattcaggccatccctgatatcaaatctaaagtgggcctccatgccagccccttgggtcttgatctcagcaccctgttttacctggacagcagtggccacagtgggtcatttcattcattagttttgatggcatttgtctctctcattggactgtaagttccttgaatcattcttaagttcctaagaatcatgtctgggctgggcacagtggctcacacttatactcccagcactttgggaggctgatatgggcagattgcttgagcccaggagttcaagaccagcctggacaacacggcaaaaccccatctct

SEQ ID NO: 385276 - DNA, 405 bp, Homo sapiens
tattccatcccattttaattagtgagaaaaaataattaaaaagcacaatttccttagctttagttttgattatgaaataataggaatagtatagtattttgtttgaattcaagtctaagaggcagaatttgattaaacctgaagatcttctaaaaacctagttcagagtagatggcttgatatgcattaaaggatttttatatttcacacacacacgtgcacacacaatgtatttttcaacatttcagaacaaaatttgtatcattactaacaaaacatcctacatcaataatggaaaaccaatttgctcaattacatgggactttcaacaacctgatttcatggtagggatagaagaaataattataaaagccattgagtcccaaataaacaccatgccatttt

SEQ ID NO: 385277 - DNA, 596 bp, Homo sapiens
acaggagtttggaataagttgattccaaccctcatggatgactttgaggagttcgactttagtagaggaagtaattccagatgtggtggaaatagagaactagaattagaaacaaagcctgatgatgtgactaaattgttgcaatctcatgataaaactttaatgaggtcaggcacagtggctcatgcctgtaatcccaacattttgggaggccagggcgggtagatcacttgaggtcaggagtttgagaccagcctggccaacatggtcaaaccccatctctactaaaattactaaaattagccaggtgtggtggcgtgtgcctgtggtcccagctactcaggaggctgagaatcgtttgaacccgggaggtggaggctgcagttagccaagatggcagcatacccaggcaggatgtatacccagaaatgacctgagaagacttttagccttcaccccatgttgttcccaaggctcaagacacaccctgctaattagtgaaggtcttccttaccagtttgcaaagacttggggagttggctgtctttccaaatggtagttttcaagaaaagaccacaagacattagaaaaaaaaa

SEQ ID NO: 385278 - DNA, 433 bp, Homo sapiens
gttatcctttgtttttaaggctgggtgcagtggctcacacctgtaatcccagtgctttgggaggctgaggcaggtggattacttgagcccaggaattcgagaccagcctaggcaatatagggaaaacctgtctctactaaaaaattgcaaaaaattagctggatgtggcagtacatgcctatggtcccagctacttggggggctgaagtgggagaatcaactgagcttgggaagttgaggctacaatgagccaagatcacgctcctgcactccagcctgggtggcagagtgagaccctgtctcaaaaaaaaaaaaaagttttaaaggacatatttttaaattgatggcctgaaaatgttataacaaaattctaataataaagaggaaagaataccctaatcctgccagcataacagatggtctatttgacttt

SEQ ID NO: 385279 - DNA, 605 bp, Homo sapiens
tgggagactcctttctcttaggtccagcaggaagttggcggggcccaagcactgtaaggcacagcatttgaggagctgagaagaggggtgagaatttagctggaaaggagttgctgcaaggccattcccggcagggcacagcacccatctaccaacgaagctgttgcagccaaggctcctgcccgtggggccagggggattattcctgggcctctggaggctgggtgggtggtcacagggctgtgctgcagagacacctgttggcctctgggttggctcctgcccacacaggctactgacccactctttgttttctgatttgctttcacgccagggtctcagtacagccaccaaggacacctacgacgcccttcacatgcaggccctgccccctcgctaacagccaggggatttcaccactcaaaggccagacctgcagacgcccagattatgagacacaggatgaagcatttacaacccggttcactcttctcagccactgaagtattcccctttatgtacaggatgctttggttatatttagctccaaaccttcacacacagactgttgtccctgcactctttaagggagtgtactcccaggg

SEQ ID NO: 385280 - DNA, 1721 bp, Homo sapiens
gggggagtgcgaatttcttggcctgtcggcaggtgctttctcaaaggccccacagtcctccacttcctggggaggtagctgcagaataaaaccagcagagactccttttctcctaaccgtcccggccaccgctgcctcagcctctgcctcccagcctctttctgagggaaaggacaagatgaagtggaaggcgcttttcaccgcggccatcctgcaggcacagttgccgattacagaggcacagagctttggcctgctggatcccaaactctgctacctgctggatggaatcctcttcatctatggtgtcattctcactgccttgttcctgagagtgaagttcagcaggagcgcagacgcccccgcgtaccagcagggccagaaccagctctataacgagctcaatctaggacgaagagaggagtacgatgttttggacaagagacgtggccgggaccctgagatggggggaaagccgagaaggaagaaccctcaggaaggcctgtacaatgaactgcagaaagataagatggcggaggcctacagtgagattgggatgaaaggcgagcgccggaggggcaaggggcacgatggcctttaccagggtctcagtacagccaccaaggacacctacgacgcccttcacatgcaggccctgccccctcgctaacagccaggggatttcaccactcaaaggccagacctgcagacgcccagattatgagacacaggatgaagcatttacaacccggttcactcttctcagccactgaagtattcccctttatgtacaggatgctttggttatatttagctccaaaccttcacacacagactgttgtccctgcactctttaagggagtgtactcccagggcttacggccctggccttgggccctctggtttgccggtggtgcaggtagacctgtctcctggcggttcctcgttctccctgggaggcgggcgcactgcctctcacagctgagttgttgagtctgttttgtaaagtccccagagaaagcgcagatgctagcacatgccctaatgtctgtatcactctgtgtctgagtggcttcactcctgctgtaaatttggcttctgttgtcaccttcacctcctttcaaggtaactgtactgggccatgttgtgcctccctggtgagagggccgggcagaggggcagatggaaaggagcctaggccaggtgcaaccagggagctgcaggggcatgggaaggtgggcgggcaggggagggtcagccagggcctgcgagggcagcgggagcctccctgcctcaggcctctgtgccgcaccattgaactgtaccatgtgctacaggggccagaagatgaacagactgaccttgatgagctgtgcacaaagtggcataaaaaacatgtggttacacagtgtgaataaagtgctgcggagcaagaggaggccgttgattcacttcacgctttcagcgaatgacaaaatcatctttgtgaaggcctcgcaggaagacccaacacttgggacctataactgcccagcggacagtggcaggacaggaaaaacccgtcaatgtactaggatactgctgcgtcattacagggcacaggccatggatggaaaacgctctctgctctgctttttttctactgttttaatttatactggcatgctaaagccttcctattttgcataataaatgcttcagtgaaaatgcagctttactaa

SEQ ID NO: 385281 - DNA, 1158 bp, Homo sapiens
gggggagtgcgaatttcttggcctgtcggcaggtgctttctcaaaggccccacagtcctccacttcctggggaggtagctgcagaataaaaccagcagagactccttttctcctaaccgtcccggccaccgctgcctcagcctctgcctcccagcctctttctgagggaaaggacaagatgaagtggaaggcgcttttcaccgcggccatcctgcaggcacagttgccgattacagaggcacagagctttggcctgctggatcccaaactctgctacctgctggatggaatcctcttcatctatggtgtcattctcactgccttgttcctgagagtgaagttcagcaggagcgcagacgcccccgcgtaccagcagggccagaaccagctctataacgagctcaatctaggacgaagagaggagtacgatgttttggacaagagacgtggccgggaccctgagatggggggaaagccgagaaggaagaaccctcaggaaggcctgtacaatgaactgcagaaagataagatggcggaggcctacagtgagattgggatgaaaggcgagcgccggaggggcaaggggcacgatggcctttaccagggtctcagtacagccaccaaggacacctacgacgcccttcacatgcaggccctgccccctcgctaacagccaggggatttcaccactcaaaggccagacctgcagacgcccagattatgagacacaggatgaagcatttacaacccggttcactcttctcagccactgaagggccagaagatgaacagactgaccttgatgagctgtgcacaaagtggcataaaaaacatgtggttacacagtgtgaataaagtgctgcggagcaagaggaggccgttgattcacttcacgctttcagcgaatgacaaaatcatctttgtgaaggcctcgcaggaagacccaacacttgggacctataactgcccagcggacagtggcaggacaggaaaaacccgtcaatgtactaggatactgctgcgtcattacagggcacaggccatggatggaaaacgctctctgctctgctttttttctactgttttaatttatactggcatgctaaagccttcctattttgcataataaatgcttcagtgaaaatgcagctttactaa

SEQ ID NO: 385282 - DNA, 1605 bp, Homo sapiens
tgaatgcacgtgtcacaggcgggaggaaaaaggacaactgggctcagaaaaaggggctgccacgccccggcccctgcaagggctcagccccaggaggcagggcagcattgttagttgccaaggagcggagtagggctgtccctcgggtcgccgcgcgccctggcaccccggctcccctgcgcgccctcgcggagcagtaacgcgctttgctttctgtgttgcagttcagcaggagcgcagacgcccccgcgtaccagcagggccagaaccagctctataacgagctcaatctaggacgaagagaggagtacgatgttttggacaagagacgtggccgggaccctgagatggggggaaagccgagaaggaagaaccctcaggaaggcctgtacaatgaactgcagaaagataagatggcggaggcctacagtgagattgggatgaaaggcgagcgccggaggggcaaggggcacgatggcctttaccagggtctcagtacagccaccaaggacacctacgacgcccttcacatgcaggccctgccccctcgctaacagccaggggatttcaccactcaaaggccagacctgcagacgcccagattatgagacacaggatgaagcatttacaacccggttcactcttctcagccactgaagtattcccctttatgtacaggatgctttggttatatttagctccaaaccttcacacacagactgttgtccctgcactctttaagggagtgtactcccagggcttacggccctggccttgggccctctggtttgccggtggtgcaggtagacctgtctcctggcggttcctcgttctccctgggaggcgggcgcactgcctctcacagctgagttgttgagtctgttttgtaaagtccccagagaaagcgcagatgctagcacatgccctaatgtctgtatcactctgtgtctgagtggcttcactcctgctgtaaatttggcttctgttgtcaccttcacctcctttcaaggtaactgtactgggccatgttgtgcctccctggtgagagggccgggcagaggggcagatggaaaggagcctaggccaggtgcaaccagggagctgcaggggcatgggaaggtgggcgggcaggggagggtcagccagggcctgcgagggcagcgggagcctccctgcctcaggcctctgtgccgcaccattgaactgtaccatgtgctacaggggccagaagatgaacagactgaccttgatgagctgtgcacaaagtggcataaaaaacatgtggttacacagtgtgaataaagtgctgcggagcaagaggaggccgttgattcacttcacgctttcagcgaatgacaaaatcatctttgtgaaggcctcgcaggaagacccaacacttgggacctataactgcccagcggacagtggcaggacaggaaaaacccgtcaatgtactaggatactgctgcgtcattacagggcacaggccatggatggaaaacgctctctgctctgctttttttctactgttttaatttatactggcatgctaaagccttcctattttgcataataaatgcttcagtgaaaatgcagctttactaa

SEQ ID NO: 385283 - DNA, 349 bp, Homo sapiens
gtgtaaagcttcaaccatagagaagaaaacatctcagaatatatcttcagttgagtatgaaaattcatcattccataatgtgttttttataccttggagaggactttatggttaaaaactccttttataattcttgatattttaatttaaaagctctttatagtctttaatacttctttagaaatcatgaataccaattcttctagtgatatgttaccttaactgaccaccccaaaccaagagaagttgaatttcatcttaactctgaggatgacagattttgaaaaccttaaaacttcttgagcagtttggatctaatatgtggaccccttaaatggaaaatgctgtg

SEQ ID NO: 385284 - DNA, 298 bp, Homo sapiens
tcagactaagctgttatgactatgctaccaaggaataagcctggtgaagaaacaggcttttctgttaggcacagggctttcggagctgaacaatttcccagtctgatggaagagactgacaactacagtatggagtagtggccatgtacctacattaagagttatttacgatgagtaaataaagggagcaacaggggaccagaggaggtgaaatgaataattttcaccttgccgtattgacttcaagggcctggagaagcgtctaacctagacttctggagtaagctgaagcccaaag

SEQ ID NO: 385285 - DNA, 359 bp, Homo sapiens
cttgatctcctgacattgtgatctgcccgcctcggcctcccaaagtgctgggattacaggtgtaagccactgcacccggccaggcctgagctttttatatacaccaactgccaaacattccacgtgaatttcctgaaacttctctttggaaagcttctgtttgtatgtataaggcaatgtgcatgccagcatgtcagttacagcaggagagagggaacaagccatgtgggaactgatggagccatgtcacatccagtgtcctctgcagccgctatggagtgccaggaggaatgaggggcaaatggcacttgaaaaatggcacaggcaagagcatcatcggatctctccttttcttcctg

SEQ ID NO: 385286 - DNA, 90 bp, Homo sapiens
tgatcacaccaaggctcagtgccatttaatatgctattttgccattttagtttcctcttccacgaatttccatcattgttcattttcctc

SEQ ID NO: 385287 - DNA, 1957 bp, Homo sapiens
tgcgcctgcgccttgtgctcctgactggctgcgctccctgcccccaacaccgccgtggcctgggaaacggtcccagagctgctgagccgacctactggtgtcatggcagccccaaagacagcagctgtggggccgttggtgggagcggtggtccaggcaccaactccactcgctttctggttttcaattcaaaaacagcggaactacttagtcatcacaaagtggaattaacacaagagttcccaaaagaaggatgggtggaacaagaccctaaagaaattcttcagtctgtctacgagtgtatagcgagaacgtgtgagaaacttgacgaactgaatattgatatatccaacataaaagctgttggtgtcagcaatcagagggaaaccactgtaatctgggacaagttaacaggagagcctctctacaatgctgtggtgtggcttgatctaagaacccagactactgttgaggatcttagtaaaaaaattccaggaaatagtaacttcgtcaagtctaagacaggccttccactcagcacttacttcagtgcagtaaaacttcgttggatgcttgacaatgtgagaaacgtccaaaaggctgttgaagaaggtagagctctttttggtaccattgattcatggcttatctggagtttgacaggaggagttaatggaggcgtgcattgtacagatgtaacaaatgcaagtaggacaatgctttttaatatccattctttggaatgggataaagagctctgtgacttttttgaaattccaatggaccttcttccaaatgtcttcagttcttctgagatctatggcctaattaaaactggagccctggaaggtgtgccaatatctgggtgttgggggaccaatgtgctgcattagtaggacaaatgtgcttccaggagggacaagccaaaaacacctatggaacaggttgcttcttactgtgtaatacgggtcgtaaatgtgtgttttctgaacatggccttttgaccacagtagcttacaaactaggcagagagaagccagcatattatgcactggaaggttctgttgctatagcaggtgctgttattcgttggctaagagacaatcttggaattatagagacctcaggagacattgaaagacttgctaaagaagtaggaacttcttatggctgttactttgtcccagccttttcagggttatatgcaccttattgggagcccagtgcaagagggatactctgtggcctcactcagtttaccaataaatgtcatattgcttttgctgcattagaagctgtttgtttccaaacccgagagattttggaagccatgaaccgtgactgtggaattccacttcgtcatttgcaggtagatggaggaatgaccaacaacaaagttcttatgcagctacaagcagatattcttcatattccagtaataaaaccctttatgcctgaaacaactgcactaggagctgccatggcagcaggggctgcagagggagtaagcgtttggagccttgaaccccaggctttgtcagttctcaggatggaacgatttgaaccacagatccaggccacagaaagtgaaattcgttatgccacatggaagaaagccgtaatgaagtcaatgggttgggttaccagtcagtctcctgaaggtggtgatccttctatcttctctagtctgcctttgggattttttatagtgagtagcatggtaatgctaattggagcaagatatatctcgggtgtgccataataataccagctatggagtcccaagatgtaaacattttacataatgaaagcatatagcagttctgcctcttaatataatgacactattatagactctgattttgtttataaaccacttgctacatgacccatgaaaaccctagacttgtgacctgaaataaagaaaatacgttagaagagcactgtaaaaaaaaaa

SEQ ID NO: 385288 - DNA, 446 bp, Homo sapiens
cgagctcggaccgtcgcgaacgtgttatccaataacaggcttatttgaaatggtagctgttattggatgacactgagtctgaagggttaaccctatcataatttatatcaagtggactataatcactcatttttggaagagcatcgtatactaaggtgatatttgtaaacctacatgaattgtgctttgaaagaactaatttatttttaagagggcagtcctcaaatattgatcttaactattggtagtgatgttgagaatgtataaaagcagatggatttattatgtaagtcggaaaaagctaaaagtctcaatgattgtttggatgtggacattgagagacagatattaaggattgcacctgtatttctgatgtgggcatctgtgtacatgatggtactatttgctaagaacagggataacacgttcgcgagggtccggctcga

SEQ ID NO: 385289 - DNA, 607 bp, Homo sapiens
ctgggctggaggggaaaatttgggagttgtcagcatgtccatgatatgaagttatgagacttgaccagttcatccagggaatgcgtatacacagaagaaaagcattctcaggaccgcaccctgaggctctccaatgttgaaaggttggcaagataaggagaccccaacaaaggaagcagaaaaggagtggcgagtgagaagaattggggtgaggagtgtaccacagcacaggaggagaaaagtatccccagaagaagggagtgcagaagacttgaacaggctaaaataagtgtcccaatggctgaggggcacgtgaaaacgtgtttattagtcatatgggagatgcagctctaaatcacaaagaaacacaattacacaccagaatggctaaaattaaaatgactgacaatactgaatatacaaggatggggaccaactcaaactcttatacattgctggtgagggtgtaaaaggcagaaccactttgaaaagctatttggcagtttctaataaagctaaacagtgaccctttgagccagcacctacactcactagcatttactcaataaatgaaaaaaaacatgcacacgaaaactggtataaaaat

SEQ ID NO: 385290 - DNA, 417 bp, Homo sapiens
acaaatagttattcagtggcagtttacataatatatattaacagtagggtgctctttggatttccataattatttatattttaaatattttacattggaaaagtaaatagtatgcatcaaagaaaattactaatgagtttcttaagctttatcacgtgtgccctgtaattctgctttttcttcactgccttctgttccattagcaacagtaatgttcagacttgctgatgtggctgccaggttatttaatttgactaaaagtgatgtgtgataattgtgtttatttaagattttgttcagaatgtttttaaaaaggtcactatgttacttttgcattatatatagtatgactgtaaaattaacttatctagaagaattacttgtatacactaaaagttttggagacttttgagatta

SEQ ID NO: 385291 - DNA, 325 bp, Homo sapiens
cagagctagaatggggattgacttcttcttcgtggagaatggtccctggatcaatccacaggtttctgctgagcaagttttatgtattgaactctgatgaaggagggataagtggaggttttcaggtcagcatgcaagttgtatggaacatgaattatttctcaataaagctgattataaaacaaaatcagcatgcactcagcagccagaacttgcttctaaataccactctcttgataaaaggaaagccttcttggacaaatgacagatcctagggcttgggcagagaaaatagaagatgagtctggagaatcttctagtgcca

SEQ ID NO: 385292 - DNA, 507 bp, Homo sapiens
taatgatacagagcatcaatggtaagtttcttacagtatacagaaatatatacttgattgatcaaattacaaaatattcctacaaaatgaaacatggcatatgcttcttatgtgagaaaaacaatattagctagaaccgttgtgtggagctatggagttcataccctttgctgacaggttaggaaatacgtgaaaggcaaagctgaacataagtgttcctgaggtctatgtctttatacagcattatacaaagtaacatttaattagcaataataatagcaacataagaatatctaaactgtaaagaaaatataactgtaaagattagttcaatttttttcttttaagttattaatttattatttgccttatagtgcgtgatctggttgtactagtctaaaactgttaagaaccaaactctgacatcacacataggtattagttatagttcaaacactgactaggctacctaatttaaataaactcgtttccttattggtcaatgag

SEQ ID NO: 385293 - DNA, 2196 bp, Homo sapiens
  misc_feature (1)..(1): n is a, c, g, or t
  misc_feature (4)..(4): n is a, c, g, or t
  misc_feature (8)..(8): n is a, c, g, or t
  misc_feature (11)..(11): n is a, c, g, or t
  misc_feature (14)..(15): n is a, c, g, or t
  misc_feature (17)..(21): n is a, c, g, or t
  misc_feature (23)..(23): n is a, c, g, or t
nttnttanaanctnngnnnnncncaccactgaagatgaggttgaaaaacctgacttttatcatcatattgataatctcaggagaactctatgcagaagagaaaccctgtggttttcctcatgtggaaaatggaagaattgcccaatattactatacttttaaaagcttttactttccaatgagcatagacaaaaaattgtcatttttctgcttggctggttataccactgaaagtggaagacaagaagagcaaaccacgtgtacaacagaaggctggtctccagagccaaggtgcttcaaaaaatgcactaagcctgacctgagtaatggttacatctctgatgtaaagttattgtataaaattcaagagaacatgcattatggttgcgcttcagggtactcttctcaaccaacctgtaggaaagaacatgaaacgtgtttggctcctgaattatataatggaaattattccacaacacagaaaacattcaaagtgaaggacaaagtacaatacgaatgtgctactggctactacacagctggaggaaagaagacagaggaggtagaatgtctcacatacggatggtctctcacaccaaaatgtaccaaattaaagtgctcttctttaagattaattgaaaatggttattttcatcctgtaaagcaaacctatgaagaaggagatgtcgttcagtttttctgtcatgaaaattattatctaagtggatctgatttaattcaatgctataactttggttggtacccagaatctcctgtatgcgaaggaagaagaaacagatgtcctcctccacctctgcccataaactccaaaattcaaacacattcaacaacttatcgtcatggagaaatagttcatatagaatgtgaacttaattttgagatccatgggtcagcagaaatacgttgtgaagatggaaaatggacagaacctccaaaatgcattgaaggacaggagaaggtagcctgtgaggaaccacccttcattgaaaatggtgcagcaaatttacactctaagatttattacaatggggataaagtgacatatgcatgtaaaagcggctaccttctccatggatcgaatgagataacttgtaatcgtggaaaatggacacttcctcctgagtgtgttgaaaataatgagaattgtaagcatcctcctgttgtaatgaatggggctgttgcagacgggatattggcaagctatgcaacaggatcctcagtggaatatagatgcaatgaatattacttactgaggggatcaaaaatatctcgttgcgaacaaggaaaatggtcatccccacctgtttgcttggaaccatgtactgttaatgtggattacatgaacagaaataacatagaaatgaagtggaaatatgaagggaaagtcttacatggagatttaatagattttgtatgtaaacagggatatgacttatctccattaaccccattgtctgaattatctgtgcagtgcaacagaggagaagtgaaatatcctttatgtactagaaaagaatctaaaggaatgtgcacatctcctcctcttattaaacatggagtcattattagttcaacagtagacacctatgaaaatggctcttcagtagaatacagatgttttgatcaccatttcctagaaggatctagggaggcctattgtttagatggaatgtggactacaccaccattgtgtttagagccatgcacattatcttttactgaaatggaaaagaataatttacttctgaaatgggattttgacaacagaccacacattttgcatggtgaatatattgagtttatttgtagaggagatacttatccagctgaattatatattactggatctatacttagaatgcaatgtgacagagggcagttaaaatatccaagatgtattccaagacaaagcaaacaaacaactggaagtggtaatcaattcaacaggccttctgaattgtctgaagtgaaagcaacgtttgccatttgatatttgtgacactttggcaaatggaaaaataaaccaatttatacgtgcaatatttcaatgtgcaaaaattaacctatatgttctgtgataaggacaaaaatcacactttctcctacttctcaatataagttcaagcactactaataaaggttggatactaaagtgtttcctcatatgacagttta

SEQ ID NO: 385294 - DNA, 2207 bp, Homo sapiens
  misc_feature (1)..(1): n is a, c, g, or t
  misc_feature (4)..(4): n is a, c, g, or t
  misc_feature (8)..(8): n is a, c, g, or t
  misc_feature (11)..(11): n is a, c, g, or t
  misc_feature (14)..(15): n is a, c, g, or t
  misc_feature (17)..(21): n is a, c, g, or t
  misc_feature (23)..(23): n is a, c, g, or t
nttnttanaanctnngnnnnncncaccactgaagatgaggttgaaaaacctgacttttatcatcatattgataatctcaggagaactctatgcagaagagaaaccctgtggttttcctcatgtggaaaatggaagaattgcccaatattactatacttttaaaagcttttactttccaatgagcatagacaaaaaattgtcatttttctgcttggctggttataccactgaaagtggaagacaagaagagcaaaccacgtgtacaacagaaggctggtctccagagccaaggtgcttcaaaaaatgcactaagcctgacctgagtaatggttacatctctgatgtaaagttattgtataaaattcaagagaacatgcattatggttgcgcttcagggtacaaaaccactggagggaaggatgaagaagtggttcaatgtctctctgatggatggtcttctcaaccaacctgtaggaaagaacatgaaacgtgtttggctcctgaattatataatggaaattattccacaacacagaaaacattcaaagtgaaggacaaagtacaatacgaatgtgctactggctactacacagctggaggaaagaagacagaggaggtagaatgtctcacatacggatggtctctcacaccaaaatgtaccaaattaaagtgctcttctttaagattaattgaaaatggttattttcatcctgtaaagcaaacctatgaagaaggagatgtcgttcagtttttctgtcatgaaaattattatctaagtggatctgatttaattcaatgctataactttggttggtacccagaatctcctgtatgcgaaggaagaagaaacagatgtcctcctccacctctgcccataaactccaaaattcaaacacattcaacaacttatcgtcatggagaaatagttcatatagaatgtgaacttaattttgagatccatgggtcagcagaaatacgttgtgaagatggaaaatggacagaacctccaaaatgcattgaaggacaggagaaggtagcctgtgaggaaccacccttcattgaaaatggtgcagcaaatttacactctaagatttattacaatggggataaagtgacatatgcatgtaaaagcggctaccttctccatggatcgaatgagataacttgtaatcgtggaaaatggacacttcctcctgagtgtgttgaaaataatgagaattgtaagcatcctcctgttgtaatgaatggggctgttgcagacgggatattggcaagctatgcaacaggatcctcagtggaatatagatgcaatgaatattacttactgaggggatcaaaaatatctcgttgcgaacaaggaaaatggtcatccccacctgtttgcttggaaccatgtactgttaatgtggattacatgaacagaaataacatagaaatgaagtggaaatatgaagggaaagtcttacatggagatttaatagattttgtatgtaaacagggatatgacttatctccattaaccccattgtctgaattatctgtgcagtgcaacagaggagaagtgaaatatcctttatgtactagaaaagaatctaaaggaatgtgcacatctcctcctcttattaaacatggagtcattattagttcaacagtagacacctatgaaaatggctcttcagtagaatacagatgttttgatcaccatttcctagaaggatctagggaggcctattgtttagatggaatgtggactacaccaccattgtgtttagagccatgcacattatcttttactgaaatggaaaagaataatttacttctgaaatgggattttgacaacagaccacacattttgcatggtgaatatattgagtttatttgtagaggagatacttatccagctgaattatatattactggatctatacttagaatgcaatgtgacagagggcagttaaaatatccaagatgtattccaagacaaagcactctgtcttatcaagaacccttaagaacatagaaatgaatggcagaaagaggagtcatatttcaatacatcatgaaattccttataaaatataattttgaggaaataagttaaaaacttcggagtttttccttgcttaaatatttgaatctaaattatttgtgctgaacatttcattatttataaatgaaaaccaataaatgtctaatttttagtttgt

SEQ ID NO: 385295 - DNA, 482 bp, Homo sapiens
acccatcaagttccctgggtttgcatgtgcaatcgattcctcgttagggatattctttcctctggtttttccttcagatacgagcttacgttcgacctcttccaagaagacgtcaggaatgtccttctgaatgcctttcctagttctcatgagaacacagcagtttttaatcaggcagagcacttattacattataattatcttcttggttcccaactgaacttttaagttccaagtgggcagtcagtaaatatttcttggtgcatcaaatgctccacattttacacagttaacgtttgctgcctacaaaccaatttggatagttactttaaagtatcttatctctagttctcaaagctttagtttcctttaacacttaagtatctcttgcatattttcttttcaaacactgcttcgttaatttgcaaattcattggactcctttccttaaaaatcaaaataataaaacttcaagaaagctg

SEQ ID NO: 385296 - DNA, 236 bp, Homo sapiens
ctcaaaaaaaaaaaaaaaaaaattacacatagttatatgtgtgaaggcttagtatatatagaaaactaataaatgtcagctgcaatgattttttaaaataattcaattattttgcaacattccttcagttaatttgacaacattcatgtttattaaatcatatttattttcattaaaatacaaggtatctgcagtgagccgagattgcaccactgcactccagcctgggtgataga

SEQ ID NO: 385297 - DNA, 418 bp, Homo sapiens
gtggtaacttagaacacacaggaaaacaatatcaaatatcaattccctccagagttgtaactttctaaatgtagtaatcagtaatttgtcaagattatcattcagcatacaaatactttctatataatttgaacttccataccaccttctatatcaagtccttaaatgctaccaaatataaaccaggtattgttttcatgaaataagaatacaggtgttaaagatgaataaactgagacattaaagagattaagtgtcttgctttaagggggtgggggaggcaaggtcaaactaagaatagaagctcaagtactatcacctgtcctaagcataaatctaaaaaactttccactttccgactagccataagtacatggtcccatcaatttttatgtattttaaacatacattttgcagg

SEQ ID NO: 385298 - DNA, 495 bp, Homo sapiens
ttggagacagagtttcactcttcttgcccaggctagagtgtaatgacgggattttaccatgttgaccaggctggtcttgatctcccgacctcaggtgatctgcccgcctaggcctcccaaagtgctgggattacaggcgtgaggcaccgcaccaggcctgtatttttagtagagatagggtcctgccatttagccaggctgatcttgaactcctgacctcaggtgatccacccacctcagccaaagtgttgggattacaggcgtgagaatcacttgaggccaggagtttgagaccagcgtgggcaacgtgacaagacccagtctctacaaaaaacttaaaaattagctgggcatggtggcacacacctgtggtcccagctactcagggggctgaagtgggaggatcacttgagcccaggaggtcaaggctcaatgagctaataatcctgctactacagtccagtcttgacaacagagtaagaccctgtctcgaaa

SEQ ID NO: 385299 - DNA, 283 bp, Homo sapiens
gtctcccctgtaaggatacctagttaacaccttcataagaaacaaaatcaggtgagcactcatagtacctgtttttaacttaatatggctgaaagaggtactgaagagatagaaaaaaagagtcctgaattgctgatgccacccctcccacacccccagcagcagcagcagcagcagagtggtgcagagagaatctatgtgctgggagatggaaagcacagcaattgtgagtcattgaactcagtgcttttctgttagagcaaaaagaaaaacagaccaaact

SEQ ID NO: 385300 - DNA, 788 bp, Homo sapiens
tgcagaaaaaaaaaaatccatcctaatatggaatcacaagtgacctggaatagccaaaagcatcttgaaaaagaggaacaaaattgcagtctcatacttcctgatttcaaaacttaccacaaagctacagcaatcaaaacaatgttgaattagcataaagacatatttataaaacaatgggaaaagataggccagaagtaaagcctcacatatatggtcaaggggccagggtatcacccttttgacaagaatgccaagaccattcagtgggggaaaagacagcttcaataaatggaactgggaaattggatatccacatgcaaaaagaatgaagtcagacacttatcttatacaatatacaaaaattaactcaaagtggatcaaagacctaaatctaagggctagaattataaaacacttaaaagaaaagataggtgaaagcttcatattaggcaatgatttcttgaaaatgacaccaaaagcacaggcaacaacaaaaaataaggtggactacatcaaaactttaaaaacttctgtgtctcaaaggacacaatcaacagagtgaaaaggcaaccaagtgactgggaaaaatatttataaatcatataactgataaggggttaatatccagaatatataaagaactcctataactcaacaataaaacaaataacctctttttaaaaaatgggtgaaggacttgaatacacatttctcaaaggaagataattagggaaacacaaataaaaaacataaagaaatatcactttacacccattagggtggcc

SEQ ID NO: 385301 - DNA, 304 bp, Homo sapiens
gctaattttaaacttcctagtagccacattttaaaaaatgaaaataaacaagtaaaaatagctttattaatataattaatatagccaatatattgaaaatgttttcatttcaacatgtaattaatatttaaaaattaatattaaaatcattgagatatgttactttttgaatactaatcaaaatctagtacaggtgtatatacatcacgtcattacttttctttttgaagttttatttatttatttatttatttagagacagtctcgctctgtcacccagactggagtgcagtggtgtgatctc

SEQ ID NO: 385302 - DNA, 339 bp, Homo sapiens
cttttctaagagacaatgaattatttccctgctgttgacatatcagctgactttacattttttcttcagtgagttttgtgaactcagaacagatttttctctccattccctttttgttatatgcaatcattgacaatgccagtagatgaacacccagctaggaaacaatggcttaatgaatacctgtattcatgctctgctttaggaaaaggaaagaatgcctctcctagcctactcctgcaaactgattcacaccaaggacaaaggtaaccagtctgggatagaaactcagccatagcaatgagcagccttagtgtttctcaccttagtttgctcagc

SEQ ID NO: 385303 - DNA, 578 bp, Homo sapiens
gtagcccatagcagattattcctcccctacttttgtttcccaccctctcctatgactcaccttccactttttcaccagttcacagtctgaactgcaaagcaacctagaggcatcaagcaaaatgagaaagaaggaaagcaagtactatttattaaacacccactctgtgccaaacttgtgactaaattactttattaaatcctcacacagctgaggatatagatctttatcttcagtatatagatgaggcagctgaggcttaaggagattaaataacttgcccaggatcacacagctaccaagtatcagagctggttttcgaatccagttttatctgatgccgaaacccagtgtttcccttccaccctgcttcccctttgaaaaccaggaatgaattcacatagagaatcagaccttgaggagttgagttgttctctattttctaaagaatttagtttataccttcaaaagggcttccctttgtcttgagatattctaagttccaagtagtctcaagtggtttttgtagcaggagctagactggaaaaactctagagctttgtatttcattataagca

SEQ ID NO: 385304 - DNA, 500 bp, Homo sapiens
aaggacaggaggtcattggggattttagaaggttacactggatacatttccattaagcttcacgatatcccacaggtccattctgtgtgaaatggtctaaaaatttcctgttctcatgcttcatttttttcttttagtaatattcctaattgtgtaaaatagtatttcttttcatttatcttaattatgttatattaagatatcatgtgtatgcttaaattatacttttgggcttcaaatgagtgaccccacccagaccttcttccctctccccgaccaaagccgtctttagctttctgaaaccagctgatcaagttgtttttacttgctcattcctatttacctatttagcattgcatgcactttaattatttattttttgagacaaagtctcgtgccctcacccaggctggagtgcagtggtgctatctcagctcactgcaacctctgcctcctgggttcgagcgattctcctgcctcagcctcccaagtagcttgga

SEQ ID NO: 385305 - DNA, 424 bp, Homo sapiens
cctttgttgcaattcacctatggaggcctgccaaaggctgcaaacattatccctatctgccactgacacctcaagtacgcttggagctgctaggtcatatggcccaagtggcagagcagcttgcacagcagcctagacctgttgtggagccttctcctgctttagaccctactcaaaactagcagctttttgagttttttggtaaatgagctagaatttaccaaatggaatttcacccctgtggtttgaatgtctcccctctaaaattcaggtcttgccaattagatagtattaacccttttcctgtttagaattttaaaaatgcagctcatggccagcactcatttaattttacttaaacatgctctttgaggctgcagcaaatctgacttgattttccaatgtgaaaataaaatataaaaac

SEQ ID NO: 385306 - DNA, 339 bp, Homo sapiens
agccaagcaacagcctcctggaccaggcacaagccttttggggggcagtgccccatccctaggattccctagctgctgtgtagacctgagcctatacctgccgccaccccgagcactgatgggacacagcaggtggcaacgggatgcccaggctcctactctccttgctcagtctgccccccgataggcctttgacttgtgcttcccctggcaaagctaccttgagtccttagaaatcccccctgagaagtacagaaggcccccccccacagggatatgctctgaaataactcagctcagaaatagctactaagtgggcctgaatagggagtgtgggag

SEQ ID NO: 385307 - DNA, 1761 bp, Homo sapiens
atctttgctgcaaaggctgggtatcggctgtgctcagcaaagcgtcaactcgtgcaagaacttagcaggaatagttctggctaaggttaggaggctgccaccaaagtctcttttttgttcctctgcttctcccgtttgcctccttatcatgagatctttttgctaagctggcagaaagattgcatagtcagtgcttccagctctgctcccacctgatcctgcactgtcctctggtccctgaatgaatgaactctgatacccaatcttgtctcgagccttctctatgccactcatggctcctcttctgctctttccatctttttgctgagagttctgagctctgtacttcctcttggcccatctcacttcctgaaacacccctgaagagggttgcttatcttgatggaactcaaaaagccaaaaagctgcaggcagaggcgttgaggacatctgtttggggaactaagagcagcagcactttcagattcagtccatatagagctgtcctacagcattctggaaacttgaggatgtgcggtgcataaaggggctggaagtgacccacctgtgatgagccctttctaaggagaagggtttccaagagatcaccccaccagaaaaggatacaagagggtcaccactcacagaagaatatggctggccctgggcctttgctggctggtgtcattcctggtgggattgacccccatgtttggctggaacatgaaactgacctcagagtaccacagaaatgtcaccttcctttcatgccaatttgtttccgtcatgagaatggactacatggtatacttcagcttcctcacctggattttcatccccctggttgtcatgtgcgccatctatcttgacatcttttacatcattcggaacaaactcagtctgaacttatctaactccaaagagacaggtgcattttatggacgggagttcaagacggctaagtccttgtttctggttcttttcttgtttgctctgtcatggctgcctttatctatcatcaactgcatcatctactttaatggtgaggtaccacagcttgtgctgtacatgggcatcctgctgtcccatgccaactccatgatgaaccctatcgtctatgcctataaaataaagaagttcaaggaaacctaccttttgatcctcaaagcctgtgtggtctgccatccctctgattctttggacacaagcattgagaagaattctgagtagttatccatcagagatgactctgtctcattgaccttcagattccccatcaacaaacacttgagggcctgtatgcctgggccaagggatttttacatccttgattacttccactgaggtgggagcatctccagtgctccccaattatatctcccccactccactactctcttcctccacttcatttttcctttgtcctttctctctaattcagtgttttggaggcctgacttggggacaacgtattattgatattattgtctgttttccttcttcccaatagaagaataagtcatggagcctgaagggtgcctagttgacttactgacaaaaggctctagttgggctgaacatgtgtgtggtggtgactcatttccatgccattgtggaattgagcagagaacctgctctcggaggatgcctaggagatgttgggaacagaagaaataaactgagtttaagggggacttaaactgctgaattcacctgtggatgtttttgagtaaataaaagctaatagctaaaaaaaatgta

SEQ ID NO: 385308 - DNA, 2255 bp, Homo sapiens
atctttgctgcaaaggctgggtatcggctgtgctcagcaaagcgtcaactcgtgcaagaacttagcaggaatagttctggctaaggttaggaggctgccaccaaagtctcttttttgttcctctgcttctcccgtttgcctccttatcatgagatctttttgctaagctggcagaaagattgcatagtcagtgcttccagctctgctcccacctgatcctgcactgtcctctggtccctgaatgaatgaactctgatacccaatcttgtctcgagccttctctatgccactcatggctcctcttctgctctttccatctttttgctgagagttctgagctctgtacttcctcttggcccatctcacttcctgaaacacccctgaagagggttgcttatcttgatggaactcaaaaagccaaaaagctgcaggcagaggcgttgaggacatctgtttggggaactaagagcagcagcactttcagattcagtccatatagagctgtcctacagcattctggaaacttgaggatgtgcggtgcataaaggggctggaagtgacccacctgtgatgagccctttctaaggagaagggtttccaagagatcaccccaccagaaaagggtaggaatgagcaagttgggaattttagactgtcactgcacatggacctctgggaagacgtctggcgagagctaggcccactggccctacagacggatcttgctggctcacctgtccctgtggaggttcccctgggaaggcaagatgcccaacaacagcactgctctgtcattggccaatgttacctacatcaccatggaaattttcattggactctgcgccatagtgggcaacgtgctggtcatctgcgtggtcaagctgaaccccagcctgcagaccaccaccttctatttcattgtctctctagccctggctgacattgctgttggggtgctggtcatgcctttggccattgttgtcagcctgggcatcacaatccacttctacagctgcctttttatgacttgcctactgcttatctttacccacgcctccatcatgtccttgctggccatcgctgtggaccgatacttgcgggtcaagcttaccgtcagatacaagagggtcaccactcacagaagaatatggctggccctgggcctttgctggctggtgtcattcctggtgggattgacccccatgtttggctggaacatgaaactgacctcagagtaccacagaaatgtcaccttcctttcatgccaatttgtttccgtcatgagaatggactacatggtatacttcagcttcctcacctggattttcatccccctggttgtcatgtgcgccatctatcttgacatcttttacatcattcggaacaaactcagtctgaacttatctaactccaaagagacaggtgcattttatggacgggagttcaagacggctaagtccttgtttctggttcttttcttgtttgctctgtcatggctgcctttatctatcatcaactgcatcatctactttaatggtgaggtaccacagcttgtgctgtacatgggcatcctgctgtcccatgccaactccatgatgaaccctatcgtctatgcctataaaataaagaagttcaaggaaacctaccttttgatcctcaaagcctgtgtggtctgccatccctctgattctttggacacaagcattgagaagaattctgagtagttatccatcagagatgactctgtctcattgaccttcagattccccatcaacaaacacttgagggcctgtatgcctgggccaagggatttttacatccttgattacttccactgaggtgggagcatctccagtgctccccaattatatctcccccactccactactctcttcctccacttcatttttcctttgtcctttctctctaattcagtgttttggaggcctgacttggggacaacgtattattgatattattgtctgttttccttcttcccaatagaagaataagtcatggagcctgaagggtgcctagttgacttactgacaaaaggctctagttgggctgaacatgtgtgtggtggtgactcatttccatgccattgtggaattgagcagagaacctgctctcggaggatgcctaggagatgttgggaacagaagaaataaactgagtttaagggggacttaaactgctgaattcacctgtggatgtttttgagtaaataaaagctaatagctaaaaaaaatgta

SEQ ID NO: 385309 - DNA, 413 bp, Homo sapiens
catggtaaaaccctgtctactaaaaaatacaaaaaaaaaaattagctgggcatggtggtgcgtgcctataatcccagctacttgggaggctgaggcaggaaaatcgcttgaacccgggagactgaagttgcagtgaggtgagattgcaccactgcactccagcctaggcgattccatctcaaaaacaataacaacaaaataacattgttggaatatttagttaatttatagaagcgtattggcctaattggggcaaataccttattctgacattctctctatttgctttactgagctttttcaccagtggaatttaagcccttgatacatgaggagggaaaataccttggagctgtgctgcacatgtaaagtacacaggagatttagaaaacttcgtagcaaaaaaaagagtg

SEQ ID NO: 385310 - DNA, 278 bp, Homo sapiens
caatattaaaatagcaccgtttattgactttaatatgtgacaaccactgtgctgagctatgtatgcttcccttattcaatctatgtaaaaattttggggaagtagctgagacttttttatttccctgacagagctgggattcagtggttggtttcttgaaaaagctaggttctttgcctaacagcagcttagctcctcaatttagggaatgaaagcaggaatgaaaatggccagagttttcgctcctcagcttgtggaggagcttgagtacatgaacc

SEQ ID NO: 385311 - DNA, 412 bp, Homo sapiens
tagaaaacctgagtggccctatatgtactgaagaaggttaatatgtaataaaaactttcccagaaagaaaacttcaggcccagatagctttcctggtgaacggtatacattagggaagaaataataccaatttgacacaaattcttccagaaaattgaaaaggaggaaatattttctagcccattttatgaggccagcattaccttgatacccaaaccagcaaagacctcacaaggaaagaaacctcggaccaacattctacacggatgtagatgcaaaaaatttaaacaattttgcaaatgcaataatatataaaaaggataatacatcatgactagggggacttagctcaggaatgcagggttggtttaatgttcaaaaatcaatcattgtaattcactatattaaccaa

SEQ ID NO: 385312 - DNA, 245 bp, Homo sapiens
gatctaagttctaagccaaataactaacaaattccaggtactatgccatcatataatatttataaatgtgttatatatattatgagatatgtataagaatatagaatgaatatgtaataaattatacttttaaattaatattttcaaatatataaatatgtagtttcagactgaaactgttctaaactatataaatgtattatgtatgttttataaaatacagtactcataatatgtattatatg

SEQ ID NO: 385313 - DNA, 110 bp, Homo sapiens
aagcaattcgcccacctaggcctcacaaaatgctggggttacaggcagaagccaccacacctggcctaaaaaatatgtttaaaggtggctgaggcttgctggagtgcagt

SEQ ID NO: 385314 - DNA, 556 bp, Homo sapiens
gctgataaaaagtgagttccagtgtgaatccactaaacagttgacccttaaacatgggttggaactttacatggattttcttccacctctgccactcatgagacagcaagaccgaccccttttcttcttcctcctcctcaggattttctcaatatcacttgcttttctctagcttactttattgtaagaatacaatatataatacctacacaaaatatgtgttacttggcagtttgttacaggtaaggcttccagtcaacaggaggctattagtaattaagtttgggggagtcaaaagttgtacatggacttttgactgcagggggtcaatgcccctagcctgcatgttaagagtcaactgtacttacattttaccccagaaagaataccaattatctaataggattttttgtctttcttttcctttcccattcctttcttctttcctttttctctccgattcagttaagtaaataaaccaaaagactctcatgagtatttgggggattgaaatacaatagtctcgagtctcaatcgaccacactcaggataggag

SEQ ID NO: 385315 - DNA, 742 bp, Homo sapiens
gggtccttccatccactttctccctcccatccaaggggcatgggggactgaaaggataaggaaacacatgaagagacaataccaaattcaggacgaaccagacagttttgcaaactgaacatcttcctggcctgggacatggacgttggctctgacaacacagactcaatagctaataggcttctaaatggagccaacctgtggataaacaagttcccaaaagagaggacaaaactatctgtcagcaaactgaataatcttgtgcaagagtttcagacatttctagaaaatctgaaagacaatgaagatgatgatgctgtgtttcctgaaactactcagatttccagctgtacggcagctcccctccagaaatggttcaggtcagtcatcaagaacatgatgcttgtcaagacctgcccaagtgcaagccaccagaaaataaagatgttatgtagtctccacagactcctctaaggcttaaggaacatgagctggctgaggtgagcacagagatgcctcataggataggaagggataggcctgggttgaaccacagaatcttacgaccactaggaagcaggtcccaaggggcccgaagtgataccagtgggagacagacaacgaagaaaggagtcagggtggagttttagggaaaagactgaggaatgctgaggtaaacaagagggtagcaagcaaggagaaggactaaaaactgtatctacattgaagctttgcattgaca

SEQ ID NO: 385316 - DNA, 291 bp, Homo sapiens
ggtgccaaaaggttggagaccactgttgtcaccaatataatttcacatttgccatatcttaatttcccattgatgcctaatagttacctgaagtttctccctcagatgcttaactagctgggatcatatacttgggtcagacccattagtaggggagaagaagggcagtttataaaagccatttagctgatcctgaccagcatttttatttcttattttattttattattattttcttcaagactgagtctcactctgtcgcccaggctggcgtgcagtggcgcgatcttg

SEQ ID NO: 385317 - DNA, 363 bp, Homo sapiens
  misc_feature (1)..(2): n is a, c, g, or t
  misc_feature (4)..(4): n is a, c, g, or t
  misc_feature (208)..(208): n is a, c, g, or t
  misc_feature (210)..(210): n is a, c, g, or t
  misc_feature (344)..(344): n is a, c, g, or t
  misc_feature (351)..(351): n is a, c, g, or t
  misc_feature (361)..(362): n is a, c, g, or t
nnangtgggagacagatggatttcagtgggatgtcattatgaaaagcatataaccttctccaaataattaaaagcagcaacaaaagacaaaaagaagaaagccatttgaataaaaattaaccttataaatgcaataaacattttaattcctttaacaacaaaaggttgggagcatgttgaaagaacccagaagccaacctgaaagagntntctcaagcagtctctaagcagcagtgactactgcagctattggctggtaagaacaaagcaagcacaaatggactgaaacagtttatgccttacatagaccacatacgcaagatcaccatagtgtcagctgcctntatctcntctcccacanna

SEQ ID NO: 385318 - DNA, 758 bp, Homo sapiens
tcctaattggggcaatccattcttttctcgatttctttccaggatatgtgaggacgcagatgtctggtaatgaggtaatgtctctttttccttgtctttgagtggcagatcattctcccggttctttggccagagggagatgacatgggggtagggaggagtaaggttgctgctgtctggatgggactgtcccctgagtctctggaacggctgtggggggtggtgaggctgcctcctgagaccttcatcactgtgcctccaggtctcaagagctgttctgctccctcagtcatgctaaggtcctcactgaagcttctctctctggagcctgaagtagtgatgagtagtctgggccctgggtgaggtaaaggacattcatgaggtcaatgttctgggaataactctcttccctgatccttggaggagcccgaactgattctggagctctgtgttctgagatcatgcatctcccacccatctgcccttctcccttctacgtgtacatcattaatccccattgccaagggcattgtccagaaactcccctgagaccttactccttccagccccaaatcatttacttttctgtggtccagccctactcctataagtcatgatctccaaagctttctgtcttccaactgcagtctccacagtcttcagaagacaaatgctcaggtagtcactgtttccttttcactgtttttaaaaaccttttattgtcaaataaaatggagatacaaaaaatgtacatttta

SEQ ID NO: 385319 - DNA, 1689 bp, Homo sapiens
  misc_feature (979)..(979): n is a, c, g, or t
ttcggcaatggcgggcgcccctcccccagcctcgctgccgccttgcagtttgatctcagactgctgtgctagcaatcagcgagactccctggggtaggacctccgagccaggtgcgggagatagtctcctggtgcgaggatttttaagccggtcggaaaagcgcagtattcgggtgggagtgacccgattttccagacaggtgaagacagaacaagaaaacaaaccaagaatttcccctcaccagccaccagctctgccagcaacttgatcttagacttcccagcctccgtaacgcctctgcttataatctgtcatggattggaaaactagaaaaagcagtttacagagtataacaaactttggaggagttaatcgactctaagtaaaagagtatctagcacggctgtggaacaaaggagagactcacaaactgttgaaagaataaatgaatgaatgaattctgttcatgagctttaataaaacagctctgagtagtaacagtggatcaaatttaggcttcttgatgcaggcatggtgtagattactacttctgtattgtcccaggagctcagcacattcctgcagagatgataggagctcatctgatacttgtcagctttgaataaactccagtccccaagagagagaatgagaatcaccggaatacagaaacttccctgttggacttcccaacattcttgaatgcaccaagatagcctcttgctgtgagattaataaatgaataaatgcctccatatttttcaaatctgtgaagttaacaacatgtagattttctttgcatatttaaaaactgcaactaaatcttaatgcctctgaagcagatggaagaaaataataggcttcccattaactgtgtcaaattgtataggtcttggccatcactggtcctgtttgtgatgaaggtttttgcccttggatataattttaattttcaatttcttctaatagggacttcanacatcaatattgaggatgaacttctctagtgtcaaggactgattgagttgtgtaacccctgaatatctgagacaggtctcgattattttagaaagtttatttgccaaggttgaggatgtgtgcctgtgacacggcctcgggaggtcctgaggacatgtgctcaaggtggtcagagcacagctttgctttatacattttagagagacatgagacatcaaccgacattatgtaagatgaacatggttccatctggaaaggcgagacaacttcaaacgaggagggggcttccaggtcataggtagataagagacaaatggctgcattcttttgagtttctgattagcctttccaaaggaggcaattagagtgagcaaaatgaacaaaatcaattattttgattctgaacaaaatgggaggctggttttccctaagcagttcccagcttgacttttccctttagctgagggatttggggggcccaagatttatttttctttcaccgttgtatcaaactacacagcggccttggaaaccatcacagttgagagtaggtaacacccatttgttgcatagttttgtgctccacactcttatctacaaaattatgaatttttttacatatattaatttcagaaaaactaaaaataaaacaaagtagtttcaaactagtattgtttttatatcttaaaaataaagctttatatactctc

SEQ ID NO: 385320 - DNA, 1837 bp, Homo sapiens
  misc_feature (1127)..(1127): n is a, c, g, or t
tcacgcccggctgcttttttgttttagtagagaggaggtttcaccgtgttagccaggatggtctcaatctcctgacctcgtgatccgcccgcctcggcctctcaaagtgctgggattacacgcgtgagccaccgcgcctggcctgaagaaagtaggaagaagaaaagctttttgaatgaatcacttctcatcttctccgaagttggaagcatcaagaatctaaataagcatttatgacggctggcatgaatatgcggaagatagaatgggagtcctagttgaccttcatataatttttagaagatggagcacttcaacttcttccactcatgaaaagagaggtgacaggtgaagacagaacaagaaaacaaaccaagaatttcccctcaccagccaccagctctgccagcaacttgatcttagacttcccagcctccgtaacgcctctgcttataatctgtcatggattggaaaactagaaaaagcagtttacagagtataacaaactttggaggagttaatcgactctaagtaaaagagtatctagcacggctgtggaacaaaggagagactcacaaactgttgaaagaataaatgaatgaatgaattctgttcatgagctttaataaaacagctctgagtagtaacagtggatcaaatttaggcttcttgatgcaggcatggtgtagattactacttctgtattgtcccaggagctcagcacattcctgcagagatgataggagctcatctgatacttgtcagctttgaataaactccagtccccaagagagagaatgagaatcaccggaatacagaaacttccctgttggacttcccaacattcttgaatgcaccaagatagcctcttgctgtgagattaataaatgaataaatgcctccatatttttcaaatctgtgaagttaacaacatgtagattttctttgcatatttaaaaactgcaactaaatcttaatgcctctgaagcagatggaagaaaataataggcttcccattaactgtgtcaaattgtataggtcttggccatcactggtcctgtttgtgatgaaggtttttgcccttggatataattttaattttcaatttcttctaatagggacttcanacatcaatattgaggatgaacttctctagtgtcaaggactgattgagttgtgtaacccctgaatatctgagacaggtctcgattattttagaaagtttatttgccaaggttgaggatgtgtgcctgtgacacggcctcgggaggtcctgaggacatgtgctcaaggtggtcagagcacagctttgctttatacattttagagagacatgagacatcaaccgacattatgtaagatgaacatggttccatctggaaaggcgagacaacttcaaacgaggagggggcttccaggtcataggtagataagagacaaatggctgcattcttttgagtttctgattagcctttccaaaggaggcaattagagtgagcaaaatgaacaaaatcaattattttgattctgaacaaaatgggaggctggttttccctaagcagttcccagcttgacttttccctttagctgagggatttggggggcccaagatttatttttctttcaccgttgtatcaaactacacagcggccttggaaaccatcacagttgagagtaggtaacacccatttgttgcatagttttgtgctccacactcttatctacaaaattatgaatttttttacatatattaatttcagaaaaactaaaaataaaacaaagtagtttcaaactagtattgtttttatatcttaaaaataaagctttatatactctc

SEQ ID NO: 385321 - DNA, 1953 bp, Homo sapiens
  misc_feature (1243)..(1243): n is a, c, g, or t
tcacgcccggctgcttttttgttttagtagagaggaggtttcaccgtgttagccaggatggtctcaatctcctgacctcgtgatccgcccgcctcggcctctcaaagtgctgggattacacgcgtgagccaccgcgcctggcctgaagaaagtaggaagaagaaaagctttttgaatgaatcacttctcatcttctccgaagttggaagcatcaagaatctaaataagcatttatgacggctggcatgaatatgtctataggtccactgatacggctttgctactctaccccgacaccctgaggactaatctattaatagtatgtacttcttataatgatgagtgaggcacaaaagaggaagcagaaacgcggaagatagaatgggagtcctagttgaccttcatataatttttagaagatggagcacttcaacttcttccactcatgaaaagagaggtgacaggtgaagacagaacaagaaaacaaaccaagaatttcccctcaccagccaccagctctgccagcaacttgatcttagacttcccagcctccgtaacgcctctgcttataatctgtcatggattggaaaactagaaaaagcagtttacagagtataacaaactttggaggagttaatcgactctaagtaaaagagtatctagcacggctgtggaacaaaggagagactcacaaactgttgaaagaataaatgaatgaatgaattctgttcatgagctttaataaaacagctctgagtagtaacagtggatcaaatttaggcttcttgatgcaggcatggtgtagattactacttctgtattgtcccaggagctcagcacattcctgcagagatgataggagctcatctgatacttgtcagctttgaataaactccagtccccaagagagagaatgagaatcaccggaatacagaaacttccctgttggacttcccaacattcttgaatgcaccaagatagcctcttgctgtgagattaataaatgaataaatgcctccatatttttcaaatctgtgaagttaacaacatgtagattttctttgcatatttaaaaactgcaactaaatcttaatgcctctgaagcagatggaagaaaataataggcttcccattaactgtgtcaaattgtataggtcttggccatcactggtcctgtttgtgatgaaggtttttgcccttggatataattttaattttcaatttcttctaatagggacttcanacatcaatattgaggatgaacttctctagtgtcaaggactgattgagttgtgtaacccctgaatatctgagacaggtctcgattattttagaaagtttatttgccaaggttgaggatgtgtgcctgtgacacggcctcgggaggtcctgaggacatgtgctcaaggtggtcagagcacagctttgctttatacattttagagagacatgagacatcaaccgacattatgtaagatgaacatggttccatctggaaaggcgagacaacttcaaacgaggagggggcttccaggtcataggtagataagagacaaatggctgcattcttttgagtttctgattagcctttccaaaggaggcaattagagtgagcaaaatgaacaaaatcaattattttgattctgaacaaaatgggaggctggttttccctaagcagttcccagcttgacttttccctttagctgagggatttggggggcccaagatttatttttctttcaccgttgtatcaaactacacagcggccttggaaaccatcacagttgagagtaggtaacacccatttgttgcatagttttgtgctccacactcttatctacaaaattatgaatttttttacatatattaatttcagaaaaactaaaaataaaacaaagtagtttcaaactagtattgtttttatatcttaaaaataaagctttatatactctc

SEQ ID NO: 385322 - DNA, 1643 bp, Homo sapiens
  misc_feature (933)..(933): n is a, c, g, or t
tcacgcccggctgcttttttgttttagtagagaggaggtttcaccgtgttagccaggatggtctcaatctcctgacctcgtgatccgcccgcctcggcctctcaaagtgctgggattacacgcgtgagccaccgcgcctggcctgaagaaacaggtgaagacagaacaagaaaacaaaccaagaatttcccctcaccagccaccagctctgccagcaacttgatcttagacttcccagcctccgtaacgcctctgcttataatctgtcatggattggaaaactagaaaaagcagtttacagagtataacaaactttggaggagttaatcgactctaagtaaaagagtatctagcacggctgtggaacaaaggagagactcacaaactgttgaaagaataaatgaatgaatgaattctgttcatgagctttaataaaacagctctgagtagtaacagtggatcaaatttaggcttcttgatgcaggcatggtgtagattactacttctgtattgtcccaggagctcagcacattcctgcagagatgataggagctcatctgatacttgtcagctttgaataaactccagtccccaagagagagaatgagaatcaccggaatacagaaacttccctgttggacttcccaacattcttgaatgcaccaagatagcctcttgctgtgagattaataaatgaataaatgcctccatatttttcaaatctgtgaagttaacaacatgtagattttctttgcatatttaaaaactgcaactaaatcttaatgcctctgaagcagatggaagaaaataataggcttcccattaactgtgtcaaattgtataggtcttggccatcactggtcctgtttgtgatgaaggtttttgcccttggatataattttaattttcaatttcttctaatagggacttcanacatcaatattgaggatgaacttctctagtgtcaaggactgattgagttgtgtaacccctgaatatctgagacaggtctcgattattttagaaagtttatttgccaaggttgaggatgtgtgcctgtgacacggcctcgggaggtcctgaggacatgtgctcaaggtggtcagagcacagctttgctttatacattttagagagacatgagacatcaaccgacattatgtaagatgaacatggttccatctggaaaggcgagacaacttcaaacgaggagggggcttccaggtcataggtagataagagacaaatggctgcattcttttgagtttctgattagcctttccaaaggaggcaattagagtgagcaaaatgaacaaaatcaattattttgattctgaacaaaatgggaggctggttttccctaagcagttcccagcttgacttttccctttagctgagggatttggggggcccaagatttatttttctttcaccgttgtatcaaactacacagcggccttggaaaccatcacagttgagagtaggtaacacccatttgttgcatagttttgtgctccacactcttatctacaaaattatgaatttttttacatatattaatttcagaaaaactaaaaataaaacaaagtagtttcaaactagtattgtttttatatcttaaaaataaagctttatatactctc

SEQ ID NO: 385323 - DNA, 476 bp, Homo sapiens
ttgttccccacctgtcatcactcaatacacaaaacttaaagaattagtctctaaactcccctaatccttcagtcctaaaatcttctattggtcaacctgattagattacacggacctgcaaacacagatgtcagacacagcacaccaaatacacaattaaacccttcttcaggaatatgtggacaagacctcctaagtaatctcagtggcaggagtggtagcatctttatctgaccacatctttcccattagctcctacaggcatgccttcactttcctaaaaatatcccattatgagcaaactcttcccctgacacctttataattttttccccataaactcaataaagtagtatcaccctactttaagtggaaaaagtccaaaggtcaccaaccttttcttttggcagtgaggacagcaacaagcatcaacaagccttgtgaagacacaaaagattttgcactctggtgtagag

SEQ ID NO: 385324 - DNA, 457 bp, Homo sapiens
gtgggcaggggaagggtggagggagctgggcaccctgcagatggcagggtgggtgctcagtgccatggggctgccaccatcctccaagtgtggccccgagggccggagctgctctccctccattgctaggcgtaatcagttccttgtgcctggctctgcccaggaggtgtatattggggggcatgaatgtagggccagcccagctggccagtgaccctctgagcacagagccttcgggatggggctgggggtgtcccccacaacagagttcccttcctgagatgcgctggtggaggagggggcagtctctggaatttctgtttggagactttccggaggcgtgttcagacataaaatcacagcagcagcagtcagttttcaagcaaagagacttctctgggcatctctgagacgagtttgagcagtgtggggattcgttttgggagcacggcctcac

SEQ ID NO: 385325 - DNA, 443 bp, Homo sapiens
acacggttgactaggctctggttaaatcccagtattgcaatttactttatgtcaaagggaacaagcaaaatgctaatgcctaccctctcagacaaaccttcctaggcaatggagggggtgtagaaaagggtgtactttctggactaatggtgtacttggtggacttcacttttaaatgatcaaccacttgggaggcggaggggagtggatcacaaggtcaggaatttgagaccagcctggccaacatagtgaaaccccatctctactaaaaatacaaaaaagtagctgggtgcggtggcaggtgcctgtactctcagctacttgggaggctgaggcaggagaatcacttgaacctgggaggaggcagaggttgcagtgagccaggatcgcgccactgcactgcactccagccccagcgacaatgcgagattctgtctcaaaaa

SEQ ID NO: 385326 - DNA, 256 bp, Homo sapiens
ccgcgtgactgagggtggagggggccctgtctcggaagactgcgtcagtcatgagtcggtgcagccctgaattagcgctctacatcctgaaagatgggtttgacctggtttcctctgaaaaatagggaagcaggtcaggttttaacaactcgacatagaaatacctcagctctggctgggaggactggctgagatgtggaccgacaaggcacattctgtggggaccacggctcagccccgtgagcagaggtgggtg

SEQ ID NO: 385327 - DNA, 338 bp, Homo sapiens
tggaatttaactgcctgccccatgatttatagaacattcatctctcatactgaaaagacctgctttttaaaatcagcttccgtatttatactcttagttatcttagttcatcaaaagttaatgaactcgaagtcattcccataactatgaaagtaagttgtagacaagagatctgagccaaagcaaaagtagtcattacaaaatacgtttctaggtagttttctcctcgttcaaataatatatcatttacctgtcttagcacttggcttcttaatcactttcttttaatgctcaaaagcaccaaaacaatgcaatccaagtgtttctgggaccctgca

SEQ ID NO: 385328 - DNA, 346 bp, Homo sapiens
tggctgattttaaaatttttttgtggagacagtcttgctgtgttgcccaggctggttatgaactcttggcctcaggcagtcctcatgcctcagcctccctaagtgctcggattataggcatgccactgtgcctggccaaaaatacagattttttaatagatattactatggctcctattcttaaaggaaaaaatatgacattttaagactatatgcaagggatattccaataatatcttttttatttaaaaagccactaattagaatcagatttcattaggcaagtgaaatccagattttactagccagaaactgccaggtgtagaaacagcaagaacattttagt

SEQ ID NO: 385329 - DNA, 577 bp, Homo sapiens
acgtgacaatttatttcccgtggccaagctctcttggctttcctctccttcaagctcctctacggcaccctctagaatagctttcccaaaggtaaacacccaccccttggctgacatcctcgcttggctgtcacagtgcacttctcctgaggggtccttcctacctcatggtcatatcttctctacctgctttcctggacctcctatgtccctgacaagcctcagggctgattctgatgttctttcctactcactccctcattgtattagtttcttggggctgccataacaaagtgccacaaacttgggtgatgacagcaacagaaacatattctctcacagttctggaagtcttaagtctgaaatcaaggtgctggcagggccatgttctctctgaaggctgtgagggagaatcttttcttatctcgtttcaggtgcttgctggcaacacttggcattccttggcttgagttgcatcattccactctctgccttcatcacttcacgttttttcctctgtgtatctgtgtccaaatttccctcttcctttaaggataccagtcatactggatttaca

SEQ ID NO: 385330 - DNA, 593 bp, Homo sapiens
cttggctaatttttgtacttttgtagtagaaatgaggtttcaccatgttagcccggctggtctcaaactcctgacctcaaatgaacttcccaccttggcctcccaaagtgctgggattacaggcgtgagccaccaaacccagcccaaaataatgaaattattttaatgttatgaattacatctgaaaacaagtttgattaatacttacatatttgagttatgtaattttctcactgtcattttctttaaaagatactatcttgcatttgtattcttcattgatcaggagagtgttttccatttcggagtgatctagggctctgcttcaatgtttactattaatattaaatcctagtttctttgggtttgagtaggagaatgaggtctgcttatttcagctttgaaaaattagttgattttttgcgatctaccatataatcctgtttttataaatgtttcatgaatgttttaagaggtacagcctttttttcctacagcattctgtatattatctgttattttctgtgtgtatggttaataatctagtaattgcaattgtactactgaaattttcatcttgaaagacaacatgg

SEQ ID NO: 385331 - DNA, 370 bp, Homo sapiens
tggatgggttagtgggtggctgggtggatagatggatgggtgattgggcgaatgggcgaatgggtggatgggtgggcgtggagttggtgggtacatgataatggggtggaatacccatggattggaatgagctgttttggctgctatttctgggacacccagctctgccaggcccctacccctctggtgggccaggctctgacggtggccactcatggcctttctagctctggtgccagcatagggaaggaggaggcacagccttgtcttactccttgcacctgttagcccccccccccgccaagggaggacccgtggttggggacagcacagggggccctgctgtgtgcagggactgtccctggggcca

SEQ ID NO: 385332 - DNA, 485 bp, Homo sapiens
cagtgagcaaggctctgtgggcatgggacccactgagccaggcacaggagaaaatctcctggtctgctggttgctaagaccgtgggaaaagtgcagtattagggcagaagtgtcccatttttccaggtacagtctgtcactgcttcccttggctaggaaagggaaatcccccaaccccttgcgcttcccaggtgaggtgatgccccgccttgctttggcttgccctccgtgggctgcacccactgtccaaccagtcccaatgagatgaaccaggtacctcagttggaaatgcggaaatcacctgtcttctgcgtcagtcatgctgggagctgcagatcggagctgttcctatttggccatcttggaacagaaaccccacttgaaagaatttgtgtacatgaaaatttttaaaaatccctccatttcctaatctatgatagaatatatttcaaaaatttggtggtaagccaatttttggaaaaaaa

SEQ ID NO: 385333 - DNA, 136 bp, Homo sapiens
tcaggaagcaaggcttgggaacagtcccttcagggctcacctgtactccagcaagccaggtatgacctaaaacctctgtagaggacaatttgccaatagctgtcaagttccaagagccatcttccccttgacccag

SEQ ID NO: 385334 - DNA, 533 bp, Homo sapiens
tgtttgcaacaagtcatccttcatcctccagcctggcctcaggacgggtgaaataccctaggacatacttccatctggagttgccttcccttggcaagggaagagggaagaaggagcttgatttcttgagttcctatgttgtgcaagatagtttgcaaaccataagtcctgataacatctcaagaccttgggaaatacaattcatcacactgatttgatgtgataggtgaagaatacaaggtgaagtgttttctccaagaccaggatcttcatgcaggcctatctgatcttaggcttcagctctttatcttacaccttgagaccccaagagagtcccaaattcctggaaaggcagcatcacagagtggggaaatacaggacttggctttaggttctagtccttaacacagcttcttccttgctgtgtgttctttggtaggtcactaaatctctctgagcctcaaatttcttatctctaggttgaaaaataaaataaagtccccatgccaatcagtgcaaggaatctgtgagat

SEQ ID NO: 385335 - DNA, 342 bp, Homo sapiens
ctctgcctgttactttccggccagagcccaggggcctcttcaagcactgtttgctggcaaagcaagaacctagtctttggggctctgtgggacattgagatttagtaacagacttcacatgcaggtataagttccagttctgtcatgtaactagctgtgtgaccttggacaggctgggttactttcttgaggcttagtttctttcactaaaaaatgtggcaagctctccttgccttacagtgtattgtaaatcttggcgataatgtgagcacagtgactgacaccagcaaattccctttccagggagggagagttctcctgcccatcactgagccaggatga

SEQ ID NO: 385336 - DNA, 263 bp, Homo sapiens
tttataatttccaggcttctcacacagtcagggagcgcagtgggagcgcaggccacagttgaagtaaccactggccatcgctgagctcagctcagaatccacagcctggaatctagctcccaacccagatgccagggcatatgccatctggatcccatctgaatccacagcctaaactccagggatagctgaagccagaaggtagaaggaggggtctcagggagagtgagcccccagggctgggggtctggcagaaacggggt

SEQ ID NO: 385337 - DNA, 375 bp, Homo sapiens
tgggttagagttaatggatttcatgttaattgtcccttaaatattttctaccattaacacatttcttattggaaatgatgtgtaagcaacagaaaatattccatttccttggataaaagatacagtaattactgtgtgcatagggaaaaattcggcagtttcagggtgagatttaacatttaagtatatgcaatcttatttatatacaagaacaagagcctgtggttaaaacacaatagggttcttttttaataaaccatatggaaactcatatatcttgtgagaggttgtgaattagcagagtacactaaaatatgttcgaatttctaaagcattcttattgtgcattgtctgtgttctaggtaaaaggaaaaa

SEQ ID NO: 385338 - DNA, 385 bp, Homo sapiens
  misc_feature (366)..(366): n is a, c, g, or t
actagaataggaataaaatgattaaacaatatgtatttaatttgctagccaatgtcatttaatggtgaaaagctaggaatactgcttgtaaagccagggctagaaataatgcctgctcacaactactacttaacattgttctgaggtctagccttgtaagtaattagaaagaactaaaattaatgaagaaatatagatattaaaaagacagtcacaaaaattactataggaatataattgcatacctggaaaacagaagcagcttttttaaaaagctaaagtgtactatttcagtaaggtgtccactgataaaaattatataaaaaggccaggcacagtggctcaagttaatcccagcactttggnaggctgaggcaggcggatc

SEQ ID NO: 385339 - DNA, 198 bp, Homo sapiens
gcctggcccatgtctatgtaactttaaaaaatacggtattttagtgatagagctggtggcagctgatgtagtagtagtagtccttttcatattacccttgatggtccacttcaaatgaatgaactttaatgattttactttaatagttcttactactttatgaattattttgttttgttttcataactccaacaaggc

SEQ ID NO: 385340 - DNA, 319 bp, Homo sapiens
gatcctaggcccccacttcctaagccatataaagaacataaggaggcaaagccgagaaacccaaaaatagagagaagagacagaatcaatgcttcaattgtgagaaagtaggccacttcaagaggtattgtcccaaattaaaatcagaaagagaagtcgtcccacttacgacctttgaggaggaataggggggttaggggctctgtctcttttaccttgaatcccaccaagagcccttgataaatttagaagtggaacccaaatctgagcttatgacctttttagtagactcaggagcagcctgctcctctgtttgtta

SEQ ID NO: 385341 - DNA, 358 bp, Homo sapiens
gagaatttgtgttggtttctgtcagccatctgagaacaattccaatccaggatcactttacatttaattctttgcctcacattttgtagatcacaaagacagagttaattaggttccataactatctaggggtcaactgatgtaattatgaagcatcaggatgaaattctgtgatcccttcctcccacctcggcctttagcacaaatgggaaaataagcatatcttcttgccgtaattgctctgcaaagagggctaatttcttattcaccattacatttatggtctaactctttgaggttccatatttgcatggggaacttctctctgaatcttcaccttgggaggccctaggcctat

SEQ ID NO: 385342 - DNA, 463 bp, Homo sapiens
gtgtgaagtggtgctgctggcatctaattggtagaagccacgatgttcacaaacgttgtatgatacacaggtcagccctgcacagcaaaggattatctggcccaaagcgtcaatagcgctgaggttgagaaaccctggtctaggttaaggagggccaaaaatgtagatccaagaaattagaactttaattgtatatgcattaacgaagccattgaggtttttttgttttgttaaggagggagtggctgtgtgcagtagaagtaggccagagatgtctatctataaaataaatttgattttataaattccttcgcaaaaataaaactcgaaaatgttaccttgtacaagaaggaaattacaaaatcagtttgttttttttcaggagcatctctaagagaagaggtgaggcatttggaagatactgaatgaaaccttgtaggcaaatatggctgggcactgtggc

SEQ ID NO: 385343 - DNA, 643 bp, Homo sapiens
aataaaagacatgttttgagaatggagcatttcagtgggaaaacgcatgccatagtaaactatgtgtgtattcaggaagacgaaggaagacaaagagttttaaaggaaaaaaaaatgaggatggttacacattgttttgaactaattatcttagctacaaaggtcaataacaagggtgacgtcagttaaaggttggacaggcagtttctgggcagacatccttgcagaggttttgtataaggtcgtgatggtctttgtgcaacgttgtggtttttacagtctttgttttcaggcatacaagcatgagtaccctctcttcatagcctttcctggctctatttgtcagagtttttgtttgtttgttacccaaatgcagtaagtcagtactgattggattttggctcaagtgaaaacatctacttacaaaaatggcaagaacaactgaagacaatttttgtaagcaatgttgtattctacattcattttgctttggttttaattttttttaattgacaaataataactgtcatattcattgggtacatagtgatatttctatacatatggaatgtagtgatcaggttagggtaactagcatatccattatccaactgaggacatctagtatggcccaggtattaaa

SEQ ID NO: 385344 - DNA, 459 bp, Homo sapiens
agaatagaagttgggacaaattagggggctatttcagttaaaaatggggagatgaagaccaatcaaggtatgtttcaaaaggaaataatgtattgacttattttatatatcccatattgctaattaaaggtcttaattaacagcaaacttttacagagcctaaaagtatgttgaggttaactatacataccttatgtttttccccaaagagggaaagtttaaaaatttagggtaattaattaccttcattagttttcattgctggagcataggttaataataaacattttaaaagaatgtcattttgcagatactgaattcaagtgaacatagagactcaaatctgatactaatccagcatttgtagcccttcaattctaattgctcaggattttgaaaaattaaaaataatctggaaaagtcagtgctttagcacatattctttgctctgaaaaaatg

SEQ ID NO: 385345 - DNA, 672 bp, Homo sapiens
gcagggaaacctgttttttgtagtgctgtgtacactaaatgaactgaggggcaatccgggagaaaaaaagcaagatgcagggataagatgcgtgtactgattttttacagcaattccagaaagttccctaagaatcatattgcagttattcaaaggcattttggcagaaggaacaatccctatctcggaggtaaaagtatagtttataatttttctcaagtacaacacactggcaaaaattctttggttgaattaggtttctgaattttctgctaggcccatctgtgcacttccctgtaaaatccagttttagcacagaccctggctaagtcagtttaccaagaaccaccaccaccaccccgccttatgtggttattctcaatatctgatcaggttccttattctccactatcccccagatgatgtctgattaccttggcctgtctccagcaagaatcctgttaggtatatttagccagaaactcctttaccccgatgtttcctcttagtaattttccatccactgacccctacacagctccttggccataaatgcccacttgcccatgctgctgtttggagttgagcctaatctctcttccactgcaaaaccccgttgcagtgagctctatatacctatcatgaagttcctgaataaagtcttccttacca

SEQ ID NO: 385346 - DNA, 613 bp, Homo sapiens
tagagacagggtttcaccatgttagccaggatggcctcgaactcctgacctcatgactcaccacctcggcctcccagagtgctgggattacaggcatgagccaccacgcctggtctgtgtgtgcttgtgaattcttaaaggatgtgtgtaagggagtgatctaggggcactgcacccagtgggaactcgggagagtggccagttgtctgcaccactctcgctctaggccataaatgaaagtatgtgccctgttagaattgctttcttcctcctgctttcaggatgtttgcaggtgtcggggagggcagactatttttacactgttcctctgcgtttatccattaaagtaggagagatgctcccagtgaggctcaggcccttgtcagacagagtccctggacggtagcagagcctttccatggccaatgacttatcagagcttttttccttccagagatgagaagaatcagtccatcatagtcagtggggagtctggagccgggaagacggtatcagccaagtatgccatgcgctatttcgccaccgttggtggctcggccagtgaaaccaacatcgaagagaaggtgctggcatccagtcccatcatggaggt

SEQ ID NO: 385347 - DNA, 254 bp, Homo sapiens
ggtattaactggtataacaagattcacctgagctctaaagatgtgcaagttattccataaataaaagactctgcaagaatactcagctggtgcttggagaatgagcttgaactttctgcaggatgttacagaccttggatcatcctagcctgaagatgtgtacataatttctcagtaactcctggtggctttgcccaaactccatgaaggcagaattggctgacactgctgaggagtgacacttcatggtacat

SEQ ID NO: 385348 - DNA, 1955 bp, Homo sapiens
  misc_feature (471)..(471): n is a, c, g, or t
  misc_feature (680)..(680): n is a, c, g, or t
  misc_feature (1590)..(1590): n is a, c, g, or t
gaggcaaatatttattttcattactgcccaacagttttctaaagtgttgtactcttttaccctcccaccagcaatacgtagtaggtacagttgttctacattctcaccaacacttagtattttcagtctttttcattttggtcattctggtgaatgtgtagtggtatactactgtggttttaatttacatttccccgatgagtaggaatattgcttaccttttgatgtgtttattgaacatttggatatcttctttgtgttatgaccattcagacatttgttcagtttttattttacttattgatttctgagggctctttgtatattctagacatgagtattttgttagacatgtgtattataaagtgaatattttgttctaaacagtgtcttgaatttttactttatgtttactttgaatatgttggtaatcctagggacctgtgaaatatgagggaagtgtgcagcagngagaggaaactgtaaggcaagaagtggacccaccttaataaggggaaaacaagaatgacatttaacctgcagagcaatttcacttggagacaaggacagctggtcccttgaatattggatggtggcaaataagacatccaagcactaagagggcaggcagagaagagttgagaatgaagcaacagcatgcttatggtggctgatggccnggtagtgagtagacaagagtggggctctggacatagatggtctgaatttgagtcctgtctcccacctactaccatcttgtgaaggtacttaaccactccaagttcctaattttaaaaaagcaaaagtaggaataatgcgagcacctacttcatgggtttgttctaatggtatactacctatccccatttttcacatattgtgaatacttaatatataacatcaaaaactacaactcctatgctgggaaaatattagaacaaataatgtttgttgttgttaatatttgtttacttattggaattggcttcagagatactctacaaataactcttggggtagagatggatgttctagcagatttgggagtcaatcagaaattggctcctgtttcagaaagttacagttattatggacttgtgacatttctgttcagaagtctgtatctggcatcttcccgcacacatgtcttgctttcaagtgctgttcagttatgtttggaatgagaatggtggtctccctacttctgcttcacttcttccacaaccttgctgacttctaaatagtttcctgcttagaatccttaggaggaattaggatctcctttcagccctatcttgggcactgacttacattcccacatgtggtccatgtgcccctagacaatctaaggagagtctagcttgccacacatgtggaaatcattcccagttcacaggtgggaagttatgggaatgaagaaaatgtgggggaggtagcaataaaactctctacttacatttcattgctgcatctgctataataaaatgagagccaagagcaacttattcccttgtgacatgatgacacacctctggatagatgtatattcagggatatgggtgggtggagaatgttacaaacactttctcntccctagtatcctattacctgtctgaagaagtacactgtgtaccttcgtatcactatgtcctataaaaaaagaaaatgaaaagaatgtaaaagaagacatggtcacttttggggataaatttaactacccaacagagagagaagaattactttattcatataagggttcattttacaaggatcttccagaaatatttccttgatttgtgtgctattcacagagggactggtcacagatgccagttagacattggattctttgactaaccactcttcatcttgtgctcttgagtacaaacagtacgttagagagaacattaaaaaaaagattgttttcagcaatttattcctgaatcaaaatccaa

SEQ ID NO: 385349 - DNA, 803 bp, Homo sapiens
ctggagcagggcaggaggaagaacagattccatagtgatggttattctgacctgtgatctttgttgaactgaactgctttctctagacaccattgttaccaaaggaaataacacgttctcagtctaccttactgcttatcggttgtgtgggtcacaggaattgggggtgagggactgctttaaaggatcaggatcagggtgaacaaaaactactgaggcttcagtgtcagttatcccaaagcccacatcgattgtgtgattctgtaaatcctaaactaaataggagcaaccgtctctgatatttattttgtgcgactgtcaacctcaaatgccatcctgaattctgtatatgacagtcaccagcctgcctgatacctcgttgatcgacttttccccatgctaccaagccatgccaggtggacagaacaattctccagggaagccaagagctatcacttcctttttctacctaatatattttgtccctgataatccatttgtcatatctgactttctccttcctgctggcagcaaccagagaccctctcattacacgactgccaggtttgcttcagcctgaactgctgcagaattaacttgtcatgtccgctccaccatgggaacctgtggggagtcagagcctcaaacagctgaaacaccggagggaaagatttcctgcctgtctcacttccatctacagcaccatggtgcactcattaaggcgtgggttggaaggtgctatagacagatacgcgcactgggaggatggaacctgcttttgaacttaaaaccatgaagacacg

SEQ ID NO: 385350 - DNA, 773 bp, Homo sapiens
ggtggcctttcctggatttgcacagtgtgacctgagcgtgtggataactgtggccagttgagtggggggttgtcagtgcctgtgtgtggtggcaggagggctgcctgattgtcagggctcagatcccagaagaagcctggctctcagattcagggcctgtctctggggttcctcggcggtgtggtatttctgtctgagccagctcctgggaactgcttttccttcctccaggaccctagggagggggctgtgctcaccctgggaacactgccatggtcaggatcttgattcctgggtagctgctgagggcccctccccccacctctgactcactgtctgacacttttcttagattctcactatgtttcattccctcttggcctctccttgtctctggctcagtctttttgtttcatctcctgcctctgcctcttagcctctggattccgaggtggaacagaggaacatgagaaccaggggcacttcccccgcctctccagaggagtatcagggaggaggtaatttctcatttcattcccgctctgcagatttggaggggattgttcatcactagaacctgcagcatgaccgtagcttccctgtgtctctgtttccctgtctgtaggcttggaggtcataacctcctcaccttaagttctctttctgtggcgatcccttaggcagagccgcagtgcgtatctgagcctgctttcctgacatctctctccatctgtttcctcttgggggaccagggagcctcctgggattgccta

SEQ ID NO: 385351 - DNA, 460 bp, Homo sapiens
tgaattttacctttcatctttatatagtgcaatgctagaggtttttaataaaatttaccatcttaaccatttttaagggtacagttcagtaacattaagtgtattcacactgttgtgatgaacgtcagttttaaagcaaatgtaagagcctttagctggtatgtagaatcactgaaatgacataactcgtatttcatagcttatacatgcatgtgtattgcattgtcaatagaatggtgaaacacaacacaaaactaactcagcggtttgtatctcatttctttacacatggacattgtccccacacccttgacttttggcttactgatgagtaaggaaggactaaaaggaagggtactacaggttgcctgatctttttctttctatgtcatctttggtgtaagtggttgactaacagagatataacacacttgttaagaaaggaacggatagggctccc

SEQ ID NO: 385352 - DNA, 327 bp, Homo sapiens
tgctgggattataggcgtgagccactgcacccagctgctttcctcttacaactttttaaagctgtattctttctttcacaattcataattgagtgaaaggaaaaagatttgatttttttttcctcacaaatataaggcatataatattcttagaaaatttcaagccttactattgagataacccttacaaatttaaacatttttagctgctttattggctttaaatgattaagttcataattgcaagtcatctggtttctaaactgctagccttattagttccaaagtattgttgatgcttttgtttcaatatccccccaaaaaaca

SEQ ID NO: 385353 - DNA, 278 bp, Homo sapiens
tggtaaatagtgttggtaaatgtcagtgtcggtaaatgtcagtgttggtagatgccagtgtcagtagatgtcagtgttggtaaacagtgttggtaaatgtcagtgtcggtaaatgtcggtgtcggtcaatgtcggtgtttgtaaatgttggtgtcagtagatgctggtgtcagtaagtgctggaggactgagcatgccagcggcaagcccagtgaccagagtccctgggggctcccctgggacagggatgcccacttccaccctgtgcgggtttcacc

SEQ ID NO: 385354 - DNA, 317 bp, Homo sapiens
cttttttggtgattgctaagctctatttttcttatcctatatatatatgtggttggtttttattttaggattttaaggttatccctaataaattttgagatgtgttccatagctagcctgttgagatctttttatatcaaaagttaatatctgtggatttgtaatcattctttctacatatttaacaaagtcattagcaaaatattgaacaaaacctgttattcatatccttagatacagaacatcaatatcctgagatacagtacatcatcaaaatgtggtccccaaatgagcagcaatagcatcatgtgggagct

SEQ ID NO: 385355 - DNA, 174 bp, Homo sapiens
  misc_feature (170)..(171): n is a, c, g, or t
  misc_feature (173)..(173): n is a, c, g, or t
ggcactttataatttaataaacacccttcaattaccgtctcatttgctcctccatgccactccacatagtatacgggacatattttaggatcaccagtttagagataaagacagaggttgtgtccccaaagtttgcttgcgagtgtggtatttgtaacttctaaaactcnnant

SEQ ID NO: 385356 - DNA, 420 bp, Homo sapiens
tttactcttaaactatcctttactgggaatacatatttcctttcaattaccttgcttacagctaggttttgaaaaaaaataataaatgacttggagcagtttttaattctttaaaaaaatccatgttcatgaatctagtagtaagttagaaagactaaaatgggccttacagcataggacttgagagtttctgtttatgtaacaaaacatgttcatcgtagcgtctgtagctgtggtgattttcaaaagatagtaaaatgccgaagtctgtagcagaactggcgtgtgcccgagcattctccactgaatgccagagattgacttcctcattgctattcactgtggatccagggctttgcagggttgttcagtgggctgaggagtgaaacattccgctgtgctggctgatgttgcacttgg

SEQ ID NO: 385357 - DNA, 744 bp, Homo sapiens
gccctctgaagcagagactggttggagtgcccgtatttctgtagaccggaggcgtgtaactagaaagagtttgctaaccaagtgggccagagagagccttgaaattagcatctgaaaaccccagctttggcctgaaggcctcccgtgcagtctggtgaatggatgcttgaaaacaatttgttttcctaattacgtaaatctagtgaagagtatttatctttttttttttttttttttttttttttttttgcttacctggggaaagtctaaaatctctggtctcaagccggaggagcgtatattaattctcttctccagccccaccctatgacttaccagagtgggtacctgggagaacagggagatggggtagggagactggcaggttgtctttattgaagtttcctgggcaatgccaccaggtctgtccccctctggtataaacctctgctcaattccagtccaaattctggctcaacctaccaaagtggttttgctgaactcagctcctggggctggccacatggtaccaacacatataggatatctcaaaaatgaatttggaagtcccaaacatgcgggtctttggtggctcagaaagcactaaggatcagattagaatagtgaactgccattgcacagaatggggaagggtttgtgttctggttatttcagatagtggctctttggattctggataatggaggtccaagtgctgacattgttaaaaaccagattaacagt

SEQ ID NO: 385358 - DNA, 228 bp, Homo sapiens
tgccagcaggtaggagctacccactccaggtctcctctctgctgagggctacagagaagtcaggatgacctgcctgtggatagaagctacctactccaggtctcctctctgtcgagggctgcaggctccactggatgacctgcctgtggaaaagagctacccacttcaggtctcctgagagctgttccatcactcaataaagcatctctgcaccttgcccaccctcca

SEQ ID NO: 385359 - DNA, 472 bp, Homo sapiens
  misc_feature (137)..(137): n is a, c, g, or t
  misc_feature (254)..(254): n is a, c, g, or t
  misc_feature (365)..(365): n is a, c, g, or t
cgtctgtcaccccctgcactatacggtcatcatgaacccccagctctgtggactgctggttctggggtcctggtgcatcagtgtcatgggttccctgctcgagaccttgactgttttgaggctgtccttctgcaccnaaatggaaattccacactttttttgtgatctacttgaagtcctgaagctcgcctgttctgacaccttcattaataacgtggtgatatactttgcaactggcgtcctgggtgtgattnccttcactggaatatttttctcttactataaaattgttttctctatactgaggatttcctcagctgggagaaagcacaaagcgttttccacctgtggttcccacctctcantggtcaccttgttctatggcacgggctttggggtctatctcagttctgcagccacaccatcttctaggacaagtctggtggcctcagtgatgtacaccatggtcacc

SEQ ID NO: 385360 - DNA, 306 bp, Homo sapiens
gaagaacaggtgccaatgaaccttcccatcctcgtctctgaaaaatcccccaacttccctgacagtcgggccagatatcccccgggtcccctagacaagcactcagcttttccggccttctgatccctttaactgaaatgctttctgcctctaactgtacctactaacatcacatatactctttaaagttcaattcaaatgttatttctttcaagaagccttgtctaataataccccagctcctagaaagaaaattcgcttgtctgcatccaacgcattcagtcctttagcaatatgatcctgttc

SEQ ID NO: 385361 - DNA, 385 bp, Homo sapiens
tgccaaaaagttgagtgggaaaataattccatcctttcagagctaaacactgtgctgagtctcatcgcacacgggtgggcaaagaaagttgacatttactgctcacccactctgtgccttgacctgtgcaagatgctttatgctagaactcatttaattctcaagaacaacctcattttacagataaggatacagaggctctaagagttaaatttacccaagaggacatggtaagtaagtgccagtgcagggaacaaattcaggtccgactctaaaatctgtctctttccagatctcaaggcacaccactgagttgcctttcacctttctcccaagatgaggattgctctggcatgacttcacctttctcttctgaagcaattcc

SEQ ID NO: 385362 - DNA, 439 bp, Homo sapiens
atgtttccttcttttacttattttaagatttatttccaactgtaagcttaactaacagatctattaatacatactttaattttagaggcttaaaacattcaattctctgaatctaaagcaaaaaggagaaagtgcaaaattacaaacatcaagtaaaaatagagaaggatattttgaagtcagtttcctctgcagttgtccctccccgtcagaccagccctgctctccctgtgtctcttcccacacatgtactgccccttctctgtgtatgaagaatgagactctcctgttgcagaccaatgcagtacccaattcagtacctccagaggagaccactatcacgtccctgaagcacagggcactggtcacaaaggtgggtccagaccatcacctcagaggcttagcattctctggaatccagaatggagttgaacaagca

SEQ ID NO: 385363 - DNA, 411 bp, Homo sapiens
tactcttttcagtttctctcatcagcattttattgttttatttctagggatattttacctccttggttaaatttatgcctagatattttttgtagctcttataaatgggattgccttcttaatttctttctgaactagttcattattggtatatagaaatgctactcaatcttgtttgatgatttttgtatcctgtaagtttactgactttatttatcaggtctcagagttttatggtggagtcattaggtttttctagagataaaattatatcatctgcaaagaggtgcaatttaactttcttcttttcaattcagatgccttttatttctatctcttgaatgattgttttggttaggacttctagtactttgtggaataggagtggtgaaagccggcacctctgtttta

SEQ ID NO: 385364 - DNA, 447 bp, Homo sapiens
taaaattacattaaaatgccagatataaaatttataattcactatttttaaataatccagaatagcactgaaaataagaatgacagcttttaggagatcatatattttaagtaatttataaaatatagaaaaacagaaggtgtcatattgattaatgaactggagcaagggaaaactcaaagcagccacaggaaaggggttccataaggaagcagatatttcttctcactcccacacttgaaatcaatagagtagatgctgctgtagtaatactagtaatacaggcttcttgagaaacagttggactagtgggacacctacctttctgccatctatctacctattaggccggctatgagatgttttccccaataaatactattgatacagttgtctatcaagtacatatttaggggtgagaaggaaagctctggtatgacaccatct

SEQ ID NO: 385365 - DNA, 177 bp, Homo sapiens
cggacagagcagggcagaaaaatgagggaaggatgacagaagctcatcagaaagccagtaatacataagattagttttgtcagcaaaacctagtaaactttgacgttaaaagacaaatattttgatctctcattcccactctcaaaaaggtttctagttcatattgttttgctaaaa

SEQ ID NO: 385366 - DNA, 788 bp, Homo sapiens
  misc_feature (1)..(1): n is a, c, g, or t
ncccatctctactgaaaatacaaaaaattagccaggcgtggtggcgggcacctgtagtcccagctactcgggaggctgaggcaggagcatggggtgaactcaggaggtggagcttgcagtgagccgcgatcacgccactgcactccagcctgggcgacagagcaagactccgtcttaaaaaaataaaaattaaaaaaaaaagtaaacaacatagagaactcaaaagttcctttgtctacctccaccaccccccaccaaaaaaaaaggcccttaactacatttgactttaaggaataaacataagagaactcagaattcctttgtctctccccacccaaaaaaaaagaaaaggttcttaacttttcttgacctaatattcagcactgaagtcttattacttgaaacttatcagatgctaaattacaccattcatacttattgttctttcaatagcaaaatgtactgaaagctctccagtcccccctccactcctggcaagcatgcagtcacgtgctcgtgtgaattttccaaaatcatgagcattttgtaagattcagttggttatatgaaattacaataaagagtattatatattttattataatttgtaaattgtgtgctatacattctttatatcagtaaaatttatagtaaacacatatacattatatactcacacacacatattactggtctttctagaaacttgattttgtgaaattctagaatgaattcccagggtgatatttgtttggcctatgaataaattgcaatgaactaacaggtaa

SEQ ID NO: 385367 - DNA, 772 bp, Homo sapiens
  misc_feature (755)..(755): n is a, c, g, or t
cggctggaaattaacccccactaaaagggaccaaaagctgaagctcaccccgggtggcggccgctctagactagttggatcccccgggctgcagtaattcggcacgaggcgctaggacctggagggctagtcggcgggctgcgcgtccggccgctagctgagctggaggccaccggccagagccgaccccaggagtgagagagacaggggcgtgcgtgagttccggcggcctgcaccgggcaaaccccgtaccttcccagcatcggctcagcaacccacgtgcatccaggccggtcaatgtcattgagtcacctccgcgccttggccaccctggagtcccgagaatccgaagttccagacaaatgcccaaactacattcctgcatgttcgaaagcgtaaattgcaaagcacaaatccagttgtagattgtggccgggagcagtggctcacgcctataatcccagcactttgggaggccgaggcggacagatcacgaggtcagcacttcgagaccagcatggccaacatggtgaagccccatctctactaaaaatacaaacattagccaggcatggtggtaggcccctgtaatcccagctactcggtaggctgaggcaggagaatcacttgaacccgggaggcagaggtttcagtgagctgagactgcaccattgcactccagcctgggcgacagaccaagactccatctaaactggaacctcgtacactatgctgagtccttccagtggatacanagccacgatgctcactg

SEQ ID NO: 385368 - DNA, 1027 bp, Homo sapiens
atccgggatccggcacgaggcgctaggacctggagggctagtcggcgggctgcgcgtccggccgctagctgagctggaggccaccggccagagccgaccccaggagtgagagagacaggggcgtgcgtgagttccggcggcctgcaccgggcaaaccccgtaccttcccagcatcggctcagcaacccacgtgcatccaggccggtcaatgtcattgagtcacctccgcgccttggccaccctggagtcccgagaatccgaagttccagacaaatgcccaaactacattcctgcatgttcgaaagcgtaaattgcaaagcacaaatccagttgtagattgtggccgggagcagtggctcacgcctataatcccagcactttgggaggccgaggcggacagatcacgaggtcagcacttcgagaccagcatggccaacatggtgaagccccatctctactaaaaatacaaacattagccaggcatggtggtaggcccctgtaatcccagctactcggtaggctgaggcaggagaatcacttgaacccgggaggcagaggtttcagtgagctgagactgcaccattgcactccagcctgggcgacagaccaagactccatctcaaaaaaaaaaaaaaaaaagttatagattgtaaggaaaatacccccaaggaagttgaggacacagcagacttggactgtctccaaacctgttcattcttctgagtgcactgctcggagcatcctattgggcagcatatcctggcctcctttccagttcgatgtggtactatacctgatttctggccaataaaatatgagaggacatgaaattcaacagcccctgggcttggcttataaaaccttccatgcaatcctccacaccttttcacctctcagctgctgagacttttctaggcactacacagaagcagcctgggtctccagtagcaaaggagagcagatccttctcactatcctgcaccgaactgtgacatgagcaaaaaataaagtttttattttcttacac

SEQ ID NO: 385369 - DNA, 1116 bp, Homo sapiens
cggctggaaattaacccccactaaaagggaccaaaagctgaagctcaccccgggtggcggccgctctagactagttggatcccccgggctgcagtaattcggcacgaggcgctaggacctggagggctagtcggcgggctgcgcgtccggccgctagctgagctggaggccaccggccagagccgaccccaggagtgagagagacaggggcgtgcgtgagttccggcggcctgcaccgggcaaaccccgtaccttcccagcatcggctcagcaacccacgtgcatccaggccggtcaatgtcattgagtcacctccgcgccttggccaccctggagtcccgagaatccgaagttccagacaaatgcccaaactacattcctgcatgttcgaaagcgtaaattgcaaagcacaaatccagttgtagattgtggccgggagcagtggctcacgcctataatcccagcactttgggaggccgaggcggacagatcacgaggtcagcacttcgagaccagcatggccaacatggtgaagccccatctctactaaaaatacaaacattagccaggcatggtggtaggcccctgtaatcccagctactcggtaggctgaggcaggagaatcacttgaacccgggaggcagaggtttcagtgagctgagactgcaccattgcactccagcctgggcgacagaccaagactccatctcaaaaaaaaaaaaaaaaaagttatagattgtaaggaaaatacccccaaggaagttgaggacacagcagacttggactgtctccaaacctgttcattcttctgagtgcactgctcggagcatcctattgggcagcatatcctggcctcctttccagttcgatgtggtactatacctgatttctggccaataaaatatgagaggacatgaaattcaacagcccctgggcttggcttataaaaccttccatgcaatcctccacaccttttcacctctcagctgctgagacttttctaggcactacacagaagcagcctgggtctccagtagcaaaggagagcagatccttctcactatcctgcaccgaactgtgacatgagcaaaaaataaagtttttattttcttacac

SEQ ID NO: 385370 - DNA, 421 bp, Homo sapiens
caacacacattagccttaacaacaaagagctaatcttatgtaaagaactcttacaattcagaaagaaaaagatcctagtgaaaatgtgggcaagagatagcaaaaaaccagccatatgataataatagtcaataagtgaatctgaatgatgttatcttcttttgtcattttagaaatacaaataaaaatgatgatgaatgctcttgcttactaaattagcaaaaactgggaaaagatgatgatattcagggtcagataaagggaaaagggtgcccttctattgcagtttggaaagtaaattggcactgactttttagtgggatagtcttgtaatatgggtcaaaagtcttcaatcgtgtccacattttgggcctgcaattccacttctaggaatttattctaaggaagtaactaaaaatat

SEQ ID NO: 385371 - DNA, 370 bp, Homo sapiens
gattacaggtgtgagccactgcgcccggccgagatttacttttataatgacttctaatatttagcattcaaaattgtgaaaggggagaaagatgtctgagaaatacagaatctaagattgggatttgtctaagtaattctttcatatttcataagttgtagtccttaaataaaaaggtttcatgtggttattaccaggaacatcaagcctcttgttcattctgtctggattaatatagattctcaaatatatttatttattaggctgtgctttactcttgttgataagacatcagaatgacttaatactttaagtctgttatttcctttcctgtttaattgcacacagtccccccaaatcacacccttct

SEQ ID NO: 385372 - DNA, 1809 bp, Homo sapiens
ccttgaaagaggaatcaccattaggaaaggtgagtcagggtcctttgtttaatgtgactagtggctcatcatcaccagtgacctggttgggcctactctccttccagaacctgcattgcttcccagacctccccactgagatgcctctaagagccaaaggagtcaacacttgagcctagggtgggctacaacaaaagattctaatttaccttgcttcatctaggtccaggccccaagtagcttgctgaaggaacttaaaaagtagctgttatttattgtattgtataagctaaaaacatttatttttgttgaatcgaaacaattccatgtagcaatcttttttctgttcacggtgtttgtgatagaaccttaaattccgcaagcatcagttttttgaaaaaatgggaattgaccggatagttacaggcaaagattataaatagctacaacatcatttaacttttataaacatgccttctctctattgaagacatctgatatttttgctggaaagttggatctatcctcagtaactctgccatgaattcctgtttcctggttccagaaaaagaaaagattacatttctgatcataaagaatgtcttgcatatgggaaatttttcaaaataaggggggtattatttatgtggcatgggaaaacttttgccatggctgtttgtcttagtggcatcttttgatgacattggatcagatatatgtagatgctgatatatgggacacatgtttaggttttggtgcagttgcacaaaactgtgttagtttatatgttactgtgttgcctttatttattctctccaaagtgtctctttatatttgttttacaatctgtgaaagagtataccataatacagaagtattttcatagtctttacctctggattgtcctgtcagtatagccacgttgatgagattacaccagtgcctttgatcatctttaagtatttgagccctgataaatattttggtaacataatccaaattagagacttagagctctggttagcaatcatgtttaaagagaagcttcttaaagctctgtatgctgggagattcatgattattaccaacgttttgatttcatgaaggtgttctcaaatttaaagcacattttcagtaagaacaaaaatatttaatgtttttatcttagacttaacttgatacatttgcatattactatggaagttattcaccttgtccctgtttttctttaagatattttaaaatcatagttatactacagtccttttttaaatgtatcctgatacattgtaaaatattttaatttcattgtggaaaataatgttggataaggagatatttttcactgttaacttttagcccatgcattttcataatttatttttttcacttgctgctttatatgacatatgtgacatttgattatttaacacttgatgtgatctgcataaacccaagttgcacaaccctcctgctgaagataaaattgaggttaaagataaagatttattttcatatttgtacagtgatcggcttcagtgatggtttttgtgggcatttattgtgtgtgtgtaagaaatttcatatgtatatattaagtaggcctctgagtattgaataattgttttatgattttgatttatatggtttacattttcattgtgtgggccatatttcgtttatactgtttatttctcttcaaaccttaataattataccataaagtgtaatttttatagcaatgcaaatgtctaaggaactacaaatattttctacgttgtaaattcaataaagcttgcttcctttggc

SEQ ID NO: 385373 - DNA, 214 bp, Homo sapiens
aaaggaagcaagctttattgaatttacaacgtagaaaatatttgtagttccttagacattttcattgtgtgggccatatttcgtttatactgtttatttctcttcaaaccttaataattataccataaagtgtaatttttatagcaatgcaaatgtctaaggaactacaaatattttctacgttgtaaattcaataaagcttgcttcctttggc

SEQ ID NO: 385374 - DNA, 353 bp, Homo sapiens
acctctggggctctgagtttcctcaaaagagtagactgcttgttttctgaggcaaagccattcagtgattggcatgacaggttttcagcaatgcccttatcactctgtataataactgctactttatctgccccccatctctaccctgcataattcctcaagggtagggattgcatctcttggcccctagcccagggcctaacacaaagtaatgttccctaactatttctgaattagggtgtcattgtgggtaccaagtggacacttactaaatgcttgctaacctaaaagttttcttattgaaaaaaaaattttttggctgggcatggtggctcacgcctgtaatcccagca

SEQ ID NO: 385375 - DNA, 1999 bp, Homo sapiens
  misc_feature (587)..(587): n is a, c, g, or t
  misc_feature (612)..(612): n is a, c, g, or t
gagacttttaatcatctatcccttgtgctttacgcagaccctacaatacactagaggcttcaaagaggtcaaaaattcacatgtgtagacaaattaggtcccttaagatgccaggcaaacgaagtgctaccaaaacacgcaatgactgtcctaaaagtgcgttctgggatacacctgtaaacttggatcaagttccctcccctctcctcaaaatatatcgacttgtgctgaaagaaatcacgaccgatgctcacaattctgacctcgtaattatatagggggtggttttggtttctgcgtctttccctgattcagtggcaggtaacatatttcatgtacaaaatgaactgcaacaccacggcaaacaagggacaggccctcaaagttgtcggtagggagccaggaccccgccagtggcgtggggagacaccgtactaaacaagcttgcaaacagcaggcaccttcctgccactgaggaggaagggctggctaagggaggccggggcggaggaagccaagctctgcaggccctgacaaagtcctcccggcctccacgcgtcgccatggcaacgcggggtctgtgctgnccgggattggccggcctggcgcgcncagggcccgctgggaaagcgcgtccccgccgcggctccgccagtttgaacttggcgggccagatgtgggcggcggggcgctgggggcctacttttccctcttcctacgccgctgccgctgagctgcagcaattccaccaggtcgctgttgtctccccttggccaccagagcttccagtttgacgaggacgacggtgacggggaggatgaggaagacgtggatgatgaggaagacgtggatgaagatgcccatgattcagaggccaaagtggcgagcctgagaggaatggagttacaggggtgcgccagcactcaggttgaatcagaaaataaccaagaagaacagaaacaggtgcgcttaccagaaagccgcctgacaccatgggaggtgtggtttattggcaaagaaaaagaagaacgtgaccggctgcaactgaaagctctagaggaattaaatcaacaactagaaaaaagaaaagaaatggaagaacgtgaaaaaagaaagataattgctgaagaaaagcacaaggaatgggttcagaaaaagaatgagcaaaaaagaaaagaaagagaacaaaaaattaataaagaaatggaggaaaaagcagcaaaggaactggagaaagaatacttgcaagaaaaagcaaaagaaaaatatcaagaatggttaaagaaaaaaaatgctgaagaatgtgagaggaagaagaaagaaaaggaaaaagaaaaacaacagcaagctgaaatacaggagaaaaaggaaatagcagaaaaaaagtttcaagaatggttggaaaatgcgaaacataaacctcgtccagctgcaaagagctatggttatgccaatggaaaacttacaggtttttacagtggaaattcctatccagaaccagccttttataatccaattccgtggaaaccaattcatatgccacctcccaaagaagctaaggatctatcaggaaggaagagtaaaagacctgtgataagtcagccacacaagtcatcatctctggtaattcataaagccaggagcaatctttgccttggaactctgtgcagaatacaaagatagcgtatgtggaaaataacatgcttttatctggagctatttaatttaaaaatcagaaattgttttttactgctcagtcaataactcaacacttaatgtgattattgacaaatagcaatttttgcatttgtatatggagtccttagagttgaggaagatattttctggattttggtttttataaacttttcaaggttgatcttggcatgttgttttgcagaataagtggctgaatatgtaagaattgtgtttgtatttagcttgtattaaaagtacactgtaataccaataaaactaacaatttttcttgaaaaaaaaa

SEQ ID NO: 385376 - DNA, 1481 bp, Homo sapiens
ttgtgggtgattagcaggatccctcgaatcgacggtttctctgctgactgcagacccaggtctcggccctcctcggactcctgctcagtccctatgacgggcgcacgtgggcaggggctggaggtggtgcgctcgccgtcgccgccgctgccgctgagctgcagcaattccaccaggtcgctgttgtctccccttggccaccagagcttccagtttgacgaggacgacggtgacggggaggatgaggaagacgtggatgatgaggaagacgtggatgaagatgcccatgattcagaggccaaagtggcgagcctgagaggaatggagttacaggggtgcgccagcactcaggttgaatcagaaaataaccaagaagaacagaaacaggtgcgcttaccagaaagccgcctgacaccatgggaggtgtggtttattggcaaagaaaaagaagaacgtgaccggctgcaactgaaagctctagagaattaaatcaacaactagaaaaaagaagaacgtgaccggctgcaactgaaagctctaggaattaaatcaacaactagaaaaaagaaaagaaatggaagaacgtgaaaaaagaaagataattgctgaagaaaagcacaaggaatgggttcagaaaaagaatgagcaaaaaagaaaagaaagagaacaaaaaattaataaagaaatggaggaaaaagcagcaaaggaactggagaaagaatacttgcaagaaaaagcaaaagaaaaatatcaagaatggttaaagaaaaaaaatgctgaagaatgtgagaggaagaagaaagaaaaggaaaaagaaaaacaacagcaagctgaaatacaggagaaaaaggaaatagcagaaaaaaagtttcaagaatggttggaaaatgcgaaacataaacctcgtccagctgcaaagagctatggttatgccaatggaaaacttacaggtttttacagtggaaattcctatccagaaccagccttttataatccaattccgtggaaaccaattcatatgccacctcccaaagaagctaaggatctatcaggaaggaagagtaaaagacctgtgataagtcagccacacaagtcatcatctctggtaattcataaagccaggagcaatctttgccttggaactctgtgcagaatacaaagatagcgtatgtggaaaataacatgcttttatctggagctatttaatttaaaaatcagaaattgttttttactgctcagtcaataactcaacacttaatgtgattattgacaaatagcaatttttgcatttgtatatggagtccttagagttgaggaagatattttctggattttggtttttataaacttttcaaggttgatcttggcatgttgttttgcagaataagtggctgaatatgtaagaattgtgtttgtatttagcttgtattaaaagtacactgtaataccaataaaactaacaatttttcttgaaaaaaaaa

SEQ ID NO: 385377 - DNA, 1199 bp, Homo sapiens
aattgcccctatgatccagttacctcccaccaggtccctcaaagatgatatttgggtggagacacagccaaaccatatcaaacacctgcttttcactcagtactgccccaggctctgagtggacattggtgagcaagatctttgtcactgacctcatgaaacttatagcccagcaggtagactgacattgtactgttaattgcaggtatgttatatattttcataaaccatgttgtgccaactgccatgatatcatgtctatttttaaaaataattgaagtttagaaaattgctgaatgcagcagtctttccttagatgagtataattactggtattacaattaaactttatctatttttatttaagaaaagaaaagaaagagaacaaaaaattaataaagaaatggaggaaaaagcagcaaaggaactggagaaagaatacttgcaagaaaaagcaaaagaaaaatatcaagaatggttaaagaaaaaaaatgctgaagaatgtgagaggaagaagaaagaaaaggaaaaagaaaaacaacagcaagctgaaatacaggagaaaaaggaaatagcagaaaaaaagtttcaagaatggttggaaaatgcgaaacataaacctcgtccagctgcaaagagctatggttatgccaatggaaaacttacaggtttttacagtggaaattcctatccagaaccagccttttataatccaattccgtggaaaccaattcatatgccacctcccaaagaagctaaggatctatcaggaaggaagagtaaaagacctgtgataagtcagccacacaagtcatcatctctggtaattcataaagccaggagcaatctttgccttggaactctgtgcagaatacaaagatagcgtatgtggaaaataacatgcttttatctggagctatttaatttaaaaatcagaaattgttttttactgctcagtcaataactcaacacttaatgtgattattgacaaatagcaatttttgcatttgtatatggagtccttagagttgaggaagatattttctggattttggtttttataaacttttcaaggttgatcttggcatgttgttttgcagaataagtggctgaatatgtaagaattgtgtttgtatttagcttgtattaaaagtacactgtaataccaataaaactaacaatttttcttgaaaaaaaaa

SEQ ID NO: 385378 - DNA, 2742 bp, Homo sapiens
  misc_feature (587)..(587): n is a, c, g, or t
  misc_feature (612)..(612): n is a, c, g, or t
  misc_feature (2741)..(2741): n is a, c, g, or t
gagacttttaatcatctatcccttgtgctttacgcagaccctacaatacactagaggcttcaaagaggtcaaaaattcacatgtgtagacaaattaggtcccttaagatgccaggcaaacgaagtgctaccaaaacacgcaatgactgtcctaaaagtgcgttctgggatacacctgtaaacttggatcaagttccctcccctctcctcaaaatatatcgacttgtgctgaaagaaatcacgaccgatgctcacaattctgacctcgtaattatatagggggtggttttggtttctgcgtctttccctgattcagtggcaggtaacatatttcatgtacaaaatgaactgcaacaccacggcaaacaagggacaggccctcaaagttgtcggtagggagccaggaccccgccagtggcgtggggagacaccgtactaaacaagcttgcaaacagcaggcaccttcctgccactgaggaggaagggctggctaagggaggccggggcggaggaagccaagctctgcaggccctgacaaagtcctcccggcctccacgcgtcgccatggcaacgcggggtctgtgctgnccgggattggccggcctggcgcgcncagggcccgctgggaaagcgcgtccccgccgcggctccgccagtttgaacttggcgggccagatgtgggcggcggggcgctgggggcctacttttccctcttcctacgccggtttctctgctgactgcagacccaggtctcggccctcctcggactcctgctcagtccctatgacgggcgcacgtgggcaggggctggaggtggtgcgctcgccgtcgccgccgctgccgctgagctgcagcaattccaccaggtcgctgttgtctccccttggccaccagagcttccagtttgacgaggacgacggtgacggggaggatgaggaagacgtggatgatgaggaagacgtggatgaagatgcccatgattcagaggccaaagtggcgagcctgagaggaatggagttacaggggtgcgccagcactcaggttgaatcagaaaataaccaagaagaacagaaacaggtgcgcttaccagaaagccgcctgacaccatgggaggtgtggtttattggcaaagaaaaagaagaacgtgaccggctgcaactgaaagctctagaggaattaaatcaacaactagaaaaaagaaaagaaatggaagaacgtgaaaaaagaaagataattgctgaagaaaagcacaaggaatgggttcagaaaaagaatgagcaagtaaggaggggaaaatggatacacacattgacatctcttttgcaaaatatttcttcctattatacttcattacctaggttttaaaaaatacttctcttagagtctttcttctttggcttgttttgtttttctatcctggtggacatttatcaagtctctatcttctgccctttgccctctacttttctcctttttccctcctgtggcttgcactaatatttgcctgcaggcagtcaccaagtctgtatttctaggcctgaccttttggatccttatggcaagtgcctccaagtctgcaaatctaaaacaacccattttgcccatttctccttcgtaaatccatcctcccatttctctgtttcattcagctgtcttctcggtcatcaaggcttaattagaattcttctgttgttcctaatcatctcctccttttctttacaattactactcccctgtttgtgatctctttccattatatctttcaacttgttgtttacttcttatactggattgtaagctacataagggcagggatttttgcctcttttgttcagttttccaggagctagatgaatacctgcgcatgatatatgtccaaaaatagtttaattgagtgaagatgttcattgaatggctgcattttttccttttaattttaatatattcttctatggatcacacacattcgaaattttaaaaatacttattctgtggtcaatttgtcttctgttgtgatttttacatatttagagtggtactgcttttattattataatccagttttacaaatgtggaaaaatgtttaaattgtaggacaatattttaaattttaattctaactttttatctttattgttgaatctaatgcctaatggtattaataagagtactaagtaaataatttcagtaaattgaagatgatataaccttcttcatccaagtattataagaaggaaattggttagatgtatgtgtgttataaccatatttgtttagaagtcaattactttgtttttttaaaaaagtttacttcatcccatgatataacatgaaagagatctttgtgaataaattcaaaaatcaaaataaatctctgtgactgttataaaactttgggtaatatctttttgaaatttgtaactataaaacaaaattattttacacatgcagaatagtttgctctttcctctaaaagtccttcttatcttctaactccattaagctaattttaccatgccaatcaaacctagttgttgtttgtctaggaatgtaagatacttctgggagacaatatattcactgttttaattagtggcagtagacctaatccaattatttgaagaaaaaaaaaattatttcttttggagggaagtggcttgccctgacataaatcactagttattgaaggcaaaattccgtaatgttgagaattatttaaaaataaaactgagacgttatatnt

SEQ ID NO: 385379 - DNA, 2112 bp, Homo sapiens
  misc_feature (587)..(587): n is a, c, g, or t
  misc_feature (612)..(612): n is a, c, g, or t
gagacttttaatcatctatcccttgtgctttacgcagaccctacaatacactagaggcttcaaagaggtcaaaaattcacatgtgtagacaaattaggtcccttaagatgccaggcaaacgaagtgctaccaaaacacgcaatgactgtcctaaaagtgcgttctgggatacacctgtaaacttggatcaagttccctcccctctcctcaaaatatatcgacttgtgctgaaagaaatcacgaccgatgctcacaattctgacctcgtaattatatagggggtggttttggtttctgcgtctttccctgattcagtggcaggtaacatatttcatgtacaaaatgaactgcaacaccacggcaaacaagggacaggccctcaaagttgtcggtagggagccaggaccccgccagtggcgtggggagacaccgtactaaacaagcttgcaaacagcaggcaccttcctgccactgaggaggaagggctggctaagggaggccggggcggaggaagccaagctctgcaggccctgacaaagtcctcccggcctccacgcgtcgccatggcaacgcggggtctgtgctgnccgggattggccggcctggcgcgcncagggcccgctgggaaagcgcgtccccgccgcggctccgccagtttgaacttggcgggccagatgtgggcggcggggcgctgggggcctacttttccctcttcctacgccggtttctctgctgactgcagacccaggtctcggccctcctcggactcctgctcagtccctatgacgggcgcacgtgggcaggggctggaggtggtgcgctcgccgtcgccgccgctgccgctgagctgcagcaattccaccaggtcgctgttgtctccccttggccaccagagcttccagtttgacgaggacgacggtgacggggaggatgaggaagacgtggatgatgaggaagacgtggatgaagatgcccatgattcagaggccaaagtggcgagcctgagaggaatggagttacaggggtgcgccagcactcaggttgaatcagaaaataaccaagaagaacagaaacaggtgcgcttaccagaaagccgcctgacaccatgggaggtgtggtttattggcaaagaaaaagaagaacgtgaccggctgcaactgaaagctctagaggaattaaatcaacaactagaaaaaagaaaagaaatggaagaacgtgaaaaaagaaagataattgctgaagaaaagcacaaggaatgggttcagaaaaagaatgagcaaaaaagaaaagaaagagaacaaaaaattaataaagaaatggaggaaaaagcagcaaaggaactggagaaagaatacttgcaagaaaaagcaaaagaaaaatatcaagaatggttaaagaaaaaaaatgctgaagaatgtgagaggaagaagaaagaaaaggaaaaagaaaaacaacagcaagctgaaatacaggagaaaaaggaaatagcagaaaaaaagtttcaagaatggttggaaaatgcgaaacataaacctcgtccagctgcaaagagctatggttatgccaatggaaaacttacaggtttttacagtggaaattcctatccagaaccagccttttataatccaattccgtggaaaccaattcatatgccacctcccaaagaagctaaggatctatcaggaaggaagagtaaaagacctgtgataagtcagccacacaagtcatcatctctggtaattcataaagccaggagcaatctttgccttggaactctgtgcagaatacaaagatagcgtatgtggaaaataacatgcttttatctggagctatttaatttaaaaatcagaaattgttttttactgctcagtcaataactcaacacttaatgtgattattgacaaatagcaatttttgcatttgtatatggagtccttagagttgaggaagatattttctggattttggtttttataaacttttcaaggttgatcttggcatgttgttttgcagaataagtggctgaatatgtaagaattgtgtttgtatttagcttgtattaaaagtacactgtaataccaataaaactaacaatttttcttgaaaaaaaaa

SEQ ID NO: 385380 - DNA, 1423 bp, Homo sapiens
ttgtgggtgattagcaggatccctcgaatcgacggtttctctgctgactgcagacccaggtctcggccctcctcggactcctgctcagtccctatgacgggcgcacgtgggcaggggctggaggtggtgcgctcgccgtcgccgccgctgccgctgagctgcagcaattccaccaggtcgctgttgtctccccttggccaccagagcttccagtttgacgaggacgacggtgacggggaggatgaggaagacgtggatgatgaggaagacgtggatgaagatgcccatgattcagaggccaaagtggcgagcctgagaggaatggagttacaggggtgcgccagcactcaggttgaatcagaaaataaccaagaagaacagaaacaggtgcgcttaccagaaagccgcctgacaccatgggaggtgtggtttattggcaaagaaaaagaagaacgtgaccggctgcaactgaaagctctagaggaattaaatcaacaactagaaaaaagaaaagaaatggaagaacgtgaaaaaagaaagataattgctgaagaaaagcacaaggaatgggttcagaaaaagaatgagcaaaaaagaaaagaaagagaacaaaaaattaataaagaaatggaggaaaaagcagcaaaggaactggagaaagaatacttgcaagaaaaagcaaaagaaaaatatcaagaatggttaaagaaaaaaaatgctgaagaatgtgagaggaagaagaaagaaaaggaaaaagaaaaacaacagcaagctgaaatacaggagaaaaaggaaatagcagaaaaaaagtttcaagaatggttggaaaatgcgaaacataaacctcgtccagctgcaaagagctatggttatgccaatggaaaacttacaggtttttacagtggaaattcctatccagaaccagccttttataatccaattccgtggaaaccaattcatatgccacctcccaaagaagctaaggatctatcaggaaggaagagtaaaagacctgtgataagtcagccacacaagtcatcatctctggtaattcataaagccaggagcaatctttgccttggaactctgtgcagaatacaaagatagcgtatgtggaaaataacatgcttttatctggagctatttaatttaaaaatcagaaattgttttttactgctcagtcaataactcaacacttaatgtgattattgacaaatagcaatttttgcatttgtatatggagtccttagagttgaggaagatattttctggattttggtttttataaacttttcaaggttgatcttggcatgttgttttgcagaataagtggctgaatatgtaagaattgtgtttgtatttagcttgtattaaaagtacactgtaataccaataaaactaacaatttttcttgaaaaaaaaa

SEQ ID NO: 385381 - DNA, 1237 bp, Homo sapiens
  misc_feature (35)..(35): n is a, c, g, or t
cctccccgtcaccgtcgtcctcgtcaaactggaanctctggtggccaaggggaggatgaggaagacgtggatgatgaggaagacgtggatgaagatgcccatgattcagaggccaaagtggcgagcctgagaggaatggagttacaggggtgcgccagcactcaggttgaatcagaaaataaccaagaagaacagaaacaggtgcgcttaccagaaagccgcctgacaccatgggaggtgtggtttattggcaaagaaaaagaagaacgtgaccggctgcaactgaaagctctagaggaattaaatcaacaactagaaaaaagaaaagaaatggaagaacgtgaaaaaagaaagataattgctgaagaaaagcacaaggaatgggttcagaaaaagaatgagcaaaaaagaaaagaaagagaacaaaaaattaataaagaaatggaggaaaaagcagcaaaggaactggagaaagaatacttgcaagaaaaagcaaaagaaaaatatcaagaatggttaaagaaaaaaaatgctgaagaatgtgagaggaagaagaaagaaaaggaaaaagaaaaacaacagcaagctgaaatacaggagaaaaaggaaatagcagaaaaaaagtttcaagaatggttggaaaatgcgaaacataaacctcgtccagctgcaaagagctatggttatgccaatggaaaacttacaggtttttacagtggaaattcctatccagaaccagccttttataatccaattccgtggaaaccaattcatatgccacctcccaaagaagctaaggatctatcaggaaggaagagtaaaagacctgtgataagtcagccacacaagtcatcatctctggtaattcataaagccaggagcaatctttgccttggaactctgtgcagaatacaaagatagcgtatgtggaaaataacatgcttttatctggagctatttaatttaaaaatcagaaattgttttttactgctcagtcaataactcaacacttaatgtgattattgacaaatagcaatttttgcatttgtatatggagtccttagagttgaggaagatattttctggattttggtttttataaacttttcaaggttgatcttggcatgttgttttgcagaataagtggctgaatatgtaagaattgtgtttgtatttagcttgtattaaaagtacactgtaataccaataaaactaacaatttttcttgaaaaaaaaa

SEQ ID NO: 385382 - DNA, 1199 bp, Homo sapiens
gcaggggttcctagtgagtgaaatgtagagtctggatcagccgttggtgaaagaagaggctggaagataggcaaagggcagattcatgggtgtcaggctaaggagtttggattttatcctcactcaggttgaatcagaaaataaccaagaagaacagaaacaggtgcgcttaccagaaagccgcctgacaccatgggaggtgtggtttattggcaaagaaaaagaagaacgtgaccggctgcaactgaaagctctagaggaattaaatcaacaactagaaaaaagaaaagaaatggaagaacgtgaaaaaagaaagataattgctgaagaaaagcacaaggaatgggttcagaaaaagaatgagcaaaaaagaaaagaaagagaacaaaaaattaataaagaaatggaggaaaaagcagcaaaggaactggagaaagaatacttgcaagaaaaagcaaaagaaaaatatcaagaatggttaaagaaaaaaaatgctgaagaatgtgagaggaagaagaaagaaaaggaaaaagaaaaacaacagcaagctgaaatacaggagaaaaaggaaatagcagaaaaaaagtttcaagaatggttggaaaatgcgaaacataaacctcgtccagctgcaaagagctatggttatgccaatggaaaacttacaggtttttacagtggaaattcctatccagaaccagccttttataatccaattccgtggaaaccaattcatatgccacctcccaaagaagctaaggatctatcaggaaggaagagtaaaagacctgtgataagtcagccacacaagtcatcatctctggtaattcataaagccaggagcaatctttgccttggaactctgtgcagaatacaaagatagcgtatgtggaaaataacatgcttttatctggagctatttaatttaaaaatcagaaattgttttttactgctcagtcaataactcaacacttaatgtgattattgacaaatagcaatttttgcatttgtatatggagtccttagagttgaggaagatattttctggattttggtttttataaacttttcaaggttgatcttggcatgttgttttgcagaataagtggctgaatatgtaagaattgtgtttgtatttagcttgtattaaaagtacactgtaataccaataaaactaacaatttttcttgaaaaaaaaa

SEQ ID NO: 385383 - DNA, 610 bp, Homo sapiens
cgcacgcacttaacagaaatgttaaactataacaagcaccatttgaggattaacaggaacatttttttgaagatttcaaacgaactcgactttcagtataattgtacctaaagtatttataaacagctcatcggagcctctatttgtcatagacttttgagttgattgttgggaccacataataggaccattttttttttgtctttaaaattgttgtaaatctctgtatgcactttgcttttttattaaacgtactccaaggtgagtcttgactctttagtgtaggacaagattgtacactaacaccagcatggacctgcttttcattgtgtctgaaatgtgagccacgtagtgtcggcctgctgtgaagttaacattgccaggacgattcttctacagaaataatttcaaattttttcagtatttagtagtgaaagatattaatacattaatggtaatacatttctggtttaatataaattaaggatgttttctagttgtgcatgaatgctggcaacttagtaagttttgacaattgtttaaatatgtaatgttaagcttaggtttaaaaaagtaaagctggtaaactgggtctttgtcatttgcttta

SEQ ID NO: 385384 - DNA, 330 bp, Homo sapiens
aggaaaaaacatggcccaggccctttccttccccctgtgctgacagcattgctgtgggggtggccccctgccctcccctggccctcatgtccccccgggggtggggtccccctgcctgtgctgtgcttgcgacgtgcatcaataaacccccatggcctgagggccctgctcgtcaaaaaaaaaaaaaaaaaaaaaaaaaattaaggatgttttctagttgtgcatgaatgctggcaacttagtaagttttgacaattgtttaaatatgtaatgttaagcttaggtttaaaaaagtaaagctggtaaactgggtctttgtcatttgcttta

SEQ ID NO: 385385 - DNA, 387 bp, Homo sapiens
catataaaatactctagatcccttatagtgtcccctgtaagtaactggtttagtttgctcctttattagcttctgtgacaatgttaatggtctcattttggcacggggtagaatattccatcggctgtgcccaggcatttattttcagacttgaagtcgccacctacatgtctggatctaagatcttggcttatcaactgtctctgtcagcagcacattcatgtccctattgagcttccccaaatatattggatatttgtaaaggcttcctgaacttctcaaggtattgctccaagatgtggatggacgactaaaacttcagcatctcaaatctccactctccccaaacctcttttttttcttctcccattccaccaaggctggaaa

SEQ ID NO: 385386 - DNA, 2734 bp, Homo sapiens
ggagcaggaaatgccgagcggcgcctgagccccagggaagcaggctaggatgtgagagacacagtcacctgcagcctaattactcaaaagctgtccccaggtcacagaagggagaggacatttcccactgaatctgtctgaaggacactaagccccacagctcaacacaaccaggagagaaagcgctgaggacgccacccaagcgcccagcaatggccctgcctggagaacatccaggctcagtgaggaagggtccagaagggaatgcttgccgactcgttggagaacaatgaaaaggaggaaactgtgactgaacctcaaaccccaaaccagcccgaggagaaccacattctcccagggacccagggcgggccgtgacccctgcggcggagaagccttggatatttccacttcagaagcctactggggaaggctgaggggtcccagctccccacgctggctgctgtgcagatgctggacgacagagccaggatggaggccgccaagaaggagaaggtagagcagatcctggcagagttccagctgcaggaggaggacctgaagaaggtgatgagacggatgcagaaggagatggaccgcggcctgaggctggagacccatgaagaggccagtgtgaagatgctgcccacctacgtgcgctccaccccagaaggctcagaagtcggggacttcctctccctggacctgggtggcactaacttcagggtgatgctggtgaaggtgggagaaggtgaggaggggcagtggagcgtgaagaccaaacaccagatgtactccatccccgaggacgccatgaccggcactgctgagatgctcttcgactacatctctgagtgcatctccgacttcctggacaagcatcagatgaaacacaagaagctgcccctgggcttcaccttctcctttcctgtgaggcacgaagacatcgataagggcatccttctcaactggaccaagggcttcaaggcctcaggagcagaagggaacaatgtcgtggggcttctgcgagacgctatcaaacggagaggggactttgaaatggatgtggtggcaatggtgaatgacacggtggccacgatgatctcctgctactacgaagaccatcagtgcgaggtcggcatgatcgtgggcacgggctgcaatgcctgctacatggaggagatgcagaatgtggagctggtggagggggacgagggccgcatgtgcgtcaataccgagtggggcgccttcggggactccggcgagctggacgagttcctgctggagtatgaccgcctggtggacgagagctctgcaaaccccggtcagcagctgtatgagaagctcataggtggcaagtacatgggcgagctggtgcggcttgtgctgctcaggctcgtggacgaaaacctgctcttccacggggaggcctccgagcagctgcgcacacgcggagccttcgagacgcgcttcgtgtcgcaggtggagagcgacacgggcgaccgcaagcagatctacaacatcctgagcacgctggggctgcgaccctcgaccaccgactgcgacatcgtgcgccgcgcctgcgagagcgtgtctacgcgcgctgcgcacatgtgctcggcggggctggcgggcgtcatcaaccgcatgcgcgagagccgcagcgaggacgtaatgcgcatcactgtgggcgtggatggctccgtgtacaagctgcaccccagcttcaaggagcggttccatgccagcgtgcgcaggctgacgcccagctgcgagatcaccttcatcgagtcggaggagggcagtggccggggcgcggccctggtctcggcggtggcctgtaagaaggcctgtatgctgggccagtgagagcagtggccgcaagcgcagggaggatgccacagccccacagcacccaggctccatggggaagtgctccccacacgtgctcgcagcctggcggggcaggaggcctggccttgtcaggacccaggccgcctgccataccgctggggaacagagcgggcctcttccctcagtttttcggtgggacagccccagggccctaacgggggtgcggcaggagcaggaacagagactctggaagccccccacctttctcgctggaatcaatttcccagaagggagttgctcactcaggactttgatgcatttccacactgtcagagctgttggcctcgcctgggcccaggctctgggaaggggtgccctctggatcctgctgtggcctcacttccctgggaactcatcctgtgtggggaggcagctccaacagcttgaccagacctagacctgggccaaaagggcagccaggggctgctcatcacccagtcctggccattttcttgcctgaggctcaagaggcccagggagcaatgggagggggctccatggaggaggtgtcccaagctttgaatacccccagagaccttttctctcccataccatcactgagtggcttgtgattctgggatggaccctcgcagcaggtgcaagagacagagcccccaagcctctgccccaaggggcccacaaaggggagaagggccagccctacatcttcagctcccatagcgctggctcaggaagaaaccccaagcagcattcagcacaccccaagggacaaccccatcatatgacatgccaccctctccatgcccaacctaagattgtgtgggttttttaattaaaaatgttaaaagttttaaacatg

SEQ ID NO: 385387 - DNA, 2545 bp, Homo sapiens
aagccctgggctgccagcctcaggcagctctccatccaagcagccgttgctgccacaggcgggccttacgctccaaggctacagcatgtgctaggcctcagcaggcaggagcatctctgcctcccaaagcatctacctcttagcccctcggagagatggcgatggatgtcacaaggagccaggcccagacagccttgactctgccagactctcctctgaactcgggcctcacatggccaactgctacttggaacaaatcgccccttggctggcagatgtgttaacatgcccagaccaagatcccaactcccacaacccaactcccaggtagagcagatcctggcagagttccagctgcaggaggaggacctgaagaaggtgatgagacggatgcagaaggagatggaccgcggcctgaggctggagacccatgaagaggccagtgtgaagatgctgcccacctacgtgcgctccaccccagaaggctcagaagtcggggacttcctctccctggacctgggtggcactaacttcagggtgatgctggtgaaggtgggagaaggtgaggaggggcagtggagcgtgaagaccaaacaccagatgtactccatccccgaggacgccatgaccggcactgctgagatgctcttcgactacatctctgagtgcatctccgacttcctggacaagcatcagatgaaacacaagaagctgcccctgggcttcaccttctcctttcctgtgaggcacgaagacatcgataagggcatccttctcaactggaccaagggcttcaaggcctcaggagcagaagggaacaatgtcgtggggcttctgcgagacgctatcaaacggagaggggactttgaaatggatgtggtggcaatggtgaatgacacggtggccacgatgatctcctgctactacgaagaccatcagtgcgaggtcggcatgatcgtgggcacgggctgcaatgcctgctacatggaggagatgcagaatgtggagctggtggagggggacgagggccgcatgtgcgtcaataccgagtggggcgccttcggggactccggcgagctggacgagttcctgctggagtatgaccgcctggtggacgagagctctgcaaaccccggtcagcagctgtatgagaagctcataggtggcaagtacatgggcgagctggtgcggcttgtgctgctcaggctcgtggacgaaaacctgctcttccacggggaggcctccgagcagctgcgcacacgcggagccttcgagacgcgcttcgtgtcgcaggtggagagcgacacgggcgaccgcaagcagatctacaacatcctgagcacgctggggctgcgaccctcgaccaccgactgcgacatcgtgcgccgcgcctgcgagagcgtgtctacgcgcgctgcgcacatgtgctcggcggggctggcgggcgtcatcaaccgcatgcgcgagagccgcagcgaggacgtaatgcgcatcactgtgggcgtggatggctccgtgtacaagctgcaccccagcttcaaggagcggttccatgccagcgtgcgcaggctgacgcccagctgcgagatcaccttcatcgagtcggaggagggcagtggccggggcgcggccctggtctcggcggtggcctgtaagaaggcctgtatgctgggccagtgagagcagtggccgcaagcgcagggaggatgccacagccccacagcacccaggctccatggggaagtgctccccacacgtgctcgcagcctggcggggcaggaggcctggccttgtcaggacccaggccgcctgccataccgctggggaacagagcgggcctcttccctcagtttttcggtgggacagccccagggccctaacgggggtgcggcaggagcaggaacagagactctggaagccccccacctttctcgctggaatcaatttcccagaagggagttgctcactcaggactttgatgcatttccacactgtcagagctgttggcctcgcctgggcccaggctctgggaaggggtgccctctggatcctgctgtggcctcacttccctgggaactcatcctgtgtggggaggcagctccaacagcttgaccagacctagacctgggccaaaagggcagccaggggctgctcatcacccagtcctggccattttcttgcctgaggctcaagaggcccagggagcaatgggagggggctccatggaggaggtgtcccaagctttgaatacccccagagaccttttctctcccataccatcactgagtggcttgtgattctgggatggaccctcgcagcaggtgcaagagacagagcccccaagcctctgccccaaggggcccacaaaggggagaagggccagccctacatcttcagctcccatagcgctggctcaggaagaaaccccaagcagcattcagcacaccccaagggacaaccccatcatatgacatgccaccctctccatgcccaacctaagattgtgtgggttttttaattaaaaatgttaaaagttttaaacatg

SEQ ID NO: 385388 - DNA, 1315 bp, Homo sapiens
ggcggggtccggacggggatgccaagagcagggatgggagcgagcctgcgtccgggcactggtccccatcccgacacgggcgaccgcaagcagatctacaacatcctgagcacgctggggctgcgaccctcgaccaccgactgcgacatcgtgcgccgcgcctgcgagagcgtgtctacgcgcgctgcgcacatgtgctcggcggggctggcgggcgtcatcaaccgcatgcgcgagagccgcagcgaggacgtaatgcgcatcactgtgggcgtggatggctccgtgtacaagctgcaccccagcttcaaggagcggttccatgccagcgtgcgcaggctgacgcccagctgcgagatcaccttcatcgagtcggaggagggcagtggccggggcgcggccctggtctcggcggtggcctgtaagaaggcctgtatgctgggccagtgagagcagtggccgcaagcgcagggaggatgccacagccccacagcacccaggctccatggggaagtgctccccacacgtgctcgcagcctggcggggcaggaggcctggccttgtcaggacccaggccgcctgccataccgctggggaacagagcgggcctcttccctcagtttttcggtgggacagccccagggccctaacgggggtgcggcaggagcaggaacagagactctggaagccccccacctttctcgctggaatcaatttcccagaagggagttgctcactcaggactttgatgcatttccacactgtcagagctgttggcctcgcctgggcccaggctctgggaaggggtgccctctggatcctgctgtggcctcacttccctgggaactcatcctgtgtggggaggcagctccaacagcttgaccagacctagacctgggccaaaagggcagccaggggctgctcatcacccagtcctggccattttcttgcctgaggctcaagaggcccagggagcaatgggagggggctccatggaggaggtgtcccaagctttgaatacccccagagaccttttctctcccataccatcactgagtggcttgtgattctgggatggaccctcgcagcaggtgcaagagacagagcccccaagcctctgccccaaggggcccacaaaggggagaagggccagccctacatcttcagctcccatagcgctggctcaggaagaaaccccaagcagcattcagcacaccccaagggacaaccccatcatatgacatgccaccctctccatgcccaacctaagattgtgtgggttttttaattaaaaatgttaaaagttttaaacatg

SEQ ID NO: 385389 - DNA, 1960 bp, Homo sapiens
ggagcaggaaatgccgagcggcgcctgagccccagggaagcaggctaggatgtgagagacacagtcacctgcagcctaattactcaaaagctgtccccaggtcacagaagggagaggacatttcccactgaatctgtctgaaggacactaagccccacagctcaacacaaccaggagagaaagcgctgaggacgccacccaagcgcccagcaatggccctgcctggagaacatccaggctcagtgaggaagggtccagaagggaatgcttgccgactcgttggagaacaatgaaaaggaggaaactgtgactgaacctcaaaccccaaaccagcccgaggagaaccacattctcccagggacccagggcgggccgtgacccctgcggcggagaagccttggatatttccacttcagaagcctactggggaaggctgaggggtcccagctccccacgctggctgctgtgcagatgctggacgacagagccaggatggaggccgccaagaaggagaaggtagagcagatcctggcagagttccagctgcaggaggaggacctgaagaaggtgatgagacggatgcagaaggagatggaccgcggcctgaggctggagacccatgaagaggccagtgtgaagatgctgcccacctacgtgcgctccaccccagaaggctcagaagtcggggacttcctctccctggacctgggtggcactaacttcagggtgatgctggtgaaggtgggagaaggtgaggaggggcagtggagcgtgaagaccaaacaccagatgtactccatccccgaggacgccatgaccggcactgctgagatgctcttcgactacatctctgagtgcatctccgacttcctggacaagcatcagatgaaacacaagaagctgcccctgggcttcaccttctcctttcctgtgaggcacgaagacatcgataagggcatccttctcaactggaccaagggcttcaaggcctcaggagcagaagggaacaatgtcgtggggcttctgcgagacgctatcaaacggagaggggactttgaaatggatgtggtggcaatggtgaatgacacggtggccacgatgatctcctgctactacgaagaccatcagtgcgaggtcggcatgatcgtgggcacgggctgcaatgcctgctacatggaggagatgcagaatgtggagctggtggagggggacgagggccgcatgtgcgtcaataccgagtggggcgccttcggggactccggcgagctggacgagttcctgctggagtatgaccgcctggtggacgagagctctgcaaaccccggtcagcagctgtaaggatgcccccctcccccacaacccaggccctgggccgctctggtgcagcggcagatgggagccgggccattgcagataatgggcttgtttttaaacaactctggggaaaagcaaactgacaatccgttcgtaagctccatcccttctgctcagtcatgacctgcccctgtgagagatgaagggttagtcccagttgtgatgtgataagcccagacctctttccttccgacaggtgatcgtgcatgcagaggaggctctgagacgcccccagcaaggttcctgggtttaacccaacattccccaaagtatgtatttggccacattcacagaaagaatattagtcttttgtggaatgctgcgggttgacagtcacagcttggaaaccaacccacagagagctcatcattaatcatggctatcacttgtttaccacctactgtgccaggcctatgctaattactttattagcgtcctctctgccgctcgcaggcctctattattataggtcagtagtattcgatttatttaaattaaatacggaggcctgctaacccacaggccgacctggtgcggctcgacgggctacctcgtttattcccacatacgcatgaccggctgtcgt

SEQ ID NO: 385390 - DNA, 2193 bp, Homo sapiens
ggcacgaggatcgagaagacaggtgaacatttccgcctggtctatgacaccaagggccgttttgctgttcaccgcatcacagtggaagaggcaaagtacaagttgtgcaaagtgaggaagattactgtgggagtgaagggaatccctcacctggtgactcatgatgctcgaaccatccgctaccttgatgacaggatctggcctcgtgccgaattcggcacgagtggagcgtgaagaccaaacaccagatgtactccatccccgaggacgccatgaccggcactgctgagatgctcttcgactacatctctgagtgcatctccgacttcctggacaagcatcagatgaaacacaagaagctgcccctgggcttcaccttctcctttcctgtgaggcacgaagacatcgataagggcatccttctcaactggaccaagggcttcaaggcctcaggagcagaagggaacaatgtcgtggggcttctgcgagacgctatcaaacggagaggggactttgaaatggatgtggtggcaatggtgaatgacacggtggccacgatgatctcctgctactacgaagaccatcagtgcgaggtcggcatgatcgtgggcacgggctgcaatgcctgctacatggaggagatgcagaatgtggagctggtggagggggacgagggccgcatgtgcgtcaataccgagtggggcgccttcggggactccggcgagctggacgagttcctgctggagtatgaccgcctggtggacgagagctctgcaaaccccggtcagcagctgtatgagaagctcataggtggcaagtacatgggcgagctggtgcggcttgtgctgctcaggctcgtggacgaaaacctgctcttccacggggaggcctccgagcagctgcgcacacgcggagccttcgagacgcgcttcgtgtcgcaggtggagagcgacacgggcgaccgcaagcagatctacaacatcctgagcacgctggggctgcgaccctcgaccaccgactgcgacatcgtgcgccgcgcctgcgagagcgtgtctacgcgcgctgcgcacatgtgctcggcggggctggcgggcgtcatcaaccgcatgcgcgagagccgcagcgaggacgtaatgcgcatcactgtgggcgtggatggctccgtgtacaagctgcaccccagcttcaaggagcggttccatgccagcgtgcgcaggctgacgcccagctgcgagatcaccttcatcgagtcggaggagggcagtggccggggcgcggccctggtctcggcggtggcctgtaagaaggcctgtatgctgggccagtgagagcagtggccgcaagcgcagggaggatgccacagccccacagcacccaggctccatggggaagtgctccccacacgtgctcgcagcctggcggggcaggaggcctggccttgtcaggacccaggccgcctgccataccgctggggaacagagcgggcctcttccctcagtttttcggtgggacagccccagggccctaacgggggtgcggcaggagcaggaacagagactctggaagccccccacctttctcgctggaatcaatttcccagaagggagttgctcactcaggactttgatgcatttccacactgtcagagctgttggcctcgcctgggcccaggctctgggaaggggtgccctctggatcctgctgtggcctcacttccctgggaactcatcctgtgtggggaggcagctccaacagcttgaccagacctagacctgggccaaaagggcagccaggggctgctcatcacccagtcctggccattttcttgcctgaggctcaagaggcccagggagcaatgggagggggctccatggaggaggtgtcccaagctttgaatacccccagagaccttttctctcccataccatcactgagtggcttgtgattctgggatggaccctcgcagcaggtgcaagagacagagcccccaagcctctgccccaaggggcccacaaaggggagaagggccagccctacatcttcagctcccatagcgctggctcaggaagaaaccccaagcagcattcagcacaccccaagggacaaccccatcatatgacatgccaccctctccatgcccaacctaagattgtgtgggttttttaattaaaaatgttaaaagttttaaacatg

SEQ ID NO: 385391 - DNA, 391 bp, Homo sapiens
ctcttacgagtgaggttaagtattgaacagatatttaaaagctataagcttttaaacagaataggcatattgctgataccagtatttgacaaccgccttgttttttcagataagaaaactgaagcacagagaccataaggcatcagcctatggtcattcacttcgtggtagtcaggtcggaggtcacaccaaggccctctggctactgataatctctgtactaggctgcttttcagtaaactcttgaatgaatgaaagaaagaacacatactgttgacttttgaacttgaatctaaacaaaacctatgttgaactttaagtctgtaatctaagaactatcaaacttaaacttgttacaaaaggagatgatgagcacaaccactttctttgg

SEQ ID NO: 385392 - DNA, 383 bp, Homo sapiens
tttttaacttcttaaacattgttagtggaaaaaaagatatgctctatttaccaatgataatcaaatcataagacatttgcccccaaatgttaccttggatatttccaagagctgttagtcattgaaatcctatttaagatactgttaaaagtttagttaatgtatcacacatatgtcttgatgtatgcttcataggagggactcagtaaagacacgggtattgaaataattaatatataaacattaggggtttcataaaatatataaagaattctagaattagaaagaactcaaaaaattatccagtccagggctggcaaacttactctgtaaatgggcagatagtaaataacctaggctttgtgagcctgatggtctctgta

SEQ ID NO: 385393 - DNA, 409 bp, Homo sapiens
tagggaaaatatctttatactatacatccaattcaagaggactttaattacttaaaagcatttaggtcataattaaaattattttcactgtttccataaaataagcattatgattgcacactccttctactgtctgaatttatgtaagaggtatagcttgcttaaaatacatatatatgtaaagttatattttcttagaaacatggatgtttacagccattgctttcaaagagattattactgtgtattctccctgttttacaatatgttttcatgaagactatgttacaccagaggcttctgattatcaaagtgataaccagttttaactgccggtatgtaccagatttgtgaactaatttaaaaaaccacaaactatgaataaaatggggtttgcaaactaaatatc

SEQ ID NO: 385394 - DNA, 375 bp, Homo sapiens
aagcaagctatacctcttacataaattcagacagtagaaggagtgtgcaatcataatgcttattttatggaaacagtgaaaataattttaattatgacctaaatgcttttaagtaattaaagtcctcttgaattggatatatatgtaaagttatattttcttagaaacatggatgtttacagccattgctttcaaagagattattactgtgtattctccctgttttacaatatgttttcatgaagactatgttacaccagaggcttctgattatcaaagtgataaccagttttaactgccggtatgtaccagatttgtgaactaatttaaaaaaccacaaactatgaataaaatggggtttgcaaactaaatatc

SEQ ID NO: 385395 - DNA, 470 bp, Homo sapiens
ccctagcagtactaaagtgtatggattggagtggttattttgtagtattttgaatttttaaaatgctattgtgtaggtcagtggtgcttcggtgcgtgaagcagcctttaaactgcttagaaagtatattaaatatgatagtaatagtaagtgatgtcacccattacagttttacaaggtgccaggcactgtgctaagtgctttcctgtattctttctgttacataatctctgtgcctcaaccttcttgtctgtaaaatggtgagaaaaataataccaatgtcacccagttgttttgaagattatataatttaatatttttatttattcatttttgaagcagggtttcacttctgtcacccaggcgggagggcagtggcatgatcttggctcatgcaacctccacctccgaggcttaagtgattctcctgtgtcagcctctcgagtaactgggactacagatgcacacca

SEQ ID NO: 385396 - DNA, 603 bp, Homo sapiens
tggcaaactccgctccaagggtaggctgtgtccaggactgtactcccgtgtgctttgacagaggtgcttcattttttgttctttcaaccccctgtgaatgtatttatcagcttctctcgctcccgctcgccgttttacaccgttgagccggcgaccaaagcagcagctccaccacctcccaccaaccagagcccacccccccgcacgcccgccgcccacccttcgttttggtttaatttttgttcttttaagctgcttctgcgcttctccatgtgctgtgatctataacctgcctctactgtctggcctcacagggtcctccggggtcacagccctcgccgcacgcacagcctccacctcacaatcctagcagcatgatgggaccccacagtcaggtaaacgcaccgtggcgctcccgcccgccggggacgcggggcgcggaggaagcagagagcccgcagaggaaaaacaaaaatcaaaatgtgctctagccactgcctgcgagtctttattgacaaattaaatttttttagaaatttcttttttctaaagatagtcttcagtcctcggatatcacacccagcttggatacgaaaccaaaag

SEQ ID NO: 385397 - DNA, 1674 bp, Homo sapiens
ggcggcggcggcagcggtgctggaggcgcagagggcggcgcaggcggagccgggcgggcgcgcgagagcggagagcgggcggccgtgcgggcggcggcggcggcacccccaggccgagccggcgcggaaggagttccagggcgatggggccgcggccggggctgacgctttgacagctggaaagagcgcggaccagcgcctgggggggagggaggggagcgcggcgaggagagcgccagcgagcgagagagcgagcgagcgccggggagggggccgggagcgaggggcagctcgggagagccggagcggtagcggcggcggcggcggcggcggcgaggctcggcgccctcttccctgcaaaccatgtttgccaaaggcaaaggctcggcggtgccctcggatgggcaggctcgggaaaagttagctttatacgtctacgaatatttactgcacgtaggagcacagaaatctgcacagaccttcttatcggagattcgatgggaaaaaaacatcacgttgggagaaccgcctgggtttttgcactcgtggtggtgtgtattttgggacctttactgtgcagctcctgaaaggagagacacttgtgaacattcaagtgaagcaaaagcctttcatgattatagtgcagcagctgccccgagccccgtgcttggcaacattccccccaacgatgggatgccgggaggccccatcccgccaggtttctttcagggtcctccggggtcacagccctcgccgcacgcacagcctccacctcacaatcctagcagcatgatgggaccccacagtcagcctccgggaggagttcctgggacacagccattgctgcccaattctatggatcccacacgacaacaaggccaccccaacatgggaggatcaatgcagagaatgaaccctccccgaggcatggggcccatgggtcccggcccacagaattacggcagcggcatgagaccaccacccaactccctcggccccgccatgcccgggattaacatgggcccgggagctggcagaccctggcccaatcctaacagtgctaactcaattccatactcctcctcatcacctggtacctatgtgggaccccctggtggtggcggtcctccaggaacacccattatgcccagtcccgcagattcaacaaattccagtgacaacatctacacaatgattaatccagtgccgcctggaggcagccggtccaacttcccgatgggtcccggctcggacggtccgatgggcggcatgggtggcatggagccacaccacatgaatggatcattagggtcaggcgacatagacggacttccaaaaaattctcctaacaacataagtggcattagcaatcctccaggcacccctcgagatgacggcgagctaggagggaacttcctccactcctttcagaacgacaattattctccaagcatgacgatgagtgtgtgatccccccttctccgagacgctgagagagcaggcattgcaggcgggaagatgccagaaattatgcaagaagtgaggtgtcattatccaggagctggtggggagggcatctccctgctcccctcaaccccctcccaccccatccacgccccctacctttcccaattttagtttcatgcaataaaaaggccaaactttttattccat

SEQ ID NO: 385398 - DNA, 982 bp, Homo sapiens
ggcggcggcggcagcggtgctggaggcgcagagggcggcgcaggcggagccgggcgggcgcgcgagagcggagagcgggcggccgtgcgggcggcggcggcggcacccccaggccgagccggcgcggaaggagttccagggcgatggggccgcggccggggctgacgctttgacagctggaaagagcgcggaccagcgcctgggggggagggaggggagcgcggcgaggagagcgccagcgagcgagagagcgagcgagcgccggggagggggccgggagcgaggggcagctcgggagagccggagcggtagcggcggcggcggcggcggcggcgaggctcggcgccctcttccctgcaaaccatgtttgccaaaggcaaaggctcggcggtgccctcggatgggcaggctcgggaaaagttagctttatacgtctacgaatatttactgcacgtaggagcacagaaatctgcacagaccttcttatcggagattcgatgggaaaaaaacatcacgttgggagaaccgcctgggtttttgcactcgtggtggtgtgtattttgggacctttactgtgcagctcctgaaaggagagacacttgtgaacattcaagtgaagcaaaagcctttcatgattatagtgcagcagctgccccgagccccgtgcttggcaacattccccccaacgatgggatgccgggaggccccatcccgccaggtttctttcagccttttatgtcaccgcgatacgcaggcggccccaggcccccgatcagaatgggaaaccagcctccgggaggagttcctgggacacagccattgctgcccaattctatggatcccacacgacaacaaggccaccccaacatgggaggatcaatgcagagaatgaaccctccccgaggcatggggcccatgggtcccggcccacagaattacggcagcggcatgagaccacgacacagtgcacgacacagaccac

SEQ ID NO: 385399 - DNA, 346 bp, Homo sapiens
tccagtgccatgagtttgttttaattaagaaacgaattaatcaccccgacttgtgggtttccactgttctacagattcaacaaattccagtgacaacatctacacaatgattaatccagtgccgcctggaggcagccggtccaacgtaagtctgctttctaataatttacatatcagacaccataacaaatcataattaacttcatcagctgaggggaaagcaagtttaattgatttcagccatttgttaccaaagatgaataaaataaaccgtcagaaaagtgattaactcttgggcaactcagttcccatttcataggcggcagggggtgggagaggaaggggt

SEQ ID NO: 385400 - DNA, 311 bp, Homo sapiens
ttactcgatagcctgacagcataacaacatcattactacaaataagccatgcacatgaacttattgctcaagtccacatgttcactttcaaaaaccaacaagcccgacagtggagcctgtcccctcccgggagggtgctcatggccccactcacctcatcaccccacggaaacctttgtgtcttgccctggaagacacccgaattctttgtacattgacatgcccttctccttcctccctcccctgtagctggtctttgttttaatcagtgacagtttattaacatgcttcaaaagtgaccaaagtgtcca

SEQ ID NO: 385401 - DNA, 454 bp, Homo sapiens
aagaacatgacagacatcctctgcccttcagcctgtgccccagaatgagagacccatgggacagactcaagctgtaccctgaagcagagctgcccagttgactgcagacctaggaggctggagaaaaaagaatccgttaaaggataacaggaagaatagcccgagaggaagagggaaaaccaggagagagtggagccctgaagctgtgtgaggagagggtttcaggagcatgggaacctctgatgctcagacaggggtgtgctgcgccattctgcaccatgtccctgggcgtggtggcgtgcacctgtaatcccagctacccaggaggctgaggcaagagaatcactggaactcgtgagacagaggctgcagtgagctgagatcgcgccactgcactccaaacggagcgacacagcaagactctgtctcaaaaaaaaatattgcagtaaaatat

SEQ ID NO: 385402 - DNA, 3229 bp, Homo sapiens
ggcggcggcggcagcggtgctggaggcgcagagggcggcgcaggcggagccgggcgggcgcgcgagagcggagagcgggcggccgtgcgggcggcggcggcggcacccccaggccgagccggcgcggaaggagttccagggcgatggggccgcggccggggctgacgctttgacagctggaaagagcgcggaccagcgcctgggggggagggaggggagcgcggcgaggagagcgccagcgagcgagagagcgagcgagcgccggggagggggccgggagcgaggggcagctcgggagagccggagcggtagcggcggcggcggcggcggcggcgaggctcggcgccctcttccctgcaaaccatgtttgccaaaggcaaaggctcggcggtgccctcggatgggcaggctcgggaaaagttagctttatacgtctacgaatatttactgcacgtaggagcacagaaatctgcacagaccttcttatcggagattcgatgggaaaaaaacatcacgttgggagaaccgcctgggtttttgcactcgtggtggtgtgtattttgggacctttactgtgcagctcctgaaaggagagacacttgtgaacattcaagtgaagcaaaagcctttcatgattatagtgcagcagctgccccgagccccgtgcttggcaacattccccccaacgatgggatgccgggaggccccatcccgccaggtttctttcagggtcctccggggtcacagccctcgccgcacgcacagcctccacctcacaatcctagcagcatgatgggaccccacagtcagccttttatgtcaccgcgatacgcaggcggccccaggcccccgatcagaatgggaaaccagcctccgggaggagttcctgggacacagccattgctgcccaattctatggatcccacacgacaacaaggccaccccaacatgggaggatcaatgcagagaatgaaccctccccgaggcatggggcccatgggtcccggcccacagaattacggcagcggcatgagaccaccacccaactccctcggccccgccatgcccgggattaacatgggcccgggagctggcagaccctggcccaatcctaacagtgctaactcaattccatactcctcctcatcacctggtacctatgtgggaccccctggtggtggcggtcctccaggaacacccattatgcccagtcccgcagattcaacaaattccagtgacaacatctacacaatgattaatccagtgccgcctggaggcagccggtccaacttcccgatgggtcccggctcggacggtccgatgggcggcatgggtggcatggagccacaccacatgaatggatcattagggtcaggcgacatagacggacttccaaaaaattctcctaacaacataagtggcattagcaatcctccaggcacccctcgagatgacggcgagctaggagggaacttcctccactcctttcagaacgacaattattctccaagcatgacgatgagtgtgtgatccccccttctccgagacgctgagagagcaggcattgcaggcgggaagatgccagaaattatgcaagaagtgaggtgtcattatccaggagctggtggggagggcatctccctgctcccctcaaccccctcccaccccatccacgccccctacctttcccaattttagtttcatgcaataaaaaggccaaactttttattccataaaacaagaaggacaaaactctcaaaaatgtatttcaagtcagtgaccagaaaaatcccaccccttgccctttccccaaaggaccttttctgtacatgacacttttttgttgttttttgtttggggttttaccattgttgggatttttttatttgttttcaggggggttttttgggggaaaatttttttaaatggaagcttctagcaagccccccaccccaatcaacctctatgctttcttcttaaaaaaaaaaaaaaaggaaaaaggaaaaaaaaaaaaggaaaaccagaagccctgctgtctgtctgtgcccaagcccttccaccagaaaagctagtctaggtgtgagagcccacattgtctgtagccatcaaaaataataataataaactggacagtttacaatcgttggtttctttcaaaaggccttttttggaaagaagaaaaggcagtcaccgttttccacttggggttttggtttgtgcaacaggcaggggaggagtggggacgcgtttgttctagcttgatttccatggcaacagcagcggcacgcttggaccccagaacccagcaccctcatcctgtggccagaggggccggaccactgacccctttcaggattccaccacagcccagaccgtcaccgtgacccggtggcatgcactgttcccaggacaccctcctcctctcctggacctcccttccgtcctggcctccctgcctctccagcccctcctctgcccccaccccagtcttcccagtgagaatcctgccagctgggtggtggcctggcgcagagtgggagaggctgccactgacaggatggctatgacctgggacatggaaacagtgacctccgcgttctggtcccgagatcctcgcatcagcgtcatcgtgtgcaccggcttggggggctggagttccggttttctttgttttttctctttattcgtcctttctcaaagatgggatactgatcagaattgctctgtatatgcttgggactggatggaaagactttggagcagctgtggggggtggggggacaccgacaaccaaacagacgtgctggctccagtcctgtttttactttcaaaaaccaacaagcccgacagtggagcctgtcccctcccgggagggtgctcatggccccactcacctcatcaccccacggaaacctttgtgtcttgccctggaagacacccgaattctttgtacattgacatgcccttctccttcctccctcccctgtagctggtctttgttttactccctccctttctgatccatgtatatcatattatgtgagatatcatctgcctgaaaaaagactttgtgcggattattgggaacattgtagctgtttctgtgttttttcttaccttgtagtctggttctgaattaagagaggaaaaaaaagtaattatgatacattgtagtttgtgtacgatatatgttgataacgttttattaaagggacatcttttttccgca

SEQ ID NO: 385403 - DNA, 3148 bp, Homo sapiens
ggcggcggcggcagcggtgctggaggcgcagagggcggcgcaggcggagccgggcgggcgcgcgagagcggagagcgggcggccgtgcgggcggcggcggcggcacccccaggccgagccggcgcggaaggagttccagggcgatggggccgcggccggggctgacgctttgacagctggaaagagcgcggaccagcgcctgggggggagggaggggagcgcggcgaggagagcgccagcgagcgagagagcgagcgagcgccggggagggggccgggagcgaggggcagctcgggagagccggagcggtagcggcggcggcggcggcggcggcgaggctcggcgccctcttccctgcaaaccatgtttgccaaaggcaaaggctcggcggtgccctcggatgggcaggctcgggaaaagttagctttatacgtctacgaatatttactgcacgtaggagcacagaaatctgcacagaccttcttatcggagattcgatgggaaaaaaacatcacgttgggagaaccgcctgggtttttgcactcgtggtggtgtgtattttgggacctttactgtgcagctcctgaaaggagagacacttgtgaacattcaagtgaagcaaaagcctttcatgattatagtgcagcagctgccccgagccccgtgcttggcaacattccccccaacgatgggatgccgggaggccccatcccgccaggtttctttcagccttttatgtcaccgcgatacgcaggcggccccaggcccccgatcagaatgggaaaccagcctccgggaggagttcctgggacacagccattgctgcccaattctatggatcccacacgacaacaaggccaccccaacatgggaggatcaatgcagagaatgaaccctccccgaggcatggggcccatgggtcccggcccacagaattacggcagcggcatgagaccaccacccaactccctcggccccgccatgcccgggattaacatgggcccgggagctggcagaccctggcccaatcctaacagtgctaactcaattccatactcctcctcatcacctggtacctatgtgggaccccctggtggtggcggtcctccaggaacacccattatgcccagtcccgcagattcaacaaattccagtgacaacatctacacaatgattaatccagtgccgcctggaggcagccggtccaacttcccgatgggtcccggctcggacggtccgatgggcggcatgggtggcatggagccacaccacatgaatggatcattagggtcaggcgacatagacggacttccaaaaaattctcctaacaacataagtggcattagcaatcctccaggcacccctcgagatgacggcgagctaggagggaacttcctccactcctttcagaacgacaattattctccaagcatgacgatgagtgtgtgatccccccttctccgagacgctgagagagcaggcattgcaggcgggaagatgccagaaattatgcaagaagtgaggtgtcattatccaggagctggtggggagggcatctccctgctcccctcaaccccctcccaccccatccacgccccctacctttcccaattttagtttcatgcaataaaaaggccaaactttttattccataaaacaagaaggacaaaactctcaaaaatgtatttcaagtcagtgaccagaaaaatcccaccccttgccctttccccaaaggaccttttctgtacatgacacttttttgttgttttttgtttggggttttaccattgttgggatttttttatttgttttcaggggggttttttgggggaaaatttttttaaatggaagcttctagcaagccccccaccccaatcaacctctatgctttcttcttaaaaaaaaaaaaaaaggaaaaaggaaaaaaaaaaaaggaaaaccagaagccctgctgtctgtctgtgcccaagcccttccaccagaaaagctagtctaggtgtgagagcccacattgtctgtagccatcaaaaataataataataaactggacagtttacaatcgttggtttctttcaaaaggccttttttggaaagaagaaaaggcagtcaccgttttccacttggggttttggtttgtgcaacaggcaggggaggagtggggacgcgtttgttctagcttgatttccatggcaacagcagcggcacgcttggaccccagaacccagcaccctcatcctgtggccagaggggccggaccactgacccctttcaggattccaccacagcccagaccgtcaccgtgacccggtggcatgcactgttcccaggacaccctcctcctctcctggacctcccttccgtcctggcctccctgcctctccagcccctcctctgcccccaccccagtcttcccagtgagaatcctgccagctgggtggtggcctggcgcagagtgggagaggctgccactgacaggatggctatgacctgggacatggaaacagtgacctccgcgttctggtcccgagatcctcgcatcagcgtcatcgtgtgcaccggcttggggggctggagttccggttttctttgttttttctctttattcgtcctttctcaaagatgggatactgatcagaattgctctgtatatgcttgggactggatggaaagactttggagcagctgtggggggtggggggacaccgacaaccaaacagacgtgctggctccagtcctgtttttactttcaaaaaccaacaagcccgacagtggagcctgtcccctcccgggagggtgctcatggccccactcacctcatcaccccacggaaacctttgtgtcttgccctggaagacacccgaattctttgtacattgacatgcccttctccttcctccctcccctgtagctggtctttgttttactccctccctttctgatccatgtatatcatattatgtgagatatcatctgcctgaaaaaagactttgtgcggattattgggaacattgtagctgtttctgtgttttttcttaccttgtagtctggttctgaattaagagaggaaaaaaaagtaattatgatacattgtagtttgtgtacgatatatgttgataacgttttattaaagggacatcttttttccgca

SEQ ID NO: 385404 - DNA, 2814 bp, Homo sapiens
tggcaaactccgctccaagggtaggctgtgtccaggactgtactcccgtgtgctttgacagaggtgcttcattttttgttctttcaaccccctgtgaatgtatttatcagcttctctcgctcccgctcgccgttttacaccgttgagccggcgaccaaagcagcagctccaccacctcccaccaaccagagcccacccccccgcacgcccgccgcccacccttcgttttggtttaatttttgttcttttaagctgcttctgcgcttctccatgtgctgtgatctataacctgcctctactgtctggcctcacagggtcctccggggtcacagccctcgccgcacgcacagcctccacctcacaatcctagcagcatgatgggaccccacagtcagccttttatgtcaccgcgatacgcaggcggccccaggcccccgatcagaatgggaaaccagcctccgggaggagttcctgggacacagccattgctgcccaattctatggatcccacacgacaacaaggccaccccaacatgggaggatcaatgcagagaatgaaccctccccgaggcatggggcccatgggtcccggcccacagaattacggcagcggcatgagaccaccacccaactccctcggccccgccatgcccgggattaacatgggcccgggagctggcagaccctggcccaatcctaacagtgctaactcaattccatactcctcctcatcacctggtacctatgtgggaccccctggtggtggcggtcctccaggaacacccattatgcccagtcccgcagattcaacaaattccagtgacaacatctacacaatgattaatccagtgccgcctggaggcagccggtccaacttcccgatgggtcccggctcggacggtccgatgggcggcatgggtggcatggagccacaccacatgaatggatcattagggtcaggcgacatagacggacttccaaaaaattctcctaacaacataagtggcattagcaatcctccaggcacccctcgagatgacggcgagctaggagggaacttcctccactcctttcagaacgacaattattctccaagcatgacgatgagtgtgtgatccccccttctccgagacgctgagagagcaggcattgcaggcgggaagatgccagaaattatgcaagaagtgaggtgtcattatccaggagctggtggggagggcatctccctgctcccctcaaccccctcccaccccatccacgccccctacctttcccaattttagtttcatgcaataaaaaggccaaactttttattccataaaacaagaaggacaaaactctcaaaaatgtatttcaagtcagtgaccagaaaaatcccaccccttgccctttccccaaaggaccttttctgtacatgacacttttttgttgttttttgtttggggttttaccattgttgggatttttttatttgttttcaggggggttttttgggggaaaatttttttaaatggaagcttctagcaagccccccaccccaatcaacctctatgctttcttcttaaaaaaaaaaaaaaaggaaaaaggaaaaaaaaaaaaggaaaaccagaagccctgctgtctgtctgtgcccaagcccttccaccagaaaagctagtctaggtgtgagagcccacattgtctgtagccatcaaaaataataataataaactggacagtttacaatcgttggtttctttcaaaaggccttttttggaaagaagaaaaggcagtcaccgttttccacttggggttttggtttgtgcaacaggcaggggaggagtggggacgcgtttgttctagcttgatttccatggcaacagcagcggcacgcttggaccccagaacccagcaccctcatcctgtggccagaggggccggaccactgacccctttcaggattccaccacagcccagaccgtcaccgtgacccggtggcatgcactgttcccaggacaccctcctcctctcctggacctcccttccgtcctggcctccctgcctctccagcccctcctctgcccccaccccagtcttcccagtgagaatcctgccagctgggtggtggcctggcgcagagtgggagaggctgccactgacaggatggctatgacctgggacatggaaacagtgacctccgcgttctggtcccgagatcctcgcatcagcgtcatcgtgtgcaccggcttggggggctggagttccggttttctttgttttttctctttattcgtcctttctcaaagatgggatactgatcagaattgctctgtatatgcttgggactggatggaaagactttggagcagctgtggggggtggggggacaccgacaaccaaacagacgtgctggctccagtcctgtttttactttcaaaaaccaacaagcccgacagtggagcctgtcccctcccgggagggtgctcatggccccactcacctcatcaccccacggaaacctttgtgtcttgccctggaagacacccgaattctttgtacattgacatgcccttctccttcctccctcccctgtagctggtctttgttttactccctccctttctgatccatgtatatcatattatgtgagatatcatctgcctgaaaaaagactttgtgcggattattgggaacattgtagctgtttctgtgttttttcttaccttgtagtctggttctgaattaagagaggaaaaaaaagtaattatgatacattgtagtttgtgtacgatatatgttgataacgttttattaaagggacatcttttttccgca

SEQ ID NO: 385405 - DNA, 3088 bp, Homo sapiens
ggcggcggcggcagcggtgctggaggcgcagagggcggcgcaggcggagccgggcgggcgcgcgagagcggagagcgggcggccgtgcgggcggcggcggcggcacccccaggccgagccggcgcggaaggagttccagggcgatggggccgcggccggggctgacgctttgacagctggaaagagcgcggaccagcgcctgggggggagggaggggagcgcggcgaggagagcgccagcgagcgagagagcgagcgagcgccggggagggggccgggagcgaggggcagctcgggagagccggagcggtagcggcggcggcggcggcggcggcgaggctcggcgccctcttccctgcaaaccatgtttgccaaaggcaaaggctcggcggtgccctcggatgggcaggctcgggaaaagttagctttatacgtctacgaatatttactgcacgtaggagcacagaaatctgcacagaccttcttatcggagattcgatgggaaaaaaacatcacgttgggagaaccgcctgggtttttgcactcgtggtggtgtgtattttgggacctttactgtgcagctcctgaaaggagagacacttgtgaacattcaagtgaagcaaaagcctttcatgattatagtgcagcagctgccccgagccccgtgcttggcaacattccccccaacgatgggatgccgggaggccccatcccgccaggtttctttcagcctccgggaggagttcctgggacacagccattgctgcccaattctatggatcccacacgacaacaaggccaccccaacatgggaggatcaatgcagagaatgaaccctccccgaggcatggggcccatgggtcccggcccacagaattacggcagcggcatgagaccaccacccaactccctcggccccgccatgcccgggattaacatgggcccgggagctggcagaccctggcccaatcctaacagtgctaactcaattccatactcctcctcatcacctggtacctatgtgggaccccctggtggtggcggtcctccaggaacacccattatgcccagtcccgcagattcaacaaattccagtgacaacatctacacaatgattaatccagtgccgcctggaggcagccggtccaacttcccgatgggtcccggctcggacggtccgatgggcggcatgggtggcatggagccacaccacatgaatggatcattagggtcaggcgacatagacggacttccaaaaaattctcctaacaacataagtggcattagcaatcctccaggcacccctcgagatgacggcgagctaggagggaacttcctccactcctttcagaacgacaattattctccaagcatgacgatgagtgtgtgatccccccttctccgagacgctgagagagcaggcattgcaggcgggaagatgccagaaattatgcaagaagtgaggtgtcattatccaggagctggtggggagggcatctccctgctcccctcaaccccctcccaccccatccacgccccctacctttcccaattttagtttcatgcaataaaaaggccaaactttttattccataaaacaagaaggacaaaactctcaaaaatgtatttcaagtcagtgaccagaaaaatcccaccccttgccctttccccaaaggaccttttctgtacatgacacttttttgttgttttttgtttggggttttaccattgttgggatttttttatttgttttcaggggggttttttgggggaaaatttttttaaatggaagcttctagcaagccccccaccccaatcaacctctatgctttcttcttaaaaaaaaaaaaaaaggaaaaaggaaaaaaaaaaaaggaaaaccagaagccctgctgtctgtctgtgcccaagcccttccaccagaaaagctagtctaggtgtgagagcccacattgtctgtagccatcaaaaataataataataaactggacagtttacaatcgttggtttctttcaaaaggccttttttggaaagaagaaaaggcagtcaccgttttccacttggggttttggtttgtgcaacaggcaggggaggagtggggacgcgtttgttctagcttgatttccatggcaacagcagcggcacgcttggaccccagaacccagcaccctcatcctgtggccagaggggccggaccactgacccctttcaggattccaccacagcccagaccgtcaccgtgacccggtggcatgcactgttcccaggacaccctcctcctctcctggacctcccttccgtcctggcctccctgcctctccagcccctcctctgcccccaccccagtcttcccagtgagaatcctgccagctgggtggtggcctggcgcagagtgggagaggctgccactgacaggatggctatgacctgggacatggaaacagtgacctccgcgttctggtcccgagatcctcgcatcagcgtcatcgtgtgcaccggcttggggggctggagttccggttttctttgttttttctctttattcgtcctttctcaaagatgggatactgatcagaattgctctgtatatgcttgggactggatggaaagactttggagcagctgtggggggtggggggacaccgacaaccaaacagacgtgctggctccagtcctgtttttactttcaaaaaccaacaagcccgacagtggagcctgtcccctcccgggagggtgctcatggccccactcacctcatcaccccacggaaacctttgtgtcttgccctggaagacacccgaattctttgtacattgacatgcccttctccttcctccctcccctgtagctggtctttgttttactccctccctttctgatccatgtatatcatattatgtgagatatcatctgcctgaaaaaagactttgtgcggattattgggaacattgtagctgtttctgtgttttttcttaccttgtagtctggttctgaattaagagaggaaaaaaaagtaattatgatacattgtagtttgtgtacgatatatgttgataacgttttattaaagggacatcttttttccgca

SEQ ID NO: 385406 - DNA, 2084 bp, Homo sapiens
tccagtgccatgagtttgttttaattaagaaacgaattaatcaccccgacttgtgggtttccactgttctacagattcaacaaattccagtgacaacatctacacaatgattaatccagtgccgcctggaggcagccggtccaacttcccgatgggtcccggctcggacggtccgatgggcggcatgggtggcatggagccacaccacatgaatggatcattagggtcaggcgacatagacggacttccaaaaaattctcctaacaacataagtggcattagcaatcctccaggcacccctcgagatgacggcgagctaggagggaacttcctccactcctttcagaacgacaattattctccaagcatgacgatgagtgtgtgatccccccttctccgagacgctgagagagcaggcattgcaggcgggaagatgccagaaattatgcaagaagtgaggtgtcattatccaggagctggtggggagggcatctccctgctcccctcaaccccctcccaccccatccacgccccctacctttcccaattttagtttcatgcaataaaaaggccaaactttttattccataaaacaagaaggacaaaactctcaaaaatgtatttcaagtcagtgaccagaaaaatcccaccccttgccctttccccaaaggaccttttctgtacatgacacttttttgttgttttttgtttggggttttaccattgttgggatttttttatttgttttcaggggggttttttgggggaaaatttttttaaatggaagcttctagcaagccccccaccccaatcaacctctatgctttcttcttaaaaaaaaaaaaaaaggaaaaaggaaaaaaaaaaaaggaaaaccagaagccctgctgtctgtctgtgcccaagcccttccaccagaaaagctagtctaggtgtgagagcccacattgtctgtagccatcaaaaataataataataaactggacagtttacaatcgttggtttctttcaaaaggccttttttggaaagaagaaaaggcagtcaccgttttccacttggggttttggtttgtgcaacaggcaggggaggagtggggacgcgtttgttctagcttgatttccatggcaacagcagcggcacgcttggaccccagaacccagcaccctcatcctgtggccagaggggccggaccactgacccctttcaggattccaccacagcccagaccgtcaccgtgacccggtggcatgcactgttcccaggacaccctcctcctctcctggacctcccttccgtcctggcctccctgcctctccagcccctcctctgcccccaccccagtcttcccagtgagaatcctgccagctgggtggtggcctggcgcagagtgggagaggctgccactgacaggatggctatgacctgggacatggaaacagtgacctccgcgttctggtcccgagatcctcgcatcagcgtcatcgtgtgcaccggcttggggggctggagttccggttttctttgttttttctctttattcgtcctttctcaaagatgggatactgatcagaattgctctgtatatgcttgggactggatggaaagactttggagcagctgtggggggtggggggacaccgacaaccaaacagacgtgctggctccagtcctgtttttactttcaaaaaccaacaagcccgacagtggagcctgtcccctcccgggagggtgctcatggccccactcacctcatcaccccacggaaacctttgtgtcttgccctggaagacacccgaattctttgtacattgacatgcccttctccttcctccctcccctgtagctggtctttgttttactccctccctttctgatccatgtatatcatattatgtgagatatcatctgcctgaaaaaagactttgtgcggattattgggaacattgtagctgtttctgtgttttttcttaccttgtagtctggttctgaattaagagaggaaaaaaaagtaattatgatacattgtagtttgtgtacgatatatgttgataacgttttattaaagggacatcttttttccgca

SEQ ID NO: 385407 - DNA, 3228 bp, Homo sapiens
ggcggcggcggcagcggtgctggaggcgcagagggcggcgcaggcggagccgggcgggcgcgcgagagcggagagcgggcggccgtgcgggcggcggcggcggcacccccaggccgagccggcgcggaaggagttccagggcgatggggccgcggccggggctgacgctttgacagctggaaagagcgcggaccagcgcctgggggggagggaggggagcgcggcgaggagagcgccagcgagcgagagagcgagcgagcgccggggagggggccgggagcgaggggcagctcgggagagccggagcggtagcggcggcggcggcggcggcggcgaggctcggcgccctcttccctgcaaaccatgtttgccaaaggcaaaggctcggcggtgccctcggatgggcaggctcgggaaaagttagctttatacgtctacgaatatttactgcacgtaggagcacagaaatctgcacagaccttcttatcggagattcgatgggaaaaaaacatcacgttgggagaaccgcctgggtttttgcactcgtggtggtgtgtattttgggacctttactgtgcagctcctgaaaggagagacacttgtgaacattcaagtgaagcaaaagcctttcatgattatagtgcagcagctgccccgagccccgtgcttggcaacattccccccaacgatgggatgccgggaggccccatcccgccaggtttctttcagggtcctccggggtcacagccctcgccgcacgcacagcctccacctcacaatcctagcagcatgatgggaccccacagtcagccttttatgtcaccgcgatacgcaggcggccccaggcccccgatcagaatgggaaaccagcctccgggaggagttcctgggacacagccattgctgcccaattctatggatcccacacgacaacaaggccaccccaacatgggaggatcaatgcagagaatgaaccctccccgaggcatggggcccatgggtcccggcccacagaattacggcagcggcatgagaccaccacccaactccctcggccccgccatgcccgggattaacatgggcccgggagctggcagaccctggcccaatcctaacagtgctaactcaattccatactcctcctcatcacctggtacctatgtgggaccccctggtggtggcggtcctccaggaacacccattatgcccagtcccgcagattcaacaaattccagtgacaacatctacacaatgattaatccagtgccgcctggaggcagccggtccaacttcccgatgggtcccggctcggacggtccgatgggcggcatgggtggcatggagccacaccacatgaatggatcattagggtcaggcgacatagacggacttccaaaaaattctcctaacaacataagtggcattagcaatcctccaggcacccctcgagatgacggcgagctaggagggaacttcctccactcctttcagaacgacaattattctccaagcatgacgatgagtgtgtgatccccccttctccgagacgctgagagagcaggcattgcaggcgggaagatgccagaaattatgcaagaagtgaggtgtcattatccaggagctggtggggagggcatctccctgctcccctcaaccccctcccaccccatccacgccccctacctttcccaattttagtttcatgcaataaaaaggccaaactttttattccataaaacaagaaggacaaaactctcaaaaatgtatttcaagtcagtgaccagaaaaatcccaccccttgccctttccccaaaggaccttttctgtacatgacacttttttgttgttttttgtttggggttttaccattgttgggatttttttatttgttttcaggggggttttttgggggaaaatttttttaaatggaagcttctagcaagccccccaccccaatcaacctctatgctttcttcttaaaaaaaaaaaaaaaggaaaaaggaaaaaaaaaaaaggaaaaccagaagccctgctgtctgtctgtgcccaagcccttccaccagaaaagctagtctaggtgtgagagcccacattgtctgtagccatcaaaaataataataataaactggacagtttacaatcgttggtttctttcaaaaggccttttttggaaagaagaaaaggcagtcaccgttttccacttggggttttggtttgtgcaacaggcaggggaggagtggggacgcgtttgttctagcttgatttccatggcaacagcagcggcacgcttggaccccagaacccagcaccctcatcctgtggccagaggggccggaccactgacccctttcaggattccaccacagcccagaccgtcaccgtgacccggtggcatgcactgttcccaggacaccctcctcctctcctggacctcccttccgtcctggcctccctgcctctccagcccctcctctgcccccaccccagtcttcccagtgagaatcctgccagctgggtggtggcctggcgcagagtgggagaggctgccactgacaggatggctatgacctgggacatggaaacagtgacctccgcgttctggtcccgagatcctcgcatcagcgtcatcgtgtgcaccggcttggggggctggagttccggttttctttgttttttctctttattcgtcctttctcaaagatgggatactgatcagaattgctctgtatatgcttgggactggatggaaagactttggagcagctgtggggggtggggggacaccgacaaccaaacagacgtgctggctccagtcctgtttttactttcaaaaaccaacaagcccgacagtggagcctgtcccctcccgggagggtgctcatggccccactcacctcatcaccccacggaaacctttgtgtcttgccctggaagacacccgaattctttgtacattgacatgcccttctccttcctccctcccctgtagctggtctttgttttactccctccctttctgatccatgtatatcatattatgtgagatatcatctgcctgaaaaaagactttgtgcggattattgggaacattgtagctgtttctgtgttttttcttaccttgtagtctggttctgaattaagagaggaaaaaaaagtaattatgatacaccgaggggtgtgtaccaatacatgatcgcttggtgacctcacgggttttcacctcctagg

SEQ ID NO: 385408 - DNA, 3144 bp, Homo sapiens
ggcggcggcggcagcggtgctggaggcgcagagggcggcgcaggcggagccgggcgggcgcgcgagagcggagagcgggcggccgtgcgggcggcggcggcggcacccccaggccgagccggcgcggaaggagttccagggcgatggggccgcggccggggctgacgctttgacagctggaaagagcgcggaccagcgcctgggggggagggaggggagcgcggcgaggagagcgccagcgagcgagagagcgagcgagcgccggggagggggccgggagcgaggggcagctcgggagagccggagcggtagcggcggcggcggcggcggcggcgaggctcggcgccctcttccctgcaaaccatgtttgccaaaggcaaaggctcggcggtgccctcggatgggcaggctcgggaaaagttagctttatacgtctacgaatatttactgcacgtaggagcacagaaatctgcacagaccttcttatcggagattcgatgggaaaaaaacatcacgttgggagaaccgcctgggtttttgcactcgtggtggtgtgtattttgggacctttactgtgcagctcctgaaaggagagacacttgtgaacattcaagtgaagcaaaagcctttcatgattatagtgcagcagctgccccgagccccgtgcttggcaacattccccccaacgatgggatgccgggaggccccatcccgccaggtttctttcagggtcctccggggtcacagccctcgccgcacgcacagcctccacctcacaatcctagcagcatgatgggaccccacagtcagccttttatgtcaccgcgatacgcaggcggccccaggcccccgatcagaatgggaaaccagcctccgggaggagttcctgggacacagccattgctgcccaattctatggatcccacacgacaacaaggccaccccaacatgggaggatcaatgcagagaatgaaccctccccgaggcatggggcccatgggtcccggcccacagaattacggcagcggcatgagaccaccacccaactccctcggccccgccatgcccgggattaacatgggcccgggagctggcagaccctggcccaatcctaacagtgctaactcaattccatactcctcctcatcacctggtacctatgtgggaccccctggtggtggcggtcctccaggaacacccattatgcccagtcccgcagattcaacaaattccagtgacaacatctacacaatgattaatccagtgccgcctggaggcagccggtccaacttcccgatgggtcccggctcggacggtccgatgggcggcatgggtggcatggagccacaccacatgaatggatcattagggtcaggcgacatagacggacttccaaaaaattctcctaacaacataagtggcattagcaatcctccaggcacccctcgagatgacggcgagctaggagggaacttcctccactcctttcagaacgacaattattctccaagcatgacgatgagtgtgtgatccccccttctccgagacgctgagagagcaggcattgcaggcgggaagatgccagaaattatgcaagaagtgaggtgtcattatccaggagctggtggggagggcatctccctgctcccctcaaccccctcccaccccatccacgccccctacctttcccaattttagtttcatgcaataaaaaggccaaactttttattccataaaacaagaaggacaaaactctcaaaaatgtatttcaagtcagtgaccagaaaaatcccaccccttgccctttccccaaaggaccttttctgtacatgacacttttttgttgttttttgtttggggttttaccattgttgggatttttttatttgttttcaggggggttttttgggggaaaatttttttaaatggaagcttctagcaagccccccaccccaatcaacctctatgctttcttcttaaaaaaaaaaaaaaaggaaaaaggaaaaaaaaaaaaggaaaaccagaagccctgctgtctgtctgtgcccaagcccttccaccagaaaagctagtctaggtgtgagagcccacattgtctgtagccatcaaaaataataataataaactggacagtttacaatcgttggtttctttcaaaaggccttttttggaaagaagaaaaggcagtcaccgttttccacttggggttttggtttgtgcaacaggcaggggaggagtggggacgcgtttgttctagcttgatttccatggcaacagcagcggcacgcttggaccccagaacccagcaccctcatcctgtggccagaggggccggaccactgacccctttcaggattccaccacagcccagaccgtcaccgtgacccggtggcatgcactgttcccaggacaccctcctcctctcctggacctcccttccgtcctggcctccctgcctctccagcccctcctctgcccccaccccagtcttcccagtgagaatcctgccagctgggtggtggcctggcgcagagtgggagaggctgccactgacaggatggctatgacctgggacatggaaacagtgacctccgcgttctggtcccgagatcctcgcatcagcgtcatcgtgtgcaccggcttggggggctggagttccggttttctttgttttttctctttattcgtcctttctcaaagatgggatactgatcagaattgctctgtatatgcttgggactggatggaaagactttggagcagctgtggggggtggggggacaccgacaaccaaacagacgtgctggctccagtcctgtttttactttcaaaaaccaacaagcccgacagtggagcctgtcccctcccgggagggtgctcatggccccactcacctcatcaccccacggaaacctttgtgtcttgccctggaagacacccgaattctttgtacattgacatgcccttctccttcctccctcccctgtagctggtctttgttttactccctccctttctgatccatgtatatcatattatgtgagatatcatctgcctgaaaaaagactgggtgtttttaggtcaggacattgtgaacgaatgtggaacagtcgtgagtcgatgtgaagtttacaatagcatagt

SEQ ID NO: 385409 - DNA, 2878 bp, Homo sapiens
ggcggcggcggcagcggtgctggaggcgcagagggcggcgcaggcggagccgggcgggcgcgcgagagcggagagcgggcggccgtgcgggcggcggcggcggcacccccaggccgagccggcgcggaaggagttccagggcgatggggccgcggccggggctgacgctttgacagctggaaagagcgcggaccagcgcctgggggggagggaggggagcgcggcgaggagagcgccagcgagcgagagagcgagcgagcgccggggagggggccgggagcgaggggcagctcgggagagccggagcggtagcggcggcggcggcggcggcggcgaggctcggcgccctcttccctgcaaaccatgtttgccaaaggcaaaggctcggcggtgccctcggatgggcaggctcgggaaaagttagctttatacgtctacgaatatttactgcacgtaggagcacagaaatctgcacagaccttcttatcggagattcgatgggaaaaaaacatcacgttgggagaaccgcctgggtttttgcactcgtggtggtgtgtattttgggacctttactgtgcagctcctgaaaggagagacacttgtgaacattcaagtgaagcaaaagcctttcatgattatagtgcagcagctgccccgagccccgtgcttggcaacattccccccaacgatgggatgccgggaggccccatcccgccaggtttctttcagggtcctccggggtcacagccctcgccgcacgcacagcctccacctcacaatcctagcagcatgatgggaccccacagtcagccttttatgtcaccgcgatacgcaggcggccccaggcccccgatcagaatgggaaaccagcctccgggaggagttcctgggacacagccattgctgcccaattctatggatcccacacgacaacaaggccaccccaacatgggaggatcaatgcagagaatgaaccctccccgaggcatggggcccatgggtcccggcccacagaattacggcagcggcatgagaccaccacccaactccctcggccccgccatgcccgggattaacatgggcccgggagctggcagaccctggcccaatcctaacagtgctaactcaattccatactcctcctcatcacctggtacctatgtgggaccccctggtggtggcggtcctccaggaacacccattatgcccagtcccgcagattcaacaaattccagtgacaacatctacacaatgattaatccagtgccgcctggaggcagccggtccaacttcccgatgggtcccggctcggacggtccgatgggcggcatgggtggcatggagccacaccacatgaatggatcattagggtcaggcgacatagacggacttccaaaaaattctcctaacaacataagtggcattagcaatcctccaggcacccctcgagatgacggcgagctaggagggaacttcctccactcctttcagaacgacaattattctccaagcatgacgatgagtgtgtgatccccccttctccgagacgctgagagagcaggcattgcaggcgggaagatgccagaaattatgcaagaagtgaggtgtcattatccaggagctggtggggagggcatctccctgctcccctcaaccccctcccaccccatccacgccccctacctttcccaattttagtttcatgcaataaaaaggccaaactttttattccataaaacaagaaggacaaaactctcaaaaatgtatttcaagtcagtgaccagaaaaatcccaccccttgccctttccccaaaggaccttttctgtacatgacacttttttgttgttttttgtttggggttttaccattgttgggatttttttatttgttttcaggggggttttttgggggaaaatttttttaaatggaagcttctagcaagccccccaccccaatcaacctctatgctttcttcttaaaaaaaaaaaaaaaggaaaaaggaaaaaaaaaaaaggaaaaccagaagccctgctgtctgtctgtgcccaagcccttccaccagaaaagctagtctaggtgtgagagcccacattgtctgtagccatcaaaaataataataataaactggacagtttacaatcgttggtttctttcaaaaggccttttttggaaagaagaaaaggcagtcaccgttttccacttggggttttggtttgtgcaacaggcaggggaggagtggggacgcgtttgttctagcttgatttccatggcaacagcagcggcacgcttggaccccagaacccagcaccctcatcctgtggccagaggggccggaccactgacccctttcaggattccaccacagcccagaccgtcaccgtgacccggtggcatgcactgttcccaggacaccctcctcctctcctggacctcccttccgtcctggcctccctgcctctccagcccctcctctgcccccaccccagtcttcccagtgagaatcctgccagctgggtggtggcctggcgcagagtgggagaggctgccactgacaggatggctatgacctgggacatggaaacagtgacctccgcgttctggtcccgagatcctcgcatcagcgtcatcgtgtgcaccggcttggggggctggagttccggttttctttgttttttctctttattcgtcctttctcaaagatgggatactgatcagaattgctctgtatatgcttgggactggatggaaagactttggagcagctgtggggggtggggggacaccgacaaccaaacagacgtgctggctccagtcctgtttttactttcaaaaaccaacaagccccccaccccaatcaacctctatgctttcttctta

SEQ ID NO: 385410 - DNA, 2717 bp, Homo sapiens
ggcggcggcggcagcggtgctggaggcgcagagggcggcgcaggcggagccgggcgggcgcgcgagagcggagagcgggcggccgtgcgggcggcggcggcggcacccccaggccgagccggcgcggaaggagttccagggcgatggggccgcggccggggctgacgctttgacagctggaaagagcgcggaccagcgcctgggggggagggaggggagcgcggcgaggagagcgccagcgagcgagagagcgagcgagcgccggggagggggccgggagcgaggggcagctcgggagagccggagcggtagcggcggcggcggcggcggcggcgaggctcggcgccctcttccctgcaaaccatgtttgccaaaggcaaaggctcggcggtgccctcggatgggcaggctcgggaaaagttagctttatacgtctacgaatatttactgcacgtaggagcacagaaatctgcacagaccttcttatcggagattcgatgggaaaaaaacatcacgttgggagaaccgcctgggtttttgcactcgtggtggtgtgtattttgggacctttactgtgcagctcctgaaaggagagacacttgtgaacattcaagtgaagcaaaagcctttcatgattatagtgcagcagctgccccgagccccgtgcttggcaacattccccccaacgatgggatgccgggaggccccatcccgccaggtttctttcagggtcctccggggtcacagccctcgccgcacgcacagcctccacctcacaatcctagcagcatgatgggaccccacagtcagccttttatgtcaccgcgatacgcaggcggccccaggcccccgatcagaatgggaaaccagcctccgggaggagttcctgggacacagccattgctgcccaattctatggatcccacacgacaacaaggccaccccaacatgggaggatcaatgcagagaatgaaccctccccgaggcatggggcccatgggtcccggcccacagaattacggcagcggcatgagaccaccacccaactccctcggccccgccatgcccgggattaacatgggcccgggagctggcagaccctggcccaatcctaacagtgctaactcaattccatactcctcctcatcacctggtacctatgtgggaccccctggtggtggcggtcctccaggaacacccattatgcccagtcccgcagattcaacaaattccagtgacaacatctacacaatgattaatccagtgccgcctggaggcagccggtccaacttcccgatgggtcccggctcggacggtccgatgggcggcatgggtggcatggagccacaccacatgaatggatcattagggtcaggcgacatagacggacttccaaaaaattctcctaacaacataagtggcattagcaatcctccaggcacccctcgagatgacggcgagctaggagggaacttcctccactcctttcagaacgacaattattctccaagcatgacgatgagtgtgtgatccccccttctccgagacgctgagagagcaggcattgcaggcgggaagatgccagaaattatgcaagaagtgaggtgtcattatccaggagctggtggggagggcatctccctgctcccctcaaccccctcccaccccatccacgccccctacctttcccaattttagtttcatgcaataaaaaggccaaactttttattccataaaacaagaaggacaaaactctcaaaaatgtatttcaagtcagtgaccagaaaaatcccaccccttgccctttccccaaaggaccttttctgtacatgacacttttttgttgttttttgtttggggttttaccattgttgggatttttttatttgttttcaggggggttttttgggggaaaatttttttaaatggaagcttctagcaagccccccaccccaatcaacctctatgctttcttcttaaaaaaaaaaaaaaaggaaaaaggaaaaaaaaaaaaggaaaaccagaagccctgctgtctgtctgtgcccaagcccttccaccagaaaagctagtctaggtgtgagagcccacattgtctgtagccatcaaaaataataataataaactggacagtttacaatcgttggtttctttcaaaaggccttttttggaaagaagaaaaggcagtcaccgttttccacttggggttttggtttgtgcaacaggcaggggaggagtggggacgcgtttgttctagcttgatttccatggcaacagcagcggcacgcttggaccccagaacccagcaccctcatcctgtggccagaggggccggaccactgacccctttcaggattccaccacagcccagaccgtcaccgtgacccggtggcatgcactgttcccaggacaccctcctcctctcctggacctcccttccgtcctggcctccctgcctctccagcccctcctctgcccccaccccagtcttcccagtgagaatcctgccagctgggtggtggcctggcgcagagtgggagattctacaaaagagaaaacagcgtacaacgtgggagaatggagacagcgagctatccgcgttttggtactcgagtatcctagtatatggcgtcaggagtgtacaccggcttgggacaatggaaaccggaactcctgcccccctagccgggcactacaatgacgctgatgcgatatct

SEQ ID NO: 385411 - DNA, 1701 bp, Homo sapiens
ggcggcggcggcagcggtgctggaggcgcagagggcggcgcaggcggagccgggcgggcgcgcgagagcggagagcgggcggccgtgcgggcggcggcggcggcacccccaggccgagccggcgcggaaggagttccagggcgatggggccgcggccggggctgacgctttgacagctggaaagagcgcggaccagcgcctgggggggagggaggggagcgcggcgaggagagcgccagcgagcgagagagcgagcgagcgccggggagggggccgggagcgaggggcagctcgggagagccggagcggtagcggcggcggcggcggcggcggcgaggctcggcgccctcttccctgcaaaccatgtttgccaaaggcaaaggctcggcggtgccctcggatgggcaggctcgggaaaagttagctttatacgtctacgaatatttactgcacgtaggagcacagaaatctgcacagaccttcttatcggagattcgatgggaaaaaaacatcacgttgggagaaccgcctgggtttttgcactcgtggtggtgtgtattttgggacctttactgtgcagctcctgaaaggagagacacttgtgaacattcaagtgaagcaaaagcctttcatgattatagtgcagcagctgccccgagccccgtgcttggcaacattccccccaacgatgggatgccgggaggccccatcccgccaggtttctttcagggtcctccggggtcacagccctcgccgcacgcacagcctccacctcacaatcctagcagcatgatgggaccccacagtcagccttttatgtcaccgcgatacgcaggcggccccaggcccccgatcagaatgggaaaccagcctccgggaggagttcctgggacacagccattgctgcccaattctatggatcccacacgacaacaaggccaccccaacatgggaggatcaatgcagagaatgaaccctccccgaggcatggggcccatgggtcccggcccacagaattacggcagcggcatgagaccaccacccaactccctcggccccgccatgcccgggattaacatgggcccgggagctggcagaccctggcccaatcctaacagtgctaactcaattccatactcctcctcatcacctggtacctatgtgggaccccctggtggtggcggtcctccaggaacacccattatgcccagtcccgcagattcaacaaattccagtgacaacatctacacaatgattaatccagtgccgcctggaggcagccggtccaacttcccgatgggtcccggctcggacggtccgatgggcggcatgggtggcatggagccacaccacatgaatggatcattagggtcaggcgacatagacggacttccaaaaaattctcctaacaacataagtggcattagcaatcctccaggcacccctcgagatgacggcgagctaggagggaacttcctccactcctttcagaacgacaattattctccaagcatgacgatgagtgtgtgatccccccttctccgagacgctgagagagcaggcattgcaggcgggaagatgccagaaattatgcaagaagtgaggtgtcattatccaggagctggtggggagggcatctccctgctcccctcaatcatccacaaacacccccaaactccgactcgagcgggatcgctctag

SEQ ID NO: 385412 - DNA, 1514 bp, Homo sapiens
ggcggcggcggcagcggtgctggaggcgcagagggcggcgcaggcggagccgggcgggcgcgcgagagcggagagcgggcggccgtgcgggcggcggcggcggcacccccaggccgagccggcgcggaaggagttccagggcgatggggccgcggccggggctgacgctttgacagctggaaagagcgcggaccagcgcctgggggggagggaggggagcgcggcgaggagagcgccagcgagcgagagagcgagcgagcgccggggagggggccgggagcgaggggcagctcgggagagccggagcggtagcggcggcggcggcggcggcggcgaggctcggcgccctcttccctgcaaaccatgtttgccaaaggcaaaggctcggcggtgccctcggatgggcaggctcgggaaaagttagctttatacgtctacgaatatttactgcacgtaggagcacagaaatctgcacagaccttcttatcggagattcgatgggaaaaaaacatcacgttgggagaaccgcctgggtttttgcactcgtggtggtgtgtattttgggacctttactgtgcagctcctgaaaggagagacacttgtgaacattcaagtgaagcaaaagcctttcatgattatagtgcagcagctgccccgagccccgtgcttggcaacattccccccaacgatgggatgccgggaggccccatcccgccaggtttctttcagccttttatgtcaccgcgatacgcaggcggccccaggcccccgatcagaatgggaaaccagcctccgggaggagttcctgggacacagccattgctgcccaattctatggatcccacacgacaacaaggccaccccaacatgggaggatcaatgcagagaatgaaccctccccgaggcatggggcccatgggtcccggcccacagaattacggcagcggcatgagaccaccacccaactccctcggccccgccatgcccgggattaacatgggcccgggagctggcagaccctggcccaatcctaacagtgctaactcaattccatactcctcctcatcacctggtacctatgtgggaccccctggtggtggcggtcctccaggaacacccattatgcccagtcccgcagattcaacaaattccagtgacaacatctacacaatgattaatccagtgccgcctggaggcagccggtccaacttcccgatgggtcccggctcggacggtccgatgggcggcatgggtggcatggagccacaccacatgaatggatcattagggtcaggcgacatagacggacttccaaaaaattctcctaacaacataagtggcattagcaatcctccaggcacccctcgagatgacggcgagctaggagggaacttcctccatcttcagaagacgattatctccagctgaagatgagtgtgtgatcccccctctcgagaagctgagaagcggcttgggcggaaagccaatttgcaaggagggctcggacggggggc

SEQ ID NO: 385413 - DNA, 489 bp, Homo sapiens
ttactcgatagcctgacagcataacaacatcattactacaaataagccatgcacatgaacttattgctcaagtccacatgttcactttcaaaaaccaacaagcccgacagtggagcctgtcccctcccgggagggtgctcatggccccactcacctcatcaccccacggaaacctttgtgtcttgccctggaagacacccgaattctttgtacattgacatgcccttctccttcctccctcccctgtagctggtctttgttttactccctccctttctgatccatgtatatcatattatgtgagatatcatctgcctgaaaaaagactttgtgcggattattgggaacattgtagctgtttctgtgttttttcttaccttgtagtctggttctgaattaagagaggaaaaaaaagtaattatgatacattgtagtttgtgtacgatatatgttgataacgttttattaaagggacatcttttttccgca

SEQ ID NO: 385414 - DNA, 892 bp, Homo sapiens
ggcggcggcggcagcggtgctggaggcgcagagggcggcgcaggcggagccgggcgggcgcgcgagagcggagagcgggcggccgtgcgggcggcggcggcggcacccccaggccgagccggcgcggaaggagttccagggcgatggggccgcggccggggctgacgctttgacagctggaaagagcgcggaccagcgcctgggggggagggaggggagcgcggcgaggagagcgccagcgagcgagagagcgagcgagcgccggggagggggccgggagcgaggggcagctcgggagagccggagcggtagcggcggcggcggcggcggcggcgaggctcggcgccctcttccctgcaaaccatgtttgccaaaggcaaaggctcggcggtgccctcggatgggcaggctcgggaaaagttagctttatacgtctacgaatatttactgcacgtaggagcacagaaatctgcacagaccttcttatcggagattcgatgggaaaaaaacatcacgttgggagaaccgcctgggtttttgcactcgtggtggtgtgtattttgggacctttactgtgcagctcctgaaaggagagacacttgtgaacattcaagtgaagcaaaagcctttcatgattatagtgcagcagctgccccgagccccgtgcttggcaacattccccccaacgatgggatgccgggaggccccatcccgccaggtttctttcagccttttatgtcaccgcgatacgcaggcggccccaggcccccgatcagaatgggaaaccagcctccgggaggagttcctgggacacagccattgctgcccaattctatggatcccacacgacaacaagccccccaccccaatcaacctctatgctttcttctta

SEQ ID NO: 385415 - DNA, 761 bp, Homo sapiens
ctttgtggagtggagagcatttgtgtttgtcactgtgcagtagggcaggctgtcattgaactaattacctataattgcagccttttatgtcaccgcgatacgcaggcggccccaggcccccgatcagaatgggaaaccagcctccgggaggagttcctgggacacagccattgctgcccaattctatggatcccacacgacaacaaggccaccccaacatgggaggatcaatgcagagaatgaaccctccccgaggcatggggcccatgggtcccggcccacagaattacggcagcggcatgagaccaccacccaactccctcggccccgccatgcccgggattaacatgggcccgggagctggcagaccctggcccaatcctaacagtgctaactcaattccatactcctcctcatcacctggtacctatgtgggaccccctggtggtggcggtcctccaggaacacccattatgcccagtcccgcagattcaacaaattccagtgacaacatctacacaatgattaatccagtgccgcctggaggcagccggtccaacgtaagtctgctttctaataatttacatatcagacaccataacaaatcataattaacttcatcagctgaggggaaagcaagtttaattgatttcagccatttgttaccaaagatgaataaaataaaccgtcagaaaagtgattaactcttgggcaactcagttcccatttcataggcggcagggggtgggagaggaaggggt

SEQ ID NO: 385416 - DNA, 1009 bp, Homo sapiens
ggcggcggcggcagcggtgctggaggcgcagagggcggcgcaggcggagccgggcgggcgcgcgagagcggagagcgggcggccgtgcgggcggcggcggcggcacccccaggccgagccggcgcggaaggagttccagggcgatggggccgcggccggggctgacgctttgacagctggaaagagcgcggaccagcgcctgggggggagggaggggagcgcggcgaggagagcgccagcgagcgagagagcgagcgagcgccggggagggggccgggagcgaggggcagctcgggagagccggagcggtagcggcggcggcggcggcggcggcgaggctcggcgccctcttccctgcaaaccatgtttgccaaaggcaaaggctcggcggtgccctcggatgggcaggctcgggaaaagttagctttatacgtctacgaatatttactgcacgtaggagcacagaaatctgcacagaccttcttatcggagattcgatgggaaaaaaacatcacgttgggagaaccgcctgggtttttgcactcgtggtggtgtgtattttgggacctttactgtgcagctcctgaaaggagagacacttgtgaacattcaagtgaagcaaaagcctttcatgattatagtgcagcagctgccccgagccccgtgcttggcaacattccccccaacgatgggatgccgggaggccccatcccgccaggtttctttcagggtcctccggggtcacagccctcgccgcacgcacagcctccacctcacaatcctagcagcatgatgggaccccacagtcagcctccgggaggagttcctgggacacagccattgctgcccaattctatggatcccacacgacaacaaggccaccccaacatgggaggatcaatgcagagaatgaaccctccccgaggcatggggcccatgggtcccggcccacagaattacggcagcggatgagacacaccaatcctcggccgcatgccggatacattgg

SEQ ID NO: 385417 - DNA, 2839 bp, Homo sapiens
ggggtgatggcgaggcaggctcgggaaaagttagctttatacgtctacgaatatttactgcacgtaggagcacagaaatctgcacagaccttcttatcggagattcgatgggaaaaaaacatcacgttgggagaaccgcctgggtttttgcactcgtggtggtgtgtattttgggacctttactgtgcagctcctgaaaggagagacacttgtgaacattcaagtgaagcaaaagcctttcatgattatagtgcagcagctgccccgagccccgtgcttggcaacattccccccaacgatgggatgccgggaggccccatcccgccaggtttctttcagggtcctccggggtcacagccctcgccgcacgcacagcctccacctcacaatcctagcagcatgatgggaccccacagtcagccttttatgtcaccgcgatacgcaggcggccccaggcccccgatcagaatgggaaaccagcctccgggaggagttcctgggacacagccattgctgcccaattctatggatcccacacgacaacaaggccaccccaacatgggaggatcaatgcagagaatgaaccctccccgaggcatggggcccatgggtcccggcccacagaattacggcagcggcatgagaccaccacccaactccctcggccccgccatgcccgggattaacatgggcccgggagctggcagaccctggcccaatcctaacagtgctaactcaattccatactcctcctcatcacctggtacctatgtgggaccccctggtggtggcggtcctccaggaacacccattatgcccagtcccgcagattcaacaaattccagtgacaacatctacacaatgattaatccagtgccgcctggaggcagccggtccaacttcccgatgggtcccggctcggacggtccgatgggcggcatgggtggcatggagccacaccacatgaatggatcattagggtcaggcgacatagacggacttccaaaaaattctcctaacaacataagtggcattagcaatcctccaggcacccctcgagatgacggcgagctaggagggaacttcctccactcctttcagaacgacaattattctccaagcatgacgatgagtgtgtgatccccccttctccgagacgctgagagagcaggcattgcaggcgggaagatgccagaaattatgcaagaagtgaggtgtcattatccaggagctggtggggagggcatctccctgctcccctcaaccccctcccaccccatccacgccccctacctttcccaattttagtttcatgcaataaaaaggccaaactttttattccataaaacaagaaggacaaaactctcaaaaatgtatttcaagtcagtgaccagaaaaatcccaccccttgccctttccccaaaggaccttttctgtacatgacacttttttgttgttttttgtttggggttttaccattgttgggatttttttatttgttttcaggggggttttttgggggaaaatttttttaaatggaagcttctagcaagccccccaccccaatcaacctctatgctttcttcttaaaaaaaaaaaaaaaggaaaaaggaaaaaaaaaaaaggaaaaccagaagccctgctgtctgtctgtgcccaagcccttccaccagaaaagctagtctaggtgtgagagcccacattgtctgtagccatcaaaaataataataataaactggacagtttacaatcgttggtttctttcaaaaggccttttttggaaagaagaaaaggcagtcaccgttttccacttggggttttggtttgtgcaacaggcaggggaggagtggggacgcgtttgttctagcttgatttccatggcaacagcagcggcacgcttggaccccagaacccagcaccctcatcctgtggccagaggggccggaccactgacccctttcaggattccaccacagcccagaccgtcaccgtgacccggtggcatgcactgttcccaggacaccctcctcctctcctggacctcccttccgtcctggcctccctgcctctccagcccctcctctgcccccaccccagtcttcccagtgagaatcctgccagctgggtggtggcctggcgcagagtgggagaggctgccactgacaggatggctatgacctgggacatggaaacagtgacctccgcgttctggtcccgagatcctcgcatcagcgtcatcgtgtgcaccggcttggggggctggagttccggttttctttgttttttctctttattcgtcctttctcaaagatgggatactgatcagaattgctctgtatatgcttgggactggatggaaagactttggagcagctgtggggggtggggggacaccgacaaccaaacagacgtgctggctccagtcctgtttttactttcaaaaaccaacaagcccgacagtggagcctgtcccctcccgggagggtgctcatggccccactcacctcatcaccccacggaaacctttgtgtcttgccctggaagacacccgaattctttgtacattgacatgcccttctccttcctccctcccctgtagctggtctttgttttactccctccctttctgatccatgtatatcatattatgtgagatatcatctgcctgaaaaaagactttgtgcggattattgggaacattgtagctgtttctgtgttttttcttaccttgtagtctggttctgaattaagagaggaaaaaaaagtaattatgatacattgtagtttgtgtacgatatatgttgataacgttttattaaagggacatcttttttccgca

SEQ ID NO: 385418 - DNA, 2840 bp, Homo sapiens
aagaacatgacagacatcctctgcccttcagcctgtgccccagaatgagagacccatgggacagactcaagctgtaccctgaagcagagctgcccagttgactgcagacctgttagctttatacgtctacgaatatttactgcacgtaggagcacagaaatctgcacagaccttcttatcggagattcgatgggaaaaaaacatcacgttgggagaaccgcctgggtttttgcactcgtggtggtgtgtattttgggacctttactgtgcagctcctgaaaggagagacacttgtgaacattcaagtgaagcaaaagcctttcatgattatagtgcagcagctgccccgagccccgtgcttggcaacattccccccaacgatgggatgccgggaggccccatcccgccaggtttctttcagccttttatgtcaccgcgatacgcaggcggccccaggcccccgatcagaatgggaaaccagcctccgggaggagttcctgggacacagccattgctgcccaattctatggatcccacacgacaacaaggccaccccaacatgggaggatcaatgcagagaatgaaccctccccgaggcatggggcccatgggtcccggcccacagaattacggcagcggcatgagaccaccacccaactccctcggccccgccatgcccgggattaacatgggcccgggagctggcagaccctggcccaatcctaacagtgctaactcaattccatactcctcctcatcacctggtacctatgtgggaccccctggtggtggcggtcctccaggaacacccattatgcccagtcccgcagattcaacaaattccagtgacaacatctacacaatgattaatccagtgccgcctggaggcagccggtccaacttcccgatgggtcccggctcggacggtccgatgggcggcatgggtggcatggagccacaccacatgaatggatcattagggtcaggcgacatagacggacttccaaaaaattctcctaacaacataagtggcattagcaatcctccaggcacccctcgagatgacggcgagctaggagggaacttcctccactcctttcagaacgacaattattctccaagcatgacgatgagtgtgtgatccccccttctccgagacgctgagagagcaggcattgcaggcgggaagatgccagaaattatgcaagaagtgaggtgtcattatccaggagctggtggggagggcatctccctgctcccctcaaccccctcccaccccatccacgccccctacctttcccaattttagtttcatgcaataaaaaggccaaactttttattccataaaacaagaaggacaaaactctcaaaaatgtatttcaagtcagtgaccagaaaaatcccaccccttgccctttccccaaaggaccttttctgtacatgacacttttttgttgttttttgtttggggttttaccattgttgggatttttttatttgttttcaggggggttttttgggggaaaatttttttaaatggaagcttctagcaagccccccaccccaatcaacctctatgctttcttcttaaaaaaaaaaaaaaaggaaaaaggaaaaaaaaaaaaggaaaaccagaagccctgctgtctgtctgtgcccaagcccttccaccagaaaagctagtctaggtgtgagagcccacattgtctgtagccatcaaaaataataataataaactggacagtttacaatcgttggtttctttcaaaaggccttttttggaaagaagaaaaggcagtcaccgttttccacttggggttttggtttgtgcaacaggcaggggaggagtggggacgcgtttgttctagcttgatttccatggcaacagcagcggcacgcttggaccccagaacccagcaccctcatcctgtggccagaggggccggaccactgacccctttcaggattccaccacagcccagaccgtcaccgtgacccggtggcatgcactgttcccaggacaccctcctcctctcctggacctcccttccgtcctggcctccctgcctctccagcccctcctctgcccccaccccagtcttcccagtgagaatcctgccagctgggtggtggcctggcgcagagtgggagaggctgccactgacaggatggctatgacctgggacatggaaacagtgacctccgcgttctggtcccgagatcctcgcatcagcgtcatcgtgtgcaccggcttggggggctggagttccggttttctttgttttttctctttattcgtcctttctcaaagatgggatactgatcagaattgctctgtatatgcttgggactggatggaaagactttggagcagctgtggggggtggggggacaccgacaaccaaacagacgtgctggctccagtcctgtttttactttcaaaaaccaacaagcccgacagtggagcctgtcccctcccgggagggtgctcatggccccactcacctcatcaccccacggaaacctttgtgtcttgccctggaagacacccgaattctttgtacattgacatgcccttctccttcctccctcccctgtagctggtctttgttttactccctccctttctgatccatgtatatcatattatgtgagatatcatctgcctgaaaaaagactttgtgcggattattgggaacattgtagctgtttctgtgttttttcttaccttgtagtctggttctgaattaagagaggaaaaaaaagtaattatgatacattgtagtttgtgtacgatatatgttgataacgttttattaaagggacatcttttttccgca

SEQ ID NO: 385419 - DNA, 3291 bp, Homo sapiens
ggcggcggcggcagcggtgctggaggcgcagagggcggcgcaggcggagccgggcgggcgcgcgagagcggagagcgggcggccgtgcgggcggcggcggcggcacccccaggccgagccggcgcggaaggagttccagggcgatggggccgcggccggggctgacgctttgacagctggaaagagcgcggaccagcgcctgggggggagggaggggagcgcggcgaggagagcgccagcgagcgagagagcgagcgagcgccggggagggggccgggagcgaggggcagctcgggagagccggagcggtagcggcggcggcggcggcggcggcgaggctcggcgccctcttccctgcaaaccatgtttgccaaaggcaaaggctcggcggtgccctcggatgggcaggctcgggaaaagttagctttatacgtctacgaatatttactgcacgtaggagcacagaaatctgcacagaccttcttatcggagattcgatgggaaaaaaacatcacgttgggagaaccgcctgggtttttgcactcgtggtggtgtgtattttgggacctttactgtgcagctcctgaaaggagagacacttgtgaacattcaagtgaagcaaaagcctttcatgattatagtgcagcagctgccccgagccccgtgcttggcaacattccccccaacgatgggatgccgggaggccccatcccgccaggtttctttcagggtcctccggggtcacagccctcgccgcacgcacagcctccacctcacaatcctagcagcatgatgggaccccacagtcagccttttatgtcaccgcgatacgcaggcggccccaggcccccgatcagaatgggaaaccagcctccgggaggagttcctgggacacagccattgctgcccaattctatggatcccacacgacaacaaggccaccccaacatgggaggatcaatgcagagaatgaaccctccccgaggcatggggcccatgggtcccggcccacagaattacggcagcggcatgagaccaccacccaactccctcggccccgccatgcccgggattaacatgggcccgggagctggcagaccctggcccaatcctaacagtgctaactcaattccatactcctcctcatcacctggtacctatgtgggaccccctggtggtggcggtcctccaggaacacccattatgcccagtcccgcagattcaacaaattccagtgacaacatctacacaatgattaatccagtgccgcctggaggcagccggtccaacttcccgatgggtcccggctcggacggtccgatgggcggcatgggtggcatggagccacaccacatgaatggatcattagggtcaggcgacatagacggacttccaaaaaattctcctaacaacataagtggcattagcaatcctccaggcacccctcgagatgacggcgagctaggagggaacttcctccactcctttcagaacgacaattattctccaagcatgacgatgagtgtgtgatccccccttctccgagacgctgagagagcaggcattgcaggcgggaagatgccagaaattatgcaagaagtgaggtgtcattatccaggagctggtggggagggcatctccctgctcccctcaaccccctcccaccccatccacgccccctacctttcccaattttagtttcatgcaataaaaaggccaaactttttattccataaaacaagaaggacaaaactctcaaaaatgtatttcaagtcagtgaccagaaaaatcccaccccttgccctttccccaaaggaccttttctgtacatgacacttttttgttgttttttgtttggggttttaccattgttgggatttttttatttgttttcaggggggttttttgggggaaaatttttttaaatggaagcttctagcaagccccccaccccaatcaacctctatgctttcttcttaaaaaaaaaaaaaaaggaaaaaggaaaaaaaaaaaaggaaaaccagaagccctgctgtctgtctgtgcccaagcccttccaccagaaaagctagtctaggtgtgagagcccacattgtctgtagccatcaaaaataataataataaactggacagtttacaatcgttggtttctttcaaaaggccttttttggaaagaagaaaaggcagtcaccgttttccacttggggttttggtttgtgcaacaggcaggggaggagtggggacgcgtttgttctagcttgatttccatggcaacagcagcggcacgcttggaccccagaacccagcaccctcatcctgtggccagaggggccggaccactgacccctttcaggattccaccacagcccagaccgtcaccgtgacccggtggcatgcactgttcccaggacaccctcctcctctcctggacctcccttccgtcctggcctccctgcctctccagcccctcctctgcccccaccccagtcttcccagtgagaatcctgccagctgggtggtggcctggcgcagagtgggagaggctgccactgacaggatggctatgacctgggacatggaaacagtgacctccgcgttctggtcccgagatcctcgcatcagcgtcatcgtgtgcaccggcttggggggctggagttccggttttctttgttttttctctttattcgtcctttctcaaagatgggatactgatcagaattgctctgtatatgcttgggactggatggaaagactttggagcagctgtggggggtggggggacaccgacaaccaaacagacgtgctggctccagtcctgtttttactttcaaaaaccaacaagcccgacagtggagcctgtcccctcccgggagggtgctcatggccccactcacctcatcaccccacggaaacctttgtgtcttgccctggaagacacccgaattctttgtacattgacatgcccttctccttcctccctcccctgtagctggtctttgttttactccctccctttctgatccatgtatatcatattatgtgagatatcatctgcctgaaaaaagactttgtgcggattattgggaacattgtagctgtttctgtgttttttcttaccttgtagtctggttctgaattaagagaggaaaaaaaagtaattatgatacattgtagtttgtgtacgatatatgttgataacgttttattaaagggacatcttttttccgcagcccttcctgacatgtttggggaatgtgggttggagtttattacactgattacaaaatgcaa

SEQ ID NO: 385420 - DNA, 1979 bp, Homo sapiens
ggcggcggcggcagcggtgctggaggcgcagagggcggcgcaggcggagccgggcgggcgcgcgagagcggagagcgggcggccgtgcgggcggcggcggcggcacccccaggccgagccggcgcggaaggagttccagggcgatggggccgcggccggggctgacgctttgacagctggaaagagcgcggaccagcgcctgggggggagggaggggagcgcggcgaggagagcgccagcgagcgagagagcgagcgagcgccggggagggggccgggagcgaggggcagctcgggagagccggagcggtagcggcggcggcggcggcggcggcgaggctcggcgccctcttccctgcaaaccatgtttgccaaaggcaaaggctcggcggtgccctcggatgggcaggctcgggaaaagttagctttatacgtctacgaatatttactgcacgtaggagcacagaaatctgcacagaccttcttatcggagattcgatgggaaaaaaacatcacgttgggagaaccgcctgggtttttgcactcgtggtggtgtgtattttgggacctttactgtgcagctcctgaaaggagagacacttgtgaacattcaagtgaagcaaaagcctttcatgattatagtgcagcagctgccccgagccccgtgcttggcaacattccccccaacgatgggatgccgggaggccccatcccgccaggtttctttcagggtcctccggggtcacagccctcgccgcacgcacagcctccacctcacaatcctagcagcatgatgggaccccacagtcagccttttatgtcaccgcgatacgcaggcggccccaggcccccgatcagaatgggaaaccagcctccgggaggagttcctgggacacagccattgctgcccaattctatggatcccacacgacaacaaggccaccccaacatgggaggatcaatgcagagaatgaaccctccccgaggcatggggcccatgggtcccggcccacagaattacggcagcggcatgagaccaccacccaactccctcggccccgccatgcccgggattaacatgggcccgggagctggcagaccctggcccaatcctaacagtgctaactcaattccatactcctcctcatcacctggtacctatgtgggaccccctggtggtggcggtcctccaggaacacccattatgcccagtcccgcagattcaacaaattccagtgacaacatctacacaatgattaatccagtgccgcctggaggcagccggtccaacttcccgatgggtcccggctcggacggtccgatgggcggcatgggtggcatggagccacaccacatgaatggatcattagggtcaggcgacatagacggacttccaaaaaattctcctaacaacataagtggcattagcaatcctccaggcacccctcgagatgacggcgagctaggagggaacttcctccactcctttcagaacgacaattattctccaagcatgacgatgagtgtgtgatccccccttctccgagacgctgagagagcaggcattgcaggcgggaagatgccagaaattatgcaagaagtgaggtgtcattatccaggagctggtggggagggcatctccctgctcccctcaaccccctcccaccccatccacgccccctacctttcccaattttagtttcatgcaataaaaaggccaaactttttattccataaaacaagaaggacaaaactctcaaaaatgtatttcaagtcagtgaccagaaaaatcccaccccttgccctttccccaaaggaccttttctgtacatgacacttttttgttgttttttgtttggggttttaccattgttgggatttttttatttgttttcaggggggttttttgggggaaaatttttttaaatggaagcttctagcaagccccccaccccaatcaacctctatgctttcttctta

SEQ ID NO: 385421 - DNA, 3105 bp, Homo sapiens
ggcggcggcggcagcggtgctggaggcgcagagggcggcgcaggcggagccgggcgggcgcgcgagagcggagagcgggcggccgtgcgggcggcggcggcggcacccccaggccgagccggcgcggaaggagttccagggcgatggggccgcggccggggctgacgctttgacagctggaaagagcgcggaccagcgcctgggggggagggaggggagcgcggcgaggagagcgccagcgagcgagagagcgagcgagcgccggggagggggccgggagcgaggggcagctcgggagagccggagcggtagcggcggcggcggcggcggcggcgaggctcggcgccctcttccctgcaaaccatgtttgccaaaggcaaaggctcggcggtgccctcggatgggcaggctcgggaaaagttagctttatacgtctacgaatatttactgcacgtaggagcacagaaatctgcacagaccttcttatcggagattcgatgggaaaaaaacatcacgttgggagaaccgcctgggtttttgcactcgtggtggtgtgtattttgggacctttactgtgcagctcctgaaaggagagacacttgtgaacattcaagtgaagcaaaagcctttcatgattatagtgcagcagctgccccgagccccgtgcttggcaacattccccccaacgatgggatgccgggaggccccatcccgccaggtttctttcagggtcctccggggtcacagccctcgccgcacgcacagcctccacctcacaatcctagcagcatgatgggaccccacagtcagccttttatgtcaccgcgatacgcaggcggccccaggcccccgatcagaatgggaaaccagcctccgggaggagttcctgggacacagccattgctgcccaattctatggatcccacacgacaacaaggccaccccaacatgggaggatcaatgcagagaatgaaccctccccgaggcatggggcccatgggtcccggcccacagaattacggcagcggcatgagaccaccacccaactccctcggccccgccatgcccgggattaacatgggcccgggagctggcagaccctggcccaatcctaacagtgctaactcaattccatactcctcctcatcacctggtacctatgtgggaccccctggtggtggcggtcctccaggaacacccattatgcccagtcccgcagattcaacaaattccagtgacaacatctacacaatgattaatccagtgccgcctggaggcagccggtccaacttcccgatgggtcccggctcggacggtccgatgggcggcatgggtggcatggagccacaccacatgaatggatcattagggtcaggcgacatagacggacttccaaaaaattctcctaacaacataagtggcattagcaatcctccaggcacccctcgagatgacggcgagctaggagggaacttcctccactcctttcagaacgacaattattctccaagcatgacgatgagtgtgtgatccccccttctccgagacgctgagagagcaggcattgcaggcgggaagatgccagaaattatgcaagaagtgaggtgtcattatccaggagctggtggggagggcatctccctgctcccctcaaccccctcccaccccatccacgccccctacctttcccaattttagtttcatgcaataaaaaggccaaactttttattccataaaacaagaaggacaaaactctcaaaaatgtatttcaagtcagtgaccagaaaaatcccaccccttgccctttccccaaaggaccttttctgtacatgacacttttttgttgttttttgtttggggttttaccattgttgggatttttttatttgttttcaggggggttttttgggggaaaatttttttaaatggaagcttctagcaagccccccaccccaatcaacctctatgctttcttcttaaaaaaaaaaaaaaaggaaaaaggaaaaaaaaaaaaggaaaaccagaagccctgctgtctgtctgtgcccaagcccttccaccagaaaagctagtctaggtgtgagagcccacattgtctgtagccatcaaaaataataataataaactggacagtttacaatcgttggtttctttcaaaaggccttttttggaaagaagaaaaggcagtcaccgttttccacttggggttttggtttgtgcaacaggcaggggaggagtggggacgcgtttgttctagcttgatttccatggcaacagcagcggcacgcttggaccccagaacccagcaccctcatcctgtggccagaggggccggaccactgacccctttcaggattccaccacagcccagaccgtcaccgtgacccggtggcatgcactgttcccaggacaccctcctcctctcctggacctcccttccgtcctggcctccctgcctctccagcccctcctctgcccccaccccagtcttcccagtgagaatcctgccagctgggtggtggcctggcgcagagtgggagaggctgccactgacaggatggctatgacctgggacatggaaacagtgacctccgcgttctggtcccgagatcctcgcatcagcgtcatcgtgtgcaccggcttggggggctggagttccggttttctttgttttttctctttattcgtcctttctcaaagatgggatactgatcagaattgctctgtatatgcttgggactggatggaaagactttggagcagctgtggggggtggggggacaccgacaaccaaacagacgtgctggctccagtcctgtttttactttcaaaaaccaacaagcccgacagtggagcctgtcccctcccgggagggtgctcatggccccactcacctcatcaccccacggaaacctttgtgtcttgccctggaagacacccgaattctttgtacattgacatgcccttctccttcctccctcccctgtagctggtctttgttttactccctccctttctgatccatgtatatcatattatgtgagatatcatctgcctgaaaaaagactgtagggtgaggtgcgactacgcggggggatcctctag

SEQ ID NO: 385422 - DNA, 1215 bp, Homo sapiens
cttgcaaatggataaaacacaggaaaatcctgccccccccttccaccagaaaagctagtctaggtgtgagagcccacattgtctgtagccatcaaaaataataataataaactggacagtttacaatcgttggtttctttcaaaaggccttttttggaaagaagaaaaggcagtcaccgttttccacttggggttttggtttgtgcaacaggcaggggaggagtggggacgcgtttgttctagcttgatttccatggcaacagcagcggcacgcttggaccccagaacccagcaccctcatcctgtggccagaggggccggaccactgacccctttcaggattccaccacagcccagaccgtcaccgtgacccggtggcatgcactgttcccaggacaccctcctcctctcctggacctcccttccgtcctggcctccctgcctctccagcccctcctctgcccccaccccagtcttcccagtgagaatcctgccagctgggtggtggcctggcgcagagtgggagaggctgccactgacaggatggctatgacctgggacatggaaacagtgacctccgcgttctggtcccgagatcctcgcatcagcgtcatcgtgtgcaccggcttggggggctggagttccggttttctttgttttttctctttattcgtcctttctcaaagatgggatactgatcagaattgctctgtatatgcttgggactggatggaaagactttggagcagctgtggggggtggggggacaccgacaaccaaacagacgtgctggctccagtcctgtttttactttcaaaaaccaacaagcccgacagtggagcctgtcccctcccgggagggtgctcatggccccactcacctcatcaccccacggaaacctttgtgtcttgccctggaagacacccgaattctttgtacattgacatgcccttctccttcctccctcccctgtagctggtctttgttttactccctccctttctgatccatgtatatcatattatgtgagatatcatctgcctgaaaaaagactttgtgcggattattgggaacattgtagctgtttctgtgttttttcttaccttgtagtctggttctgaattaagagaggaaaaaaaagtaattatgatacattgtagtttgtgtacgatatatgttgataacgttttattaaagggacatcttttttccgca

SEQ ID NO: 385423 - DNA, 1678 bp, Homo sapiens
ggcggcggcggcagcggtgctggaggcgcagagggcggcgcaggcggagccgggcgggcgcgcgagagcggagagcgggcggccgtgcgggcggcggcggcggcacccccaggccgagccggcgcggaaggagttccagggcgatggggccgcggccggggctgacgctttgacagctggaaagagcgcggaccagcgcctgggggggagggaggggagcgcggcgaggagagcgccagcgagcgagagagcgagcgagcgccggggagggggccgggagcgaggggcagctcgggagagccggagcggtagcggcggcggcggcggcggcggcgaggctcggcgccctcttccctgcaaaccatgtttgccaaaggcaaaggctcggcggtgccctcggatgggcaggctcgggaaaagttagctttatacgtctacgaatatttactgcacgtaggagcacagaaatctgcacagaccttcttatcggagattcgatgggaaaaaaacatcacgttgggagaaccgcctgggtttttgcactcgtggtggtgtgtattttgggacctttactgtgcagctcctgaaaggagagacacttgtgaacattcaagtgaagcaaaagcctttcatgattatagtgcagcagctgccccgagccccgtgcttggcaacattccccccaacgatgggatgccgggaggccccatcccgccaggtttctttcagggtcctccggggtcacagccctcgccgcacgcacagcctccacctcacaatcctagcagcatgatgggaccccacagtcagccttttatgtcaccgcgatacgcaggcggccccaggcccccgatcagaatgggaaaccagcctccgggaggagttcctgggacacagccattgctgcccaattctatggatcccacacgacaacaaggccaccccaacatgggaggatcaatgcagagaatgaaccctccccgaggcatggggcccatgggtcccggcccacagaattacggcagcggcatgagaccaccacccaactccctcggccccgccatgcccgggattaacatgggcccgggagctggcagaccctggcccaatcctaacagtgctaactcaattccatactcctcctcatcacctggtacctatgtgggaccccctggtggtggcggtcctccaggaacacccattatgcccagtcccgcagattcaacaaattccagtgacaacatctacacaatgattaatccagtgccgcctggaggcagccggtccaacttcccgatgggtcccggctcggacggtccgatgggcggcatgggtggcatggagccacaccacatgaatggatcattagggtcaggcgacatagacggacttccaaaaaattctcctaacaacataagtggcattagcaatcctccaggcacccctcgagatgacggcgagctaggagggaacttcctccactcctttcagaacgacaattattctccaagcatgacgatgagtgtgtgatccccccttctccgagacgctgagagagcaggcattgcaggcgggaagatgccagaaattatgcaagaagtgaggtgtcattatccaggagctggtggggagggcatctccctgctcccctcaactacttggataactgttgtaactg

SEQ ID NO: 385424 - DNA, 1410 bp, Homo sapiens
ggcggcggcggcagcggtgctggaggcgcagagggcggcgcaggcggagccgggcgggcgcgcgagagcggagagcgggcggccgtgcgggcggcggcggcggcacccccaggccgagccggcgcggaaggagttccagggcgatggggccgcggccggggctgacgctttgacagctggaaagagcgcggaccagcgcctgggggggagggaggggagcgcggcgaggagagcgccagcgagcgagagagcgagcgagcgccggggagggggccgggagcgaggggcagctcgggagagccggagcggtagcggcggcggcggcggcggcggcgaggctcggcgccctcttccctgcaaaccatgtttgccaaaggcaaaggctcggcggtgccctcggatgggcaggctcgggaaaagttagctttatacgtctacgaatatttactgcacgtaggagcacagaaatctgcacagaccttcttatcggagattcgatgggaaaaaaacatcacgttgggagaaccgcctgggtttttgcactcgtggtggtgtgtattttgggacctttactgtgcagctcctgaaaggagagacacttgtgaacattcaagtgaagcaaaagcctttcatgattatagtgcagcagctgccccgagccccgtgcttggcaacattccccccaacgatgggatgccgggaggccccatcccgccaggtttctttcagccttttatgtcaccgcgatacgcaggcggccccaggcccccgatcagaatgggaaaccagcctccgggaggagttcctgggacacagccattgctgcccaattctatggatcccacacgacaacaaggccaccccaacatgggaggatcaatgcagagaatgaaccctccccgaggcatggggcccatgggtcccggcccacagaattacggcagcggcatgagaccaccacccaactccctcggccccgccatgcccgggattaacatgggcccgggagctggcagaccctggcccaatcctaacagtgctaactcaattccatactcctcctcatcacctggtacctatgtgggaccccctggtggtggcggtcctccaggaacacccattatgcccagtcccgcagattcaacaaattccagtgacaacatctacacaatgattaatccagtgccgcctggaggcagccggtccaacgtaagtctgctttctaataatttacatatcagacaccataacaaatcataattaacttcatcagctgaggggaaagcaagtttaattgatttcagccatttgttaccaaagatgaataaaataaaccgtcagaaaagtgattaactcttgggcaactcagttcccatttcataggcggcagggggtgggagaggaaggggt

SEQ ID NO: 385425 - DNA, 239 bp, Homo sapiens
gaacaatgcaaattttggtcaagagatatcaatgaagagagacacaataaataaactgacttaaaagataattttactgggcaatattgatcaatgagagcctgaggcgaataagtgccttcatccacagaatatcttttaaacttaatatgtttataattatacatggtagagcacatttcctaatgaattatttttagtagtgttcctactttccagtcaaactacttactctattt

SEQ ID NO: 385426 - DNA, 516 bp, Homo sapiens
gtcatctgtaaaatggaggataggggaataacatctgccttaaggggtgggttgatgggtgtctggaatgcagtagcactgtgtaactgtctgcgttatcatcacaggttccccaacctctgtgccatgaggcatttatcttcctgaattcactccccctacctgaggctttgctggaggcatcttaacggcctcttggcccgacccaggctggtaagagccttggcaagcgcacgcctgcgtgcccattctccagagttcctggcctcgcgatcgtgcactgatttccttcagaaccccaggcccgctctggacgtggaaggcagccgtgccgtctgggaaagtggagccgagcccgggacgctgtcggcctaaatggaacgccggccccggggcccgctccccggcgggttcccgagctaaatcctccaactgttccatgacgtcatcgggccccctccccctgctccggcccgcgcggccccagcgtggcgctaaggagtgtggcggtccccg

SEQ ID NO: 385427 - DNA, 379 bp, Homo sapiens
ctgtgtcccctattgccccaagataagttcatttaaaacaaaaaagcttctatctcaggtagaaaacccatcatcactgggcattgtcttccagtgattctgagcagaaacaacggggaacgtatgtcttcattgtgactcagcgagcaaagagatggagtcttttccaagaagaaagtgggagatttgggaccactgacatatttggcccactgattccattcccctagaccaacacgtgttcatcaaattgcatcactcttatggggaacttaatgcaactccggtgcccattgcattagtttttgatgatggaattctctttgtgaacttgaacttgaggggtctggctacccctctgagacttcttttttgagat

SEQ ID NO: 385428 - DNA, 189 bp, Homo sapiens
aatgctagtcctttccattctttttctatcttgcccttgatatcagtgagccatcagaaggccaggaagcagccaggcatggtggcttatacctgtaatcccagctactcaggaggctgaagctggaggatcatttgtagtcaggagtttgagaccagcctgggcaacatagcaagatctcatccctac

SEQ ID NO: 385429 - DNA, 297 bp, Homo sapiens
tcccccaggatcccaaggtgctggagttataggcatgagccacccaccatgccaagtcatcatgtaaagatttacagaaagttttgtgtaaacattgtcttttttttttttttgaagcagagtctgggtggcccggatgtttgacaaattttatggagaggcctagggcattatgagcaattggaaacccccaagggaatgtgcggtgtggctaacagctggggggggtggtgtgtggttaacattccacttcaaagtgtgagtcttaacatggcttgggataaacaggtccgcgag

SEQ ID NO: 385430 - DNA, 272 bp, Homo sapiens
tatagagatggagttctgccatgttgtccaggctggtctcaaactcttgggctcaagcaatccttctaccttggcctctcaaagtgatgggattacaggtgtgagccactgcacctggcctcaagtacagagtaatggaagtttactcaacttcattttaccaccaattgaccatttttcagatgttctagatttatttacacacaacctccttgttgaggctgacctactaaggagcatctgatttggaagagaagaacagtttataactc

SEQ ID NO: 385431 - DNA, 805 bp, Homo sapiens
aatcttgaaattcgaagtcaggatggatctctgatattggaagtaagcactggttattcatctaaccttgccaggggtggaagccttgaaactggaagtaaggagaaatctctactatgcagttctctggtgtttaagccccaacatggtaccacaggcccttattccagcatgagcaaagagggatgccatgtgcacaggctgactccagtgtacttgaggaagagaacaccatgggactgggctaagaccaggacaaaaagacatggtctcctccctgagccaccattcctaatttgttgactttcctagaagtgaaatggagctgggtgagaagaggaagaactggcatggcgaggaagaagagagttataaagacagccctgggacatgcctctgaataaagggatgggttttagttcagtagggataggaacaaagctgaggctaatatggcttccagtctgtaggcagctgttttttcctggtcacctgctaatgtcctcgtctgctttagtgatatcagcacagttatgaactttagcgttggtgattcggcatgtggactagaacttggagctgtgttcacaaaaagtggagctcctcaccttgaggatgggctgtgggataatgagactgatgcagttatctgctgagacaacctgtgattgtgtcatcggaccacgtcagctgctatcattcatgctaaagagactggctgcttactccggcacagctggttagttggaaactagaagttgtggcatctgtagttcggtagctgtcagttgctactaggtaaact

SEQ ID NO: 385432 - DNA, 761 bp, Homo sapiens
atcttggctcactgcaacccccacctcccaggtgcaagcaatcctcctgtctcagcctccaagtagctgggactacaggcatgtgccgcagtgcctggctaattaaataaaaatttttggcagagatgagggtctcactatattgcccaggttggtctcgaactccgaggttcaggcgatcctcctgccttgccctcccaaaatgctgggactacaggcatgagccactcactcagtctggaggccctgttttctgagctgaggtataagtgtcctcagcagcagggcagcacggtgtccaggcaggggtgactcacctccacagaggcctacccgccaagagggtggagtggtgtcctgggctgatgcagaggcagaagtgcgagagcttaggatttcacacaccttttcgtgaagtgctggggtgctgtgctctcagacctcaggcctgagctttcctctggaaggggtttgggttgtgtttgtgtttcctgatgttcaagggtccacaagagcaaagctgggaggggggtctctgtgggagtcggggcacatggggcagacctggggcctttgggtatgtaggggtggcatgctgagtgactccacacccatcatcgggcaaggccatgctggagttttagggggtataagagggctgtgcccctgccaggacatccagctaagccccctgcccagctgggccagcactgtgttcccagcaccccagacattcccatgcttgtggcctgagaccacca

SEQ ID NO: 385433 - DNA, 478 bp, Homo sapiens
ggtcttgctatgttgccagggctggtctcgaactcctggcctcaagcaatcctcttgcttcagcctctcaaagtgttggaattccaggtgtgaaccactatattagacccacatattttctgtgttgtatgtattatatacttgtactcttataataaattaagctaaagaaattgttacaaaaatcataagcaggagaaaatatatttactatccattaagtggaagaggatcatcataaaggtcttccttgtcatcttcacattgagtaggctgaggagggagaggaaggcttggtcttgctgtcttggggtagtgaaggtagaagaaaatccatctgtaaatggacctgtgcagttcaaacccatgttgttcaagggtcacctatacctccttctgccctttgtacatctgttgttgcacttaacacattgtgttgtaattatttgcgtactttatttataataaactgaatatc

SEQ ID NO: 385434 - DNA, 410 bp, Homo sapiens
tcccgattatttgggaggctgaggtgggagaatggcttgggtaagagtgagaccctgtctctaaaataaataaaaggtgtaacatgtgtaataagaacaccagaaagagaagaaacaaaataatataagaaatatttgaaacaagtgactgagaaattcccagaattaatatcagacaccaaaccacagatccaggaagctcagagaataccaaacaggataaatgcccccaaaacctacatgtaggcatttcattttcaaactacagaaaataaaaagataaagaacattcctgaaagaagctggggagggggggaaacaccttacgtatagagaaaaataaaaattatatccaacttcccctaagaaaccatgcaagcaagaagagagtacagtgaagtatttaaagt

SEQ ID NO: 385435 - DNA, 1680 bp, Homo sapiens
ctctcaggcacagaggccaccgttactcctgatgattctgtctcagacccaacaacctggccttcccaggaggtctccatgtgtcaccccctccctgggtctcacccttctcacctgctcaaggaagggatgacctcagtgaggcccagggcctgcagcaaggccctccctggcaattgcagaccaaggattctgctcctccaccttgaactccagcctctttctctccatttttccctctctctcccctacccgtctctccctctctctcacacacacactcttccgggttcaagggccaagcgtctgcctaggctgagacacgtgctgagctccctgaagatggaccagctgccccctagaagggagactttcaggggcatcagggcccttgggatgctccgccctgaccagctttttggtggcagagggaggcacggggagagggagaggccatgtcgcagtccccctgccgtgggagaggcaacgcggaaatgtatagacccagtgctcagccagaaacagggccagcaagcggcagtgaacggaggcagcccggggctcgtcagggtgggcagagccatggcccaggggttgaaaacccccgagttccccgtgagacttggctggcccttcccacccctgggcctcagtctccccatcttgtgtgatgaggagagaccctgaggacagaggtcttcaggctgtgggtctcaacaggaactgagatccccaagggagacagagttgcaggtcacctcccctacctgcttctcagcaggacctaggaggcctggcccagctcctggtggaccccaagcagccagagcctactgctgccatctgaagacctcatctgagcccactttccaccaagcgcccacccaggctgaggtctcctgggaattctcacccgctctcctgctgctaaggaaatgacgtcaatggctaccccagagaaatgccccacatcccaggacaccagccatcaggaaggcagctcttcctcacccagaaagaggcaattatttcctctcagcagcctggccccaggagcccccttccctctctggggctctgcctctccttttgtgccctgccatggagccccagggccggggcagcccctctctgcccagggaaggcaccgccctcaaagacaaggcttggccgggcagtgaccttccctgagcggaggggtggcttgagcaggacacttcttgcccttactcaaaaacgaaatggccagtttccagaggcgtcgggggaacggctgacgaagtcacaatcgttatgttctcaattgttttcctcctcttactttctctcctgcctcgtttggacaggccagtggcattcgcccttgaggtccctcgcagccccggccccccgggcccgcccacacctctggcttcctctgtgcatcctgtgaagtctgtttctgatgcgttggcgtggggggtgggctgggtggggtggggatgagggcccagccctcatgattccatttcccaattcctttctggtctccatcctctctgtagatatgtagatctctttgaaacgaagtaagcacccatccctcccagctcactcggctccaccgtggggacctgctgggggagccgctggctccctgaggaaagtgaaagccaataaaacatctcccacactctcgtg

SEQ ID NO: 385436 - DNA, 502 bp, Homo sapiens
catggtggtgtgcacctgtaattccaggtactcaggctgaggtaggaggatcacttgagatcaggagttctaggctgtagtgtgctatgagcacatctatgaataggcactgcgttccagcctgggcaacatagtgaggccccatctcttaaaagggcacacgtgtataggacagctccattataatcttatgggaccactgtaatatgtgtaatccattgttgactggaacatccttatgcagcacatgactgtgtacataacttaaaatttatcatttaaaccatttttaagtgtacaattcggtggtataaagtacatttacattattgtgtaactatcacctctatccatctccctaactttttcatcatcctaaacaagctctgcccattaaacaatatcacctcatgcccatagcccttggtaaccattgttctactttttgactctatgaatttgtgtactccaggtacctcgtataaatggaattatgtaatat

SEQ ID NO: 385437 - DNA, 648 bp, Homo sapiens
ttgtctaaggggaaatatattctttaagaagaaactatcacatacttctcatccaggctgttctttgggtcgtgggggctcagttgtgataaaaggtgaagttagaactagttaatggagaactagctcccattatgccacttcctggccaaatcagggactgaccatgggactgccccatatgtgaacctatgttgccttcactgagactggggactttgagaagcactggcatatttggaaactttatgcagcagttgactggtctaaaaactacacagatgaaatctctctcagaagaaatatattcttaactatcctactctctttctcctctataataaatgttataaaggtttgcccctgtgtttgttttactttacatgtgaaacaaaaattttcatgggtaaatgagttaaagtatttggcttttagctcaaacaaatgagatgttagtttaagaatagacctccacttataggctgatttataacatttgcattggaggatatggaaaggatataatgaaaacacaaaaatttccgtggcattttaaattttcatttttttatcaagaaaaattgagttcttgttgaaataacctgtacaaaacctgctttaaaaaatagtttttgatgttgcttacat

SEQ ID NO: 385438 - DNA, 273 bp, Homo sapiens
aaggatttagaaacactttggaagctcacgaaaaaacttaagctatttatatgatagttcttgtaaaaggcaggggctgggaacccctttgtactgggtgttgaaatataacaggacatcttacttcagtagcaaggatgaatcccatcatttgtttggtttactttcatatgttacaagcaccgggactactggtgttggttgctggtcacagaagcaaagacaagtaggcttacatgatctaaaattcaactgccagatgactaaacactg

SEQ ID NO: 385439 - DNA, 369 bp, Homo sapiens
agagaaggggtttcgccatgttggccaagctgatcttgaactcctgggcttaagcaatctaccggctttggctttccaaagtgctgagattacaggcatgaggcactgtgcacagccttattattttatttttaatctataccataattctcactccttctatcccgttgtccgcatatatacatatctaccaaagacaggttgagggaacaggaaaatggctgttttaaaatccttgacctttcctgcattgtttatgtatgaactgtcaaatttatatgtcatttttttattctttgacattcatatttagtagacagtataactccctagaagttaatcttgatagttaatttttattacttggga

SEQ ID NO: 385440 - DNA, 2662 bp, Homo sapiens
atcgctaccgggacacgcttcgccgcgccatcctgctgctcagcccacagggagcccactccttcatcaacgaggccgtggagaccaacctggcttccaaggacagccactgggtctttgtgaatgaggaaatcagtgacccggagatcctggatctggtccatagtgcccttggaaggatgaccgtggtccggcaaatctttccgtctgcaaaggacaatcagaaatgcacgaggaacaaccaccgcatctcctccctgctctgcgacccccaggaaggctacctccagatgctgcagatctccaacctctatctgtatgacagtgttctgatgctggccaacgcctttcacaggaagctggaggaccggaagtggcatagcatggcgagcctcaactgcatacggaaatccactaagccatggaatggtgggaggtccatgctggataccatcaaaaagggccacatcactggcctcactggggtgatggagtttcgggaggacagttcgaatccctatgtccagtttgaaatccttggcactacctatagtgagacttttggcaaagacatgcgcaagttggcgacatgggactcagagaagggcttgaatggcagcttgcaagagaggcccatgggcagccgcctccaaggattgactcttaaagtggtgactgtcttggaagagcctttcgtgatggtggctgagaacatcctaggacagcccaagcgctacaaagggttctccatagatgtcctggatgcactggccaaggctctgggctttaaatatgagatttaccaagcccctgatggcaggtacggtcaccagctccataacacctcctggaacgggatgatcggggagctcatcagcaagagagcagacttggccatctctgccatcaccatcaccccagagagggagagcgttgtggacttcagcaagcggtacatggactattcagtggggattctaattaagaagcccgaggagaaaatcagcatcttctccctctttgctccatttgatttcgctgtgtgggcctgcattgcagcagccatccctgtggttggtgtgctgatatttgtgttgaacaggatacaggctgtgagggctcagagtgctgcccagcccaggccgtcagcttctgccactctgcacagcgccatctggattgtctatggagccttcgtacagcaaggtggcgaatcttccgtgaactccatggccatgcgcatcgtgatgggcagctggtggctcttcacgctcattgtgtgctcctcctacacagccaaccttgctgccttcctcacagtgtccaggatggacaaccccataaggactttccaggacctgtccaaacaagtggaaatgtcttatggcactgtccgggattctgctgtatatgagtacttccgagccaagggcaccaaccccctggagcaggacagcacgtttgctgaactctggcggaccatcagcaagaacggaggggctgacaactgcgtgtccagtccttcagaaggcatcaggaaggcaaagaaggggaactacgccttcctgtgggatgtggccgtggtggaatacgcagccctgacggatgacgactgctcggtgactgtcatcggcaacagcatcagcagcaagggttacgggattgccctgcagcatggcagcccctacagggacctcttctcccagaggatcctggagctgcaggacacaggggacctggatgtgctgaagcagaagtggtggccgcacatgggccgctgtgacctcaccagccatgccagcgcccaggccgacggcaaatccctcaagctgcacagcttcgccggggtcttctgcatcctggccattggcctgctcctggcctgcctggtggctgccctggagttgtggtggaacagcaaccggtgccaccaggagacccccaaggaggacaaagaagtgaacttggagcaggtccaccggcgcatgaacagcctcatggatgaagacattgctcacaagcagatttccccagcgtcgattgagctctcggccctggagatggggggcctggctcccacccagaccttggagccgacacgggagtaccagaacacccagctctcggtcagcacctttctgccagagcagagcagccatggcaccagccggacactctcatcagggcccagcagcaacctgccgctgccgctgagcagctcggcgaccatgccctccatgcagtgcaaacacaggtcacccaacggggggctgttccggcagagcccggtgaagacccccatccccatgtccttccagcccgtgcctggaggcgtccttccagaggctctggacacctcccacgggacctccatctgactgcgccgcctgccctcctgcccaccctcccacccacccgaccagcagagctttttaatacaagaaaacaacaacacaaaccacacacactcgcacacacacacatacacagagactctttcatttttcttgtacatatgtgtaaataatgacagaatggagtggggtaaaagtgtattttgaatattcccaattttcgaagtcagtaaaaaaacacaaaaactgtatgaatgactttgtaaattttgttctatatgaataaaaaggcaaattacttgtgatca

SEQ ID NO: 385441 - DNA, 432 bp, Homo sapiens
ttaaagtggtgactgtcttggtaggatcatggggacattctgggagcgagctacaccatccaggctgttgaatcagaggctgctttctgtttaatgctgggtttggggagaagagaatcttgaggagtattgtgagctttcataaggcctttcattcaaataattgtatgaataatgaaaggaagagtgagattgaagtttctgccccaggacctctgtgccttccaaaggaagtccctgagctgctctagaaaaggacttctcattcacagcttcctctgaggaccagagggggccaagctgctccatttgttcttggatgtaaaatggatcttgacccactactggtccttaggagagttgttctggtagccagaaccccaagatagatgctggaggaggacattctcttagcacccaacaccagtgatg

SEQ ID NO: 385442 - DNA, 5097 bp, Homo sapiens
atcgctaccgggacacgcttcgccgcgccatcctgctgctcagcccacagggagcccactccttcatcaacgaggccgtggagaccaacctggcttccaaggacagccactgggtctttgtgaatgaggaaatcagtgacccggagatcctggatctggtccatagtgcccttggaaggatgaccgtggtccggcaaatctttccgtctgcaaaggacaatcagaaatgcacgaggaacaaccaccgcatctcctccctgctctgcgacccccaggaaggctacctccagatgctgcagatctccaacctctatctgtatgacagtgttctgatgctggccaacgcctttcacaggaagctggaggaccggaagtggcatagcatggcgagcctcaactgcatacggaaatccactaagccatggaatggtgggaggtccatgctggataccatcaaaaagggccacatcactggcctcactggggtgatggagtttcgggaggacagttcgaatccctatgtccagtttgaaatccttggcactacctatagtgagacttttggcaaagacatgcgcaagttggcgacatgggactcagagaagggcttgaatggcagcttgcaagagaggcccatgggcagccgcctccaaggattgactcttaaagtggtgactgtcttggaagagcctttcgtgatggtggctgagaacatcctaggacagcccaagcgctacaaagggttctccatagatgtcctggatgcactggccaaggctctgggctttaaatatgagatttaccaagcccctgatggcaggtacggtcaccagctccataacacctcctggaacgggatgatcggggagctcatcagcaagagagcagacttggccatctctgccatcaccatcaccccagagagggagagcgttgtggacttcagcaagcggtacatggactattcagtggggattctaattaagaagcccgaggagaaaatcagcatcttctccctctttgctccatttgatttcgctgtgtgggcctgcattgcagcagccatccctgtggttggtgtgctgatatttgtgttgaacaggatacaggctgtgagggctcagagtgctgcccagcccaggccgtcagcttctgccactctgcacagcgccatctggattgtctatggagccttcgtacagcaaggtggcgaatcttccgtgaactccatggccatgcgcatcgtgatgggcagctggtggctcttcacgctcattgtgtgctcctcctacacagccaaccttgctgccttcctcacagtgtccaggatggacaaccccataaggactttccaggacctgtccaaacaagtggaaatgtcttatggcactgtccgggattctgctgtatatgagtacttccgagccaagggcaccaaccccctggagcaggacagcacgtttgctgaactctggcggaccatcagcaagaacggaggggctgacaactgcgtgtccagtccttcagaaggcatcaggaaggcaaagaaggggaactacgccttcctgtgggatgtggccgtggtggaatacgcagccctgacggatgacgactgctcggtgactgtcatcggcaacagcatcagcagcaagggttacgggattgccctgcagcatggcagcccctacagggacctcttctcccagaggatcctggagctgcaggacacaggggacctggatgtgctgaagcagaagtggtggccgcacatgggccgctgtgacctcaccagccatgccagcgcccaggccgacggcaaatccctcaagctgcacagcttcgccggggtcttctgcatcctggccattggcctgctcctggcctgcctggtggctgccctggagttgtggtggaacagcaaccggtgccaccaggagacccccaaggaggacaaagaagtgaacttggagcaggtccaccggcgcatgaacagcctcatggatgaagacattgctcacaagcagatttccccagcgtcgattgagctctcggccctggagatggggggcctggctcccacccagaccttggagccgacacgggagtaccagaacacccagctctcggtcagcacctttctgccagagcagagcagccatggcaccagccggacactctcatcagggcccagcagcaacctgccgctgccgctgagcagctcggcgaccatgccctccatgcagtgcaaacacaggtcacccaacggggggctgttccggcagagcccggtgaagacccccatccccatgtccttccagcccgtgcctggaggcgtccttccagaggctctggacacctcccacgggacctccatctgactgcgccgcctgccctcctgcccaccctcccacccacccgaccagcagagctttttaatacaagaaaacaacaacacaaaccacacacactcgcacacacacacatacacagagactctttcatttttcttgtacatatgtgtaaataatgacagaatggagtggggtaaaagtgtattttgaatattcccaattttcgaagtcagtaaaaaaacacaaaaactgtatgaatgactttgtaaattttgttctatatgaataaaaaggcaaattacttgtgatcattctgaagtgccaaaggagcccccccattcctgggcctttctgagggcaggaggggcgaccagataaggagcccctctctgctgggggagaagggaagacgaggaaccccacatgccactcgctgccttgtcccacagcttgctgccccatttctttgctcctggcacctcgtcccttttagtccctcagcttgataaagagtgagtttggagcccgcattgggctggcccactgggttgctgtgctgtagggtgatcggctgttctgggtagcctggggctgaggaggtgccctggactcagggctatcctgtcctgtcttggatcttgcgggacgagttagtcaccgctgtgtgtgttgcagtgtgcctctgccccatgggcccgagagaagctgacaattacccatagtgaggtaattgagggctttgatactgagctgttctcatatcatactgttggccttgtttttcattttcttttcaaaattagaagaatcaaaaagtgatagaatattgggggaaggagggcagactccatcgtttcctcagggagactgggcggaggtggggttggtctggaagaaggtccatgggggcagggagttgcgaggtggggttagttgcatggaccaggtgaggtggtggaacaaaaggccaggtagaggaagaatattcccttgggtttggacccatggtcccaggtgagagaaggaagtgaggccatagatgcagggagtagaagctttgtggtgtcaggcaaacggactctgttagtaagagttgggggaggtgcccaggtgggtggaccagtactccaggtgatggggcatgctgagaaatagagaaaagagaccatgtttatttgggtaggaggaagccttgccttgcgccttaggtgagaagcataagtgtaactcccatccaccagggaagttgcttgtagccccaaaagtaaaggcctatctctgggtcataaatcctgcaggcagtccaacaaacagggctggctccagcacaaactctcccttccacctttacgaccctctccagaccagacctggagtcctcttcaagcagcaatccaacccagagcaggggccctccccactcaggcatctgataacctctgagatttccaggcctatccctgtgcaggtacagctgcagggaagcccagttttctaagcctaggaccacctaacagcgccccctccttcagttgccctttctgaggcaactaaactacagaatcagggaaagaaccattaggagtggaactgggggaatctgagttgtgtcacttcagttcctctcctaaagacaaaggttagtctgatctccagacccgtcagaatggaatacacagcccacatctgtcactgaaggaggtggagctcccacagccagcagtaatcagggagctgagagcctggttctgtgatcatggagaaatacaaagtcctattgattgcttcttctatagccttgtagagtttctagagagatgtatttatgagggtgataactagcccaggattgatttctttcctaaagtccctagtgacatgattgagcagtaaagaacggccaaatcacacagtcagctaaaagcactgtggggaagagagtgtttataattatgttatttattgctggatgctgagaatggtctgatattcgtgctacctaggcaatccattgacatttctccaatcagagcatgtggaccttggagccaggcatgctcagagaagcctaggtgggctaccatgaccccgaggaagagcaggctttgttttccatcagcacgttgggggccctgccctgaatggtcaatttttcacatatatatctctctatttttttaatcaaactctggtctcactgccttatctcacaccaactctgtttcctcattgccccctgagatggcctgtcttctggggtatagcttggatgtcttcttggatggttctgcttagaatgagtgtcaaggaggaaagagagggagatggaggatgtgtttgtgcgcctgtgtgtgtgtgtttgtgtgtgtgtgtgtgtgtgagagagagagagagagagagagagaccagcatcttcaagagaagtattctgcttatacaaaatccttaacacctcatggtgttattcttcaccatgtttatatatatatatatatatttttttttttttttagaattttctacccttggcatgaggggaaatgattgatattcaagcaagttctctaggaaaaaaaaaaacttcccaactcagatttctgtgtcagctcagaatgtatctttttttcatgctttgctctttggatttataactctgtttagactattccatacattttaggtatattttgtgccttcagacactgcaaataataatcagcatttggattaaagttgtttaataata

SEQ ID NO: 385443 - DNA, 2323 bp, Homo sapiens
atcgctaccgggacacgcttcgccgcgccatcctgctgctcagcccacagggagcccactccttcatcaacgaggccgtggagaccaacctggcttccaaggacagccactgggtctttgtgaatgaggaaatcagtgacccggagatcctggatctggtccatagtgcccttggaaggatgaccgtggtccggcaaatctttccgtctgcaaaggacaatcagaaatgcacgaggaacaaccaccgcatctcctccctgctctgcgacccccaggaaggctacctccagatgctgcagatctccaacctctatctgtatgacagtgttctgatgctggccaacgcctttcacaggaagctggaggaccggaagtggcatagcatggcgagcctcaactgcatacggaaatccactaagccatggaatggtgggaggtccatgctggataccatcaaaaagggccacatcactggcctcactggggtgatggagtttcgggaggacagttcgaatccctatgtccagtttgaaatccttggcactacctatagtgagacttttggcaaagacatgcgcaagttggcgacatgggactcagagaagggcttgaatggcagcttgcaagagaggcccatgggcagccgcctccaaggattgactcttaaagtggtgactgtcttggaagagcctttcgtgatggtggctgagaacatcctaggacagcccaagcgctacaaagggttctccatagatgtcctggatgcactggccaaggctctgggctttaaatatgagatttaccaagcccctgatggcaggtacggtcaccagctccataacacctcctggaacgggatgatcggggagctcatcagcaagagagcagacttggccatctctgccatcaccatcaccccagagagggagagcgttgtggacttcagcaagcggtacatggactattcagtggggattctaattaagaagcccgaggagaaaatcagcatcttctccctctttgctccatttgatttcgctgtgtgggcctgcattgcagcagccatccctgtggttggtgtgctgatatttgtgttgaacaggatacaggctgtgagggctcagagtgctgcccagcccaggccgtcagcttctgccactctgcacagcgccatctggattgtctatggagccttcgtacagcaaggtggcgaatcttccgtgaactccatggccatgcgcatcgtgatgggcagctggtggctcttcacgctcattgtgtgctcctcctacacagccaaccttgctgccttcctcacagtgtccaggatggacaaccccataaggactttccaggacctgtccaaacaagtggaaatgtcttatggcactgtccgggattctgctgtatatgagtacttccgagccaagggcaccaaccccctggagcaggacagcacgtttgctgaactctggcggaccatcagcaagaacggaggggctgacaactgcgtgtccagtccttcagaaggcatcaggaaggcaaagaaggggaactacgccttcctgtgggatgtggccgtggtggaatacgcagccctgacggatgacgactgctcggtgactgtcatcggcaacagcatcagcagcaagggttacgggattgccctgcagcatggcagcccctacagggacctcttctcccagaggatcctggagctgcaggacacaggggacctggatgtgctgaagcagaagtggtggccgcacatgggccgctgtgacctcaccagccatgccagcgcccaggccgacggcaaatccctcaagctgcacagcttcgccggggtcttctgcatcctggccattggcctgctcctggcctgcctggtggctgccctggagttgtggtggaacagcaaccggtgccaccaggagacccccaaggaggacaaagaagtgaacttggagcaggtccaccggcgcatgaacagcctcatggatgaagacattgctcacaagcagatttccccagcgtcgattgagctctcggccctggagatggggggcctggctcccacccagcagagctttttaatacaagaaaacaacaacacaaaccacacacactcgcacacacacacatacacagagactctttcatttttcttgtacatatgtgtaaataatgacagaatggagtggggtaaaagtgtattttgaatattcccaattttcgaagtcagtaaaaaaacacaaaaactgtatgaatgactttgtaaattttgttctatatgaataaaaaggcaaattacttgtgatca

SEQ ID NO: 385444 - DNA, 3006 bp, Homo sapiens
gtataggacgctatctcagcacattatccgaagaaaattccagttaaaaatcatctcatagaaaatatgactagtatttacagtccagtcaagctttatgattcttatgtcgattttttctttgtgattgactctttcctattccctcctcttctcttaacaggtaaatattgtcacagccctaagttcagagccaggcctggctctgaacttaggctaactcgttggaattctccaaagcaatcagtgtgagccagtgcctcttccttacccacatctctactttcaagaagctgccctgcatttcctggggcaaaactctactttgtaagaaaaataataggaccagaaatttaaatcccaaattgaactatggaacttgaactctagcgtgttcgccccaactgggagaggtgagctttttcccagtgtttcagaactgattttctttactttctacaagggagggcagcacagggactacggttgaggcccgtgaaggctgggtttgatgccaccctatacagagcagggacctctctggctaatccccagtcctcagccaggctgtgtgaatcaagtgcctgccccagggctcttgagctattgaagctgcttgggtacaggacacagtaggtggggagggttaagacccttctgtgagttccctgtgcggggctgtacttgcctcttccaattcgtggcctttccctgcttggtccctactagacagacaaaccagccacagtccagcctgcagccagaccaccttgttcactcattctcctttgcctcagagctaagacaaaaatgagacagaaggcagggctccctgggagtccactgtgctccagggttctggggaatcagggttagccagcagctcctggctgcttccctcagagactagggctctcatcctccccaagagaagcagcaagcccagcctggaccacactgtccatattgctggacagtggcctgacagaaagtgactcctccaagtcccaggaggccagggcttttctcatccttgcctttcagccctaacccatgggactgcccacggattggagacttcaagggctgaggtctgggagctgcataaagggcattgcttcagcccaagttagaaatctgcctgggcaagctcttcctgccccagacctacaaagcagcagaccgggggctctggtggactagcccctgacattggtggggggccccacaccactccaccccaccctgccttccagctctcctgggcatttttctccctgtactcaaacagcctacccacccaaggtttcctccctgggcagcctagcaatgaacagtgcagccggcagggcagaggcccggcagtcaccgggcccgtcaggctcaggcagagaagccacaggggccaggagtcactggagactatttctaaatgatgggggtaaatgcacaaatagaatctcaccaaagggctgcctccacattgatgccgtgcccagagggacagaaccaatgccaccagcctgggtatatgtcactgggcacagctctaaccccctcctccggactctagtcccgctcctctgcgcacagagcccccagcccacaggtacaccttcatgatttggagaaagacgctcgccccatgcacgccctcctctgggccttctgccctgctcccagtcacttccaagcttcctgtttgcctgtgatgttattgtgcctgttgagggaagcagcagaggaggcagtggctgacttggcacagatgcctgctacgtgctctgttgaaatgcgcggggtggccattcctcggtacagactagtcctggtccttgggtgtgggcagtgggggaggaaccaactggtcgaggtttcagagccaaaccttgcctttggttggtgagtccttgccccccaggcctgcgctccacgatgcctttcacccttggcaatctcagggccatcctgggtagtaaccccactcctctctgctcccgcccgcacctgtggctctcactctgggctcaacccctgcaaccctccaggagcccgacagcagccagctgcctgcactgtcgcctccgtaagctccaacttccagacccagaagtccctctgcttccctctgttggaaaaagcctaaaagaattagcttccagattcctctagcccctgctccattcccacccagtccttctgaagaggaatgagcaatacatctgagctggatttctctctagtcctttctccagacaaatccttcttaaagcaaaagtcctggctgagcacctgtccttggggaccgatctgccgtgtgaccaggggaagaaagttcccgaaagcctgttccaccaattctgcttctgtgttgtgaatccagtctgctttccattagaaaaccgcttcggcacttatggtcactttaataaatctagtatgtaaaaaaagaaagaaagaaaagaaacagaaaaaagaaacgtgcaggcaaatgtaaaatacaatgctctctgtaagataaatatttgcctttttttctaaaaggtgtacgtattctgtatgtgaaattgtctgtagaaagtttctatgttcttaaatggcaatacattccaaaaattgtactgtagatatgtacagcaaccgcactgggatggggtagttttgcctgtaattttatttaaactccagtttccacacttgcatcttgcaatgttggtatggtatatatcagtgcaaaagaaaaaacaaaacagaaacaaacaaaaaaaaaaaacaaaaatccacgcaggtctaaagcacagagtctgacgtacaaaaggaaaaatgctcagtattgatgtgtgtgacctttgttgtaaattacatctgtactgtgaatgagaagtttttacaagtataataattgcctttattacagctctggctgagtgttcagcctgaggatattttttaaaaaaaaaagaattagcatgttggaataaatttgaaaatcccaacataaaaaaa

SEQ ID NO: 385445 - DNA, 270 bp, Homo sapiens
tgaatggagaaataaactgtggtacctccagacgatggaatattcttcttctgtgctaaaaaagaaatgagctatccagccatgaaaagacatggagggaattactacgtgaaagaagccaatctaaaaaggctatatactgtatattccaacaatatgatactctggaaaaggcaaaactatggagacagtaaaaagatcagtgtttgccaggggttaaagaggaggaatggatgaataggcagaacacagagaattccggaggcagta

SEQ ID NO: 385446 - DNA, 292 bp, Homo sapiens
tagcatcttacataattaaagcatagttatcgaaaacaagaaatcaacattggcacaattcaattaactagaggccatattcagatttcacgatttcttttagttgttatttttccttagtgtctagtctatgacagttcctcagtctttacctgtcatttgtgaccctttcttgtctttgtgaccttgacacttttgaagaatactggtcagttattttgggttcggtgttttttgtttttaaaaatagacacgtggtcttgctatgttgcctaggctggtctcgaactcc

SEQ ID NO: 385447 - DNA, 347 bp, Homo sapiens
tatctagacattttaccgagccatcaaagggatgaccaaatctgtcctcttctctccttaccactcccctccccactcttcctcttcccttctctcatttatttattatctatttgtctatctatccatctgtatgtctaacctcaatcagtcatctgtgagtcatgtctttgtctactttgttttgttttgatggaatggcagcaaaggatgataagagagcagtagttgtctgaagtctcaaatatcactggagtttgttcaaagtgttgcgtgaaggtagttcagtcatacctagcttgtattatttgttgaaatcgtggtcaaggaagaaaaggacttttctg

SEQ ID NO: 385448 - DNA, 900 bp, Homo sapiens
gggagacatggttcatttcatagcatatgggaaaggctgagggaagagcaggtttaggagatgagtacaagagctcagggcctctgatctggacatgatcttcatcagatcacactccagctatgacagtgattgtccaagctccattccctgtctctcctcccagactaggacatcttcttcttctgggttcccacatcattctaggttccagtggcacttttcttacttgatgcaaggatgtgggatttgggaacatggtttcatctctccaaccacaataccagcaactttcaggcaactgtctgatgccacacagcaaatctgccccagggcagagggggcagtaggtaggcagtaactgggagcacaggcagagaggctggcatgaagaaacctgcccatgggaagcagggccaatgccacctaggctgggttcaaggatgtggccaaaaaagcagaacttccgacaaacttggaaaactagtcaggttactgaaacaggaacttaagcttctcagcaaattagacgtaacatataaactggaaaaatcagtgaacttgaagatagagcaacagaaatgatctaaagaaatataaagagagaaaagaaggctgggggacagaacagagcacccaagcattgtgagacaacataaaatggtctaacatatgtatagttgggatctcattaagaaaagagagcagagtagaactatttgaagagataatgaccaagaacttgttaaagaaaggcaacataccacaagtccaagatactcagagaaccttaatcagaatttttaaaaaaatccacctagatgtgtcatgatcaaactgctaaaaaccaaagataaattctgaagacaaccaaggaaaacagaatgccggtgtccccct

SEQ ID NO: 385449 - DNA, 412 bp, Homo sapiens
acattctttccagatatctaatataacaaactgaaacttataattagttattaaattttcacatattaactttaggataggaaaccactacttaatatattttaacattttactcctggctattaacatttacaacatgggttacaaataggtatcatacctctaaaggaagtaacagaaacaattagtaatctctctctgttctttttcatagagatttcaaaataaatctaaggttatgcataggatgtgggtttttctccgggagtagtattacagaaggtttgtggtattagaagggtcatgacacaatgcaagttgcttagtctcaaacacaagcgtaaagctttcattttaagaatattttatattatacccacagatgaaaaatctaacaaaaagagacacggtg

SEQ ID NO: 385450 - DNA, 475 bp, Homo sapiens
ttgataatgacctgggaaagagggccgagtgggatgagggtgggagtaggaaagaaacattcggcccacacagtgttcatatcttctcttgtttttgtatctgtggcaactgcagattaaatgaattaggttattcttttccattgccttctaccaaatagaagtacttatttaagccttgcagatttttttcctgctgagtgaagcctgaactgagcccatgaaaggtgatctctccaaagcaagggctcctgtttccttccttccatcctgctatctcattcaagtgaaattcctgccatggcatttatcctgagctttgtcacacaggattactgtgatggtccttactatgaatggagtgttaaggtgttttctttagctcgagataaaaaccagttttaggaatgaattctcttttgctgtgaaaaacatgttctaagggaacaaacctcgcctcatttccatttttaca

SEQ ID NO: 385451 - DNA, 1165 bp, Homo sapiens
agaaagatcaatgacaaaatatctgtcagccaggccacaaacaggtgtaaaattatgaaaggagtggttggatgtgccaagtttggtaaagtggtgactgcatctgagaaagaggctgtgaggctgaactcttggtggcttccttctgtaacttccagagggagtcttcaacacaggccccgtgctcgtaggaatacggtagcacctatgtaggaagtgcgtggagttttctgtcttctttctgtgtgatttttggcctttttatcagcacttctcccctcccaggagcctggggatgccaaacatccagaatgtgatgggacaagatgggggcaggggcctcacctccctgcagaggtccggccaggtctccttgtccctggacaatctcctgagcctctctgcttggtggagcaggcacctgtgtgcagaattcccactgtggccagcacgaggaagtcttttctagtgaaaatgtgtcttgtggtcaggaataattatcctttcccctgtagccaccaaggagggcaaatagagaaaggtaacctaattgaaggattggtcatgtgaaaagggctacatttgggaagctgggaaaggcctccaggcttctagagcagctagcttgggctggattctcacacccaggctgccccttggattgttctacccaagcttttccctggggtctgggctcactccataaggtaaggtgccttttaccttatggtccttctttagcaggtaacaaaggagcatcaggggcaggctgccctggtggcatcacactggctagtgaggccgtgaatatcttgtcccccagcagggccgacagtttctatcacagaaaacagtgtgttcagtggtgaaaatcgttgcatgcatgttttcatctgagcgtgtccttctcccatactccctatcagccagccctgcctgtagctgctgtatggtgattgcacttggacatcagtccaatgactgcaagtcggcctggattttcacttgcagaggctacagctgcattgtcaggtctcccagccctgcagagagctccctccactggttagcagtgtgttgtgttttccattcatttcagaagagctacattgtgtcactggacatttttaaaaactgtgatttttaataaaaatttaaaatttgc

SEQ ID NO: 385452 - DNA, 362 bp, Homo sapiens
cccaccttggagaaccagcagatacctactctctgtgaagacttccctaaaatttcttggttaagggtgatttatctgaccctttcctttcctttcctttcctctcctttctcctttttcctttcctctcctttctcctttttcctttccattcctttcatttctcctttcctttcctttttcctttcctttctcccttcctttcctttttcctttttctttgttgagacagggtctcgctctgtcgcccaggctggagtgcagtggccccgtcttggctcactgcaacctctaattgatcctcccacctcagcctcctgagtggctgggactgcatgcgtgtgctgacacgcccggctaat

SEQ ID NO: 385453 - DNA, 139 bp, Homo sapiens
ggctctaaaccaggggagcgggagagacgcagtgtaggacagtatcggggaagagcaggcctgtgtcttctccggtggcctcagggaatgagggagaaggaaggtgctggggaggctggcaaggcctggaggatgcagg

SEQ ID NO: 385454 - DNA, 277 bp, Homo sapiens
gggaggggaggggaatggggggaagggaaagagagagaaaagaaaggaaaaaagaactattattaccgatgaagtaaagattaagaaggtaagagaatacgatgtaaatgtttaagttaataaatttgaaaatttaaatgaaatggacaaattactggaaaagtattacttagctaaatggaattgaggaaaattataattttccaacactttttccgaaagtgtttaaaattcttctataaataaaatgccaagtccagatgattttacaagtgaa

SEQ ID NO: 385455 - DNA, 409 bp, Homo sapiens
ctgcctcagcctcctgagtagctgggattacaggtgtgtgccaccaagcctggctaattttttatatttttagtagataccggggtttcatcatgttggccaggctggtctcgaactcctgacctccggtgatccgcctgccttggcctcccaaagtgcagggattacaggcatgagccaccgtgcccagccaactctgcttttaaggggcttattgactagatcaggctcacccagataatctcccttctttaaggtcaaccaattgatcagtaacaccattaattacctatgtagcacacattaattagatttgaaaatctctgtcatgatcacaggaatcaggtcgacatccatggacctgcatcaataacaatatgattaataacagcagctgtcatgaatcaag

SEQ ID NO: 385456 - DNA, 1167 bp, Homo sapiens
gaacatgtaaaaagggaaaataatcaatggtagctttttaataggaacaagagactgactttaccttatatatgactgcaatacagcaaggagttctgcaacaggaaattccagaactatgtcacacatgctaagcaaatgaataaattatattaagtaactaatcaggccaggcaagtaatgtccaaagaatgtcacagctataaatgagagaataatgagcagaatataagaatatagggtgaatgaatgaattacaaaaaccagctgttattttaaaatagtctaatgtgtatatacaacaaatagaatatatatgaaaattaaaaaaacaaggcaagaagttttttttaaaattttggtccatctagtcttacattgtaagaatgtagtaccttgtgaaaaataacgatccatcagtaaaaatttaaaaaacgattcactgtgaactagagatttagaattcaaactgtccaagatgaaaatgtcatctcaagatccacttatgagtaattgttaaagtttttggaattttcatgctaggaggtgaaatctgttgcaaagctgaatttataaggttaggggggactgtccattaagaatacttcttctttacacagagactaatggcttctttgatggtccaaagcataggcacctgaattctgaaacattatccatcacaaatctccagcattcttcagaggaaacacacaaggcaactttcagcttctttgattacaaatgccaaagttttttttcaggctagtagatttaatgtttcatcccacattttagccctgctacaagaaaatatcttttatttcaatacaaaccagtgatttgcaagcctggctggtaatcagaatcaccttttaaaaattataaattgccagccaggtgcggtggctcacgcctgtaatcccagcactttgggaggctgaggcaggcagatcacgaggtcaggggatcaagaccatcctggctaacacggttaaaccccgtctctactaagacatacaaaaaaattagctgggcgtggtggcaggaacctggtagtcccagcaggagaatagcatgaacccgggaggcagagcttgcaataagccgagatcgcgccactgcactccagcctgggcgacagagcgagactccgtctcaaaaaaa

SEQ ID NO: 385457 - DNA, 356 bp, Homo sapiens
tcacttctcttggaattactgtatacctttttatgattccattttatctccttgttggtttattagctctaactctattgcggcccctgggtgaactttaaggaatattccctctccttctctggcctcagatagttttctcacacatatgcactaaccagtacttagttaaacactagggtaggacctcctgggagatagccagagtgttctctctgtgcagctttcttctttctggtaatctgccctgcaaacccaaaccactgtggcctcttcagattccaggtctggctccccagttcagaggacctccagaatatgcctgggctgctcctcctggggctggtatctggaaa

SEQ ID NO: 385458 - DNA, 719 bp, Homo sapiens
ctccagcctgggtgacaaagcaagactttgtctcaggaaaaagaaaaaagttactaaaggaaatcatctgaaatgtaaagactatttgtaaatatgttcattcctgtgtttttcttaatagcaaagatttgggtatgccctcaatgcctattaattggggacttgctaagtaaattctctagatactgatattatatagtcatttacaattatattaatgaaaaagattaatgacatgggaaggattgtaatgtaacattaaaggagaacgtaggactaaaaaactttttctacaccgggaactcaaccatgggaaaattctacacacgcatgcacacatacatacaactgggaggaaatattccaaaatactagtactgactatcttggatagtcagtgaatttatagatgacttctgttttcttctttgtatttctattttactacatcttctaaattttctacaataagaaaatactttctcaatcagaaataaggtacttaaaagaaatgtatcacacctttctagattgaagtcattcatatttatattacttatcctagcatatataggtatgtatatggtttagacatcagtacaaaaagaaacctcatacccgttagtcatcactccccatttgtccccagcccctggcaaccactaatctagtttctgcctctgtgaatttgttcaggctgttttcttgaattttcagtc

SEQ ID NO: 385459 - DNA, 839 bp, Homo sapiens
tcgtctataaataagtttgctaacacaaagaactgagtcttactcagcatataacttggaggaaagtgtgtgggtgttctagaggacaacctaccagtcttgagcatttgtccttaccttagataataacagtataacttttggagacagtgatgctcgccagtattccaaagctcctgtacatttctcagtcttttctgctgttaggttggggacatttgactaacagtaaccaatggaacttgcaagtaggtgcatggtggtgtatgagatgctggaaactccataatctgagtcatttgaataactgtggaattaagtctccttattgagttaagccactgagatctactttttactgtgggttaagatctactttttactgtgggttaagatcttattgcaacataaccttgcccttcctgattatcatgaaatgtttaacttaaggaagaagagagtccttaagttaatagggtgaatcaactgagttaatggaagttaagagatgagtttttaaaacaattaaaaaaataaaaagaaaactttatttgaacaagaaaaagttaaggatgttacacttcaaaagaattttgaactcattaattatttttaattgacaaatcactgtggatttacagggtactgtatgatttttttgatacatgtgattaaaccaggctaattaacatatccatcacttcactttttggtggtatgaatatttaaaatctctctctgcaattttcaaatatacaatacagttggccctctatatctgtgggtttcacatcctctcattcattcaactgtgggttgaaaatatttagaaaaaaaaa

SEQ ID NO: 385460 - DNA, 658 bp, Homo sapiens
caaataatgaaacatctgaaaaagggaccagtatactgtaaaagtagaatatagaagttctttatgtactcagctggagaaagcaccaagatacgttgtttgtttgttgtttgtttttgtttttgagacggagtctcgctctgtctcccaggatggagtgcagtgatgtgatcttggctcactacaacctccacctcccgggttcaagcgattcttctgcctcagcctcccgagtaatgggattacaggcaagtgccaccacacctggctaattttgtattttttgcagagacagggtttcaccatgttggccagtctggtttcgaactcctgacctcaagtgatccacccaccttggcctcccaaagtgctgggattgcatgcatgagccactgcacccagccaagatacattgttgagtgaaaaaaaaatttcaagatatatagaacagtgtaaacatgcatccaattgtgtttttcaaggagaaaataatgtatacttgtattggtttacgtatgaaacaaaaatatctagaaggatgaataaaaatctagtaactgattatacactagggcaaattggaaacaaatgggagacttcatggatgacttttttatatttgtaaagtgaagtgatgtattacttattcaacaattaa

SEQ ID NO: 385461 - DNA, 486 bp, Homo sapiens
aagggatatatttacataattcaaagaaaaattgtatggaaaggtttactgaagagaaatcatgctctttccccaccccagcctcaccatctatcctatataggtgaccactttgattaatttcttttgcatctttccattatttcttgtgcacatatgatcatggtcactccccctggcacctcaagcatggtgcaatatgtagatagactatagacacagatatacttaccccactctcttgcacaaaaggtagcatattatatattcttttctgcaccatgctattttcttcccttaacaatatagcctggccatctctctgcatcagtaaaaagagatcttcctcttttttacatgactatataatattccattgtatggatagattatagttcttttagtctgttccctgttgctggacctttgggtcatttaaaatctttcgctattggccgggtgcctcacacctgtaatcccagcact

SEQ ID NO: 385462 - DNA, 184 bp, Homo sapiens
gtcatcaacctgagggtatcatgctgtcatctcactaaagcaacacccaggcgggtgacatcccagtattcagaacaaattcctgtcatctgggacatggttgggccagtttaatctgtgtcacctgaccaactcatgcagaactgttacctcatgcttggagatgtaggaacaggaagagttg

SEQ ID NO: 385463 - DNA, 94 bp, Homo sapiens
gtacaactggtcagggagaaccaatggcagacatgtgctatatcccaacacaccttgactcttgctctcaccggaagctcagcttagggaaagg

SEQ ID NO: 385464 - DNA, 289 bp, Homo sapiens
cactgcacacctgcggttggggacaggacatgactaagcacagagctttcttcttttgaggccacgcatgtggtgcagagcgggaccacctgcatccacacagcccggcgcacctgctcctacttctgcttagcgtgtgagcagcttggtgaccagggtctccaccagggggcaggccaggaccggcttacagcactttctaggggttctctggtcccgggctgggacacatacagggcttagtaaagttcatagatggtagctaggcagccccaggccccaggtgaca

SEQ ID NO: 385465 - DNA, 194 bp, Homo sapiens
cccccccccccccccccccttaggaggtcgagatggaaggatcgcttaagcccgggagttcaaaactagcctgggcaacttggtaagacctccatcgctacaaaaaaaatgtttttttctttttcttttgagacggagtcttgctctgtcacccaggctggagtgcaatggcacgatctcggctcactgcaacc

SEQ ID NO: 385466 - DNA, 468 bp, Homo sapiens
ctcctctttccatgctggtcggcccaagatttgaacattgagctcagtgcacaagaaatactcaatcccgctcaatcacggggcccatcctgtaccatgaacatcaaaccagagggaaccagggagcagggtcccatgcagggagctggccacattcccttcccaaagggtggcagcccattgatattgacttgcctttgttccacctctgttgaggaggaaaatccttgtaaaacctgactactgtgtgactggtatacgtatttcatccttttaagaaaaagtctaaggctcctgggttgaaagcagcctagtcatttacgtgtcgtagctagatgcattttaagtgcatttaaacattatcttgaatttgctacatgtaaacctcaaataactctagtgggtggcaattaattaaacatcggtatccatcccttcccttcctcggtcttccctctctgtggcctt

SEQ ID NO: 385467 - DNA, 423 bp, Homo sapiens
cttgggtacagatgagggatccagagggtagagggtgagaaacttgcccaaggtcacacagtcatgcagctagtaagagatggtgctgggattcaaacctgtggtctcagaactcacccatgttcctctctctctgcagtatagtcgggggaaaagaaaagaccagaagatgcccacagaccaaaaggcacagatacagtgccaaaataagcccaggacaggcaggtgggaccttgccatggttatttgtcctaaccttaccatgaggttaggaccagcaacagctgaaggggcgagagtgctggagagagaggtcacaggggtggacgcccattcctgcctcctgggacaggcgatcttccaaacttcccatgcatagccttatttacccctcccaaaaccctgtaaaaggtaggtgtggcc

SEQ ID NO: 385468 - DNA, 304 bp, Homo sapiens
gggtcctagcacccagacccaagcgtgccacggcgtcagccctggggacagagtctccgcgcttcttagacagacctgacttcttcgattatccggactcagaccaagccaggctgctggctgtggcccagtttattggagagaaacccatcgtgttcattaactcagggacagccaagcgttaaggggaaaatgcagagcaaaaggagccaaggacaaagaaagttccatgtacttggagagtaaacaaaaacgagaaatggatgaatagacaagacagcatttttcttctggagtcagcaca

SEQ ID NO: 385469 - DNA, 474 bp, Homo sapiens
gggtcctagcacccagacccaagcgtgccacggcgtcagccctggggacagagtctccgcgcttcttagacagacctgacttcttcgattatccggactcagaccaagccaggctgctggctgtggcccagtttattggagagaaacccatcgtgttcattaactcaggttccagccccgggctcttccatcacatcctggtgggcttgctggtggtggcgttcttctttctccttttccagttctgcacccacattatagtcgggggaaaagaaaagaccagaagatgcccacagaccaaaaggcacagatacagtgccaaaataagcccaggacagggacagccaagcgttaaggggaaaatgcagagcaaaaggagccaaggacaaagaaagttccatgtacttggagagtaaacaaaaacgagaaatggatgaatagacaagacagcatttttcttctggagtcagcaca

SEQ ID NO: 385470 - DNA, 188 bp, Homo sapiens
atggccagggtcagtgtgacctccatttcccattgtgaaatccgagctggttttgttggacagttgagagatgagaggttccctattaatacacatatccacatgccaagacttggacataaaagctaagaatgtggcatgggggaggaggtaggataagtgacagcattctgaacttagagtcccct

SEQ ID NO: 385471 - DNA, 2823 bp, Homo sapiens
gcgattcgagcagtcgcgtcaagcaggctattccgggtttgtggctgcttggctccacacgtgggccgccgtaggtattccgaccggtaattcctcctattggtgtgcagcagccacattgaaggatagagtggcagcagaggccaaggatcgtgagttgatggagtttgctgctgaaaatgaagggaagtctgggggaggtctccacagcgtagctgagggggtgcggctaagtccagagcctggcagggagggagtaagggacttagcaggggcggaggagttcggcggcggagaggaggggacagggctgacagggataaaggagataggggatggagaggaaggaagtggacaaaggccagaggaaataccgatggacctaacggtagtgaagcaggaaattatagactggccaggtacagaaggcaggttggctggccagtgggtagaacaggaggtggaggataggcctgaggtgaaggatgagaacgcaggcgtattggaggtgaagcaggagacggatagtagtttagtggtaaaagaagcgaaggtgggtgaaccagaggtaaaggaagagaaggtaaaggaagaggtaatggactggtcagaagtgaaggaagagaaggataacttggagataaaacaggaggagaagtttgttggtcaatgcataaaagaggaattgatgcatggagagtgtgtaaaagaagagaaggatttcctgaagaaagaaatcgtggatgatacaaaggtgaaagaagagcctccgataaatcacccggtgggctgcaagcggaaactggccatgtcaaggtgtgagacttgtggtacagaagaagcaaagtacagatgtccacgttgtatgcgatattcctgcagtttgccctgtgtaaagaaacacaaagcagaactgacatgtaatggagttcgagataaaactgcatacatttcaatacaacagtttactgaaatgaatctcctaagtgattatcgatttttggaagatgtggcaagaacagcggaccatatttctagagatgcttttttgaagagaccaataagcaataaatatatgtactttatgaaaaatcgtgcccggaggcaaggtattaacttaaaacttctacccaatggattcaccaagaggaaggagaattcaaccttttttgataagaaaaaacaacagttttgttggcatgtgaagctccagtttcctcaaagtcaagctgagtacatagaaaaaagagtaccagatgataaaactattaatgaaatcctaaaaccttacattgatcctgaaaagtctgatcctgtaattcgtcaaaggttgaaagcctacattcgctctcagactggggttcagattttaatgaagattgaatatatgcagcaaaatttagtaagatattatgaactagatccttataaaagtctcctagacaatttgaggaacaaagtgatcattgagtatccaacattacatgtggtattgaaaggatccaataatgacatgaaagttcttcaccaagtgaagagtgaatctaccaagaacgttggcaatgaaaattgagcattttttctggaagaagaaagtgaaaacttccagacaactgcagcagactctgcattgatgggctgttggctgattggggtattgtcaatgggtgattggaattttttctttgtatgaaaaataagcttaactcttttaaaaaatgtattttataacctcttgaattaattgacttgtaagacccatttattcatattaagaactctcctttgcacttgatcagcatagtacttattaggccctggctttttaatatgcttaattgcttaattccataaactgaaaactttttttttcttttttctttctttttttgagatggggtcttggagtgcaagtggtatgagcatagcttcctcaaattcctgggctcgaatggtcctctcactgcagcctcccaacaggctggtaccaccacactcagctaagttttttgttgttgtttttttttggtagagacagggttgcgctctttcgcccaggctggtctcaaatttgtggcctcaagcaatccttccacctcagactccaaagcattgggattacaggcatcagccaccacacctggccttgaacattttttatttgttaatttcatgcgtgacgaaacccaaggatcacccatgtcaaccacaaagttggcattccctttagtagaacctcactaaacggaaaggctgtacaacgcaccgtctagccacaggagaactaatcttctatcagttgccctttcttctttggagtttttatgtaacttacccttgtgagacaagttttctacttgagaaactcctagtacaatgtcttatactagaagcctggataaatactattaactactgtttcttatattcacttcagaaaatcagtggctccacattgtttgagccattagtgataacaaatttggatctacttactcaagtcttatgaattctgtgcctttcatcacattcctagcccactctcatcattactgcagaagggtgttgtgatgaccagttttatactgtgttttgatatgtctagcaataacttaaagaaaaaaaaacctgggaaatcttcaacatgttattggaacatatatgtatgtattaatgtatatacatggcttaacttatacgttatggcagctctgtatacagtttgatctcatgtactgaaaaaaaattcttaattttattggagtttataccactgtgaaactgcaatatgactgtaagagagtaaaaagattgttacatcta

SEQ ID NO: 385472 - DNA, 494 bp, Homo sapiens
tttcgagcggccgcccgggcaggtacgcgggaaggaagtaactactgaattgtcatcacctttaaaaaatttttaatgtaaaatactctcatatatttatctattagtaattttgaatattaagagtgtttcctggttttttgtttttttttattaataagataatattatgaactagatccttataaaagtctcctagacaatttgaggaacaaagtgatcattgagtatccaacattacatgtggtattgaaaggatccaataatgacatgaaagttcttcaccaaggtaagtgtaaatttgtttctgtaatgcttagaatagctttagagaaaccaaagcaaaatatgtccacccttatttctttatatgtgttttcccactatatttacacacttacaggatctactgtatagctagttaatgtgaagaaccaggtaaatgcaatgctgctactcttctgtttctaagagcgtataatcttataaaacca

SEQ ID NO: 385473 - DNA, 3726 bp, Homo sapiens
  misc_feature (302)..(302): n is a, c, g, or t
  misc_feature (410)..(410): n is a, c, g, or t
  misc_feature (624)..(624): n is a, c, g, or t
tttaatattacaaaaagaaatcagatacctaaaacattaaatatgcactgaaaattatttaccaaaaactgaaacaagtaaaaaacattcccttatttgaaaaatgcctttcattagaagccttatgatttagctaaaatgcacagaagataagttattgccaagtgcttgtaggatgccacttgaaaagttcctgtttgagagtccaggtcttatttcctcccaagaaaaatttagttatcaccattttatattttactttgtaagttaatcttttacttgggtatctgatataatctcanttttcttttttatataattgctactaactttgaaaaaaacactgcttatttcaaagagaaataatgtttaaaagatgtgaagcatttaatccttgaatgctggaaacncttttaaagtattgtaagtacatctgtattacattacacacagggaaaagaatgtatgaattctatgatctgtgggcactaaggtggctggtttagaaaaacagtattttgcatttcaagtttcttttcaacataaagaatattctgcaattttaaaaagaataattccaggctggggtgtgtggtcagggaagcataagtaaagttttggttntacagttgttctctaactttagtaagcttggctctgcattttgttaagcacttttatatttttcctgatttgaaaacgattgcgtgagacaaactcagaacatggagaaatcactacatcacatttcttaatgagtgtcctgcatgtcttactcagctatgattatggtgcagataattttttactaattaagaaataccaaagtttgtgaatgatttactcttaaaattacagcaaatttaaatgtatcccaatgataacctcactcttgatcacttgtgttccagtgtgcttttttgagcaggagataaaaggatggagttacagccattaggctggatctcatgagatatgtgttttgcatgtgaatatcacctgtcattggtagagatgaataaaaatgctggagaacttctgcactagactggttgacatgttctcagctttttcttctttgacatgaaatgacattaacatgccaacatattctcatatgtacccgctagtgagctagctagaattccacccctttcactcccaccccagaaagcaagcaagaatgaatgttctggggatgcattttcagccacctcagacttatttttttaaagtaatgatttgagaatttcatgctttaatgaccattagcatctaattacctgtgacacatttggcagctatgtcacgataaactctgtatttcttaaattttacatggcaatataaatttctggaaaccagttataattagaataattgacttttttccaaaagccaattttgtaaccagttattttattgccatgttactagaaattgtcataaggtgattggttgtctttaaggctcaaaataaatatatttgaggaattcaaatagttagctcatcattcttttattcaagaaaaataacaacataaatattattattattttatttttttatttttttgaggcagagtttcactcttcttgcccaggctggagtgcagtggcacgatcttggcttactgcagcctccgcctcctggattcaagcgattctcccacctcagcctcccgagtagctgtgattacaggcatgtgccaccatgccgagctaattttgtatttttagtagagatggggattctccatgttgctcacgcctgtaatcccagcactttgggaggccaaggcaggcagattacgaggtcaggagatcgagaccatcctagctaacactgtgaaaccccgtctctactaaaaatacaaaaaaaattagccaggcatggtggcacgcacctatagtcccagctacttgggaggctgaggcaggagaatcgcttgagcctgggagatggaggttgcagtgagccgagattgtgccactgcactccagcctgggcaacaaagcgagactccatatcaaaaaaagaaaaagaaaattagtaacttgttttagagctttcctaatgtcagaatatttgatttttttttatttagttttagaacctctataataatagctcttgtacctgcctttcttagaaggtattaaacttactatgctataaggaagtaactactgaattgtcatcacctttaaaaaatttttaatgtaaaatactctcatatatttatctattagtaattttgaatattaagagtgtttcctggttttttgtttttttttattaataagataatattatgaactagatccttataaaagtctcctagacaatttgaggaacaaagtgatcattgagtatccaacattacatgtggtattgaaaggatccaataatgacatgaaagttcttcaccaagtgaagagtgaatctaccaagaacgttggcaatgaaaattgagcattttttctggaagaagaaagtgaaaacttccagacaactgcagcagactctgcattgatgggctgttggctgattggggtattgtcaatgggtgattggaattttttctttgtatgaaaaataagcttaactcttttaaaaaatgtattttataacctcttgaattaattgacttgtaagacccatttattcatattaagaactctcctttgcacttgatcagcatagtacttattaggccctggctttttaatatgcttaattgcttaattccataaactgaaaactttttttttcttttttctttctttttttgagatggggtcttggagtgcaagtggtatgagcatagcttcctcaaattcctgggctcgaatggtcctctcactgcagcctcccaacaggctggtaccaccacactcagctaagttttttgttgttgtttttttttggtagagacagggttgcgctctttcgcccaggctggtctcaaatttgtggcctcaagcaatccttccacctcagactccaaagcattgggattacaggcatcagccaccacacctggccttgaacattttttatttgttaatttcatgcgtgacgaaacccaaggatcacccatgtcaaccacaaagttggcattccctttagtagaacctcactaaacggaaaggctgtacaacgcaccgtctagccacaggagaactaatcttctatcagttgccctttcttctttggagtttttatgtaacttacccttgtgagacaagttttctacttgagaaactcctagtacaatgtcttatactagaagcctggataaatactattaactactgtttcttatattcacttcagaaaatcagtggctccacattgtttgagccattagtgataacaaatttggatctacttactcaagtcttatgaattctgtgcctttcatcacattcctagcccactctcatcattactgcagaagggtgttgtgatgaccagttttatactgtgttttgatatgtctagcaataacttaaagaaaaaaaaacctgggaaatcttcaacatgttattggaacatatatgtatgtattaatgtatatacatggcttaacttatacgttatggcagctctgtatacagtttgatctcatgtactgaaaaaaaattcttaattttattggagtttataccactgtgaaactgcaatatgactgtaagagagtaaaaagattgttacatcta

SEQ ID NO: 385474 - DNA, 2698 bp, Homo sapiens
gcgattcgagcagtcgcgtcaagcaggctattccgggtttgtggctgcttggctccacacgtgggccgccgtaggtattccgaccggtaattcctcctattggtgtgcagcagccacattgaaggatagagtggcagcagaggccaaggatcgtgagttgatggagtttgctgctgaaaatgaagggaagtctgggggaggtctccacagcgtagctgagggggtgcggctaagtccagagcctggcagggagggagtaagggacttagcaggggcggaggagttcggcggcggagaggaggggacagggctgacagggataaaggagataggggatggagaggaaggaagtggacaaaggccagaggaaataccgatggacctaacggtagtgaagcaggaaattatagactggccaggtacagaaggcaggttggctggccagtgggtagaacaggaggtggaggataggcctgaggtgaaggatgagaacgcaggcgtattggaggtgaagcaggagacggatagtagtttagtggtaaaagaagcgaaggtgggtgaaccagaggtaaaggaagagaaggtaaaggaagaggtaatggactggtcagaagtgaaggaagagaaggataacttggagataaaacaggaggagaagtttgttggtcaatgcataaaagaggaattgatgcatggagagtgtgtaaaagaagagaaggatttcctgaagaaagaaatcgtggatgatacaaaggtgaaagaagagcctccgataaatcacccggtgggctgcaagcggaaactggccatgtcaaggtgtgagacttgtggtacagaagaagcaaagtacagatgtccacgttgtatgcgatattcctgcagtttgccctgtgtaaagaaacacaaagcagaactgacatgtaatggagttcgagataaaactgcatacatttcaatacaacagtttactgaaatgaatctcctaagtgattatcgatttttggaagatgtggcaagaacagcggaccatatttctagagatgcttttttgaagagaccaataagcaataaatatatgtactttatgaaaaatcgtgcccggaggcaaggtattaacttaaaacttctacccaatggattcaccaagaggaaggagaattcaaccttttttgataagaaaaaacaacagttttgttggcatgtgaagctccagtttcctcaaagtcaagctgagtacatagaaaaaagagtaccagatgataaaactattaatgaaatcctaaaaccttacattgatcctgaaaagtctgatcctgtaattcgtcaaaggttgaaagcctacattcgctctcagactggggttcagattttaatgaagattgaatatatgcagcaaaatttagtaagtgaagagtgaatctaccaagaacgttggcaatgaaaattgagcattttttctggaagaagaaagtgaaaacttccagacaactgcagcagactctgcattgatgggctgttggctgattggggtattgtcaatgggtgattggaattttttctttgtatgaaaaataagcttaactcttttaaaaaatgtattttataacctcttgaattaattgacttgtaagacccatttattcatattaagaactctcctttgcacttgatcagcatagtacttattaggccctggctttttaatatgcttaattgcttaattccataaactgaaaactttttttttcttttttctttctttttttgagatggggtcttggagtgcaagtggtatgagcatagcttcctcaaattcctgggctcgaatggtcctctcactgcagcctcccaacaggctggtaccaccacactcagctaagttttttgttgttgtttttttttggtagagacagggttgcgctctttcgcccaggctggtctcaaatttgtggcctcaagcaatccttccacctcagactccaaagcattgggattacaggcatcagccaccacacctggccttgaacattttttatttgttaatttcatgcgtgacgaaacccaaggatcacccatgtcaaccacaaagttggcattccctttagtagaacctcactaaacggaaaggctgtacaacgcaccgtctagccacaggagaactaatcttctatcagttgccctttcttctttggagtttttatgtaacttacccttgtgagacaagttttctacttgagaaactcctagtacaatgtcttatactagaagcctggataaatactattaactactgtttcttatattcacttcagaaaatcagtggctccacattgtttgagccattagtgataacaaatttggatctacttactcaagtcttatgaattctgtgcctttcatcacattcctagcccactctcatcattactgcagaagggtgttgtgatgaccagttttatactgtgttttgatatgtctagcaataacttaaagaaaaaaaaacctgggaaatcttcaacatgttattggaacatatatgtatgtattaatgtatatacatggcttaacttatacgttatggcagctctgtatacagtttgatctcatgtactgaaaaaaaattcttaattttattggagtttataccactgtgaaactgcaatatgactgtaagagagtaaaaagattgttacatcta

SEQ ID NO: 385475 - DNA, 3319 bp, Homo sapiens
  misc_feature (302)..(302): n is a, c, g, or t
  misc_feature (410)..(410): n is a, c, g, or t
  misc_feature (624)..(624): n is a, c, g, or t
tttaatattacaaaaagaaatcagatacctaaaacattaaatatgcactgaaaattatttaccaaaaactgaaacaagtaaaaaacattcccttatttgaaaaatgcctttcattagaagccttatgatttagctaaaatgcacagaagataagttattgccaagtgcttgtaggatgccacttgaaaagttcctgtttgagagtccaggtcttatttcctcccaagaaaaatttagttatcaccattttatattttactttgtaagttaatcttttacttgggtatctgatataatctcanttttcttttttatataattgctactaactttgaaaaaaacactgcttatttcaaagagaaataatgtttaaaagatgtgaagcatttaatccttgaatgctggaaacncttttaaagtattgtaagtacatctgtattacattacacacagggaaaagaatgtatgaattctatgatctgtgggcactaaggtggctggtttagaaaaacagtattttgcatttcaagtttcttttcaacataaagaatattctgcaattttaaaaagaataattccaggctggggtgtgtggtcagggaagcataagtaaagttttggttntacagttgttctctaactttagtaagcttggctctgcattttgttaagcacttttatatttttcctgatttgaaaacgattgcgtgagacaaactcagaacatggagaaatcactacatcacatttcttaatgagtgtcctgcatgtcttactcagctatgattatggtgcagataattttttactaattaagaaataccaaagtttgtgaatgatttactcttaaaattacagcaaatttaaatgtatcccaatgataacctcactcttgatcacttgtgttccagtgtgcttttttgagcaggagataaaaggatggagttacagccattaggctggatctcatgagatatgtgttttgcatgtgaatatcacctgtcattggtagagatgaataaaaatgctggagaacttctgcactagactggttgacatgttctcagctttttcttctttgacatgaaatgacattaacatgccaacatattctcatatgtacccgctagtgagctagctagaattccacccctttcactcccaccccagaaagcaagcaagaatgaatgttctggggatgcattttcagccacctcagacttatttttttaaagtaatgatttgagaatttcatgctttaatgaccattagcatctaattacctgtgacacatttggcagctatgtcacgataaactctgtatttcttaaattttacatggcaatataaatttctggaaaccagttataattagaataattgacttttttccaaaagccaattttgtaaccagttattttattgccatgttactagaaattgtcataaggtgattggttgtctttaaggctcaaaataaatatatttgaggaattcaaatagttagctcatcattcttttattcaagaaaaataacaacataaatattattattattttatttttttatttttttgaggcagagtttcacttccagcctgggcaacaaagcgagactccatatcaaaaaaagaaaaagaaaattagtaacttgttttagagctttcctaatgtcagaatatttgatttttttttatttagttttagaacctctataataatagctcttgtacctgcctttcttagaaggtattaaacttactatgctataaggaagtaactactgaattgtcatcacctttaaaaaatttttaatgtaaaatactctcatatatttatctattagtaattttgaatattaagagtgtttcctggttttttgtttttttttattaataagataatattatgaactagatccttataaaagtctcctagacaatttgaggaacaaagtgatcattgagtatccaacattacatgtggtattgaaaggatccaataatgacatgaaagttcttcaccaagtgaagagtgaatctaccaagaacgttggcaatgaaaattgagcattttttctggaagaagaaagtgaaaacttccagacaactgcagcagactctgcattgatgggctgttggctgattggggtattgtcaatgggtgattggaattttttctttgtatgaaaaataagcttaactcttttaaaaaatgtattttataacctcttgaattaattgacttgtaagacccatttattcatattaagaactctcctttgcacttgatcagcatagtacttattaggccctggctttttaatatgcttaattgcttaattccataaactgaaaactttttttttcttttttctttctttttttgagatggggtcttggagtgcaagtggtatgagcatagcttcctcaaattcctgggctcgaatggtcctctcactgcagcctcccaacaggctggtaccaccacactcagctaagttttttgttgttgtttttttttggtagagacagggttgcgctctttcgcccaggctggtctcaaatttgtggcctcaagcaatccttccacctcagactccaaagcattgggattacaggcatcagccaccacacctggccttgaacattttttatttgttaatttcatgcgtgacgaaacccaaggatcacccatgtcaaccacaaagttggcattccctttagtagaacctcactaaacggaaaggctgtacaacgcaccgtctagccacaggagaactaatcttctatcagttgccctttcttctttggagtttttatgtaacttacccttgtgagacaagttttctacttgagaaactcctagtacaatgtcttatactagaagcctggataaatactattaactactgtttcttatattcacttcagaaaatcagtggctccacattgtttgagccattagtgataacaaatttggatctacttactcaagtcttatgaattctgtgcctttcatcacattcctagcccactctcatcattactgcagaagggtgttgtgatgaccagttttatactgtgttttgatatgtctagcaataacttaaagaaaaaaaaacctgggaaatcttcaacatgttattggaacatatatgtatgtattaatgtatatacatggcttaacttatacgttatggcagctctgtatacagtttgatctcatgtactgaaaaaaaattcttaattttattggagtttataccactgtgaaactgcaatatgactgtaagagagtaaaaagattgttacatcta

SEQ ID NO: 385476 - DNA, 1483 bp, Homo sapiens
  misc_feature (44)..(44): n is a, c, g, or t
  misc_feature (57)..(57): n is a, c, g, or t
agtgaagtagagaccgcggcaatatataaggaacacccgaaaanggcctagttgttnactaactagcatattatgaactagatccttataaaagtctcctagacaatttgaggaacaaagtgatcattgagtatccaacattacatgtggtattgaaaggatccaataatgacatgaaagttcttcaccaagtgaagagtgaatctaccaagaacgttggcaatgaaaattgagcattttttctggaagaagaaagtgaaaacttccagacaactgcagcagactctgcattgatgggctgttggctgattggggtattgtcaatgggtgattggaattttttctttgtatgaaaaataagcttaactcttttaaaaaatgtattttataacctcttgaattaattgacttgtaagacccatttattcatattaagaactctcctttgcacttgatcagcatagtacttattaggccctggctttttaatatgcttaattgcttaattccataaactgaaaactttttttttcttttttctttctttttttgagatggggtcttggagtgcaagtggtatgagcatagcttcctcaaattcctgggctcgaatggtcctctcactgcagcctcccaacaggctggtaccaccacactcagctaagttttttgttgttgtttttttttggtagagacagggttgcgctctttcgcccaggctggtctcaaatttgtggcctcaagcaatccttccacctcagactccaaagcattgggattacaggcatcagccaccacacctggccttgaacattttttatttgttaatttcatgcgtgacgaaacccaaggatcacccatgtcaaccacaaagttggcattccctttagtagaacctcactaaacggaaaggctgtacaacgcaccgtctagccacaggagaactaatcttctatcagttgccctttcttctttggagtttttatgtaacttacccttgtgagacaagttttctacttgagaaactcctagtacaatgtcttatactagaagcctggataaatactattaactactgtttcttatattcacttcagaaaatcagtggctccacattgtttgagccattagtgataacaaatttggatctacttactcaagtcttatgaattctgtgcctttcatcacattcctagcccactctcatcattactgcagaagggtgttgtgatgaccagttttatactgtgttttgatatgtctagcaataacttaaagaaaaaaaaacctgggaaatcttcaacatgttattggaacatatatgtatgtattaatgtatatacatggcttaacttatacgttatggcagctctgtatacagtttgatctcatgtactgaaaaaaaattcttaattttattggagtttataccactgtgaaactgcaatatgactgtaagagagtaaaaagattgttacatcta

SEQ ID NO: 385477 - DNA, 1469 bp, Homo sapiens
gttaaaggtatcttactttttcatattttctcctgacccccacgcccgcttccatattatgaactagatccttataaaagtctcctagacaatttgaggaacaaagtgatcattgagtatccaacattacatgtggtattgaaaggatccaataatgacatgaaagttcttcaccaagtgaagagtgaatctaccaagaacgttggcaatgaaaattgagcattttttctggaagaagaaagtgaaaacttccagacaactgcagcagactctgcattgatgggctgttggctgattggggtattgtcaatgggtgattggaattttttctttgtatgaaaaataagcttaactcttttaaaaaatgtattttataacctcttgaattaattgacttgtaagacccatttattcatattaagaactctcctttgcacttgatcagcatagtacttattaggccctggctttttaatatgcttaattgcttaattccataaactgaaaactttttttttcttttttctttctttttttgagatggggtcttggagtgcaagtggtatgagcatagcttcctcaaattcctgggctcgaatggtcctctcactgcagcctcccaacaggctggtaccaccacactcagctaagttttttgttgttgtttttttttggtagagacagggttgcgctctttcgcccaggctggtctcaaatttgtggcctcaagcaatccttccacctcagactccaaagcattgggattacaggcatcagccaccacacctggccttgaacattttttatttgttaatttcatgcgtgacgaaacccaaggatcacccatgtcaaccacaaagttggcattccctttagtagaacctcactaaacggaaaggctgtacaacgcaccgtctagccacaggagaactaatcttctatcagttgccctttcttctttggagtttttatgtaacttacccttgtgagacaagttttctacttgagaaactcctagtacaatgtcttatactagaagcctggataaatactattaactactgtttcttatattcacttcagaaaatcagtggctccacattgtttgagccattagtgataacaaatttggatctacttactcaagtcttatgaattctgtgcctttcatcacattcctagcccactctcatcattactgcagaagggtgttgtgatgaccagttttatactgtgttttgatatgtctagcaataacttaaagaaaaaaaaacctgggaaatcttcaacatgttattggaacatatatgtatgtattaatgtatatacatggcttaacttatacgttatggcagctctgtatacagtttgatctcatgtactgaaaaaaaattcttaattttattggagtttataccactgtgaaactgcaatatgactgtaagagagtaaaaagattgttacatcta

SEQ ID NO: 385478 - DNA, 2640 bp, Homo sapiens
  misc_feature (302)..(302): n is a, c, g, or t
  misc_feature (410)..(410): n is a, c, g, or t
  misc_feature (624)..(624): n is a, c, g, or t
tttaatattacaaaaagaaatcagatacctaaaacattaaatatgcactgaaaattatttaccaaaaactgaaacaagtaaaaaacattcccttatttgaaaaatgcctttcattagaagccttatgatttagctaaaatgcacagaagataagttattgccaagtgcttgtaggatgccacttgaaaagttcctgtttgagagtccaggtcttatttcctcccaagaaaaatttagttatcaccattttatattttactttgtaagttaatcttttacttgggtatctgatataatctcanttttcttttttatataattgctactaactttgaaaaaaacactgcttatttcaaagagaaataatgtttaaaagatgtgaagcatttaatccttgaatgctggaaacncttttaaagtattgtaagtacatctgtattacattacacacagggaaaagaatgtatgaattctatgatctgtgggcactaaggtggctggtttagaaaaacagtattttgcatttcaagtttcttttcaacataaagaatattctgcaattttaaaaagaataattccaggctggggtgtgtggtcagggaagcataagtaaagttttggttntacagttgttctctaactttagtaagcttggctctgcattttgttaagcacttttatatttttcctgatttgaaaacgattgcgtgagacaaactcagaacatggagaaatcactacatcacatttcttaatgagtgtcctgcatgtcttactcagctatgattatggtgcagataattttttactaattaagaaataccaaagtttgtgaatgatttactcttaaaattacagcaaatttaaatgtatcccaatgataacctcactcttgatcacttgtgttccagtgtgcttttttgagcaggagataaaaggatggagttacagccattaggctggatctcatgagatatgtgttttgcatgtgaatatcacctgtcattggtagagatgaataaaaatgctggagaacttctgcactagactggttgacatgttctcagctttttcttctttgacatgaaatgacattaacatgccaacatattctcatatgtacccgctagtgagctagctagaattccacccctttcactcccaccccagaaagcaagcaagaatgaatgttctggggatgcattttcagccacctcagacttatttttttaaagtaatgatttgagaatttcatgctttaatgaccattagcatctaattacctgtgacacatttggcagctatgtcacgataaactctgtatttcttaaattttacatggcaatataaatttctggaaaccagttataattagaataattgacttttttccaaaagccaattttgtaaccagttattttattgccatgttactagaaattgtcataaggtgattggttgtctttaaggctcaaaataaatatatttgaggaattcaaatagttagctcatcattcttttattcaagaaaaataacaacataaatattattattattttatttttttatttttttgaggcagagtttcactcttcttgcccaggctggagtgcagtggcacgatcttggcttactgcagcctccgcctcctggattcaagcgattctcccacctcagcctcccgagtagctgtgattacaggcatgtgccaccatgccgagctaattttgtatttttagtagagatggggattctccatgttgctcacgcctgtaatcccagcactttgggaggccaaggcaggcagattacgaggtcaggagatcgagaccatcctagctaacactgtgaaaccccgtctctactaaaaatacaaaaaaaattagccaggcatggtggcacgcacctatagtcccagctacttgggaggctgaggcaggagaatcgcttgagcctgggagatggaggttgcagtgagccgagattgtgccactgcactccagcctgggcaacaaagcgagactccatatcaaaaaaagaaaaagaaaattagtaacttgttttagagctttcctaatgtcagaatatttgatttttttttatttagttttagaacctctataataatagctcttgtacctgcctttcttagaaggtattaaacttactatgctataaggaagtaactactgaattgtcatcacctttaaaaaatttttaatgtaaaatactctcatatatttatctattagtaattttgaatattaagagtgtttcctggttttttgtttttttttattaataagataatattatgaactagatccttataaaagtctcctagacaatttgaggaacaaagtgatcattgagtatccaacattacatgtggtattgaaaggatccaataatgacatgaaagttcttcaccaaggtaagtgtaaatttgtttctgtaatgcttagaatagctttagagaaaccaaagcaaaatatgtccacccttatttctttatatgtgttttcccactatatttacacacttacaggatctactgtatagctagttaatgtgaagaaccaggtaaatgcaatgctgctactcttctgtttctaagagcgtataatcttataaaacca

SEQ ID NO: 385479 - DNA, 1769 bp, Homo sapiens
  misc_feature (33)..(33): n is a, c, g, or t
  misc_feature (43)..(43): n is a, c, g, or t
cccgtgtcctagaagcttttggctcggggagcncccacacggncccggaggcaaggtattaacttaaaacttctacccaatggattcaccaagaggaaggagaattcaaccttttttgataagaaaaaacaacagttttgttggcatgtgaagctccagtttcctcaaagtcaagctgagtacatagaaaaaagagtaccagatgataaaactattaatgaaatcctaaaaccttacattgatcctgaaaagtctgatcctgtaattcgtcaaaggttgaaagcctacattcgctctcagactggggttcagattttaatgaagattgaatatatgcagcaaaatttagtaagatattatgaactagatccttataaaagtctcctagacaatttgaggaacaaagtgatcattgagtatccaacattacatgtggtattgaaaggatccaataatgacatgaaagttcttcaccaagtgaagagtgaatctaccaagaacgttggcaatgaaaattgagcattttttctggaagaagaaagtgaaaacttccagacaactgcagcagactctgcattgatgggctgttggctgattggggtattgtcaatgggtgattggaattttttctttgtatgaaaaataagcttaactcttttaaaaaatgtattttataacctcttgaattaattgacttgtaagacccatttattcatattaagaactctcctttgcacttgatcagcatagtacttattaggccctggctttttaatatgcttaattgcttaattccataaactgaaaactttttttttcttttttctttctttttttgagatggggtcttggagtgcaagtggtatgagcatagcttcctcaaattcctgggctcgaatggtcctctcactgcagcctcccaacaggctggtaccaccacactcagctaagttttttgttgttgtttttttttggtagagacagggttgcgctctttcgcccaggctggtctcaaatttgtggcctcaagcaatccttccacctcagactccaaagcattgggattacaggcatcagccaccacacctggccttgaacattttttatttgttaatttcatgcgtgacgaaacccaaggatcacccatgtcaaccacaaagttggcattccctttagtagaacctcactaaacggaaaggctgtacaacgcaccgtctagccacaggagaactaatcttctatcagttgccctttcttctttggagtttttatgtaacttacccttgtgagacaagttttctacttgagaaactcctagtacaatgtcttatactagaagcctggataaatactattaactactgtttcttatattcacttcagaaaatcagtggctccacattgtttgagccattagtgataacaaatttggatctacttactcaagtcttatgaattctgtgcctttcatcacattcctagcccactctcatcattactgcagaagggtgttgtgatgaccagttttatactgtgttttgatatgtctagcaataacttaaagaaaaaaaaacctgggaaatcttcaacatgttattggaacatatatgtatgtattaatgtatatacatggcttaacttatacgttatggcagctctgtatacagtttgatctcatgtactgaaaaaaaattcttaattttattggagtttataccactgtgaaactgcaatatgactgtaagagagtaaaaagattgttacatcta

SEQ ID NO: 385480 - DNA, 1259 bp, Homo sapiens
gcgattcgagcagtcgcgtcaagcaggctattccgggtttgtggctgcttggctccacacgtgggccgccgtaggtattccgaccggtaattcctcctattggtgtgcagcagccacattgaaggatagagtggcagcagaggccaaggatcgtgagttgatggagtttgctgctgaaaatgaagggaagtctgggggaggtctccacagcgtagctgagggggtgcggctaagtccagagcctggcagggagggagtaagggacttagcaggggcggaggagttcggcggcggagaggaggggacagggctgacagggataaaggagataggggatggagaggaaggaatggtatgagcatagcttcctcaaattcctgggctcgaatggtcctctcactgcagcctcccaacaggctggtaccaccacactcagctaagttttttgttgttgtttttttttggtagagacagggttgcgctctttcgcccaggctggtctcaaatttgtggcctcaagcaatccttccacctcagactccaaagcattgggattacaggcatcagccaccacacctggccttgaacattttttatttgttaatttcatgcgtgacgaaacccaaggatcacccatgtcaaccacaaagttggcattccctttagtagaacctcactaaacggaaaggctgtacaacgcaccgtctagccacaggagaactaatcttctatcagttgccctttcttctttggagtttttatgtaacttacccttgtgagacaagttttctacttgagaaactcctagtacaatgtcttatactagaagcctggataaatactattaactactgtttcttatattcacttcagaaaatcagtggctccacattgtttgagccattagtgataacaaatttggatctacttactcaagtcttatgaattctgtgcctttcatcacattcctagcccactctcatcattactgcagaagggtgttgtgatgaccagttttatactgtgttttgatatgtctagcaataacttaaagaaaaaaaaacctgggaaatcttcaacatgttattggaacatatatgtatgtattaatgtatatacatggcttaacttatacgttatggcagctctgtatacagtttgatctcatgtactgaaaaaaaattcttaattttattggagtttataccactgtgaaactgcaatatgactgtaagagagtaaaaagattgttacatcta

SEQ ID NO: 385481 - DNA, 8381 bp, Homo sapiens
  misc_feature (3)..(3): n is a, c, g, or t
  misc_feature (702)..(702): n is a, c, g, or t
  misc_feature (730)..(730): n is a, c, g, or t
  misc_feature (1767)..(1767): n is a, c, g, or t
  misc_feature (2149)..(2150): n is a, c, g, or t
  misc_feature (2672)..(2672): n is a, c, g, or t
  misc_feature (3468)..(3468): n is a, c, g, or t
ggngagctcggctcttaagatacgagtctgccaatgctcccggccaaataaaaaacctcttccttctttaatctggtgtctgaggagttttgtctgtgactcgtcctgctacatttcttggttccctggccaggaagcaaggtaattgaaggacagtcgaggcagccccttaggtggcttaggcctgccctgtggagcatccctgcaggggactctggccagcttgagtgacgcggatcctgagagcgctcccaggtaggcaattaccccggtggaaagcctcgtcagagcagtgcgtggcaggcccctgtggaggatcaatgcagtggctgaacactgggaaggaacaggcacttggagtccagacatttgaaacttggtaagactggtcttcggaacttgcccactccatttgagtggaagcgtggcctgatcaaccacggcatgcctgtactggcactttggtttttgtttttgacttgacttgaattgcttgatactttggttttggtttgacctggcttggatttctggatactctgattttggttttgattctggtttggtgaaaactgaaaaagtgtgtgtgtgcactttttacccattctttgttttgtggtgtgcatgtggtgtgagcttggtgttttgtcttgaggaaacatggatcagacacaaaataagcctactcctctaggaactatnttgaaaaattttaagaagggatttaatngagactatggggttactatgacaccagggaaacttagaactttgtgtgaaatagattggccaacattagaagtgggttggccatcagaaggaagcctggacaggtcccttgtttctaaggtatggcacaaggtaactagtaagtcaggacactcagaccagtttccatacatagacacttggttacagctggtgctagaccccccacagtggctaagagggcaggcagcagcagtgctagtagcaaagggacagatagtcaaggaaggattctgctccacccgctgaggaaatcaactcctgaagttctgttcgaccaaacatcagaagatccattgcaggagatggcaccagtgatcccagtgttgccctccccttatcagggagagaggctccccacttttgagtccacagtgcttgcgcctctgccagacaaatgtatccctaggccactcagagtagacaagagaggaggtgaagcctcgggagaaacccctcccttggcagctcatttaagacccaaaacagggatacaaatgcccctgagagagcagcagtatactggaatagatgaggatgggcacatggtggagagtcgtgtttttgtgtaccagcccttcacctctgccgaccttctcaactggaaaaacaataccccgtcctatactgaaaagccgcaagctctaattgatttgctccaaactattatccagacccataaccccacttgggctgattgccaccagttgctcatgttcctctttaaaacagatgaaaggtgaagggtgcttcaagcagcaactaagtggctagaggaacatgcactggctgattaccaaaacccccaagagtatgtaaggacacagttaccaggaaccgacccccagtgggacccaaattaaagagaggatatgcaaaggctaaaccgatacaggaaagctctcttagaaggattaaagaggagagcccagaaggccacaaacattaacaaggtctctgaggtcattcagggaaaagaagaaagtccagcaaaattcnacgagagactgtgtgaggcttattgtatgtatactccctttgatcccgatagccctgaaaatcaacgcatgattaacatggctttagttagtcaaagcacagaagacattagaagaaaactgcagaaaaaggctgggtttgcagggatgaacacatcacagttattagaaatagccaaccaggtgtttgtaaacagggatgcagcaagccgtaaggaaaaccacatagagaatgaacgtcaggcccggcgaaacgcacctgttagctgcagcaattagaggggtccccccaaagaggcaagggaaaaggggggccctgggaaagaaactcagcctggctgtcagagcttgcagtgtaatcagtgtgcttatcgtaaagaaannggatattggaagaacaaatgccctcagctaaaaggaaaacaaggtgactcggagcaggaggctccagacaaggaggaaggggccctgctcaacctggcagaagggttattggactgagggggactgggctcaaggacctccaaagagcctatggtcaggatgacagttgggggtaaagacattgattttcttgtagataccagtgctgaacattcggtagtaactgcctcagtcgcccccttatccaaaaagactattgacatcatcggagccatgggagtttcagcaaaacaagctttctgcttgccccagacttgtactataggaggacataaagtgattcatcagtttttgtacatgcctgattgtcccttgcccttgttgggaagagacttgcttagcaaactgagagccactatctcttttacagagcacggctctttgctgctaaagttacccggaacaggagtcattatgacccttatgctcccccgagaggaggaatggagacttttcttaacngagccgggccaagagataagaccagctctggctaagcggtggccaagagtgtgggcggaagacaaccctccagggttggcagtcaaccaagcccccgtgcttatagaagttaagcctggggtccagccggttaggcaaaaacagtacccggtcctcagagaagctcttgaaggtatccaggtccatctcaagtgcctaagaacctttagaattatagttccttgtcagtctccatggaacactcccctcctgcctgttcccaagcctgggaccaaggactacaggccggtacaggatttgcgcttggttaatcaggctacagtgactttacatccaacagtacctaacctgtacacattgctggggttgctgccagctgaggacagctggttcacctgcttggacctgaaagatgctttctttagcatcagattagcccctgagagacagaagctgtttgcctttcagtgggaagatccagagtcaggtgtcactactcaatacacttggacccagcttccccaaaggttcaagaactcccccaccatctttggggaggcgttggctcgagacctccagaagtttcccaccagagacctaggctgcgtgttgctccagtacgttgatgaccttttgctgggacaccccacggcagtcgggtgcgccaagggaacagatgctctactccggcacctggaggactgtgggtataaggtgtccaagaaaaaaagctcagatctgccgacagcaggtatgttacttgggatttactatccaacagggggagcacagcctnggatcagaaagaaagcaggtcatttgtaatctaccggagcctaagaccagaaggcaggtgagagaattcttaggggctgtgggtttttgcagactgtggatcccaaactttgcagtattagctaagcctttgtatgaggtcacaaaggcgggggaccaggaaccttttgaatggggatcccagcaacagcaagcctttcatgagttaaaggaaagacttatgtcagtcccagccctggggctacctgatctgacaaagccttttacattgtatgtgtcagagagtgaaaagatggcagttggagttttaacccaaactgtggggccctggctgaggccggtggcctacctctctaaacaactagacggggtttctaaaggatggcccccgtgtttgagggccttggcagcaactgccctgctagtacaagaagcagataagctgattcttgggcaaaacctgaacataaaggacccccatgctgtggtgactttaatgaatactagaggacatcattggctaacgaatgctagacttactaagtaccaaagtttgctttgtgaaaatccccatataaccattgaagtttgtaacaccctgaaccccgctaccttgctcccagtattagagatccctgtcgagcatgactgtgtagaagtgttggactcagtttactctgggcatcagtagactgggaactatacgtggatgggagcagctttgtcaacccacaagaagagagatgtgcagggtatgcggtggtaactctggacactgttgctgaagccagatcgtttccccagggcacttcaactcagaaagctgaactcattgctttaattcgggccttagaactcagtgaaggtaagactgtaaacatttacactgactcttgatatgtctttttaacccttcaagtgcatggagcattatgtaaagaaaagggcctattgaactctgggggaaaagacataaaatatcaacaagaaatcttgcaattattagaagcagtatggaaaccccacaaggtggctgttatacattgcggaggacaccagtgagcttccaccttggtgggtttggggaattcctgcactgacttagaggctcaaaaagcagcatctgcccttccgggcatcagtgacagcccccctgctccctcaagcacctgatcttgtacctacttattctaaagaagaaaaggactttctccaggcagagggaggacaagtgatggaggaaggatggatttggttaccagatgggagagtagctgtgccacagctgctaggagctgcagttgtactggctgtgcataaaaccacccatctaggtcaggaatcacttgaaaagttgttaggctggtatttctacatctcgcatttgtcagcccttgccaaaacagtgacgcagcggtgtgttacctgccgacagcataatgcgagacaaggtccagctgttccccctggcatacaagcttatggagcagccccctttgaagatctccaggtggacttcacagagatgccaaagtgtggaggtaacaagtatttactagttcttgtgtgtacctactctgggcaggtggaggcttatccaacacgaactgagaaagctcatgaagtaactcgtgtgcttcttcgagatcttattcctagatttggactgcccttacggattggctcagataatgggctggtgtttgtggctgacttggtacagaagacggcaaaggtattggggatcacatggaaactgcatgctgcctaccagcctcagagttccggaaaggtagagcggatgaatcggactatcaaaaatagtttagggaaagtatgtcaagaaacaggattaaaatggatacaggctcttcctatggtattatttaaaattagatgtaccccttctaaaagaacaggatattccccttatgaaatattatatcataggccccctcctatattgcggggacttccaggcactccccgagagttaggtgaaattgagttacagcgatagctacaggcttcaggaaaaattacacaaacaatctcggcctgggtaaatgagagatgccctgttaacttattctccccagttcaccctttctccccaggtgatctagtgtggatcaaggactgaaacgtagcctgtttgtgtccacggtggaaaggaccccagactgtcatcctgagcactcccaccgctgtgaaggtagagggaatcccaacctggatccaccacagccgtgtaaaacctgcagtgcctgaaacctgggaggcaagaccaagcccagaaaacccctgcagagtgaccccgaagaagacaacaagccctgctccagtcacacccggaagctgactggtccacgcacggccgaagcatgcagaagctcatcatgggattcatttttcttaaattttggacttatacagtaagggcttcaactgatcttactcaaactggggactgttcccagtgtattcatcaggtcaccgaggtaggacagcaaattaaaacaatgtttctgttctatagttattataaatgtataggaacattaaaagaaacttgtttgtataatgctactcagtacaatgtatgtagcccaggaaatgaccgacctgatgtgtgttataacccatctgagcctcctgcaaccaccatttttgaaataagaataagaactggccttttcctaggtgatacaagtaaaataataactagaacagaagaaaaagaaatccccaaacaaataactttaagatttgatgcttgtgcagccattaatagtaaaaagctaggaataggatgtgattctcttaactgggaaaggagctacagaataaaaaataaatatgtttgtcatgagtcaggggtttgtgaaaattgtgcctattggccatgtgttatttgggctacttggaaaaagaacaaaaaggacccggtttatcttcagaagggggaagccaacccctcctgtgctgctggtcactgtaacccactagaactaataattaccaatcccctagatccccattggaaaaagggagaacgtgtaaccctggggattgatgggacagggttaaacccccaagttgccattttaattagaggggaggtccacaagtgctctcccaaaccagtatttcaaaccttttataaggagctgaatctgccagcaccagaatttccaaaaaagacaaaaaatttgtttctccaattagcagaaaatgtagctcattcccttaatgttacttcttgttatgtatgcgggggaaccactatcggagaccgatggccttgggaagcccgagagttggtgcctactgatccagctcctgatataattccagttcagaaaacccaagctagcaacttctgggtcctaaaaacctcaattattggacaatactgtatagctagagaagggaaagactttatcatccctgtaggaaagcttaattgtataggacagaagttgtataacagtacaacaaagacaattacttggtggggcataaaccacactgaaaagaatccatttagtaaattttcaaaattaaaaactgcttgggctcatccagaatctcatcaggactggatggctcccgctggactatactggatatgtgggcacagagcctacattcggttacctaataaataggcaggcagttgtgttattggcactattaagtcgtcctttttcttattacccataaaaacaggtgagaccctaggtttccctgtctatgcctcccgagaaaagagaggcatagttataggaaactggaaagataatgagtggcgccctgaaaggatcatacagtattatgggcctgccacatgggcacaagacggctcatggggataccgaacccccatttacatgctcaatcggatcatacggttgcaggccatcttagaaataattactaatgaaactggcagagctttgactgttttagctcggcaggaaacccaaacgaggaatgctatctatcagaatagactggccttggactacttgctagcagctgaaggaggagtttgtggaaaatttaacttaaccaattactgcctacaaatagatgatcaaggacaggtggttgaaaacatagtcagggacatgacaaaggtggcacatgtgcctgtacaggtttggcacaagtttaatcctgagtctttatttggaaaatggtttccagctataggaggatttaaaaccctcattgtaggtgtattgctagtgataggaacttgcttgctgctcccctgtgtattacccttgctttttcaaatgataaaatattttgttgttactttagttcatcagaaaacttcagcacatgtgtattatacaaatcactatcgctctatctcacaaagagactaaaaaagtgaggacgagagtaagaactcccactaaaagtgaaaattctcaaagggggggaaatatggtatgaggtcgccacttctcctgttgtccttctcagtttctccccaacctccccttttccctagtttataagacaggagaaaagggagaaagcaaaaagttgaaaagaaacagaagtaagataaatagctagacgaccttggcaccaccacctggccctggtggctaaaataataataatattattaacccctgaccaaaactattggtgttatctgtaaattccagacactgtatgagaaaatactgtaaaactttttgttctgttagctgatgtatgtagcccccagtcatgtttctcacgcttacttgatctattatgactttttcatgtagaccccttagagttgtaagcccttaaaagggctaagaatttctttttcggggagctcggctcttaagacacgagtctgccaatgatcccggccgaataaaaaacctcttccttctt

SEQ ID NO: 385482 - DNA, 377 bp, Homo sapiens
tcactgggtccataaatcctgtcctggttatctccccattctctgtaaaaaggattctctgtaaaaagattacatcgccctaaaccaggacctgagctcttggactgcggcggccatggcggctcagattacccagcgcaagtgggaggcggcccatgaggcggagcagcagacagcctacctggagggcaggtgcgtggagtggctccgcagatacctggagaacaggaaggagacactgcagcacacctgtaccagggaccacgggcgcctccctgatcgcctgtaatctcccgggctggcctcccacaaggatgggagacagatgggaccaacactagaatatcaccctccctctggtcctgagggagaagaat

SEQ ID NO: 385483 - DNA, 1104 bp, Homo sapiens
cagccaggaaaaaagcttaagcattttggccaaggttacacaacccgaaacaccgggacgcggcccggaggcggcttcggccttgcggtccaggctaggccactgcgccggggcccagcctgctcggcgcccgcccgagtgctcggcaggcccgtagcgccgcggctcccaggagccgaggggcagccggcgcgcaggcggcggttgccgggccctccctcggcccggcggcggtggcggccccgcgtcgcgaggcacttccggcgcgtgccggggtggccggatgacgtggctgagtcagaggaagaggctgaggaggcgcggggggcgggggaggctcaggagcgggcggtgacggcgacggcggcggcagaggaggcagcggctgggccgggccccgtgcgtctgtccgcgccccgtggatgcgaatcggccgcggcggaggcggcggcggcggaggaggcggcggcgggaggaggagtcggtgagccggctccgggccggaggggcgcggaggatgaggccgctgcctggcgctcttggcgtggcggcggccgccgcgctgtggctgctgctgctgctgctgccccggacccgggcggacgagcacgaacacacgtatcaagataaagaggaagttgtcttatggatgaatactgttgggccctaccataatcgtcaagaaacatataagtacttttcacttccattctgtgtggggtcaaaaaaaagtatcagtcattaccatgaaactctgggagaagcacttcaaggggttgaattggaatttagtggtctggatattaaatttaaaggtaagtaaaccttaatagtccttacaatgcaatttggattgtagacaagggtttcatattttggcactattgacactggtgttggataattctttgttgtatggagctgttatgtacatgttaggatgtctagcagagtccctggcctgtaccccccagatgccagtagcaccttccagttgtgaaaaccaaaaaagtcaccagacattgctaattgctgtcagttgagaaccactactttagactctaaaatgtgttttagtctgtaaatgaggtgtattgcatttag

SEQ ID NO: 385484 - DNA, 6444 bp, Homo sapiens
cagccaggaaaaaagcttaagcattttggccaaggttacacaacccgaaacaccgggacgcggcccggaggcggcttcggccttgcggtccaggctaggccactgcgccggggcccagcctgctcggcgcccgcccgagtgctcggcaggcccgtagcgccgcggctcccaggagccgaggggcagccggcgcgcaggcggcggttgccgggccctccctcggcccggcggcggtggcggccccgcgtcgcgaggcacttccggcgcgtgccggggtggccggatgacgtggctgagtcagaggaagaggctgaggaggcgcggggggcgggggaggctcaggagcgggcggtgacggcgacggcggcggcagaggaggcagcggctgggccgggccccgtgcgtctgtccgcgccccgtggatgcgaatcggccgcggcggaggcggcggcggcggaggaggcggcggcgggaggaggagtcggtgagccggctccgggccggaggggcgcggaggatgaggccgctgcctggcgctcttggcgtggcggcggccgccgcgctgtggctgctgctgctgctgctgccccggacccgggcggacgagcacgaacacacgtatcaagataaagaggaagttgtcttatggatgaatactgttgggccctaccataatcgtcaagaaacatataagtacttttcacttccattctgtgtggggtcaaaaaaaagtatcagtcattaccatgaaactctgggagaagcacttcaaggggttgaattggaatttagtggtctggatattaaatttaaagatgatgtgatgccagccacttactgtgaaattgatttagataaagaaaagagagatgcatttgtatatgccataaaaaatcattactggtaccagatgtacatagatgatttaccaatatggggtattgttggtgaggctgatgaaaatggagaagattactatctttggacctataaaaaacttgaaataggttttaatggaaatcgaattgttgatgttaatctaactagtgaaggaaaggtgaaactggttccaaatactaaaatccagatgtcatattcagtaaaatggaaaaagtcagatgtgaaatttgaagatcgatttgacaaatatcttgatccgtccttttttcaacatcggattcattggttttcaattttcaactccttcatgatggtgatcttcttggtgggcttagtttcaatgattttaatgagaacattaagaaaagattatgctcggtacagtaaagaggaagaaatggatgatatggatagagacctaggagatgaatatggatggaaacaggtgcatggagatgtatttagaccatcaagtcacccactgatattttcctctctgattggttctggatgtcagatatttgctgtgtctctcatcgttattattgttgcaatgatagaagatttatatactgagaggggatcaatgctcagtacagccatatttgtctatgctgctacgtctccagtgaatggttattttggaggaagtctgtatgctagacaaggaggaaggagatggataaagcagatgtttattggggcattccttatcccagctatggtgtgtggcactgccttcttcatcaatttcatagccatttattaccatgcttcaagagccattccttttggaacaatggtggccgtttgttgcatctgtttttttgttattcttcctctaaatcttgttggtacaatacttggccgaaatctgtcaggtcagcccaactttccttgtcgtgtcaatgctgtgcctcgtcctataccggagaaaaaatggttcatggagcctgcggttattgtttgcctgggtggaattttaccttttggttcaatctttattgaaatgtatttcatcttcacgtctttctgggcatataagatctattatgtctatggcttcatgatgctggtgctggttatcctgtgcattgtgactgtctgtgtgactattgtgtgcacatattttctactaaatgcagaagattaccggtggcaatggacaagttttctctctgctgcatcaactgcaatctatgtttacatgtattccttttactactattttttcaaaacaaagatgtatggcttatttcaaacatcattttactttggatatatggcggtatttagcacagccttggggataatgtgtggagcgattggttacatgggaacaagtgcctttgtccgaaaaatctatactaatgtgaaaattgactagagacccaagaaaacctggaactttggatcaatttctttttcataggggtggaacttgcacagcaaaaacaaacaaacgcaagaagagatttgggctttaacacactgggtactttgtgggtctctctttcgtcggtggcttaaagtaacatctatttccattgatcctaggttcttcctgactgctttctccaactgttcacagcaaatgcttggattttatgcagtaggcattactacagtacatggctaatcttcccaaaaactagctcattaaagatgaaatagaccagctctcttcagtgaagaggacaaatagtttatttaaagcatttgttccaataaaataaatagagggaaacttggatgctaaaattacatgaataggaatcttcctggcacttagtgtttctatgttattgaaaaatgatgttccagaaagattacttttttcctcttatttttactgccattgtcgacctattgtgggacatttttatatattgaatctgggttcttttttgacttttttttttcccaatccaacagcatccttttttttaaaagagagaattagaaaatattaaatcctgcatgtaatatatctgctgtcatcttagttggaccaacttcccatttatttatcttaaaactatacagttacatcttaattccatccaaagaagatacagtttgaagacagaagtgtactctctacaatgcaatttactgtacagttagaaagcaaagtgttaaatggagaagatacttgtttttattaaacattttgagatttagataaactacattttaactgaatgtctaaagtgattatcttttttccccccaagttagtcttaaatcttttgggtttgaatgaaggttttacataagaaattattaaaaacaaggggggtgggtaataaatgtatataacattaaataatgtaacgtaggtgtagattcccaaatgcatttggatgtacagatcgactacagagtacttttttcttatgatgattggtgtagaaatgtgtgatttgggtgggcttttacatcttgcctaccattgcatgaaacattggggtttcttcaaaatgtgtgtgtcatacttcttttgggaggggggttgttttcttctgtttattttctgagactcctacaggagccaaatttgtaatttagagacacttaattttgttaatcctgtctgggacacttaagtaacatctaaagcattattgctttagaatgttcaaataaaatttcctgaccaaattgttttgtggaaatagatgtgtttgcaatttgaagatatctttctgtccagaaggcaaaattaccgaatgccatttttaaaagtatgctataaactatgctactctcatacaggggacccgtattttaaaatctccagacttgcttacatctagattatccagcacaatcataaagtgaatgacaaaccctttgaatgaaattgtggcacaaaatctgttcaggttggtgtaccgtgtaaagtggggatggggtaaaagtggttaacgtactgttggatcaacaaataaaggttacagttttgtaagagaagtgatttgaatacatttttctggaactattcataatatgaagttttcctagaaccactgagtttctagtttaatagtttgctatgcaaatgaccacctaaaacaatactttatattgttatttttagaaagactcaaaacacctgtatttaaaccttaatatgaaaatcatgcaattaatagttacacaagatgttttcattacaaaatatgtacctatatattgatggactctacatcctatattgtgacatgtaagtcctttaaaaggtgaaaagtatgatttcttaccacttaagtatgattgatatgatccaacaaatttgatcagaagctgtaggtaaatcctcttctgaagccaaaatggtatattaaatataatttattggtacttccattttctcttccttcttacttgcctttaagatcttataaaaaagaaactaaaagttaatatttagttgcctatattatgtaaccttttaactatatataaagtacttttttggtttctttctcaccacttttattcaaaagtacttttaacataccaatacatagtctgtctgatgggagtataaattggacagtaaggttttgtcttaataaaatgaaatttgtttctcatgatatgaatcttgcaggtaagatgtagggtttattgaaaatgtgtgggttaaatgctttcaggtacaccaattctttctactaaattgagctctatttgaagttctttggaatctgtggtgaaaaataattttctgatttccaaatacattaagagcattaaatgaatattaatcacctttaaagtcttttagaaaaggacttgtattggtttttggctgcatagaggggttgaataagtgtatgtatgtgtgtgcgtgtgtgtgtgtcttcttaaagaagatgtaattcacaaatagtttagctccctagcgctcagttgtagaatagaaaatagaacattattcaagttaattgaaaggtgaggtttttatacccccactaatgctgtgtatctgtctttcgtttgttaacattatttgcttaatttctttcaactcacactttggataatactatcaaaaactaaggctaaacattccttgtgtatctttaagcatgcttctcctgaaatttaactacattagtagttgacatttgtatacatatatcctaatacaagagtaggataaggtggaaatgtaatggcctgagggatggtgaagcattcttttagtatttttcatcatgttgggctcctagattgtactggggttgcccataaatcaaaccccatactcttagaattcattatattatggtgatatccgaacctagtgaatggtatgcttgggtgttttccattgagagcggatggacctctttataaagttggttgctgcaaaatccagttcttccaaaagccactttatttagggtttattcacaagtcatatccattttggtacagtgtttgtttcctaatatttattaaccaccttataccaaatgtcttgcaaagaaatgttattaaaaccttgaatttttacaaatgtaaaaaacaaaaagtgtattaatgtatttgttcaggaaaagctacataccgaagggcttttgtatatgaattctgtggtggggagacccatttgtaatctatatggcagttccatctgggttttaagtttagatttcaccgtgtcttagtgcttcattctattggtttattggaacatgtaataaataggagtagtgatgtattaaaacacaagtattcattaatgttttatatcttcactaaaattctatagttatgaaactattttatcaatcaaggtgttatatttcagtcagaagtgaaaatttatgaagagtatttggaagtgtgtacagaaataaactagacttacaggtaggctagatcagaacgttaacatatgaacctgcagaaatctggtaagacttaaattcagtgtgaggaataactctagttctctcctatgagcatttcctaaaagccatctgatttggcattcttactggagctgcagacagaaatctacaaagacaaaagtaaacaaaattaagttattattccactgttaggaatggaaataaacttgtgaagtctgtttattttgaagtattggtgaactaggcttgctaattgataactgcagcagtttgtgtttactccagttcatcagcttaggtcatttgaaagatataagagcttaaggcaagaaagaaataacatggaattctatttgaaggacaacagaacattcttggaaaagcagctccagttggtttttcaactgtcaaacttgaatgtgtaagtccccacagagcatggacagtcggtgcagagttccaaggaaacaattattgcctgatgaccacttccattttgtatacactctttggttcgtataggccatattccaactggctttttagtaatagaaatccagtatataatgtatcaaatacaattgaggttctaacctagtgtgttaatttatctgaatttggatttttaaaaagtaataaaaagttaaatgta

SEQ ID NO: 385485 - DNA, 6390 bp, Homo sapiens
cagccaggaaaaaagcttaagcattttggccaaggttacacaacccgaaacaccgggacgcggcccggaggcggcttcggccttgcggtccaggctaggccactgcgccggggcccagcctgctcggcgcccgcccgagtgctcggcaggcccgtagcgccgcggctcccaggagccgaggggcagccggcgcgcaggcggcggttgccgggccctccctcggcccggcggcggtggcggccccgcgtcgcgaggcacttccggcgcgtgccggggtggccggatgacgtggctgagtcagaggaagaggctgaggaggcgcggggggcgggggaggctcaggagcgggcggtgacggcgacggcggcggcagaggaggcagcggctgggccgggccccgtgcgtctgtccgcgccccgtggatgcgaatcggccgcggcggaggcggcggcggcggaggaggcggcggcgggaggaggagtcggtgagccggctccgggccggaggggcgcggaggatgaggccgctgcctggcgctcttggcgtggcggcggccgccgcgctgtggctgctgctgctgctgctgccccggacccgggcggacgagcacgaacacacgtatcaagataaagaggaagttgtcttatggatgaatactgttgggccctaccataatcgtcaagaaacatataagtacttttcacttccattctgtgtggggtcaaaaaaaagtatcagtcattaccatgaaactctgggagaagcacttcaaggggttgaattggaatttagtggtctggatattaaatttaaagatgatgtgatgccagccacttactgtgaaattgatttagataaagaaaagagagatgcatttgtatatgccataaaaaatcattactggtaccagatgtacatagatgatttaccaatatggggtattgttggtgaggctgatgaaaatggagaagattactatctttggacctataaaaaacttgaaataggttttaatggaaatcgaattgttgatgttaatctaactagtgaaggaaaggtgaaactggttccaaatactaaaatccagatgtcatattcagtaaaatggaaaaagtcagatgtgaaatttgaagatcgatttgacaaatatcttgatccgtccttttttcaacatcggattcattggttttcaattttcaactccttcatgatggtgatcttcttggtgggcttagtttcaatgattttaatgagaacattaagaaaagattatgctcggtacagtaaagaggaagaaatggatgatatggatagagacctaggagatgaatatggatggaaacaggtgcatggagatgtatttagaccatcaagtcacccactgatattttcctctctgattggttctggatgtcagatatttgctgtgtctctcatcgttattattgttgcaatgatagaagatttatatactgagaggggatcaatgctcagtacagccatatttgtctatgctgctacgtctccagtgaatggttattttggaggaagtctgtatgctagacaaggaggaaggagatggataaagcagatgtttattggggcattccttatcccagctatggtgtgtggcactgccttcttcatcaatttcatagccatttattaccatgcttcaagagccattccttttggaacaatggtggccgtttgttgcatctgtttttttgttattcttcctctaaatcttgttggtacaatacttggccgaaatctgtcaggtcagcccaactttccttgtcgtgtcaatgctgtgcctcgtcctataccggagaaaaaatggttcatggagcctgcggttattgtttgcctgggtggaattttaccttttggttcaatctttattgaaatgtatttcatcttcacgtctttctgggcatataagatctattatgtctatggcttcatgatgctggtgctggttatcctgtgcattgtgactgtctgtgtgactattgtgtgcacatattttctactaaatgcagaagattaccggtggcaatggacaagttttctctctgctgcatcaactgcaatctatgtttacatgtattccttttactactattttttcaaaacaaagatgtatggcttatttcaaacatcattttactttggatatatggcggtatttagcacagccttggggataatgtgtggagcgattggttacatgggaacaagtgcctttgtccgaaaaatctatactaatgtgaaaattgactagagacccaagaaaacctggaactttggatcaatttctttttcataggggtggaacttgcacagcaaaaacaaacaaacgcaagaagagatttgggctttaacacactgggtactttgtgggtctctctttcgtcggtggcttaaagtaacatctatttccattgatcctaggttcttcctgactgctttctccaactgttcacagcaaatgcttggattttatgcagtaggcattactacagtacatggctaatcttcccaaaaactagctcattaaagatgaaatagaccagctctcttcagtgaagaggacaaatagtttatttaaagcatttgttccaataaaataaatagagggaaacttggatgctaaaattacatgaataggaatcttcctggcacttagtgtttctatgttattgaaaaatgatgttccagaaagattacttttttcctcttatttttactgccattgtcgacctattgtgggacatttttatatattgaatctgggttcttttttgacttttttttttcccaatccaacagcatccttttttttaaaagagagaattagaaaatattaaatcctgcatgtaatatatctgctgtcatcttagttggaccaacttcccatttatttatcttaaaactatacagttacatcttaattccatccaaagaagatacagtttgaagacagaagtgtactctctacaatgcaatttactgtacagttagaaagcaaagtgttaaatggagaagatacttgtttttattaaacattttgagatttagataaactacattttaactgaatgtctaaagtgattatcttttttccccccaagttagtcttaaatcttttgggtttgaatgaaggttttacataagaaattattaaaaacaaggggggtgggtaataaatgtatataacattaaataatgtaacgtaggtgtagattcccaaatgcatttggatgtacagatcgactacagagtacttttttcttatgatgattggtgtagaaatgtgtgatttgggtgggcttttacatcttgcctaccattgcatgaaacattggggtttcttcaaaatgtgtgtgtcatacttcttttgggaggggggttgttttcttctgtttattttctgagactcctacaggagccaaatttgtaatttagagacacttaattttgttaatcctgtctgggacacttaagtaacatctaaagcattattgctttagaatgttcaaataaaatttcctgaccaaattgttttgtggaaatagatgtgtttgcaatttgaagatatctttctgtccagaaggcaaaattaccgaatgccatttttaaaagtatgctataaactatgctactctcatacaggggacccgtattttaaaatctccagacttgcttacatctagattatccagcacaatcataaagtgaatgacaaaccctttgaatgaaattgtggcacaaaatctgttcaggttggtgtaccgtgtaaagtggggatggggtaaaagtggttaacgtactgttggatcaacaaataaaggttacagttttgtaagagaagtgatttgaatacatttttctggaactattcataatatgaagttttcctagaaccactgagtttctagtttaatagtttgctatgcaaatgaccacctaaaacaatactttatattgttatttttagaaagactcaaaacacctgtatttaaaccttaatatgaaaatcatgcaattaatagttacacaagatgttttcattacaaaatatgtacctatatattgatggactctacatcctatattgtgacatgtaagtcctttaaaaggtgaaaagtatgatttcttaccacttaagtatgattgatatgatccaacaaatttgatcagaagctgtaggtaaatcctcttctgaagccaaaatggtatattaaatataatttattggtacttccattttctcttccttcttacttgcctttaagatcttataaaaaagaaactaaaagttaatatttagttgcctatattatgtaaccttttaactatatataaagtacttttttggtttctttctcaccacttttattcaaaagtacttttaacataccaatacatagtctgtctgatgggagtataaattggacagtaaggttttgtcttaataaaatgaaatttgtttctcatgatatgaatcttgcaggtaagatgtagggtttattgaaaatgtgtgggttaaatgctttcaggtacaccaattctttctactaaattgagctctatttgaagttctttggaatctgtggtgaaaaataattttctgatttccaaatacattaagagcattaaatgaatattaatcacctttaaagtcttttagaaaaggacttgtattggtttttggctgcatagaggggttgaataagtgtatgtatgtgtgtgcgtgtgtgtgtgtcttcttaaagaagatgtaattcacaaatagtttagctccctagcgctcagttgtagaatagaaaatagaacattattcaagttaattgaaaggtgaggtttttatacccccactaatgctgtgtatctgtctttcgtttgttaacattatttgcttaatttctttcaactcacactttggataatactatcaaaaactaaggctaaacattccttgtgtatctttaagcatgcttctcctgaaatttaactacattagtagttgacatttgtatacatatatcctaatacaagagtaggataaggtggaaatgtaatggcctgagggatggtgaagcattcttttagtatttttcatcatgttgggctcctagattgtactggggttgcccataaatcaaaccccatactcttagaattcattatattatggtgatatccgaacctagtgaatggtatgcttgggtgttttccattgagagcggatggacctctttataaagttggttgctgcaaaatccagttcttccaaaagccactttatttagggtttattcacaagtcatatccattttggtacagtgtttgtttcctaatatttattaaccaccttataccaaatgtcttgcaaagaaatgttattaaaaccttgaatttttacaaatgtaaaaaacaaaaagtgtattaatgtatttgttcaggaaaagctacataccgaagggcttttgtatatgaattctgtggtggggagacccatttgtaatctatatggcagttccatctgggttttaagtttagatttcaccgtgtcttagtgcttcattctattggtttattggaacatgtaataaataggagtagtgatgtattaaaacacaagtattcattaatgttttatatcttcactaaaattctatagttatgaaactattttatcaatcaaggtgttatatttcagtcagaagtgtaggctagatcagaacgttaacatatgaacctgcagaaatctggtaagacttaaattcagtgtgaggaataactctagttctctcctatgagcatttcctaaaagccatctgatttggcattcttactggagctgcagacagaaatctacaaagacaaaagtaaacaaaattaagttattattccactgttaggaatggaaataaacttgtgaagtctgtttattttgaagtattggtgaactaggcttgctaattgataactgcagcagtttgtgtttactccagttcatcagcttaggtcatttgaaagatataagagcttaaggcaagaaagaaataacatggaattctatttgaaggacaacagaacattcttggaaaagcagctccagttggtttttcaactgtcaaacttgaatgtgtaagtccccacagagcatggacagtcggtgcagagttccaaggaaacaattattgcctgatgaccacttccattttgtatacactctttggttcgtataggccatattccaactggctttttagtaatagaaatccagtatataatgtatcaaatacaattgaggttctaacctagtgtgttaatttatctgaatttggatttttaaaaagtaataaaaagttaaatgta

SEQ ID NO: 385486 - DNA, 6390 bp, Homo sapiens
cagccaggaaaaaagcttaagcattttggccaaggttacacaacccgaaacaccgggacgcggcccggaggcggcttcggccttgcggtccaggctaggccactgcgccggggcccagcctgctcggcgcccgcccgagtgctcggcaggcccgtagcgccgcggctcccaggagccgaggggcagccggcgcgcaggcggcggttgccgggccctccctcggcccggcggcggtggcggccccgcgtcgcgaggcacttccggcgcgtgccggggtggccggatgacgtggctgagtcagaggaagaggctgaggaggcgcggggggcgggggaggctcaggagcgggcggtgacggcgacggcggcggcagaggaggcagcggctgggccgggccccgtgcgtctgtccgcgccccgtggatgcgaatcggccgcggcggaggcggcggcggcggaggaggcggcggcgggaggaggagtcggtgagccggctccgggccggaggggcgcggaggatgaggccgctgcctggcgctcttggcgtggcggcggccgccgcgctgtggctgctgctgctgctgctgccccggacccgggcggacgagcacgaacacacgtatcaagataaagaggaagttgtcttatggatgaatactgttgggccctaccataatcgtcaagaaacatataagtacttttcacttccattctgtgtggggtcaaaaaaaagtatcagtcattaccatgaaactctgggagaagcacttcaaggggttgaattggaatttagtggtctggatattaaatttaaagatgatgtgatgccagccacttactgtgaaattgatttagataaagaaaagagagatgcatttgtatatgccataaaaaatcattactggtaccagatgtacatagatgatttaccaatatggggtattgttggtgaggctgatgaaaatggagaagattactatctttggacctataaaaaacttgaaataggttttaatggaaatcgaattgttgatgttaatctaactagtgaaggaaaggtgaaactggttccaaatactaaaatccagatgtcatattcagtaaaatggaaaaagtcagatgtgaaatttgaagatcgatttgacaaatatcttgatccgtccttttttcaacatcggattcattggttttcaattttcaactccttcatgatggtgatcttcttggtgggcttagtttcaatgattttaatgagaacattaagaaaagattatgctcggtacagtaaagaggaagaaatggatgatatggatagagacctaggagatgaatatggatggaaacaggtgcatggagatgtatttagaccatcaagtcacccactgatattttcctctctgattggttctggatgtcagatatttgctgtgtctctcatcgttattattgttgcaatgatagaagatttatatactgagaggggatcaatgctcagtacagccatatttgtctatgctgctacgtctccagtgaatggttattttggaggaagtctgtatgctagacaaggaggaaggagatggataaagcagatgtttattggggcattccttatcccagctatggtgtgtggcactgccttcttcatcaatttcatagccatttattaccatgcttcaagagccattccttttggaacaatggtggccgtttgttgcatctgtttttttgttattcttcctctaaatcttgttggtacaatacttggccgaaatctgtcaggtcagcccaactttccttgtcgtgtcaatgctgtgcctcgtcctataccggagaaaaaatggttcatggagcctgcggttattgtttgcctgggtggaattttaccttttggttcaatctttattgaaatgtatttcatcttcacgtctttctgggcatataagatctattatgtctatggcttcatgatgctggtgctggttatcctgtgcattgtgactgtctgtgtgactattgtgtgcacatattttctactaaatgcagaagattaccggtggcaatggacaagttttctctctgctgcatcaactgcaatctatgtttacatgtattccttttactactattttttcaaaacaaagatgtatggcttatttcaaacatcattttactttggatatatggcggtatttagcacagccttggggataatgtgtggagcgattggttacatgggaacaagtgcctttgtccgaaaaatctatactaatgtgaaaattgactagagacccaagaaaacctggaactttggatcaatttctttttcataggggtggaacttgcacagcaaaaacaaacaaacgcaagaagagatttgggctttaacacactgggtactttgtgggtctctctttcgtcggtggcttaaagtaacatctatttccattgatcctaggttcttcctgactgctttctccaactgttcacagcaaatgcttggattttatgcagtaggcattactacagtacatggctaatcttcccaaaaactagctcattaaagatgaaatagaccagctctcttcagtgaagaggacaaatagtttatttaaagcatttgttccaataaaataaatagagggaaacttggatgctaaaattacatgaataggaatcttcctggcacttagtgtttctatgttattgaaaaatgatgttccagaaagattacttttttcctcttatttttactgccattgtcgacctattgtgggacatttttatatattgaatctgggttcttttttgacttttttttttcccaatccaacagcatccttttttttaaaagagagaattagaaaatattaaatcctgcatgtaatatatctgctgtcatcttagttggaccaacttcccatttatttatcttaaaactatacagttacatcttaattccatccaaagaagatacagtttgaagacagaagtgtactctctacaatgcaatttactgtacagttagaaagcaaagtgttaaatggagaagatacttgtttttattaaacattttgagatttagataaactacattttaactgaatgtctaaagtgattatcttttttccccccaagttagtcttaaatcttttgggtttgaatgaaggttttacataagaaattattaaaaacaaggggggtgggtaataaatgtatataacattaaataatgtaacgtaggtgtagattcccaaatgcatttggatgtacagatcgactacagagtacttttttcttatgatgattggtgtagaaatgtgtgatttgggtgggcttttacatcttgcctaccattgcatgaaacattggggtttcttcaaaatgtgtgtgtcatacttcttttgggaggggggttgttttcttctgtttattttctgagactcctacaggagccaaatttgtaatttagagacacttaattttgttaatcctgtctgggacacttaagtaacatctaaagcattattgctttagaatgttcaaataaaatttcctgaccaaattgttttgtggaaatagatgtgtttgcaatttgaagatatctttctgtccagaaggcaaaattaccgaatgccatttttaaaagtatgctataaactatgctactctcatacaggggacccgtattttaaaatctccagacttgcttacatctagattatccagcacaatcataaagtgaatgacaaaccctttgaatgaaattgtggcacaaaatctgttcaggttggtgtaccgtgtaaagtggggatggggtaaaagtggttaacgtactgttggatcaacaaataaaggttacagttttgtaagagaagtgatttgaatacatttttctggaactattcataatatgaagttttcctagaaccactgagtttctagtttaatagtttgctatgcaaatgaccacctaaaacaatactttatattgttatttttagaaagactcaaaacacctgtatttaaaccttaatatgaaaatcatgcaattaatagttacacaagatgttttcattacaaaatatgtacctatatattgatggactctacatcctatattgtgacatgtaagtcctttaaaaggtgaaaagtatgatttcttaccacttaagtatgattgatatgatccaacaaatttgatcagaagctgtaggtaaatcctcttctgaagccaaaatggtatattaaatataatttattggtacttccattttctcttccttcttacttgcctttaagatcttataaaaaagaaactaaaagttaatatttagttgcctatattatgtaaccttttaactatatataaagtacttttttggtttctttctcaccacttttattcaaaagtacttttaacataccaatacatagtctgtctgatgggagtataaattggacagtaaggttttgtcttaataaaatgaaatttgtttctcatgatatgaatcttgcaggtaagatgtagggtttattgaaaatgtgtgggttaaatgctttcaggtacaccaattctttctactaaattgagctctatttgaagttctttggaatctgtggtgaaaaataattttctgatttccaaatacattaagagcattaaatgaatattaatcacctttaaagtcttttagaaaaggacttgtattggtttttggctgcatagaggggttgaataagtgtatgtatgtgtgtgcgtgtgtgtgtgtcttcttaaagaagatgtaattcacaaatagtttagctccctagcgctcagttgtagaatagaaaatagaacattattcaagttaattgaaaggtgaggtttttatacccccactaatgctgtgtatctgtctttcgtttgttaacattatttgcttaatttctttcaactcacactttggataatactatcaaaaactaaggctaaacattccttgtgtatctttaagcatgcttctcctgaaatttaactacattagtagttgacatttgtatacatatatcctaatacaagagtaggataaggtggaaatgtaatggcctgagggatggtgaagcattcttttagtatttttcatcatgttgggctcctagattgtactggggttgcccataaatcaaaccccatactcttagaattcattatattatggtgatatccgaacctagtgaatggtatgcttgggtgttttccattgagagcggatggacctctttataaagttggttgctgcaaaatccagttcttccaaaagccactttatttagggtttattcacaagtcatatccattttggtacagtgtttgtttcctaatatttattaaccaccttataccaaatgtcttgcaaagaaatgttattaaaaccttgaatttttacaaatgtaaaaaacaaaaagtgtattaatgtatttgttcaggaaaagctacataccgaagggcttttgtatatgaattctgtggtggggagacccatttgtaatctatatggcagttccatctgggttttaagtttagatttcaccgtgtcttagtgcttcattctattggtttattggaacatgtaataaataggagtagtgatgtattaaaacacaagtattcattaatgttttatatcttcactaaaattctatagttatgaaactattttatcaatcaaggtgttatatttcagtcagaagtgaaaatttatgaagagtatttggaagtgtgtacagaaataaactagacttacaggtaggctagatcagaacgttaacatatgaacctgcagaaatctggtaagacttaaattcagtgtgaggaataactctagttctctcctatgagcatttcctaaaagccatctgatttggcattcttactggagctgcagacagaaatctacaaagacaaaagtaaacaaaattaagttattattccactgttaggaatggaaataaacttgtgaagtctgtttattttgaagtattggtgaactaggcttgctaattgataactgcagcagtttgtgtttactccagttcatcagcttaggtcatttgaaagatataagagcttaaggcaagaaagaaataacatggaattctatttgaaggacaacagaacattcttggaagagcatggacagtcggtgcagagttccaaggaaacaattattgcctgatgaccacttccattttgtatacactctttggttcgtataggccatattccaactggctttttagtaatagaaatccagtatataatgtatcaaatacaattgaggttctaacctagtgtgttaatttatctgaatttggatttttaaaaagtaataaaaagttaaatgta

SEQ ID NO: 385487 - DNA, 6493 bp, Homo sapiens
cagccaggaaaaaagcttaagcattttggccaaggttacacaacccgaaacaccgggacgcggcccggaggcggcttcggccttgcggtccaggctaggccactgcgccggggcccagcctgctcggcgcccgcccgagtgctcggcaggcccgtagcgccgcggctcccaggagccgaggggcagccggcgcgcaggcggcggttgccgggccctccctcggcccggcggcggtggcggccccgcgtcgcgaggcacttccggcgcgtgccggggtggccggatgacgtggctgagtcagaggaagaggctgaggaggcgcggggggcgggggaggctcaggagcgggcggtgacggcgacggcggcggcagaggaggcagcggctgggccgggccccgtgcgtctgtccgcgccccgtggatgcgaatcggccgcggcggaggcggcggcggcggaggaggcggcggcgggaggaggagtcggtgagccggctccgggccggaggggcgcggaggatgaggccgctgcctggcgctcttggcgtggcggcggccgccgcgctgtggctgctgctgctgctgctgccccggacccgggcggacgagcacgaacacacgtatcaagataaagaggaagttgtcttatggatgaatactgttgggccctaccataatcgtcaagaaacatataagtacttttcacttccattctgtgtggggtcaaaaaaaagtatcagtcattaccatgaaactctgggagaagcacttcaaggggttgaattggaatttagtggtctggatattaaatttaaagatgatgtgatgccagccacttactgtgaaattgatttagataaagaaaagagagatgcatttgtatatgccataaaaaatcattactggtaccagatgtacatagatgatttaccaatatggggtattgttggtgaggctgatgaaaatggagaagattactatctttggacctataaaaaacttgaaataggttttaatggaaatcgaattgttgatgttaatctaactagtgaaggaaaggtgaaactggttccaaatactaaaatccagatgtcatattcagtaaaatggaaaaagtcagatgtgaaatttgaagatcgatttgacaaatatcttgatccgtccttttttcaacatcggattcattggttttcaattttcaactccttcatgatggtgatcttcttggtgggcttagtttcaatgattttaatgagaacattaagaaaagattatgctcggtacagtaaagaggaagaaatggatgatatggatagagacctaggagatgaatatggatggaaacaggtgcatggagatgtatttagaccatcaagtcacccactgatattttcctctctgattggttctggatgtcagatatttgctgtgtctctcatcgttattattgttgcaatgatagaagatttatatactgagaggggatcaatgctcagtacagccatatttgtctatgctgctacgtctccagtgaatggttattttggaggaagtctgtatgctagacaaggaggaaggagatggataaagcagatgtttattggggcattccttatcccagctatggtgtgtggcactgccttcttcatcaatttcatagccatttattaccatgcttcaagagccattccttttggaacaatggtggccgtttgttgcatctgtttttttgttattcttcctctaaatcttgttggtacaatacttggccgaaatctgtcaggtcagcccaactttccttgtcgtgtcaatgctgtgcctcgtcctataccggagaaaaaatggttcatggagcctgcggttattgtttgcctgggtggaattttaccttttggttcaatctttattgaaatgtatttcatcttcacgtctttctgggcatataagatctattatgtctatggcttcatgatgctggtgctggttatcctgtgcattgtgactgtctgtgtgactattgtgtgcacatattttctactaaatgcagaagattaccggtgtgccattcattcaaaagagatttatcttctttccccctccccccaccaggcaatggacaagttttctctctgctgcatcaactgcaatctatgtttacatgtattccttttactactattttttcaaaacaaagatgtatggcttatttcaaacatcattttactttggatatatggcggtatttagcacagccttggggataatgtgtggagcgattggttacatgggaacaagtgcctttgtccgaaaaatctatactaatgtgaaaattgactagagacccaagaaaacctggaactttggatcaatttctttttcataggggtggaacttgcacagcaaaaacaaacaaacgcaagaagagatttgggctttaacacactgggtactttgtgggtctctctttcgtcggtggcttaaagtaacatctatttccattgatcctaggttcttcctgactgctttctccaactgttcacagcaaatgcttggattttatgcagtaggcattactacagtacatggctaatcttcccaaaaactagctcattaaagatgaaatagaccagctctcttcagtgaagaggacaaatagtttatttaaagcatttgttccaataaaataaatagagggaaacttggatgctaaaattacatgaataggaatcttcctggcacttagtgtttctatgttattgaaaaatgatgttccagaaagattacttttttcctcttatttttactgccattgtcgacctattgtgggacatttttatatattgaatctgggttcttttttgacttttttttttcccaatccaacagcatccttttttttaaaagagagaattagaaaatattaaatcctgcatgtaatatatctgctgtcatcttagttggaccaacttcccatttatttatcttaaaactatacagttacatcttaattccatccaaagaagatacagtttgaagacagaagtgtactctctacaatgcaatttactgtacagttagaaagcaaagtgttaaatggagaagatacttgtttttattaaacattttgagatttagataaactacattttaactgaatgtctaaagtgattatcttttttccccccaagttagtcttaaatcttttgggtttgaatgaaggttttacataagaaattattaaaaacaaggggggtgggtaataaatgtatataacattaaataatgtaacgtaggtgtagattcccaaatgcatttggatgtacagatcgactacagagtacttttttcttatgatgattggtgtagaaatgtgtgatttgggtgggcttttacatcttgcctaccattgcatgaaacattggggtttcttcaaaatgtgtgtgtcatacttcttttgggaggggggttgttttcttctgtttattttctgagactcctacaggagccaaatttgtaatttagagacacttaattttgttaatcctgtctgggacacttaagtaacatctaaagcattattgctttagaatgttcaaataaaatttcctgaccaaattgttttgtggaaatagatgtgtttgcaatttgaagatatctttctgtccagaaggcaaaattaccgaatgccatttttaaaagtatgctataaactatgctactctcatacaggggacccgtattttaaaatctccagacttgcttacatctagattatccagcacaatcataaagtgaatgacaaaccctttgaatgaaattgtggcacaaaatctgttcaggttggtgtaccgtgtaaagtggggatggggtaaaagtggttaacgtactgttggatcaacaaataaaggttacagttttgtaagagaagtgatttgaatacatttttctggaactattcataatatgaagttttcctagaaccactgagtttctagtttaatagtttgctatgcaaatgaccacctaaaacaatactttatattgttatttttagaaagactcaaaacacctgtatttaaaccttaatatgaaaatcatgcaattaatagttacacaagatgttttcattacaaaatatgtacctatatattgatggactctacatcctatattgtgacatgtaagtcctttaaaaggtgaaaagtatgatttcttaccacttaagtatgattgatatgatccaacaaatttgatcagaagctgtaggtaaatcctcttctgaagccaaaatggtatattaaatataatttattggtacttccattttctcttccttcttacttgcctttaagatcttataaaaaagaaactaaaagttaatatttagttgcctatattatgtaaccttttaactatatataaagtacttttttggtttctttctcaccacttttattcaaaagtacttttaacataccaatacatagtctgtctgatgggagtataaattggacagtaaggttttgtcttaataaaatgaaatttgtttctcatgatatgaatcttgcaggtaagatgtagggtttattgaaaatgtgtgggttaaatgctttcaggtacaccaattctttctactaaattgagctctatttgaagttctttggaatctgtggtgaaaaataattttctgatttccaaatacattaagagcattaaatgaatattaatcacctttaaagtcttttagaaaaggacttgtattggtttttggctgcatagaggggttgaataagtgtatgtatgtgtgtgcgtgtgtgtgtgtcttcttaaagaagatgtaattcacaaatagtttagctccctagcgctcagttgtagaatagaaaatagaacattattcaagttaattgaaaggtgaggtttttatacccccactaatgctgtgtatctgtctttcgtttgttaacattatttgcttaatttctttcaactcacactttggataatactatcaaaaactaaggctaaacattccttgtgtatctttaagcatgcttctcctgaaatttaactacattagtagttgacatttgtatacatatatcctaatacaagagtaggataaggtggaaatgtaatggcctgagggatggtgaagcattcttttagtatttttcatcatgttgggctcctagattgtactggggttgcccataaatcaaaccccatactcttagaattcattatattatggtgatatccgaacctagtgaatggtatgcttgggtgttttccattgagagcggatggacctctttataaagttggttgctgcaaaatccagttcttccaaaagccactttatttagggtttattcacaagtcatatccattttggtacagtgtttgtttcctaatatttattaaccaccttataccaaatgtcttgcaaagaaatgttattaaaaccttgaatttttacaaatgtaaaaaacaaaaagtgtattaatgtatttgttcaggaaaagctacataccgaagggcttttgtatatgaattctgtggtggggagacccatttgtaatctatatggcagttccatctgggttttaagtttagatttcaccgtgtcttagtgcttcattctattggtttattggaacatgtaataaataggagtagtgatgtattaaaacacaagtattcattaatgttttatatcttcactaaaattctatagttatgaaactattttatcaatcaaggtgttatatttcagtcagaagtgaaaatttatgaagagtatttggaagtgtgtacagaaataaactagacttacaggtaggctagatcagaacgttaacatatgaacctgcagaaatctggtaagacttaaattcagtgtgaggaataactctagttctctcctatgagcatttcctaaaagccatctgatttggcattcttactggagctgcagacagaaatctacaaagacaaaagtaaacaaaattaagttattattccactgttaggaatggaaataaacttgtgaagtctgtttattttgaagtattggtgaactaggcttgctaattgataactgcagcagtttgtgtttactccagttcatcagcttaggtcatttgaaagatataagagcttaaggcaagaaagaaataacatggaattctatttgaaggacaacagaacattcttggaaaagcagctccagttggtttttcaactgtcaaacttgaatgtgtaagtccccacagagcatggacagtcggtgcagagttccaaggaaacaattattgcctgatgaccacttccattttgtatacactctttggttcgtataggccatattccaactggctttttagtaatagaaatccagtatataatgtatcaaatacaattgaggttctaacctagtgtgttaatttatctgaatttggatttttaaaaagtaataaaaagttaaatgta

SEQ ID NO: 385488 - DNA, 6376 bp, Homo sapiens
cagccaggaaaaaagcttaagcattttggccaaggttacacaacccgaaacaccgggacgcggcccggaggcggcttcggccttgcggtccaggctaggccactgcgccggggcccagcctgctcggcgcccgcccgagtgctcggcaggcccgtagcgccgcggctcccaggagccgaggggcagccggcgcgcaggcggcggttgccgggccctccctcggcccggcggcggtggcggccccgcgtcgcgaggcacttccggcgcgtgccggggtggccggatgacgtggctgagtcagaggaagaggctgaggaggcgcggggggcgggggaggctcaggagcgggcggtgacggcgacggcggcggcagaggaggcagcggctgggccgggccccgtgcgtctgtccgcgccccgtggatgcgaatcggccgcggcggaggcggcggcggcggaggaggcggcggcgggaggaggagtcggtgagccggctccgggccggaggggcgcggaggatgaggccgctgcctggcgctcttggcgtggcggcggccgccgcgctgtggctgctgctgctgctgctgccccggacccgggcggacgagcacgaacacacgtatcaagataaagaggaagttgtcttatggatgaatactgttgggccctaccataatcgtcaagaaacatataagtacttttcacttccattctgtgtggggtcaaaaaaaagtatcagtcattaccatgaaactctgggagaagcacttcaaggggttgaattggaatttagtggtctggatattaaatttaaagatgatgtgatgccagccacttactgtgaaattgatttagataaagaaaagagagatgcatttgtatatgccataaaaaatcattactggtaccagatgtacatagatgatttaccaatatggggtattgttggtgaggctgatgaaaatggagaagattactatctttggacctataaaaaacttgaaataggttttaatggaaatcgaattgttgatgttaatctaactagtgaaggaaaggtgaaactggttccaaatactaaaatccagatgtcatattcagtaaaatggaaaaagtcagatgtgaaatttgaagatcgatttgacaaatatcttgatccgtccttttttcaacatcggattcattggttttcaattttcaactccttcatgatggtgatcttcttggtgggcttagtttcaatgattttaatgagaacattaagaaaagattatgctcggtacagtaaagaggaagaaatggatgatatggatagagacctaggagatgaatatggatggaaacaggtgcatggagatgtatttagaccatcaagtcacccactgatattttcctctctgattggttctggatgtcagatatttgctgtgtctctcatcgttattattgttgcaatgatagaagatttatatactgagaggggatcaatgctcagtacagccatatttgtctatgctgctacgtctccagtgaatggttattttggaggaagtctgtatgctagacaaggaggaaggagatggataaagcagatgtttattggggcattccttatcccagctatggtgtgtggcactgccttcttcatcaatttcatagccatttattaccatgcttcaagagccattccttttggaacaatggtggccgtttgttgcatctgtttttttgttattcttcctctaaatcttgttggtacaatacttggccgaaatctgtcaggtcagcccaactttccttgtcgtgtcaatgctgtgcctcgtcctataccggagaaaaaatggttcatggagcctgcggttattgtttgcctgggtggaattttaccttttggttcaatctttattgaaatgtatttcatcttcacgtctttctgggcatataagatctattatgtctatggcttcatgatgctggtgctggttatcctgtgcattgtgactgtctgtgtgactattgtgtgcacatattttctactaaatgcagaagattaccggtggcaatggacaagttttctctctgctgcatcaactgcaatctatgtttacatgtattccttttactactattttttcaaaacaaagatgtatggcttatttcaaacatcattttactttggatatatggcggtatttagcacagccttggggataatgtgtggagcgattggttacatgggaacaagtgcctttgtccgaaaaatctatactaatgtgaaaattgactagagacccaagaaaacctggaactttggatcaatttctttttcataggggtggaacttgcacagcaaaaacaaacaaacgcaagaagagatttgggctttaacacactgggtactttgtgggtctctctttcgtcggtggcttaaagtaacatctatttccattgatcctaggttcttcctgactgctttctccaactgttcacagcaaatgcttggattttatgcagtaggcattactacagtacatggctaatcttcccaaaaactagctcattaaagatgaaatagaccagctctcttcagtgaagaggacaaatagtttatttaaagcatttgttccaataaaataaatagagggaaacttggatgctaaaattacttttttcctcttatttttactgccattgtcgacctattgtgggacatttttatatattgaatctgggttcttttttgacttttttttttcccaatccaacagcatccttttttttaaaagagagaattagaaaatattaaatcctgcatgtaatatatctgctgtcatcttagttggaccaacttcccatttatttatcttaaaactatacagttacatcttaattccatccaaagaagatacagtttgaagacagaagtgtactctctacaatgcaatttactgtacagttagaaagcaaagtgttaaatggagaagatacttgtttttattaaacattttgagatttagataaactacattttaactgaatgtctaaagtgattatcttttttccccccaagttagtcttaaatcttttgggtttgaatgaaggttttacataagaaattattaaaaacaaggggggtgggtaataaatgtatataacattaaataatgtaacgtaggtgtagattcccaaatgcatttggatgtacagatcgactacagagtacttttttcttatgatgattggtgtagaaatgtgtgatttgggtgggcttttacatcttgcctaccattgcatgaaacattggggtttcttcaaaatgtgtgtgtcatacttcttttgggaggggggttgttttcttctgtttattttctgagactcctacaggagccaaatttgtaatttagagacacttaattttgttaatcctgtctgggacacttaagtaacatctaaagcattattgctttagaatgttcaaataaaatttcctgaccaaattgttttgtggaaatagatgtgtttgcaatttgaagatatctttctgtccagaaggcaaaattaccgaatgccatttttaaaagtatgctataaactatgctactctcatacaggggacccgtattttaaaatctccagacttgcttacatctagattatccagcacaatcataaagtgaatgacaaaccctttgaatgaaattgtggcacaaaatctgttcaggttggtgtaccgtgtaaagtggggatggggtaaaagtggttaacgtactgttggatcaacaaataaaggttacagttttgtaagagaagtgatttgaatacatttttctggaactattcataatatgaagttttcctagaaccactgagtttctagtttaatagtttgctatgcaaatgaccacctaaaacaatactttatattgttatttttagaaagactcaaaacacctgtatttaaaccttaatatgaaaatcatgcaattaatagttacacaagatgttttcattacaaaatatgtacctatatattgatggactctacatcctatattgtgacatgtaagtcctttaaaaggtgaaaagtatgatttcttaccacttaagtatgattgatatgatccaacaaatttgatcagaagctgtaggtaaatcctcttctgaagccaaaatggtatattaaatataatttattggtacttccattttctcttccttcttacttgcctttaagatcttataaaaaagaaactaaaagttaatatttagttgcctatattatgtaaccttttaactatatataaagtacttttttggtttctttctcaccacttttattcaaaagtacttttaacataccaatacatagtctgtctgatgggagtataaattggacagtaaggttttgtcttaataaaatgaaatttgtttctcatgatatgaatcttgcaggtaagatgtagggtttattgaaaatgtgtgggttaaatgctttcaggtacaccaattctttctactaaattgagctctatttgaagttctttggaatctgtggtgaaaaataattttctgatttccaaatacattaagagcattaaatgaatattaatcacctttaaagtcttttagaaaaggacttgtattggtttttggctgcatagaggggttgaataagtgtatgtatgtgtgtgcgtgtgtgtgtgtcttcttaaagaagatgtaattcacaaatagtttagctccctagcgctcagttgtagaatagaaaatagaacattattcaagttaattgaaaggtgaggtttttatacccccactaatgctgtgtatctgtctttcgtttgttaacattatttgcttaatttctttcaactcacactttggataatactatcaaaaactaaggctaaacattccttgtgtatctttaagcatgcttctcctgaaatttaactacattagtagttgacatttgtatacatatatcctaatacaagagtaggataaggtggaaatgtaatggcctgagggatggtgaagcattcttttagtatttttcatcatgttgggctcctagattgtactggggttgcccataaatcaaaccccatactcttagaattcattatattatggtgatatccgaacctagtgaatggtatgcttgggtgttttccattgagagcggatggacctctttataaagttggttgctgcaaaatccagttcttccaaaagccactttatttagggtttattcacaagtcatatccattttggtacagtgtttgtttcctaatatttattaaccaccttataccaaatgtcttgcaaagaaatgttattaaaaccttgaatttttacaaatgtaaaaaacaaaaagtgtattaatgtatttgttcaggaaaagctacataccgaagggcttttgtatatgaattctgtggtggggagacccatttgtaatctatatggcagttccatctgggttttaagtttagatttcaccgtgtcttagtgcttcattctattggtttattggaacatgtaataaataggagtagtgatgtattaaaacacaagtattcattaatgttttatatcttcactaaaattctatagttatgaaactattttatcaatcaaggtgttatatttcagtcagaagtgaaaatttatgaagagtatttggaagtgtgtacagaaataaactagacttacaggtaggctagatcagaacgttaacatatgaacctgcagaaatctggtaagacttaaattcagtgtgaggaataactctagttctctcctatgagcatttcctaaaagccatctgatttggcattcttactggagctgcagacagaaatctacaaagacaaaagtaaacaaaattaagttattattccactgttaggaatggaaataaacttgtgaagtctgtttattttgaagtattggtgaactaggcttgctaattgataactgcagcagtttgtgtttactccagttcatcagcttaggtcatttgaaagatataagagcttaaggcaagaaagaaataacatggaattctatttgaaggacaacagaacattcttggaaaagcagctccagttggtttttcaactgtcaaacttgaatgtgtaagtccccacagagcatggacagtcggtgcagagttccaaggaaacaattattgcctgatgaccacttccattttgtatacactctttggttcgtataggccatattccaactggctttttagtaatagaaatccagtatataatgtatcaaatacaattgaggttctaacctagtgtgttaatttatctgaatttggatttttaaaaagtaataaaaagttaaatgta

SEQ ID NO: 385489 - DNA, 4007 bp, Homo sapiens
cagccaggaaaaaagcttaagcattttggccaaggttacacaacccgaaacaccgggacgcggcccggaggcggcttcggccttgcggtccaggctaggccactgcgccggggcccagcctgctcggcgcccgcccgagtgctcggcaggcccgtagcgccgcggctcccaggagccgaggggcagccggcgcgcaggcggcggttgccgggccctccctcggcccggcggcggtggcggccccgcgtcgcgaggcacttccggcgcgtgccggggtggccggatgacgtggctgagtcagaggaagaggctgaggaggcgcggggggcgggggaggctcaggagcgggcggtgacggcgacggcggcggcagaggaggcagcggctgggccgggccccgtgcgtctgtccgcgccccgtggatgcgaatcggccgcggcggaggcggcggcggcggaggaggcggcggcgggaggaggagtcggtgagccggctccgggccggaggggcgcggaggatgaggccgctgcctggcgctcttggcgtggcggcggccgccgcgctgtggctgctgctgctgctgctgccccggacccgggcggacgagcacgaacacacgtatcaagataaagaggaagttgtcttatggatgaatactgttgggccctaccataatcgtcaagaaacatataagtacttttcacttccattctgtgtggggtcaaaaaaaagtatcagtcattaccatgaaactctgggagaagcacttcaaggggttgaattggaatttagtggtctggatattaaatttaaagatgatgtgatgccagccacttactgtgaaattgatttagataaagaaaagagagatgcatttgtatatgccataaaaaatcattactggtaccagatgtacatagatgatttaccaatatggggtattgttggtgaggctgatgaaaatggagaagattactatctttggacctataaaaaacttgaaataggttttaatggaaatcgaattgttgatgttaatctaactagtgaaggaaaggtgaaactggttccaaatactaaaatccagatgtcatattcagtaaaatggaaaaagtcagatgtgaaatttgaagatcgatttgacaaatatcttgatccgtccttttttcaacatcggattcattggttttcaattttcaactccttcatgatggtgatcttcttggtgggcttagtttcaatgattttaatgagaacattaagaaaagattatgctcggtacagtaaagaggaagaaatggatgatatggatagagacctaggagatgaatatggatggaaacaggtgcatggagatgtatttagaccatcaagtcacccactgatattttcctctctgattggttctggatgtcagatatttgctgtgtctctcatcgttattattgttgcaatgatagaagatttatatactgagaggggatcaatgctcagtacagccatatttgtctatgctgctacgtctccagtgaatggttattttggaggaagtctgtatgctagacaaggaggaaggagatggataaagcagatgtttattggggcattccttatcccagctatggtgtgtggcactgccttcttcatcaatttcatagccatttattaccatgcttcaagagccattccttttggaacaatggtggccgtttgttgcatctgtttttttgttattcttcctctaaatcttgttggtacaatacttggccgaaatctgtcaggtcagcccaactttccttgtcgtgtcaatgctgtgcctcgtcctataccggagaaaaaatggttcatggagcctgcggttattgtttgcctgggtggaattttaccttttggttcaatctttattgaaatgtatttcatcttcacgtctttctgggcatataagatctattatgtctatggcttcatgatgctggtgctggttatcctgtgcattgtgactgtctgtgtgactattgtgtgcacatattttctactaaatgcagaagattaccggtggcaatggacaagttttctctctgctgcatcaactgcaatctatgtttacatgtattccttttactactattttttcaaaacaaagatgtatggcttatttcaaacatcattttactttggatatatggcggtatttagcacagccttggggataatgtgtggagcgattggttacatgggaacaagtgcctttgtccgaaaaatctatactaatgtgaaaattgactagagacccaagaaaacctggaactttggatcaatttctttttcataggggtggaacttgcacagcaaaaacaaacaaacgcaagaagagatttgggctttaacacactgggtactttgtgggtctctctttcgtcggtggcttaaagtaacatctatttccattgatcctaggttcttcctgactgctttctccaactgttcacagcaaatgcttggattttatgcagtaggcattactacagtacatggctaatcttcccaaaaactagctcattaaagatgaaatagaccagctctcttcagtgaagaggacaaatagtttatttaaagcatttgttccaataaaataaatagagggaaacttggatgctaaaattacatgaataggaatcttcctggcacttagtgtttctatgttattgaaaaatgatgttccagaaagattacttttttcctcttatttttactgccattgtcgacctattgtgggacatttttatatattgaatctgggttcttttttgacttttttttttcccaatccaacagcatccttttttttaaaagagagaattagaaaatattaaatcctgcatgtaatatatctgctgtcatcttagttggaccaacttcccatttatttatcttaaaactatacagttacatcttaattccatccaaagaagatacagtttgaagacagaagtgtactctctacaatgcaatttactgtacagttagaaagcaaagtgttaaatggagaagatacttgtttttattaaacattttgagatttagataaactacattttaactgaatgtctaaagtgattatcttttttccccccaagttagtcttaaatcttttgggtttgaatgaaggttttacataagaaattattaaaaacaaggggggtgggtaataaatgtatataacattaaataatgtaacgtaggtgtagattcccaaatgcatttggatgtacagatcgactacagagtacttttttcttatgatgattggtgtagaaatgtgtgatttgggtgggcttttacatcttgcctaccattgcatgaaacattggggtttcttcaaaatgtgtgtgtcatacttcttttgggaggggggttgttttcttctgtttattttctgagactcctacaggagccaaatttgtaatttagagacacttaattttgttaatcctgtctgggacacttaagtaacatctaaagcattattgctttagaatgttcaaataaaatttcctgaccaaattgttttgtggaaatagatgtgtttgcaatttgaagatatctttctgtccagaaggcaaaattaccgaatgccatttttaaaagtatgctataaactatgctactctcatacaggggacccgtattttaaaatctccagacttgcttacatctagattatccagcacaatcataaagtgaatgacaaaccctttgaatgaaattgtggcacaaaatctgttcaggttggtgtaccgtgtaaagtggggatggggtaaaagtggttaacgtactgttggatcaacaaataaaggttacagttttgtaagaaaaaaacaaacaaaaaaatttgggggcggcccgaaaatttatacattgtgggcggcccggtttgaatgtgtacgtcaaaactgggatgtggttccaaaaggcggggcttaacaagggtggcggttagcagctgc

SEQ ID NO: 385490 - DNA, 3837 bp, Homo sapiens
cagccaggaaaaaagcttaagcattttggccaaggttacacaacccgaaacaccgggacgcggcccggaggcggcttcggccttgcggtccaggctaggccactgcgccggggcccagcctgctcggcgcccgcccgagtgctcggcaggcccgtagcgccgcggctcccaggagccgaggggcagccggcgcgcaggcggcggttgccgggccctccctcggcccggcggcggtggcggccccgcgtcgcgaggcacttccggcgcgtgccggggtggccggatgacgtggctgagtcagaggaagaggctgaggaggcgcggggggcgggggaggctcaggagcgggcggtgacggcgacggcggcggcagaggaggcagcggctgggccgggccccgtgcgtctgtccgcgccccgtggatgcgaatcggccgcggcggaggcggcggcggcggaggaggcggcggcgggaggaggagtcggtgagccggctccgggccggaggggcgcggaggatgaggccgctgcctggcgctcttggcgtggcggcggccgccgcgctgtggctgctgctgctgctgctgccccggacccgggcggacgagcacgaacacacgtatcaagataaagaggaagttgtcttatggatgaatactgttgggccctaccataatcgtcaagaaacatataagtacttttcacttccattctgtgtggggtcaaaaaaaagtatcagtcattaccatgaaactctgggagaagcacttcaaggggttgaattggaatttagtggtctggatattaaatttaaagatgatgtgatgccagccacttactgtgaaattgatttagataaagaaaagagagatgcatttgtatatgccataaaaaatcattactggtaccagatgtacatagatgatttaccaatatggggtattgttggtgaggctgatgaaaatggagaagattactatctttggacctataaaaaacttgaaataggttttaatggaaatcgaattgttgatgttaatctaactagtgaaggaaaggtgaaactggttccaaatactaaaatccagatgtcatattcagtaaaatggaaaaagtcagatgtgaaatttgaagatcgatttgacaaatatcttgatccgtccttttttcaacatcggattcattggttttcaattttcaactccttcatgatggtgatcttcttggtgggcttagtttcaatgattttaatgagaacattaagaaaagattatgctcggtacagtaaagaggaagaaatggatgatatggatagagacctaggagatgaatatggatggaaacaggtgcatggagatgtatttagaccatcaagtcacccactgatattttcctctctgattggttctggatgtcagatatttgctgtgtctctcatcgttattattgttgcaatgatagaagatttatatactgagaggggatcaatgctcagtacagccatatttgtctatgctgctacgtctccagtgaatggttattttggaggaagtctgtatgctagacaaggaggaaggagatggataaagcagatgtttattggggcattccttatcccagctatggtgtgtggcactgccttcttcatcaatttcatagccatttattaccatgcttcaagagccattccttttggaacaatggtggccgtttgttgcatctgtttttttgttattcttcctctaaatcttgttggtacaatacttggccgaaatctgtcaggtcagcccaactttccttgtcgtgtcaatgctgtgcctcgtcctataccggagaaaaaatggttcatggagcctgcggttattgtttgcctgggtggaattttaccttttggttcaatctttattgaaatgtatttcatcttcacgtctttctgggcatataagatctattatgtctatggcttcatgatgctggtgctggttatcctgtgcattgtgactgtctgtgtgactattgtgtgcacatattttctactaaatgcagaagattaccggtggcaatggacaagttttctctctgctgcatcaactgcaatctatgtttacatgtattccttttactactattttttcaaaacaaagatgtatggcttatttcaaacatcattttactttggatatatggcggtatttagcacagccttggggataatgtgtggagcgattggttacatgggaacaagtgcctttgtccgaaaaatctatactaatgtgaaaattgactagagacccaagaaaacctggaactttggatcaatttctttttcataggggtggaacttgcacagcaaaaacaaacaaacgcaagaagagatttgggctttaacacactgggtactttgtgggtctctctttcgtcggtggcttaaagtaacatctatttccattgatcctaggttcttcctgactgctttctccaactgttcacagcaaatgcttggattttatgcagtaggcattactacagtacatggctaatcttcccaaaaactagctcattaaagatgaaatagaccagctctcttcagtgaagaggacaaatagtttatttaaagcatttgttccaataaaataaatagagggaaacttggatgctaaaattacatgaataggaatcttcctggcacttagtgtttctatgttattgaaaaatgatgttccagaaagattacttttttcctcttatttttactgccattgtcgacctattgtgggacatttttatatattgaatctgggttcttttttgacttttttttttcccaatccaacagcatccttttttttaaaagagagaattagaaaatattaaatcctgcatgtaatatatctgctgtcatcttagttggaccaacttcccatttatttatcttaaaactatacagttacatcttaattccatccaaagaagatacagtttgaagacagaagtgtactctctacaatgcaatttactgtacagttagaaagcaaagtgttaaatggagaagatacttgtttttattaaacattttgagatttagataaactacattttaactgaatgtctaaagtgattatcttttttccccccaagttagtcttaaatcttttgggtttgaatgaaggttttacataagaaattattaaaaacaaggggggtgggtaataaatgtatataacattaaataatgtaacgtaggtgtagattcccaaatgcatttggatgtacagatcgactacagagtacttttttcttatgatgattggtgtagaaatgtgtgatttgggtgggcttttacatcttgcctaccattgcatgaaacattggggtttcttcaaaatgtgtgtgtcatacttcttttgggaggggggttgttttcttctgtttattttctgagactcctacaggagccaaatttgtaatttagagacacttaattttgttaatcctgtctgggacacttaagtaacatctaaagcattattgctttagaatgttcaaataaaatttcctgaccaaaagaatcatataacctacgaacaaaaaagaggggggagctaaaaattcccaggggccacttatcggtccccgttctcggaacaaggggctcaaggagcgtattaaagaaggcgggcgggtgaacagctgaaggaacgtctcggtctgggagaccctggtgggccatggccccccacagtagcccggataataagttttgacccttccctgaatgctatatactctatctactccgcccacatctacactgagccacgtgcacgtcatagatcaa

SEQ ID NO: 385491 - DNA, 3577 bp, Homo sapiens
  misc_feature (3484)..(3484): n is a, c, g, or t
  misc_feature (3486)..(3486): n is a, c, g, or t
  misc_feature (3497)..(3498): n is a, c, g, or t
  misc_feature (3509)..(3509): n is a, c, g, or t
  misc_feature (3512)..(3512): n is a, c, g, or t
  misc_feature (3514)..(3514): n is a, c, g, or t
  misc_feature (3519)..(3519): n is a, c, g, or t
cagccaggaaaaaagcttaagcattttggccaaggttacacaacccgaaacaccgggacgcggcccggaggcggcttcggccttgcggtccaggctaggccactgcgccggggcccagcctgctcggcgcccgcccgagtgctcggcaggcccgtagcgccgcggctcccaggagccgaggggcagccggcgcgcaggcggcggttgccgggccctccctcggcccggcggcggtggcggccccgcgtcgcgaggcacttccggcgcgtgccggggtggccggatgacgtggctgagtcagaggaagaggctgaggaggcgcggggggcgggggaggctcaggagcgggcggtgacggcgacggcggcggcagaggaggcagcggctgggccgggccccgtgcgtctgtccgcgccccgtggatgcgaatcggccgcggcggaggcggcggcggcggaggaggcggcggcgggaggaggagtcggtgagccggctccgggccggaggggcgcggaggatgaggccgctgcctggcgctcttggcgtggcggcggccgccgcgctgtggctgctgctgctgctgctgccccggacccgggcggacgagcacgaacacacgtatcaagataaagaggaagttgtcttatggatgaatactgttgggccctaccataatcgtcaagaaacatataagtacttttcacttccattctgtgtggggtcaaaaaaaagtatcagtcattaccatgaaactctgggagaagcacttcaaggggttgaattggaatttagtggtctggatattaaatttaaagatgatgtgatgccagccacttactgtgaaattgatttagataaagaaaagagagatgcatttgtatatgccataaaaaatcattactggtaccagatgtacatagatgatttaccaatatggggtattgttggtgaggctgatgaaaatggagaagattactatctttggacctataaaaaacttgaaataggttttaatggaaatcgaattgttgatgttaatctaactagtgaaggaaaggtgaaactggttccaaatactaaaatccagatgtcatattcagtaaaatggaaaaagtcagatgtgaaatttgaagatcgatttgacaaatatcttgatccgtccttttttcaacatcggattcattggttttcaattttcaactccttcatgatggtgatcttcttggtgggcttagtttcaatgattttaatgagaacattaagaaaagattatgctcggtacagtaaagaggaagaaatggatgatatggatagagacctaggagatgaatatggatggaaacaggtgcatggagatgtatttagaccatcaagtcacccactgatattttcctctctgattggttctggatgtcagatatttgctgtgtctctcatcgttattattgttgcaatgatagaagatttatatactgagaggggatcaatgctcagtacagccatatttgtctatgctgctacgtctccagtgaatggttattttggaggaagtctgtatgctagacaaggaggaaggagatggataaagcagatgtttattggggcattccttatcccagctatggtgtgtggcactgccttcttcatcaatttcatagccatttattaccatgcttcaagagccattccttttggaacaatggtggccgtttgttgcatctgtttttttgttattcttcctctaaatcttgttggtacaatacttggccgaaatctgtcaggtcagcccaactttccttgtcgtgtcaatgctgtgcctcgtcctataccggagaaaaaatggttcatggagcctgcggttattgtttgcctgggtggaattttaccttttggttcaatctttattgaaatgtatttcatcttcacgtctttctgggcatataagatctattatgtctatggcttcatgatgctggtgctggttatcctgtgcattgtgactgtctgtgtgactattgtgtgcacatattttctactaaatgcagaagattaccggtggcaatggacaagttttctctctgctgcatcaactgcaatctatgtttacatgtattccttttactactattttttcaaaacaaagatgtatggcttatttcaaacatcattttactttggatatatggcggtatttagcacagccttggggataatgtgtggagcgattggttacatgggaacaagtgcctttgtccgaaaaatctatactaatgtgaaaattgactagagacccaagaaaacctggaactttggatcaatttctttttcataggggtggaacttgcacagcaaaaacaaacaaacgcaagaagagatttgggctttaacacactgggtactttgtgggtctctctttcgtcggtggcttaaagtaacatctatttccattgatcctaggttcttcctgactgctttctccaactgttcacagcaaatgcttggattttatgcagtaggcattactacagtacatggctaatcttcccaaaaactagctcattaaagatgaaatagaccagctctcttcagtgaagaggacaaatagtttatttaaagcatttgttccaataaaataaatagagggaaacttggatgctaaaattacatgaataggaatcttcctggcacttagtgtttctatgttattgaaaaatgatgttccagaaagattacttttttcctcttatttttactgccattgtcgacctattgtgggacatttttatatattgaatctgggttcttttttgacttttttttttcccaatccaacagcatccttttttttaaaagagagaattagaaaatattaaatcctgcatgtaatatatctgctgtcatcttagttggaccaacttcccatttatttatcttaaaactatacagttacatcttaattccatccaaagaagatacagtttgaagacagaagtgtactctctacaatgcaatttactgtacagttagaaagcaaagtgttaaatggagaagatacttgtttttattaaacattttgagatttagataaactacattttaactgaatgtctaaagtgattatcttttttccccccaagttagtcttaaatcttttgggtttgaatgaaggttttacataagaaattattaaaaacaaggggggtgggtaataaatgtatataacattaaataatgtaacgtaggtgtagattcccaaatgcatttggatgtacagatcgactacagagtacttttttcttatgatgattggtgtagaaatgtgtgatttgggtgggcttttacatcttgcctaccattgcatgaaacattggggtttcttcaaaatgtgtgtgtcatacttcttttgggaggggggttgttttcttctgtttattttctgagactcctacaggagccaaatttgtaatttagagctattgtatcngntggactagtannttaagctttgnttnantgcantaattccggcacattgttggcaacattgtgcatgaaatttcgcaagaaaaccagctta

SEQ ID NO: 385492 - DNA, 3532 bp, Homo sapiens
tctagagcggccgcctactactactactactactaaattcgcggccgcgtcgacaagaagatacagtttgaagacagaagtgtactctctacaatgcaatttactgtacagttagaaagcaaagtgttaaatggagaagatacttgtttttattaaacattttgagatttagataaactacattttaactgaatgtctaaagtgattatcttttttccccccaagttagtcttaaatcttttgggtttgaatgaaggttttacataagaaattattaaaaacaaggggggtgggtaataaatgtatataacattaaataatgtaacgtaggtgtagattcccaaatgcatttggatgtacagatcgactacagagtacttttttcttatgatgattggtgtagaaatgtgtgatttgggtgggcttttacatcttgcctaccattgcatgaaacattggggtttcttcaaaatgtgtgtgtcatacttcttttgggaggggggttgttttcttctgtttattttctgagactcctacaggagccaaatttgtaatttagagacacttaattttgttaatcctgtctgggacacttaagtaacatctaaagcattattgctttagaatgttcaaataaaatttcctgaccaaattgttttgtggaaatagatgtgtttgcaatttgaagatatctttctgtccagaaggcaaaattaccgaatgccatttttaaaagtatgctataaactatgctactctcatacaggggacccgtattttaaaatctccagacttgcttacatctagattatccagcacaatcataaagtgaatgacaaaccctttgaatgaaattgtggcacaaaatctgttcaggttggtgtaccgtgtaaagtggggatggggtaaaagtggttaacgtactgttggatcaacaaataaaggttacagttttgtaagagaagtgatttgaatacatttttctggaactattcataatatgaagttttcctagaaccactgagtttctagtttaatagtttgctatgcaaatgaccacctaaaacaatactttatattgttatttttagaaagactcaaaacacctgtatttaaaccttaatatgaaaatcatgcaattaatagttacacaagatgttttcattacaaaatatgtacctatatattgatggactctacatcctatattgtgacatgtaagtcctttaaaaggtgaaaagtatgatttcttaccacttaagtatgattgatatgatccaacaaatttgatcagaagctgtaggtaaatcctcttctgaagccaaaatggtatattaaatataatttattggtacttccattttctcttccttcttacttgcctttaagatcttataaaaaagaaactaaaagttaatatttagttgcctatattatgtaaccttttaactatatataaagtacttttttggtttctttctcaccacttttattcaaaagtacttttaacataccaatacatagtctgtctgatgggagtataaattggacagtaaggttttgtcttaataaaatgaaatttgtttctcatgatatgaatcttgcaggtaagatgtagggtttattgaaaatgtgtgggttaaatgctttcaggtacaccaattctttctactaaattgagctctatttgaagttctttggaatctgtggtgaaaaataattttctgatttccaaatacattaagagcattaaatgaatattaatcacctttaaagtcttttagaaaaggacttgtattggtttttggctgcatagaggggttgaataagtgtatgtatgtgtgtgcgtgtgtgtgtgtcttcttaaagaagatgtaattcacaaatagtttagctccctagcgctcagttgtagaatagaaaatagaacattattcaagttaattgaaaggtgaggtttttatacccccactaatgctgtgtatctgtctttcgtttgttaacattatttgcttaatttctttcaactcacactttggataatactatcaaaaactaaggctaaacattccttgtgtatctttaagcatgcttctcctgaaatttaactacattagtagttgacatttgtatacatatatcctaatacaagagtaggataaggtggaaatgtaatggcctgagggatggtgaagcattcttttagtatttttcatcatgttgggctcctagattgtactggggttgcccataaatcaaaccccatactcttagaattcattatattatggtgatatccgaacctagtgaatggtatgcttgggtgttttccattgagagcggatggacctctttataaagttggttgctgcaaaatccagttcttccaaaagccactttatttagggtttattcacaagtcatatccattttggtacagtgtttgtttcctaatatttattaaccaccttataccaaatgtcttgcaaagaaatgttattaaaaccttgaatttttacaaatgtaaaaaacaaaaagtgtattaatgtatttgttcaggaaaagctacataccgaagggcttttgtatatgaattctgtggtggggagacccatttgtaatctatatggcagttccatctgggttttaagtttagatttcaccgtgtcttagtgcttcattctattggtttattggaacatgtaataaataggagtagtgatgtattaaaacacaagtattcattaatgttttatatcttcactaaaattctatagttatgaaactattttatcaatcaaggtgttatatttcagtcagaagtgaaaatttatgaagagtatttggaagtgtgtacagaaataaactagacttacaggtaggctagatcagaacgttaacatatgaacctgcagaaatctggtaagacttaaattcagtgtgaggaataactctagttctctcctatgagcatttcctaaaagccatctgatttggcattcttactggagctgcagacagaaatctacaaagacaaaagtaaacaaaattaagttattattccactgttaggaatggaaataaacttgtgaagtctgtttattttgaagtattggtgaactaggcttgctaattgataactgcagcagtttgtgtttactccagttcatcagcttaggtcatttgaaagatataagagcttaaggcaagaaagaaataacatggaattctatttgaaggacaacagaacattcttggaaaagcagctccagttggtttttcaactgtcaaacttgaatgtgtaagtccccacagagcatggacagtcggtgcagagttccaaggaaacaattattgcctgatgaccacttccattttgtatacactctttggttcgtataggccatattccaactggctttttagtaatagaaatccagtatataatgtatcaaatacaattgaggttctaacctagtgtgttaatttatctgaatttggatttttaaaaagtaataaaaagttaaatgta

SEQ ID NO: 385493 - DNA, 3482 bp, Homo sapiens
ttcaatttctacacagtgatctgctctaagcaaattaatcaaacctgaagaggtaggcatagagaccccgatttacagtgggttggtcaaaagtacaggtcacaacctgtaagcttgtgattggcatcgcaagtgggaggcagtcttggaggattgaaccattaaactgtgggatctgacgctatctccaagtaaatagtgtagaaattgaacgttcaatttctacacaaacaaggggggtgggtaataaatgtatataacattaaataatgtaacgtaggtgtagattcccaaatgcatttggatgtacagatcgactacagagtacttttttcttatgatgattggtgtagaaatgtgtgatttgggtgggcttttacatcttgcctaccattgcatgaaacattggggtttcttcaaaatgtgtgtgtcatacttcttttgggaggggggttgttttcttctgtttattttctgagactcctacaggagccaaatttgtaatttagagacacttaattttgttaatcctgtctgggacacttaagtaacatctaaagcattattgctttagaatgttcaaataaaatttcctgaccaaattgttttgtggaaatagatgtgtttgcaatttgaagatatctttctgtccagaaggcaaaattaccgaatgccatttttaaaagtatgctataaactatgctactctcatacaggggacccgtattttaaaatctccagacttgcttacatctagattatccagcacaatcataaagtgaatgacaaaccctttgaatgaaattgtggcacaaaatctgttcaggttggtgtaccgtgtaaagtggggatggggtaaaagtggttaacgtactgttggatcaacaaataaaggttacagttttgtaagagaagtgatttgaatacatttttctggaactattcataatatgaagttttcctagaaccactgagtttctagtttaatagtttgctatgcaaatgaccacctaaaacaatactttatattgttatttttagaaagactcaaaacacctgtatttaaaccttaatatgaaaatcatgcaattaatagttacacaagatgttttcattacaaaatatgtacctatatattgatggactctacatcctatattgtgacatgtaagtcctttaaaaggtgaaaagtatgatttcttaccacttaagtatgattgatatgatccaacaaatttgatcagaagctgtaggtaaatcctcttctgaagccaaaatggtatattaaatataatttattggtacttccattttctcttccttcttacttgcctttaagatcttataaaaaagaaactaaaagttaatatttagttgcctatattatgtaaccttttaactatatataaagtacttttttggtttctttctcaccacttttattcaaaagtacttttaacataccaatacatagtctgtctgatgggagtataaattggacagtaaggttttgtcttaataaaatgaaatttgtttctcatgatatgaatcttgcaggtaagatgtagggtttattgaaaatgtgtgggttaaatgctttcaggtacaccaattctttctactaaattgagctctatttgaagttctttggaatctgtggtgaaaaataattttctgatttccaaatacattaagagcattaaatgaatattaatcacctttaaagtcttttagaaaaggacttgtattggtttttggctgcatagaggggttgaataagtgtatgtatgtgtgtgcgtgtgtgtgtgtcttcttaaagaagatgtaattcacaaatagtttagctccctagcgctcagttgtagaatagaaaatagaacattattcaagttaattgaaaggtgaggtttttatacccccactaatgctgtgtatctgtctttcgtttgttaacattatttgcttaatttctttcaactcacactttggataatactatcaaaaactaaggctaaacattccttgtgtatctttaagcatgcttctcctgaaatttaactacattagtagttgacatttgtatacatatatcctaatacaagagtaggataaggtggaaatgtaatggcctgagggatggtgaagcattcttttagtatttttcatcatgttgggctcctagattgtactggggttgcccataaatcaaaccccatactcttagaattcattatattatggtgatatccgaacctagtgaatggtatgcttgggtgttttccattgagagcggatggacctctttataaagttggttgctgcaaaatccagttcttccaaaagccactttatttagggtttattcacaagtcatatccattttggtacagtgtttgtttcctaatatttattaaccaccttataccaaatgtcttgcaaagaaatgttattaaaaccttgaatttttacaaatgtaaaaaacaaaaagtgtattaatgtatttgttcaggaaaagctacataccgaagggcttttgtatatgaattctgtggtggggagacccatttgtaatctatatggcagttccatctgggttttaagtttagatttcaccgtgtcttagtgcttcattctattggtttattggaacatgtaataaataggagtagtgatgtattaaaacacaagtattcattaatgttttatatcttcactaaaattctatagttatgaaactattttatcaatcaaggtgttatatttcagtcagaagtgaaaatttatgaagagtatttggaagtgtgtacagaaataaactagacttacaggtaggctagatcagaacgttaacatatgaacctgcagaaatctggtaagacttaaattcagtgtgaggaataactctagttctctcctatgagcatttcctaaaagccatctgatttggcattcttactggagctgcagacagaaatctacaaagacaaaagtaaacaaaattaagttattattccactgttaggaatggaaataaacttgtgaagtctgtttattttgaagtattggtgaactaggcttgctaattgataactgcagcagtttgtgtttactccagttcatcagcttaggtcatttgaaagatataagagcttaaggcaagaaagaaataacatggaattctatttgaaggacaacagaacattcttggaaaagcagctccagttggtttttcaactgtcaaacttgaatgtgtaagtccccacagagcatggacagtcggtgcagagttccaaggaaacaattattgcctgatgaccacttccattttgtatacactctttggttcgtataggccatattccaactggctttttagtaatagaaatccagtatataatgtatcaaatacaattgaggttctaacctagtgtgttaatttatctgaatttggatttttaaaaagtaataaaaagttaaatgta

SEQ ID NO: 385494 - DNA, 2495 bp, Homo sapiens
gggaatctaattgttcggaccgggataagtcacatccctgaccatcttatggtattttgaagctcaaacctgtatttaaaccttaatatgaaaatcatgcaattaatagttacacaagatgttttcattacaaaatatgtacctatatattgatggactctacatcctatattgtgacatgtaagtcctttaaaaggtgaaaagtatgatttcttaccacttaagtatgattgatatgatccaacaaatttgatcagaagctgtaggtaaatcctcttctgaagccaaaatggtatattaaatataatttattggtacttccattttctcttccttcttacttgcctttaagatcttataaaaaagaaactaaaagttaatatttagttgcctatattatgtaaccttttaactatatataaagtacttttttggtttctttctcaccacttttattcaaaagtacttttaacataccaatacatagtctgtctgatgggagtataaattggacagtaaggttttgtcttaataaaatgaaatttgtttctcatgatatgaatcttgcaggtaagatgtagggtttattgaaaatgtgtgggttaaatgctttcaggtacaccaattctttctactaaattgagctctatttgaagttctttggaatctgtggtgaaaaataattttctgatttccaaatacattaagagcattaaatgaatattaatcacctttaaagtcttttagaaaaggacttgtattggtttttggctgcatagaggggttgaataagtgtatgtatgtgtgtgcgtgtgtgtgtgtcttcttaaagaagatgtaattcacaaatagtttagctccctagcgctcagttgtagaatagaaaatagaacattattcaagttaattgaaaggtgaggtttttatacccccactaatgctgtgtatctgtctttcgtttgttaacattatttgcttaatttctttcaactcacactttggataatactatcaaaaactaaggctaaacattccttgtgtatctttaagcatgcttctcctgaaatttaactacattagtagttgacatttgtatacatatatcctaatacaagagtaggataaggtggaaatgtaatggcctgagggatggtgaagcattcttttagtatttttcatcatgttgggctcctagattgtactggggttgcccataaatcaaaccccatactcttagaattcattatattatggtgatatccgaacctagtgaatggtatgcttgggtgttttccattgagagcggatggacctctttataaagttggttgctgcaaaatccagttcttccaaaagccactttatttagggtttattcacaagtcatatccattttggtacagtgtttgtttcctaatatttattaaccaccttataccaaatgtcttgcaaagaaatgttattaaaaccttgaatttttacaaatgtaaaaaacaaaaagtgtattaatgtatttgttcaggaaaagctacataccgaagggcttttgtatatgaattctgtggtggggagacccatttgtaatctatatggcagttccatctgggttttaagtttagatttcaccgtgtcttagtgcttcattctattggtttattggaacatgtaataaataggagtagtgatgtattaaaacacaagtattcattaatgttttatatcttcactaaaattctatagttatgaaactattttatcaatcaaggtgttatatttcagtcagaagtgaaaatttatgaagagtatttggaagtgtgtacagaaataaactagacttacaggtaggctagatcagaacgttaacatatgaacctgcagaaatctggtaagacttaaattcagtgtgaggaataactctagttctctcctatgagcatttcctaaaagccatctgatttggcattcttactggagctgcagacagaaatctacaaagacaaaagtaaacaaaattaagttattattccactgttaggaatggaaataaacttgtgaagtctgtttattttgaagtattggtgaactaggcttgctaattgataactgcagcagtttgtgtttactccagttcatcagcttaggtcatttgaaagatataagagcttaaggcaagaaagaaataacatggaattctatttgaaggacaacagaacattcttggaaaagcagctccagttggtttttcaactgtcaaacttgaatgtgtaagtccccacagagcatggacagtcggtgcagagttccaaggaaacaattattgcctgatgaccacttccattttgtatacactctttggttcgtataggccatattccaactggctttttagtaatagaaatccagtatataatgtatcaaatacaattgaggttctaacctagtgtgttaatttatctgaatttggatttttaaaaagtaataaaaagttaaatgta

SEQ ID NO: 385495 - DNA, 1846 bp, Homo sapiens
cttgcggtacgccccgaggttttgatatgtcgaccaggcgctcgcgacgcgtggagccacgcgtctgtggacgcgtgggcggctttaaagtcttttagaaaaggacttgtattggtttttggctgcatagaggggttgaataagtgtatgtatgtgtgtgcgtgtgtgtgtgtcttcttaaagaagatgtaattcacaaatagtttagctccctagcgctcagttgtagaatagaaaatagaacattattcaagttaattgaaaggtgaggtttttatacccccactaatgctgtgtatctgtctttcgtttgttaacattatttgcttaatttctttcaactcacactttggataatactatcaaaaactaaggctaaacattccttgtgtatctttaagcatgcttctcctgaaatttaactacattagtagttgacatttgtatacatatatcctaatacaagagtaggataaggtggaaatgtaatggcctgagggatggtgaagcattcttttagtatttttcatcatgttgggctcctagattgtactggggttgcccataaatcaaaccccatactcttagaattcattatattatggtgatatccgaacctagtgaatggtatgcttgggtgttttccattgagagcggatggacctctttataaagttggttgctgcaaaatccagttcttccaaaagccactttatttagggtttattcacaagtcatatccattttggtacagtgtttgtttcctaatatttattaaccaccttataccaaatgtcttgcaaagaaatgttattaaaaccttgaatttttacaaatgtaaaaaacaaaaagtgtattaatgtatttgttcaggaaaagctacataccgaagggcttttgtatatgaattctgtggtggggagacccatttgtaatctatatggcagttccatctgggttttaagtttagatttcaccgtgtcttagtgcttcattctattggtttattggaacatgtaataaataggagtagtgatgtattaaaacacaagtattcattaatgttttatatcttcactaaaattctatagttatgaaactattttatcaatcaaggtgttatatttcagtcagaagtgaaaatttatgaagagtatttggaagtgtgtacagaaataaactagacttacaggtaggctagatcagaacgttaacatatgaacctgcagaaatctggtaagacttaaattcagtgtgaggaataactctagttctctcctatgagcatttcctaaaagccatctgatttggcattcttactggagctgcagacagaaatctacaaagacaaaagtaaacaaaattaagttattattccactgttaggaatggaaataaacttgtgaagtctgtttattttgaagtattggtgaactaggcttgctaattgataactgcagcagtttgtgtttactccagttcatcagcttaggtcatttgaaagatataagagcttaaggcaagaaagaaataacatggaattctatttgaaggacaacagaacattcttggaaaagcagctccagttggtttttcaactgtcaaacttgaatgtgtaagtccccacagagcatggacagtcggtgcagagttccaaggaaacaattattgcctgatgaccacttccattttgtatacactctttggttcgtataggccatattccaactggctttttagtaatagaaatccagtatataatgtatcaaatacaattgaggttctaacctagtgtgttaatttatctgaatttggatttttaaaaagtaataaaaagttaaatgta

SEQ ID NO: 385496 - DNA, 2252 bp, Homo sapiens
cagccaggaaaaaagcttaagcattttggccaaggttacacaacccgaaacaccgggacgcggcccggaggcggcttcggccttgcggtccaggctaggccactgcgccggggcccagcctgctcggcgcccgcccgagtgctcggcaggcccgtagcgccgcggctcccaggagccgaggggcagccggcgcgcaggcggcggttgccgggccctccctcggcccggcggcggtggcggccccgcgtcgcgaggcacttccggcgcgtgccggggtggccggatgacgtggctgagtcagaggaagaggctgaggaggcgcggggggcgggggaggctcaggagcgggcggtgacggcgacggcggcggcagaggaggcagcggctgggccgggccccgtgcgtctgtccgcgccccgtggatgcgaatcggccgcggcggaggcggcggcggcggaggaggcggcggcgggaggaggagtcggtgagccggctccgggccggaggggcgcggaggatgaggccgctgcctggcgctcttggcgtggcggcggccgccgcgctgtggctgctgctgctgctgctgccccggacccgggcggacgagcacgaacacacgtatcaagataaagaggaagttgtcttatggatgaatactgttgggccctaccataatcgtcaagaaacatataagtacttttcacttccattctgtgtggggtcaaaaaaaagtatcagtcattaccatgaaactctgggagaagcacttcaaggggttgaattggaatttagtggtctggatattaaatttaaagatgatgtgatgccagccacttactgtgaaattgatttagataaagaaaagagagatgcatttgtatatgccataaaaaatcattactggtaccagatgtacatagatgatttaccaatatggggtattgttggtgaggctgatgaaaatggagaagattactatctttggacctataaaaaacttgaaataggttttaatggaaatcgaattgttgatgttaatctaactagtgaaggaaaggtgaaactggttccaaatactaaaatccagatgtcatattcagtaaaatggaaaaagtcagatgtgaaatttgaagatcgatttgacaaatatcttgatccgtccttttttcaacatcggattcattggttttcaattttcaactccttcatgatggtgatcttcttggtgggcttagtttcaatgattttaatgagaacattaagaaaagattatgctcggtacagtaaagaggaagaaatggatgatatggatagagacctaggagatgaatatggatggaaacaggtgcatggagatgtatttagaccatcaagtcacccactgatattttcctctctgattggttctggatgtcagatatttgctgtgtctctcatcgttattattgttgcaatgatagaagatttatatactgagaggggatcaatgctcagtacagccatatttgtctatgctgctacgtctccagtgaatggttattttggaggaagtctgtatgctagacaaggaggaaggagatggataaagcagatgtttattggggcattccttatcccagctatggtgtgtggcactgccttcttcatcaatttcatagccatttattaccatgcttcaagagccattccttttggaacaatggtggccgtttgttgcatctgtttttttgttattcttcctctaaatcttgttggtacaatacttggccgaaatctgtcaggtcagcccaactttccttgtcgtgtcaatgctgtgcctcgtcctataccggagaaaaaatggttcatggagcctgcggttattgtttgcctgggtggaattttaccttttggttcaatctttattgaaatgtaagttttgataatgtatttatgttttgagggatttgattatagtaagacaatttaggagttagggaacatgtaaagttatcagttgggagaacatctaataatctgttaattccatgattccagaaagggaataggctatataaaggtagctgttggctgtgttcttaaatattcaagtgatgtttatacctttttgtattgtattctagacctccctcacctaagaggaaatcttagaaatcaaaactatgtgttaaagaatggtagaccagcctttgatcatatgcatgatttaaggaattcctggtttttattgtattttaaaaatatttctgagg

SEQ ID NO: 385497 - DNA, 143 bp, Homo sapiens
tagaatcattggaactttaaacttgtcgagatcttagaaatctttgacaggcctcccacttgtaccttggaactactcaaagtcattactgaccacacttcagatttagccatgtataatattcactgatatgtagttccata

SEQ ID NO: 385498 - DNA, 3873 bp, Homo sapiens
cagccaggaaaaaagcttaagcattttggccaaggttacacaacccgaaacaccgggacgcggcccggaggcggcttcggccttgcggtccaggctaggccactgcgccggggcccagcctgctcggcgcccgcccgagtgctcggcaggcccgtagcgccgcggctcccaggagccgaggggcagccggcgcgcaggcggcggttgccgggccctccctcggcccggcggcggtggcggccccgcgtcgcgaggcacttccggcgcgtgccggggtggccggatgacgtggctgagtcagaggaagaggctgaggaggcgcggggggcgggggaggctcaggagcgggcggtgacggcgacggcggcggcagaggaggcagcggctgggccgggccccgtgcgtctgtccgcgccccgtggatgcgaatcggccgcggcggaggcggcggcggcggaggaggcggcggcgggaggaggagtcggtgagccggctccgggccggaggggcgcggaggatgaggccgctgcctggcgctcttggcgtggcggcggccgccgcgctgtggctgctgctgctgctgctgccccggacccgggcggacgagcacgaacacacgtatcaagataaagaggaagttgtcttatggatgaatactgttgggccctaccataatcgtcaagaaacatataagtacttttcacttccattctgtgtggggtcaaaaaaaagtatcagtcattaccatgaaactctgggagaagcacttcaaggggttgaattggaatttagtggtctggatattaaatttaaagatgatgtgatgccagccacttactgtgaaattgatttagataaagaaaagagagatgcatttgtatatgccataaaaaatcattactggtaccagatgtacatagatgatttaccaatatggggtattgttggtgaggctgatgaaaatggagaagattactatctttggacctataaaaaacttgaaataggttttaatggaaatcgaattgttgatgttaatctaactagtgaaggaaaggtgaaactggttccaaatactaaaatccagatgtcatattcagtaaaatggaaaaagtcagatgtgaaatttgaagatcgatttgacaaatatcttgatccgtccttttttcaacatcggattcattggttttcaattttcaactccttcatgatggtgatcttcttggtgggcttagtttcaatgattttaatgagaacattaagaaaagattatgctcggtacagtaaagaggaagaaatggatgatatggatagagacctaggagatgaatatggatggaaacaggtgcatggagatgtatttagaccatcaagtcacccactgatattttcctctctgattggttctggatgtcagatatttgctgtgtctctcatcgttattattgttgcaatgatagaagatttatatactgagaggggatcaatgctcagtacagccatatttgtctatgctgctacgtctccagtgaatggttattttggaggaagtctgtatgctagacaaggaggaaggagatggataaagcagatgtttattggggcattccttatcccagctatggtgtgtggcactgccttcttcatcaatttcatagccatttattaccatgcttcaagagccattccttttggaacaatggtggccgtttgttgcatctgtttttttgttattcttcctctaaatcttgttggtacaatacttggccgaaatctgtcaggtcagcccaactttccttgtcgtgtcaatgctgtgcctcgtcctataccggagaaaaaatggttcatggagcctgcggttattgtttgcctgggtggaattttaccttttggttcaatctttattgaaatgtatttcatcttcacgtctttctgggcatataagatctattatgtctatggcttcatgatgctggtgctggttatcctgtgcattgtgactgtctgtgtgactattgtgtgcacatattttctactaaatgcagaagattaccggtggcaatggacaagttttctctctgctgcatcaactgcaatctatgtttacatgtattccttttactactattttttcaaaacaaagatgtatggcttatttcaaacatcattttactttggatatatggcggtatttagcacagccttggggataatgtgtggagcgattggttacatgggaacaagtgcctttgtccgaaaaatctatactaatgtgaaaattgactagagacccaagaaaacctggaactttggatcaatttctttttcataggggtggaacttgcacagcaaaaacaaacaaacgcaagaagagatttgggctttaacacactgggtactttgtgggtctctctttcgtcggtggcttaaagtaacatctatttccattgatcctaggttcttcctgactgctttctccaactgttcacagcaaatgcttggattttatgcagtaggcattactacagtacatggctaatcttcccaaaaactagctcattaaagatgaaatagaccagctctcttcagtgaagaggacaaatagtttatttaaagcatttgttccaataaaataaatagagggaaacttggatgctaaaattacatgaataggaatcttcctggcacttagtgtttctatgttattgaaaaatgatgttccagaaagattacttttttcctcttatttttactgccattgtcgacctattgtgggacatttttatatattgaatctgggttcttttttgacttttttttttcccaatccaacagcatccttttttttaaaagagagaattagaaaatattaaatcctgcatgtaatatatctgctgtcatcttagttggaccaacttcccatttatttatcttaaaactatacagttacatcttaattccatccaaagaagatacagtttgaagacagaagtgtactctctacaatgcaatttactgtacagttagaaagcaaagtgttaaatggagaagatacttgtttttattaaacattttgagatttagataaactacattttaactgaatgtctaaagtgattatcttttttccccccaagttagtcttaaatcttttgggtttgaatgaaggttttacataagaaattattaaaaacaaggggggtgggtaataaatgtatataacattaaataatgtaacgtaggtgtagattcccaaatgcatttggatgtacagatcgactacagagtacttttttcttatgatgattggtgtagaaatgtgtgatttgggtgggcttttacatcttgcctaccattgcatgaaacattggggtttcttcaaaatgtgtgtgtcatacttcttttgggaggggggttgttttcttctgtttattttctgagactcctacaggagccaaatttgtaatttagagacacttaattttgttaatcctgtctgggacacttaagtaacatctaaagcattattgctttagaatgttcaaataaaatttcctgaccaaattgttttgtggaaatagatgtgtttgcaatttgaagatatctttctgtccagaaggcaaaattaccgaatgccatttttaaaagtatgctataaactatgctactctcatacaggggacccgtattttaaaatctccagacttgcttacatctagattatccagcacaatcataaagtgaatgacaaaccctttgaatgaaattgtggcacaaaatctgttcaggttggtgtaccgtgtaaagtggggatggggtaaaagtggttaacgtactgttggatcaacaaataaaggttacagttttgtaaga

SEQ ID NO: 385499 - DNA, 6390 bp, Homo sapiens
cagccaggaaaaaagcttaagcattttggccaaggttacacaacccgaaacaccgggacgcggcccggaggcggcttcggccttgcggtccaggctaggccactgcgccggggcccagcctgctcggcgcccgcccgagtgctcggcaggcccgtagcgccgcggctcccaggagccgaggggcagccggcgcgcaggcggcggttgccgggccctccctcggcccggcggcggtggcggccccgcgtcgcgaggcacttccggcgcgtgccggggtggccggatgacgtggctgagtcagaggaagaggctgaggaggcgcggggggcgggggaggctcaggagcgggcggtgacggcgacggcggcggcagaggaggcagcggctgggccgggccccgtgcgtctgtccgcgccccgtggatgcgaatcggccgcggcggaggcggcggcggcggaggaggcggcggcgggaggaggagtcggtgagccggctccgggccggaggggcgcggaggatgaggccgctgcctggcgctcttggcgtggcggcggccgccgcgctgtggctgctgctgctgctgctgccccggacccgggcggacgagcacgaacacacgtatcaagataaagaggaagttgtcttatggatgaatactgttgggccctaccataatcgtcaagaaacatataagtacttttcacttccattctgtgtggggtcaaaaaaaagtatcagtcattaccatgaaactctgggagaagcacttcaaggggttgaattggaatttagtggtctggatattaaatttaaagatgatgtgatgccagccacttactgtgaaattgatttagataaagaaaagagagatgcatttgtatatgccataaaaaatcattactggtaccagatgtacatagatgatttaccaatatggggtattgttggtgaggctgatgaaaatggagaagattactatctttggacctataaaaaacttgaaataggttttaatggaaatcgaattgttgatgttaatctaactagtgaaggaaaggtgaaactggttccaaatactaaaatccagatgtcatattcagtaaaatggaaaaagtcagatgtgaaatttgaagatcgatttgacaaatatcttgatccgtccttttttcaacatcggattcattggttttcaattttcaactccttcatgatggtgatcttcttggtgggcttagtttcaatgattttaatgagaacattaagaaaagattatgctcggtacagtaaagaggaagaaatggatgatatggatagagacctaggagatgaatatggatggaaacaggtgcatggagatgtatttagaccatcaagtcacccactgatattttcctctctgattggttctggatgtcagatatttgctgtgtctctcatcgttattattgttgcaatgatagaagatttatatactgagaggggatcaatgctcagtacagccatatttgtctatgctgctacgtctccagtgaatggttattttggaggaagtctgtatgctagacaaggaggaaggagatggataaagcagatgtttattggggcattccttatcccagctatggtgtgtggcactgccttcttcatcaatttcatagccatttattaccatgcttcaagagccattccttttggaacaatggtggccgtttgttgcatctgtttttttgttattcttcctctaaatcttgttggtacaatacttggccgaaatctgtcaggtcagcccaactttccttgtcgtgtcaatgctgtgcctcgtcctataccggagaaaaaatggttcatggagcctgcggttattgtttgcctgggtggaattttaccttttggttcaatctttattgaaatgtatttcatcttcacgtctttctgggcatataagatctattatgtctatggcttcatgatgctggtgctggttatcctgtgcattgtgactgtctgtgtgactattgtgtgcacatattttctactaaatgcagaagattaccggtggcaatggacaagttttctctctgctgcatcaactgcaatctatgtttacatgtattccttttactactattttttcaaaacaaagatgtatggcttatttcaaacatcattttactttggatatatggcggtatttagcacagccttggggataatgtgtggagcgattggttacatgggaacaagtgcctttgtccgaaaaatctatactaatgtgaaaattgactagagacccaagaaaacctggaactttggatcaatttctttttcataggggtggaacttgcacagcaaaaacaaacaaacgcaagaagagatttgggctttaacacactgggtactttgtgggtctctctttcgtcggtggcttaaagtaacatctatttccattgatcctaggttcttcctgactgctttctccaactgttcacagcaaatgcttggattttatgcagtaggcattactacagtacatggctaatcttcccaaaaactagctcattaaagatgaaatagaccagctctcttcagtgaagaggacaaatagtttatttaaagcatttgttccaataaaataaatagagggaaacttggatgctaaaattacatgaataggaatcttcctggcacttagtgtttctatgttattgaaaaatgatgttccagaaagattacttttttcctcttatttttactgccattgtcgacctattgtgggacatttttatatattgaatctgggttcttttttgacttttttttttcccaatccaacagcatccttttttttaaaagagagaattagaaaatattaaatcctgcatgtaatatatctgctgtcatcttagttggaccaacttcccatttatttatcttaaaactatacagttacatcttaattccatccaaagaagatacagtttgaagacagaagtgtactctctacaatgcaatttactgtacagttagaaagcaaagtgttaaatggagaagatacttgtttttattaaacattttgagatttagataaactacattttaactgaatgtctaaagtgattatcttttttccccccaagttagtcttaaatcttttgggtttgaatgaaggttttacataagaaattattaaaaacaaggggggtgggtaataaatgtatataacattaaataatgtaacgtaggtgtagattcccaaatgcatttggatgtacagatcgactacagagtacttttttcttatgatgattggtgtagaaatgtgtgatttgggtgggcttttacatcttgcctaccattgcatgaaacattggggtttcttcaaaatgtgtgtgtcatacttcttttgggaggggggttgttttcttctgtttattttctgagactcctacaggagccaaatttgtaatttagagacacttaattttgttaatcctgtctgggacacttaagtaacatctaaagcattattgctttagaatgttcaaataaaatttcctgaccaaattgttttgtggaaatagatgtgtttgcaatttgaagatatctttctgtccagaaggcaaaattaccgaatgccatttttaaaagtatgctataaactatgctactctcatacaggggacccgtattttaaaatctccagacttgcttacatctagattatccagcacaatcataaagtgaatgacaaaccctttgaatgaaattgtggcacaaaatctgttcaggttggtgtaccgtgtaaagtggggatggggtaaaagtggttaacgtactgttggatcaacaaataaaggttacagttttgtaagagaagtgatttgaatacatttttctggaactattcataatatgaagttttcctagaaccactgagtttctagtttaatagtttgctatgcaaatgaccacctaaaacaatactttatattgttatttttagaaagactcaaaacacctgtatttaaaccttaatatgaaaatcatgcaattaatagttacacaagatgttttcattacaaaatatgtacctatatattgatggactctacatcctatattgtgacatgtaagtcctttaaaaggtgaaaagtatgatttcttaccacttaagtatgattgatatgatccaacaaatttgatcagaagctgtaggtaaatcctcttctgaagccaaaatggtatattaaatataatttattggtacttccattttctcttccttcttacttgcctttaagatcttataaaaaagaaactaaaagttaatatttagttgcctatattatgtaaccttttaactatatataaagtacttttttggtttctttctcaccacttttattcaaaagtacttttaacataccaatacatagtctgtctgatgggagtataaattggacagtaaggttttgtcttaataaaatgaaatttgtttctcatgatatgaatcttgcaggtaagatgtagggtttattgaaaatgtgtgggttaaatgctttcaggtacaccaattctttctactaaattgagctctatttgaagttctttggaatctgtggtgaaaaataattttctgatttccaaatacattaagagcattaaatgaatattaatcacctttaaagtcttttagaaaaggacttgtattggtttttggctgcatagaggggttgaataagtgtatgtatgtgtgtgcgtgtgtgtgtgtcttcttaaagaagatgtaattcacaaatagtttagctccctagcgctcagttgtagaatagaaaatagaacattattcaagttaattgaaaggtgaggtttttatacccccactaatgctgtgtatctgtctttcgtttgttaacattatttgcttaatttctttcaactcacactttggataatactatcaaaaactaaggctaaacattccttgtgtatctttaagcatgcttctcctgaaatttaactacattagtagttgacatttgtatacatatatcctaatacaagagtaggataaggtggaaatgtaatggcctgagggatggtgaagcattcttttagtatttttcatcatgttgggctcctagattgtactggggttgcccataaatcaaaccccatactcttagaattcattatattatggtgatatccgaacctagtgaatggtatgcttgggtgttttccattgagagcggatggacctctttataaagttggttgctgcaaaatccagttcttccaaaagccactttatttagggtttattcacaagtcatatccattttggtacagtgtttgtttcctaatatttattaaccaccttataccaaatgtcttgcaaagaaatgttattaaaaccttgaatttttacaaatgtaaaaaacaaaaagtgtattaatgtatttgttcaggaaaagctacataccgaagggcttttgtatatgaattctgtggtggggagacccatttgtaatctatatggcagttccatctgggttttaagtttagatttcaccgtgtcttagtgcttcattctattggtttattggaacatgtaataaataggagtagtgatgtattaaaacacaagtattcattaatgttttatatcttcactaaaattctatagttatgaaactattttatcaatcaaggtgttatatttcagtcagaagtgaaaatttatgaagagtatttggaagtgtgtacagaaataaactagacttacaggtaggctagatcagaacgttaacatatgaacctgcagaaatctggtaagacttaaattcagtgtgaggaataactctagttctctcctatgagcatttcctacaaaagtaaacaaaattaagttattattccactgttaggaatggaaataaacttgtgaagtctgtttattttgaagtattggtgaactaggcttgctaattgataactgcagcagtttgtgtttactccagttcatcagcttaggtcatttgaaagatataagagcttaaggcaagaaagaaataacatggaattctatttgaaggacaacagaacattcttggaaaagcagctccagttggtttttcaactgtcaaacttgaatgtgtaagtccccacagagcatggacagtcggtgcagagttccaaggaaacaattattgcctgatgaccacttccattttgtatacactctttggttcgtataggccatattccaactggctttttagtaatagaaatccagtatataatgtatcaaatacaattgaggttctaacctagtgtgttaatttatctgaatttggatttttaaaaagtaataaaaagttaaatgta

SEQ ID NO: 385500 - DNA, 6361 bp, Homo sapiens
cagccaggaaaaaagcttaagcattttggccaaggttacacaacccgaaacaccgggacgcggcccggaggcggcttcggccttgcggtccaggctaggccactgcgccggggcccagcctgctcggcgcccgcccgagtgctcggcaggcccgtagcgccgcggctcccaggagccgaggggcagccggcgcgcaggcggcggttgccgggccctccctcggcccggcggcggtggcggccccgcgtcgcgaggcacttccggcgcgtgccggggtggccggatgacgtggctgagtcagaggaagaggctgaggaggcgcggggggcgggggaggctcaggagcgggcggtgacggcgacggcggcggcagaggaggcagcggctgggccgggccccgtgcgtctgtccgcgccccgtggatgcgaatcggccgcggcggaggcggcggcggcggaggaggcggcggcgggaggaggagtcggtgagccggctccgggccggaggggcgcggaggatgaggccgctgcctggcgctcttggcgtggcggcggccgccgcgctgtggctgctgctgctgctgctgccccggacccgggcggacgagcacgaacacacgtatcaagataaagaggaagttgtcttatggatgaatactgttgggccctaccataatcgtcaagaaacatataagtacttttcacttccattctgtgtggggtcaaaaaaaagtatcagtcattaccatgaaactctgggagaagcacttcaaggggttgaattggaatttagtggtctggatattaaatttaaagatgatgtgatgccagccacttactgtgaaattgatttagataaagaaaagagagatgcatttgtatatgccataaaaaatcattactggtaccagatgtacatagatgatttaccaatatggggtattgttggtgaggctgatgaaaatggagaagattactatctttggacctataaaaaacttgaaataggttttaatggaaatcgaattgttgatgttaatctaactagtgaaggaaaggtgaaactggttccaaatactaaaatccagatgtcatattcagtaaaatggaaaaagtcagatgtgaaatttgaagatcgatttgacaaatatcttgatccgtccttttttcaacatcggattcattggttttcaattttcaactccttcatgatggtgatcttcttggtgggcttagtttcaatgattttaatgagaacattaagaaaagattatgctcggtacagtaaagaggaagaaatggatgatatggatagagacctaggagatgaatatggatggaaacaggtgcatggagatgtatttagaccatcaagtcacccactgatattttcctctctgattggttctggatgtcagatatttgctgtgtctctcatcgttattattgttgcaatgatagaagatttatatactgagaggggatcaatgctcagtacagccatatttgtctatgctgctacgtctccagtgaatggttattttggaggaagtctgtatgctagacaaggaggaaggagatggataaagcagatgtttattggggcattccttatcccagctatggtgtgtggcactgccttcttcatcaatttcatagccatttattaccatgcttcaagagccattccttttggaacaatggtggccgtttgttgcatctgtttttttgttattcttcctctaaatcttgttggtacaatacttggccgaaatctgtcaggtcagcccaactttccttgtcgtgtcaatgctgtgcctcgtcctataccggagaaaaaatggttcatggagcctgcggttattgtttgcctgggtggaattttaccttttggttcaatctttattgaaatgtatttcatcttcacgtctttctgggcatataagatctattatgtctatggcttcatgatgctggtgctggttatcctgtgcattgtgactgtctgtgtgactattgtgtgcacatattttctactaaatgcagaagattaccggtggcaatggacaagttttctctctgctgcatcaactgcaatctatgtttacatgtattccttttactactattttttcaaaacaaagatgtatggcttatttcaaacatcattttactttggatatatggcggtatttagcacagccttggggataatgtgtggagcgattggttacatgggaacaagtgcctttgtccgaaaaatctatactaatgtgaaaattgactagagacccaagaaaacctggaactttggatcaatttctttttcataggggtggaacttgcacagcaaaaacaaacaaacgcaagaagagatttgggctttaacacactgggtactttgtgggtctctctttcgtcggtggcttaaagtaacatctatttccattgatcctaggttcttcctgactgctttctccaactgttcacagcaaatgcttggattttatgcagtaggcattactacagtacatggctaatcttcccaaaaactagctcattaaagatgaaatagaccagctctcttcagtgaagaggacaaatagtttatttaaagcatttgttccaataaaataaatagagggaaacttggatgctaaaattacatgaataggaatcttcctggcacttagtgtttctatgttattgaaaaatgatgttccagaaagattacttttttcctcttatttttactgccattgtcgacctattgtgggacatttttatatattgaatctgggttcttttttgacttttttttttcccaatccaacagcatccttttttttaaaagagagaattagaaaatattaaatcctgcatgtaatatatctgctgtcatcttagttggaccaacttcccatttatttatcttaaaactatacagttacatcttaattccatccaaagaagatacagtttgaagacagaagtgtactctctacaatgcaatttactgtacagttagaaagcaaagtgttaaatggagaagatacttgtttttattaaacattttgagatttagataaactacattttaactgaatgtctaaagtgattatcttttttccccccaagttagtcttaaatcttttgggtttgaatgaaggttttacataagaaattattaaaaacaaggggggtgggtaataaatgtatataacattaaataatgtaacgtaggtgtagattcccaaatgcatttggatgtacagatcgactacagagtacttttttcttatgatgattggtgtagaaatgtgtgatttgggtgggcttttacatcttgcctaccattgcatgaaacattggggtttcttcaaaatgtgtgtgtcatacttcttttgggaggggggttgttttcttctgtttattttctgagactcctacaggagccaaatttgtaatttagagacacttaattttgttaatcctgtctgggacacttaagtaacatctaaagcattattgctttagaatgttcaaataaaatttcctgaccaaattgttttgtggaaatagatgtgtttgcaatttgaagatatctttctgtccagaaggcaaaattaccgaatgccatttttaaaagtatgctataaactatgctactctcatacaggggacccgtattttaaaatctccagacttgcttacatctagattatccagcacaatcataaagtgaatgacaaaccctttgaatgaaattgtggcacaaaatctgttcaggttggtgtaccgtgtaaagtggggatggggtaaaagtggttaacgtactgttggatcaacaaataaaggttacagttttgtaagagaagtgatttgaatacatttttctggaactattcataatatgaagttttcctagaaccactgagtttctagtttaatagtttgctatgcaaatgaccacctaaaacaatactttatattgttatttttagaaagactcaaaacacctgtatttaaaccttaatatgaaaatcatgcaattaatagttacacaagatgttttcattacaaaatatgtacctatatattgatggactctacatcctatattgtgacatgtaagtcctttaaaaggtgaaaagtatgatttcttaccacttaagtatgattgatatgatccaacaaatttgatcagaagctgtaggtaaatcctcttctgaagccaaaatggtatattaaatataatttattggtacttccattttctcttccttcttacttgcctttaagatcttataaaaaagaaactaaaagttaatatttagttgcctatattatgtaaccttttaactatatataaagtacttttttggtttctttctcaccacttttattcaaaagtacttttaacataccaatacatagtctgtctgatgggagtataaattggacagtaaggttttgtcttaataaaatgaaatttgtttctcatgatatgaatcttgcaggtaagatgtagggtttattgaaaatgtgtgggttaaatgctttcaggtacaccaattctttctactaaattgagctctatttgaagttctttggaatctgtggtgaaaaataattttctgatttccaaatacattaagagcattaaatgaatattaatcacctttaaagtcttttagaaaaggacttgtattggtttttggctgcatagaggggttgaataagtgtatgtatgtgtgtgcgtgtgtgtgtgtcttcttaaagaagatgtaattcacaaatagtttagctccctagcgctcagttgtagaatagaaaatagaacattattcaagttaattgaaaggtgaggtttttatacccccactaatgctgtgtatctgtctttcgtttgttaacattatttgcttaatttctttcaactcacactttggataatactatcaaaaactaaggctaaacattccttgtgtatctttaagcatgcttctcctgaaatttaactacattagtagttgacatttgtatacatatatcctaatacaagagtaggataaggtggaaatgtaatggcctgagggatggtgaagcattcttttagtatttttcatcatgttgggctcctagattgtactggggttgcccataaatcaaaccccatactcttagaattcattatattatggtgatatccgaacctagtgaatggtatgcttgggtgttttccattgagagcggatggacctctttataaagttggttgctgcaaaatccagttcttccaaaagccactttatttagggtttattcacaagtcatatccattttggtacagtgtttgtttcctaatatttattaaccaccttatcaggaaaagctacataccgaagggcttttgtatatgaattctgtggtggggagacccatttgtaatctatatggcagttccatctgggttttaagtttagatttcaccgtgtcttagtgcttcattctattggtttattggaacatgtaataaataggagtagtgatgtattaaaacacaagtattcattaatgttttatatcttcactaaaattctatagttatgaaactattttatcaatcaaggtgttatatttcagtcagaagtgaaaatttatgaagagtatttggaagtgtgtacagaaataaactagacttacaggtaggctagatcagaacgttaacatatgaacctgcagaaatctggtaagacttaaattcagtgtgaggaataactctagttctctcctatgagcatttcctaaaagccatctgatttggcattcttactggagctgcagacagaaatctacaaagacaaaagtaaacaaaattaagttattattccactgttaggaatggaaataaacttgtgaagtctgtttattttgaagtattggtgaactaggcttgctaattgataactgcagcagtttgtgtttactccagttcatcagcttaggtcatttgaaagatataagagcttaaggcaagaaagaaataacatggaattctatttgaaggacaacagaacattcttggaaaagcagctccagttggtttttcaactgtcaaacttgaatgtgtaagtccccacagagcatggacagtcggtgcagagttccaaggaaacaattattgcctgatgaccacttccattttgtatacactctttggttcgtataggccatattccaactggctttttagtaatagaaatccagtatataatgtatcaaatacaattgaggttctaacctagtgtgttaatttatctgaatttggatttttaaaaagtaataaaaagttaaatgta

SEQ ID NO: 385501 - DNA, 5899 bp, Homo sapiens
atctttgacaggcctcccacttgtaccttggaactactcaaagtcattactgaccacacttcagatttagccattatcaagataaagaggaagttgtcttatggatgaatactgttgggccctaccataatcgtcaagaaacatataagtacttttcacttccattctgtgtggggtcaaaaaaaagtatcagtcattaccatgaaactctgggagaagcacttcaaggggttgaattggaatttagtggtctggatattaaatttaaagatgatgtgatgccagccacttactgtgaaattgatttagataaagaaaagagagatgcatttgtatatgccataaaaaatcattactggtaccagatgtacatagatgatttaccaatatggggtattgttggtgaggctgatgaaaatggagaagattactatctttggacctataaaaaacttgaaataggttttaatggaaatcgaattgttgatgttaatctaactagtgaaggaaaggtgaaactggttccaaatactaaaatccagatgtcatattcagtaaaatggaaaaagtcagatgtgaaatttgaagatcgatttgacaaatatcttgatccgtccttttttcaacatcggattcattggttttcaattttcaactccttcatgatggtgatcttcttggtgggcttagtttcaatgattttaatgagaacattaagaaaagattatgctcggtacagtaaagaggaagaaatggatgatatggatagagacctaggagatgaatatggatggaaacaggtgcatggagatgtatttagaccatcaagtcacccactgatattttcctctctgattggttctggatgtcagatatttgctgtgtctctcatcgttattattgttgcaatgatagaagatttatatactgagaggggatcaatgctcagtacagccatatttgtctatgctgctacgtctccagtgaatggttattttggaggaagtctgtatgctagacaaggaggaaggagatggataaagcagatgtttattggggcattccttatcccagctatggtgtgtggcactgccttcttcatcaatttcatagccatttattaccatgcttcaagagccattccttttggaacaatggtggccgtttgttgcatctgtttttttgttattcttcctctaaatcttgttggtacaatacttggccgaaatctgtcaggtcagcccaactttccttgtcgtgtcaatgctgtgcctcgtcctataccggagaaaaaatggttcatggagcctgcggttattgtttgcctgggtggaattttaccttttggttcaatctttattgaaatgtatttcatcttcacgtctttctgggcatataagatctattatgtctatggcttcatgatgctggtgctggttatcctgtgcattgtgactgtctgtgtgactattgtgtgcacatattttctactaaatgcagaagattaccggtggcaatggacaagttttctctctgctgcatcaactgcaatctatgtttacatgtattccttttactactattttttcaaaacaaagatgtatggcttatttcaaacatcattttactttggatatatggcggtatttagcacagccttggggataatgtgtggagcgattggttacatgggaacaagtgcctttgtccgaaaaatctatactaatgtgaaaattgactagagacccaagaaaacctggaactttggatcaatttctttttcataggggtggaacttgcacagcaaaaacaaacaaacgcaagaagagatttgggctttaacacactgggtactttgtgggtctctctttcgtcggtggcttaaagtaacatctatttccattgatcctaggttcttcctgactgctttctccaactgttcacagcaaatgcttggattttatgcagtaggcattactacagtacatggctaatcttcccaaaaactagctcattaaagatgaaatagaccagctctcttcagtgaagaggacaaatagtttatttaaagcatttgttccaataaaataaatagagggaaacttggatgctaaaattacatgaataggaatcttcctggcacttagtgtttctatgttattgaaaaatgatgttccagaaagattacttttttcctcttatttttactgccattgtcgacctattgtgggacatttttatatattgaatctgggttcttttttgacttttttttttcccaatccaacagcatccttttttttaaaagagagaattagaaaatattaaatcctgcatgtaatatatctgctgtcatcttagttggaccaacttcccatttatttatcttaaaactatacagttacatcttaattccatccaaagaagatacagtttgaagacagaagtgtactctctacaatgcaatttactgtacagttagaaagcaaagtgttaaatggagaagatacttgtttttattaaacattttgagatttagataaactacattttaactgaatgtctaaagtgattatcttttttccccccaagttagtcttaaatcttttgggtttgaatgaaggttttacataagaaattattaaaaacaaggggggtgggtaataaatgtatataacattaaataatgtaacgtaggtgtagattcccaaatgcatttggatgtacagatcgactacagagtacttttttcttatgatgattggtgtagaaatgtgtgatttgggtgggcttttacatcttgcctaccattgcatgaaacattggggtttcttcaaaatgtgtgtgtcatacttcttttgggaggggggttgttttcttctgtttattttctgagactcctacaggagccaaatttgtaatttagagacacttaattttgttaatcctgtctgggacacttaagtaacatctaaagcattattgctttagaatgttcaaataaaatttcctgaccaaattgttttgtggaaatagatgtgtttgcaatttgaagatatctttctgtccagaaggcaaaattaccgaatgccatttttaaaagtatgctataaactatgctactctcatacaggggacccgtattttaaaatctccagacttgcttacatctagattatccagcacaatcataaagtgaatgacaaaccctttgaatgaaattgtggcacaaaatctgttcaggttggtgtaccgtgtaaagtggggatggggtaaaagtggttaacgtactgttggatcaacaaataaaggttacagttttgtaagagaagtgatttgaatacatttttctggaactattcataatatgaagttttcctagaaccactgagtttctagtttaatagtttgctatgcaaatgaccacctaaaacaatactttatattgttatttttagaaagactcaaaacacctgtatttaaaccttaatatgaaaatcatgcaattaatagttacacaagatgttttcattacaaaatatgtacctatatattgatggactctacatcctatattgtgacatgtaagtcctttaaaaggtgaaaagtatgatttcttaccacttaagtatgattgatatgatccaacaaatttgatcagaagctgtaggtaaatcctcttctgaagccaaaatggtatattaaatataatttattggtacttccattttctcttccttcttacttgcctttaagatcttataaaaaagaaactaaaagttaatatttagttgcctatattatgtaaccttttaactatatataaagtacttttttggtttctttctcaccacttttattcaaaagtacttttaacataccaatacatagtctgtctgatgggagtataaattggacagtaaggttttgtcttaataaaatgaaatttgtttctcatgatatgaatcttgcaggtaagatgtagggtttattgaaaatgtgtgggttaaatgctttcaggtacaccaattctttctactaaattgagctctatttgaagttctttggaatctgtggtgaaaaataattttctgatttccaaatacattaagagcattaaatgaatattaatcacctttaaagtcttttagaaaaggacttgtattggtttttggctgcatagaggggttgaataagtgtatgtatgtgtgtgcgtgtgtgtgtgtcttcttaaagaagatgtaattcacaaatagtttagctccctagcgctcagttgtagaatagaaaatagaacattattcaagttaattgaaaggtgaggtttttatacccccactaatgctgtgtatctgtctttcgtttgttaacattatttgcttaatttctttcaactcacactttggataatactatcaaaaactaaggctaaacattccttgtgtatctttaagcatgcttctcctgaaatttaactacattagtagttgacatttgtatacatatatcctaatacaagagtaggataaggtggaaatgtaatggcctgagggatggtgaagcattcttttagtatttttcatcatgttgggctcctagattgtactggggttgcccataaatcaaaccccatactcttagaattcattatattatggtgatatccgaacctagtgaatggtatgcttgggtgttttccattgagagcggatggacctctttataaagttggttgctgcaaaatccagttcttccaaaagccactttatttagggtttattcacaagtcatatccattttggtacagtgtttgtttcctaatatttattaaccaccttataccaaatgtcttgcaaagaaatgttattaaaaccttgaatttttacaaatgtaaaaaacaaaaagtgtattaatgtatttgttcaggaaaagctacataccgaagggcttttgtatatgaattctgtggtggggagacccatttgtaatctatatggcagttccatctgggttttaagtttagatttcaccgtgtcttagtgcttcattctattggtttattggaacatgtaataaataggagtagtgatgtattaaaacacaagtattcattaatgttttatatcttcactaaaattctatagttatgaaactattttatcaatcaaggtgttatatttcagtcagaagtgaaaatttatgaagagtatttggaagtgtgtacagaaataaactagacttacaggtaggctagatcagaacgttaacatatgaacctgcagaaatctggtaagacttaaattcagtgtgaggaataactctagttctctcctatgagcatttcctaaaagccatctgatttggcattcttactggagctgcagacagaaatctacaaagacaaaagtaaacaaaattaagttattattccactgttaggaatggaaataaacttgtgaagtctgtttattttgaagtattggtgaactaggcttgctaattgataactgcagcagtttgtgtttactccagttcatcagcttaggtcatttgaaagatataagagcttaaggcaagaaagaaataacatggaattctatttgaaggacaacagaacattcttggaaaagcagctccagttggtttttcaactgtcaaacttgaatgtgtaagtccccacagagcatggacagtcggtgcagagttccaaggaaacaattattgcctgatgaccacttccattttgtatacactctttggttcgtataggccatattccaactggctttttagtaatagaaatccagtatataatgtatcaaatacaattgaggttctaacctagtgtgttaatttatctgaatttggatttttaaaaagtaataaaaagttaaatgta

SEQ ID NO: 385502 - DNA, 4983 bp, Homo sapiens
gtgctcgcttcggcagcacatatactaaaattggaacgatacagagaagattagcatggcccctgcgcaaggatgacacgcaaattcgtgaagcgttccatatttttaaggaaggagatggataaagcagatgtttattggggcattccttatcccagctatggtgtgtggcactgccttcttcatcaatttcatagccatttattaccatgcttcaagagccattccttttggaacaatggtggccgtttgttgcatctgtttttttgttattcttcctctaaatcttgttggtacaatacttggccgaaatctgtcaggtcagcccaactttccttgtcgtgtcaatgctgtgcctcgtcctataccggagaaaaaatggttcatggagcctgcggttattgtttgcctgggtggaattttaccttttggttcaatctttattgaaatgtatttcatcttcacgtctttctgggcatataagatctattatgtctatggcttcatgatgctggtgctggttatcctgtgcattgtgactgtctgtgtgactattgtgtgcacatattttctactaaatgcagaagattaccggtggcaatggacaagttttctctctgctgcatcaactgcaatctatgtttacatgtattccttttactactattttttcaaaacaaagatgtatggcttatttcaaacatcattttactttggatatatggcggtatttagcacagccttggggataatgtgtggagcgattggttacatgggaacaagtgcctttgtccgaaaaatctatactaatgtgaaaattgactagagacccaagaaaacctggaactttggatcaatttctttttcataggggtggaacttgcacagcaaaaacaaacaaacgcaagaagagatttgggctttaacacactgggtactttgtgggtctctctttcgtcggtggcttaaagtaacatctatttccattgatcctaggttcttcctgactgctttctccaactgttcacagcaaatgcttggattttatgcagtaggcattactacagtacatggctaatcttcccaaaaactagctcattaaagatgaaatagaccagctctcttcagtgaagaggacaaatagtttatttaaagcatttgttccaataaaataaatagagggaaacttggatgctaaaattacatgaataggaatcttcctggcacttagtgtttctatgttattgaaaaatgatgttccagaaagattacttttttcctcttatttttactgccattgtcgacctattgtgggacatttttatatattgaatctgggttcttttttgacttttttttttcccaatccaacagcatccttttttttaaaagagagaattagaaaatattaaatcctgcatgtaatatatctgctgtcatcttagttggaccaacttcccatttatttatcttaaaactatacagttacatcttaattccatccaaagaagatacagtttgaagacagaagtgtactctctacaatgcaatttactgtacagttagaaagcaaagtgttaaatggagaagatacttgtttttattaaacattttgagatttagataaactacattttaactgaatgtctaaagtgattatcttttttccccccaagttagtcttaaatcttttgggtttgaatgaaggttttacataagaaattattaaaaacaaggggggtgggtaataaatgtatataacattaaataatgtaacgtaggtgtagattcccaaatgcatttggatgtacagatcgactacagagtacttttttcttatgatgattggtgtagaaatgtgtgatttgggtgggcttttacatcttgcctaccattgcatgaaacattggggtttcttcaaaatgtgtgtgtcatacttcttttgggaggggggttgttttcttctgtttattttctgagactcctacaggagccaaatttgtaatttagagacacttaattttgttaatcctgtctgggacacttaagtaacatctaaagcattattgctttagaatgttcaaataaaatttcctgaccaaattgttttgtggaaatagatgtgtttgcaatttgaagatatctttctgtccagaaggcaaaattaccgaatgccatttttaaaagtatgctataaactatgctactctcatacaggggacccgtattttaaaatctccagacttgcttacatctagattatccagcacaatcataaagtgaatgacaaaccctttgaatgaaattgtggcacaaaatctgttcaggttggtgtaccgtgtaaagtggggatggggtaaaagtggttaacgtactgttggatcaacaaataaaggttacagttttgtaagagaagtgatttgaatacatttttctggaactattcataatatgaagttttcctagaaccactgagtttctagtttaatagtttgctatgcaaatgaccacctaaaacaatactttatattgttatttttagaaagactcaaaacacctgtatttaaaccttaatatgaaaatcatgcaattaatagttacacaagatgttttcattacaaaatatgtacctatatattgatggactctacatcctatattgtgacatgtaagtcctttaaaaggtgaaaagtatgatttcttaccacttaagtatgattgatatgatccaacaaatttgatcagaagctgtaggtaaatcctcttctgaagccaaaatggtatattaaatataatttattggtacttccattttctcttccttcttacttgcctttaagatcttataaaaaagaaactaaaagttaatatttagttgcctatattatgtaaccttttaactatatataaagtacttttttggtttctttctcaccacttttattcaaaagtacttttaacataccaatacatagtctgtctgatgggagtataaattggacagtaaggttttgtcttaataaaatgaaatttgtttctcatgatatgaatcttgcaggtaagatgtagggtttattgaaaatgtgtgggttaaatgctttcaggtacaccaattctttctactaaattgagctctatttgaagttctttggaatctgtggtgaaaaataattttctgatttccaaatacattaagagcattaaatgaatattaatcacctttaaagtcttttagaaaaggacttgtattggtttttggctgcatagaggggttgaataagtgtatgtatgtgtgtgcgtgtgtgtgtgtcttcttaaagaagatgtaattcacaaatagtttagctccctagcgctcagttgtagaatagaaaatagaacattattcaagttaattgaaaggtgaggtttttatacccccactaatgctgtgtatctgtctttcgtttgttaacattatttgcttaatttctttcaactcacactttggataatactatcaaaaactaaggctaaacattccttgtgtatctttaagcatgcttctcctgaaatttaactacattagtagttgacatttgtatacatatatcctaatacaagagtaggataaggtggaaatgtaatggcctgagggatggtgaagcattcttttagtatttttcatcatgttgggctcctagattgtactggggttgcccataaatcaaaccccatactcttagaattcattatattatggtgatatccgaacctagtgaatggtatgcttgggtgttttccattgagagcggatggacctctttataaagttggttgctgcaaaatccagttcttccaaaagccactttatttagggtttattcacaagtcatatccattttggtacagtgtttgtttcctaatatttattaaccaccttataccaaatgtcttgcaaagaaatgttattaaaaccttgaatttttacaaatgtaaaaaacaaaaagtgtattaatgtatttgttcaggaaaagctacataccgaagggcttttgtatatgaattctgtggtggggagacccatttgtaatctatatggcagttccatctgggttttaagtttagatttcaccgtgtcttagtgcttcattctattggtttattggaacatgtaataaataggagtagtgatgtattaaaacacaagtattcattaatgttttatatcttcactaaaattctatagttatgaaactattttatcaatcaaggtgttatatttcagtcagaagtgaaaatttatgaagagtatttggaagtgtgtacagaaataaactagacttacaggtaggctagatcagaacgttaacatatgaacctgcagaaatctggtaagacttaaattcagtgtgaggaataactctagttctctcctatgagcatttcctaaaagccatctgatttggcattcttactggagctgcagacagaaatctacaaagacaaaagtaaacaaaattaagttattattccactgttaggaatggaaataaacttgtgaagtctgtttattttgaagtattggtgaactaggcttgctaattgataactgcagcagtttgtgtttactccagttcatcagcttaggtcatttgaaagatataagagcttaaggcaagaaagaaataacatggaattctatttgaaggacaacagaacattcttggaaaagcagctccagttggtttttcaactgtcaaacttgaatgtgtaagtccccacagagcatggacagtcggtgcagagttccaaggaaacaattattgcctgatgaccacttccattttgtatacactctttggttcgtataggccatattccaactggctttttagtaatagaaatccagtatataatgtatcaaatacaattgaggttctaacctagtgtgttaatttatctgaatttggatttttaaaaagtaataaaaagttaaatgta

SEQ ID NO: 385503 - DNA, 3561 bp, Homo sapiens
cagccaggaaaaaagcttaagcattttggccaaggttacacaacccgaaacaccgggacgcggcccggaggcggcttcggccttgcggtccaggctaggccactgcgccggggcccagcctgctcggcgcccgcccgagtgctcggcaggcccgtagcgccgcggctcccaggagccgaggggcagccggcgcgcaggcggcggttgccgggccctccctcggcccggcggcggtggcggccccgcgtcgcgaggcacttccggcgcgtgccggggtggccggatgacgtggctgagtcagaggaagaggctgaggaggcgcggggggcgggggaggctcaggagcgggcggtgacggcgacggcggcggcagaggaggcagcggctgggccgggccccgtgcgtctgtccgcgccccgtggatgcgaatcggccgcggcggaggcggcggcggcggaggaggcggcggcgggaggaggagtcggtgagccggctccgggccggaggggcgcggaggatgaggccgctgcctggcgctcttggcgtggcggcggccgccgcgctgtggctgctgctgctgctgctgccccggacccgggcggacgagcacgaacacacgtatcaagataaagaggaagttgtcttatggatgaatactgttgggccctaccataatcgtcaagaaacatataagtacttttcacttccattctgtgtggggtcaaaaaaaagtatcagtcattaccatgaaactctgggagaagcacttcaaggggttgaattggaatttagtggtctggatattaaatttaaagatgatgtgatgccagccacttactgtgaaattgatttagataaagaaaagagagatgcatttgtatatgccataaaaaatcattactggtaccagatgtacatagatgatttaccaatatggggtattgttggtgaggctgatgaaaatggagaagattactatctttggacctataaaaaacttgaaataggttttaatggaaatcgaattgttgatgttaatctaactagtgaaggaaaggtgaaactggttccaaatactaaaatccagatgtcatattcagtaaaatggaaaaagtcagatgtgaaatttgaagatcgatttgacaaatatcttgatccgtccttttttcaacatcggattcattggttttcaattttcaactccttcatgatggtgatcttcttggtgggcttagtttcaatgattttaatgagaacattaagaaaagattatgctcggtacagtaaagaggaagaaatggatgatatggatagagacctaggagatgaatatggatggaaacaggtgcatggagatgtatttagaccatcaagtcacccactgatattttcctctctgattggttctggatgtcagatatttgctgtgtctctcatcgttattattgttgcaatgatagaagatttatatactgagaggggatcaatgctcagtacagccatatttgtctatgctgctacgtctccagtgaatggttattttggaggaagtctgtatgctagacaaggaggaaggagatggataaagcagatgtttattggggcattccttatcccagctatggtgtgtggcactgccttcttcatcaatttcatagccatttattaccatgcttcaagagccattccttttggaacaatggtggccgtttgttgcatctgtttttttgttattcttcctctaaatcttgttggtacaatacttggccgaaatctgtcaggtcagcccaactttccttgtcgtgtcaatgctgtgcctcgtcctataccggagaaaaaatggttcatggagcctgcggttattgtttgcctgggtggaattttaccttttggttcaatctttattgaaatgtatttcatcttcacgtctttctgggcatataagatctattatgtctatggcttcatgatgctggtgctggttatcctgtgcattgtgactgtctgtgtgactattgtgtgcacatattttctactaaatgcagaagattaccggtggcaatggacaagttttctctctgctgcatcaactgcaatctatgtttacatgtattccttttactactattttttcaaaacaaagatgtatggcttatttcaaacatcattttactttggatatatggcggtatttagcacagccttggggataatgtgtggagcgattggttacatgggaacaagtgcctttgtccgaaaaatctatactaatgtgaaaattgactagagacccaagaaaacctggaactttggatcaatttctttttcataggggtggaacttgcacagcaaaaacaaacaaacgcaagaagagatttgggctttaacacactgggtactttgtgggtctctctttcgtcggtggcttaaagtaacatctatttccattgatcctaggttcttcctgactgctttctccaactgttcacagcaaatgcttggattttatgcagtaggcattactacagtacatggctaatcttcccaaaaactagctcattaaagatgaaatagaccagctctcttcagtgaagaggacaaatagtttatttaaagcatttgttccaataaaataaatagagggaaacttggatgctaaaattacatgaataggaatcttcctggcacttagtgtttctatgttattgaaaaatgatgttccagaaagattacttttttcctcttatttttactgccattgtcgacctattgtgggacatttttatatattgaatctgggttcttttttgacttttttttttcccaatccaacagcatccttttttttaaaagagagaattagaaaatattaaatcctgcatgtaatatatctgctgtcatcttagttggaccaacttcccatttatttatcttaaaactatacagttacatcttaattccatccaaagaagatacagtttgaagacagaagtgtactctctacaatgcaatttactgtacagttagaaagcaaagtgttaaatggagaagatacttgtttttattaaacattttgagatttagataaactacattttaactgaatgtctaaagtgattatcttttttccccccaagttagtcttaaatcttttgggtttgaatgaaggttttacataagaaattattaaaaacaaggggggtgggtaataaatgtatataacattaaataatgtaacgtaggtgtagattcccaaatgcatttggatgtacagatcgactacagagtacttttttcttatgatgattggtgtagaaatgtgtgatttgggtgggcttttacatcttgcctaccattgcatgaaacattggggtttcttcaaaatgtgtgtgtcatacttcttttgggaggggggttgttttcttctgtttattttctgagactcctacaggagccaaatttgtaatttagagacacttaattttgttaatcctgtctgggacacttaagtaacatctaaagcattattgctttagaatgttcaaataaaatttcctgacc

SEQ ID NO: 385504 - DNA, 4334 bp, Homo sapiens
cagccaggaaaaaagcttaagcattttggccaaggttacacaacccgaaacaccgggacgcggcccggaggcggcttcggccttgcggtccaggctaggccactgcgccggggcccagcctgctcggcgcccgcccgagtgctcggcaggcccgtagcgccgcggctcccaggagccgaggggcagccggcgcgcaggcggcggttgccgggccctccctcggcccggcggcggtggcggccccgcgtcgcgaggcacttccggcgcgtgccggggtggccggatgacgtggctgagtcagaggaagaggctgaggaggcgcggggggcgggggaggctcaggagcgggcggtgacggcgacggcggcggcagaggaggcagcggctgggccgggccccgtgcgtctgtccgcgccccgtggatgcgaatcggccgcggcggaggcggcggcggcggaggaggcggcggcgggaggaggagtcggtgagccggctccgggccggaggggcgcggaggatgaggccgctgcctggcgctcttggcgtggcggcggccgccgcgctgtggctgctgctgctgctgctgccccggacccgggcggacgagcacgaacacacgtatcaagataaagaggaagttgtcttatggatgaatactgttgggccctaccataatcgtcaagaaacatataagtacttttcacttccattctgtgtggggtcaaaaaaaagtatcagtcattaccatgaaactctgggagaagcacttcaaggggttgaattggaatttagtggtctggatattaaatttaaagatgatgtgatgccagccacttactgtgaaattgatttagataaagaaaagagagatgcatttgtatatgccataaaaaatcattactggtaccagatgtacatagatgatttaccaatatggggtattgttggtgaggctgatgaaaatggagaagattactatctttggacctataaaaaacttgaaataggttttaatggaaatcgaattgttgatgttaatctaactagtgaaggaaaggtgaaactggttccaaatactaaaatccagatgtcatattcagtaaaatggaaaaagtcagatgtgaaatttgaagatcgatttgacaaatatcttgatccgtccttttttcaacatcggattcattggttttcaattttcaactccttcatgatggtgatcttcttggtgggcttagtttcaatgattttaatgagaacattaagaaaagattatgctcggtacagtaaagaggaagaaatggatgatatggatagagacctaggagatgaatatggatggaaacaggtgcatggagatgtatttagaccatcaagtcacccactgatattttcctctctgattggttctggatgtcagatatttgctgtgtctctcatcgttattattgttgcaatgatagaagatttatatactgagaggggatcaatgctcagtacagccatatttgtctatgctgctacgtctccagtgaatggttattttggaggaagtctgtatgctagacaaggaggaaggagatggataaagcagatgtttattggggcattccttatcccagctatggtgtgtggcactgccttcttcatcaatttcatagccatttattaccatgcttcaagagccattccttttggaacaatggtggccgtttgttgcatctgtttttttgttattcttcctctaaatcttgttggtacaatacttggccgaaatctgtcaggtcagcccaactttccttgtcgtgtcaatgctgtgcctcgtcctataccggagaaaaaatggttcatggagcctgcggttattgtttgcctgggtggaattttaccttttggttcaatctttattgaaatgtatttcatcttcacgtctttctgggcatataagatctattatgtctatggcttcatgatgctggtgctggttatcctgtgcattgtgactgtctgtgtgactattgtgtgcacatattttctactaaatgcagaagattaccggtggcaatggacaagttttctctctgctgcatcaactgcaatctatgtttacatgtattccttttactactattttttcaaaacaaagatgtatggcttatttcaaacatcattttactttggatatatggcggtatttagcacagccttggggataatgtgtggagcgattggttacatgggaacaagtgcctttgtccgaaaaatctatactaatgtgaaaattgactagagacccaagaaaacctggaactttggatcaatttctttttcataggggtggaacttgcacagcaaaaacaaacaaacgcaagaagagatttgggctttaacacactgggtactttgtgggtctctctttcgtcggtggcttaaagtaacatctatttccattgatcctaggttcttcctgactgctttctccaactgttcacagcaaatgcttggattttatgcagtaggcattactacagtacatggctaatcttcccaaaaactagctcattaaagatgaaatagaccagctctcttcagtgaagaggacaaatagtttatttaaagcatttgttccaataaaataaatagagggaaacttggatgctaaaattacatgaataggaatcttcctggcacttagtgtttctatgttattgaaaaatgatgttccagaaagattacttttttcctcttatttttactgccattgtcgacctattgtgggacatttttatatattgaatctgggttcttttttgacttttttttttcccaatccaacagcatccttttttttaaaagagagaattagaaaatattaaatcctgcatgtaatatatctgctgtcatcttagttggaccaacttcccatttatttatcttaaaactatacagttacatcttaattccatccaaagaagatacagtttgaagacagaagtgtactctctacaatgcaatttactgtacagttagaaagcaaagtgttaaatggagaagatacttgtttttattaaacattttgagatttagataaactacattttaactgaatgtctaaagtgattatcttttttccccccaagttagtcttaaatcttttgggtttgaatgaaggttttacataagaaattattaaaaacaaggggggtgggtaataaatgtatataacattaaataatgtaacgtaggtgtagattcccaaatgcatttggatgtacagatcgactacagagtacttttttcttatgatgattggtgtagaaatgtgtgatttgggtgggcttttacatcttgcctaccattgcatgaaacattggggtttcttcaaaatgtgtgtgtcatacttcttttgggaggggggttgttttcttctgtttattttctgagactcctacaggagccaaatttgtaatttagagacacttaattttgttaatcctgtctgggacacttaagtaacatctaaagcattattgctttagaatgttcaaataaaatttcctgaccaaattgttttgtggaaatagatgtgtttgcaatttgaagatatctttctgtccagaaggcaaaattaccgaatgccatttttaaaagtatgctataaactatgctactctcatacaggggacccgtattttaaaatctccagacttgcttacatctagattatccagcacaatcataaagtgaatgacaaaccctttgaatgaaattgtggcacaaaatctgttcaggttggtgtaccgtgtaaagtggggatggggtaaaagtggttaacgtactgttggatcaacaaataaaggttacagttttgtaagaaaaaaaaaaaaaaaaaaaaacaaaaaaaaaaaaaaaaaaaaaaaaaaaaaaagaaaaaaaaaaaaagaaacggaagaaagaaacacgaagcaaaccagggaggaatgaagcgaacaacagagacaaaaaagaaaaagatagaaatacaaaacaagtaaagagaacaaagatagcacacaaacacccacaaacataaaacaccaaaaaaaaaaacgaaggaagaagcaaggggcggaacgcccgacacgcaagagccgccgacgaccagacgcataagagagggagcagggaaagaggaagggagagaagaacacaagaaaggaggaaaaggatagacaagaagacaagaacgcagaggggagcaggcgaacaaacaaaacaggagcagggaaaaaccagcgagcgaaaacaaaataaaaggaaaaaaagaaaggaggagaacaagacacagcagggagagg

SEQ ID NO: 385505 - DNA, 3839 bp, Homo sapiens
cagccaggaaaaaagcttaagcattttggccaaggttacacaacccgaaacaccgggacgcggcccggaggcggcttcggccttgcggtccaggctaggccactgcgccggggcccagcctgctcggcgcccgcccgagtgctcggcaggcccgtagcgccgcggctcccaggagccgaggggcagccggcgcgcaggcggcggttgccgggccctccctcggcccggcggcggtggcggccccgcgtcgcgaggcacttccggcgcgtgccggggtggccggatgacgtggctgagtcagaggaagaggctgaggaggcgcggggggcgggggaggctcaggagcgggcggtgacggcgacggcggcggcagaggaggcagcggctgggccgggccccgtgcgtctgtccgcgccccgtggatgcgaatcggccgcggcggaggcggcggcggcggaggaggcggcggcgggaggaggagtcggtgagccggctccgggccggaggggcgcggaggatgaggccgctgcctggcgctcttggcgtggcggcggccgccgcgctgtggctgctgctgctgctgctgccccggacccgggcggacgagcacgaacacacgtatcaagataaagaggaagttgtcttatggatgaatactgttgggccctaccataatcgtcaagaaacatataagtacttttcacttccattctgtgtggggtcaaaaaaaagtatcagtcattaccatgaaactctgggagaagcacttcaaggggttgaattggaatttagtggtctggatattaaatttaaagatgatgtgatgccagccacttactgtgaaattgatttagataaagaaaagagagatgcatttgtatatgccataaaaaatcattactggtaccagatgtacatagatgatttaccaatatggggtattgttggtgaggctgatgaaaatggagaagattactatctttggacctataaaaaacttgaaataggttttaatggaaatcgaattgttgatgttaatctaactagtgaaggaaaggtgaaactggttccaaatactaaaatccagatgtcatattcagtaaaatggaaaaagtcagatgtgaaatttgaagatcgatttgacaaatatcttgatccgtccttttttcaacatcggattcattggttttcaattttcaactccttcatgatggtgatcttcttggtgggcttagtttcaatgattttaatgagaacattaagaaaagattatgctcggtacagtaaagaggaagaaatggatgatatggatagagacctaggagatgaatatggatggaaacaggtgcatggagatgtatttagaccatcaagtcacccactgatattttcctctctgattggttctggatgtcagatatttgctgtgtctctcatcgttattattgttgcaatgatagaagatttatatactgagaggggatcaatgctcagtacagccatatttgtctatgctgctacgtctccagtgaatggttattttggaggaagtctgtatgctagacaaggaggaaggagatggataaagcagatgtttattggggcattccttatcccagctatggtgtgtggcactgccttcttcatcaatttcatagccatttattaccatgcttcaagagccattccttttggaacaatggtggccgtttgttgcatctgtttttttgttattcttcctctaaatcttgttggtacaatacttggccgaaatctgtcaggtcagcccaactttccttgtcgtgtcaatgctgtgcctcgtcctataccggagaaaaaatggttcatggagcctgcggttattgtttgcctgggtggaattttaccttttggttcaatctttattgaaatgtatttcatcttcacgtctttctgggcatataagatctattatgtctatggcttcatgatgctggtgctggttatcctgtgcattgtgactgtctgtgtgactattgtgtgcacatattttctactaaatgcagaagattaccggtggcaatggacaagttttctctctgctgcatcaactgcaatctatgtttacatgtattccttttactactattttttcaaaacaaagatgtatggcttatttcaaacatcattttactttggatatatggcggtatttagcacagccttggggataatgtgtggagcgattggttacatgggaacaagtgcctttgtccgaaaaatctatactaatgtgaaaattgactagagacccaagaaaacctggaactttggatcaatttctttttcataggggtggaacttgcacagcaaaaacaaacaaacgcaagaagagatttgggctttaacacactgggtactttgtgggtctctctttcgtcggtggcttaaagtaacatctatttccattgatcctaggttcttcctgactgctttctccaactgttcacagcaaatgcttggattttatgcagtaggcattactacagtacatggctaatcttcccaaaaactagctcattaaagatgaaatagaccagctctcttcagtgaagaggacaaatagtttatttaaagcatttgttccaataaaataaatagagggaaacttggatgctaaaattacatgaataggaatcttcctggcacttagtgtttctatgttattgaaaaatgatgttccagaaagattacttttttcctcttatttttactgccattgtcgacctattgtgggacatttttatatattgaatctgggttcttttttgacttttttttttcccaatccaacagcatccttttttttaaaagagagaattagaaaatattaaatcctgcatgtaatatatctgctgtcatcttagttggaccaacttcccatttatttatcttaaaactatacagttacatcttaattccatccaaagaagatacagtttgaagacagaagtgtactctctacaatgcaatttactgtacagttagaaagcaaagtgttaaatggagaagatacttgtttttattaaacattttgagatttagataaactacattttaactgaatgtctaaagtgattatcttttttccccccaagttagtcttaaatcttttgggtttgaatgaaggttttacataagaaattattaaaaacaaggggggtgggtaataaatgtatataacattaaataatgtaacgtaggtgtagattcccaaatgcatttggatgtacagatcgactacagagtacttttttcttatgatgattggtgtagaaatgtgtgatttgggtgggcttttacatcttgcctaccattgcatgaaacattggggtttcttcaaaatgtgtgtgtcatacttcttttgggaggggggttgttttcttctgtttattttctgagactcctacaggagccaaatttgtaatttagagacacttaattttgttaatcctgtctgggacacttaagtaacatctaaagcattattgctttagaatgttcaaataaaatttcctgaccgaaaaaaaaacaaacaacaaaaaacactgttgttgggcgcgtctctagcccccaaaaaaaggtcttaacaccatctcggctgggcgcggcggccccaacatggatagcgtaaacggtgccacaacgcgttctcccaaagaaacccgggggcacgaacatacgggccgtgctctcccctaataaaaacgccgggggaacacgacgtgtttgtaacaaccccaaggaggtcagaggcaagacggacaacctcccagggcccacacgacggattataatcg

SEQ ID NO: 385506 - DNA, 3092 bp, Homo sapiens
cagccaggaaaaaagcttaagcattttggccaaggttacacaacccgaaacaccgggacgcggcccggaggcggcttcggccttgcggtccaggctaggccactgcgccggggcccagcctgctcggcgcccgcccgagtgctcggcaggcccgtagcgccgcggctcccaggagccgaggggcagccggcgcgcaggcggcggttgccgggccctccctcggcccggcggcggtggcggccccgcgtcgcgaggcacttccggcgcgtgccggggtggccggatgacgtggctgagtcagaggaagaggctgaggaggcgcggggggcgggggaggctcaggagcgggcggtgacggcgacggcggcggcagaggaggcagcggctgggccgggccccgtgcgtctgtccgcgccccgtggatgcgaatcggccgcggcggaggcggcggcggcggaggaggcggcggcgggaggaggagtcggtgagccggctccgggccggaggggcgcggaggatgaggccgctgcctggcgctcttggcgtggcggcggccgccgcgctgtggctgctgctgctgctgctgccccggacccgggcggacgagcacgaacacacgtatcaagataaagaggaagttgtcttatggatgaatactgttgggccctaccataatcgtcaagaaacatataagtacttttcacttccattctgtgtggggtcaaaaaaaagtatcagtcattaccatgaaactctgggagaagcacttcaaggggttgaattggaatttagtggtctggatattaaatttaaagatgatgtgatgccagccacttactgtgaaattgatttagataaagaaaagagagatgcatttgtatatgccataaaaaatcattactggtaccagatgtacatagatgatttaccaatatggggtattgttggtgaggctgatgaaaatggagaagattactatctttggacctataaaaaacttgaaataggttttaatggaaatcgaattgttgatgttaatctaactagtgaaggaaaggtgaaactggttccaaatactaaaatccagatgtcatattcagtaaaatggaaaaagtcagatgtgaaatttgaagatcgatttgacaaatatcttgatccgtccttttttcaacatcggattcattggttttcaattttcaactccttcatgatggtgatcttcttggtgggcttagtttcaatgattttaatgagaacattaagaaaagattatgctcggtacagtaaagaggaagaaatggatgatatggatagagacctaggagatgaatatggatggaaacaggtgcatggagatgtatttagaccatcaagtcacccactgatattttcctctctgattggttctggatgtcagatatttgctgtgtctctcatcgttattattgttgcaatgatagaagatttatatactgagaggggatcaatgctcagtacagccatatttgtctatgctgctacgtctccagtgaatggttattttggaggaagtctgtatgctagacaaggaggaaggagatggataaagcagatgtttattggggcattccttatcccagctatggtgtgtggcactgccttcttcatcaatttcatagccatttattaccatgcttcaagagccattccttttggaacaatggtggccgtttgttgcatctgtttttttgttattcttcctctaaatcttgttggtacaatacttggccgaaatctgtcaggtcagcccaactttccttgtcgtgtcaatgctgtgcctcgtcctataccggagaaaaaatggttcatggagcctgcggttattgtttgcctgggtggaattttaccttttggttcaatctttattgaaatgtatttcatcttcacgtctttctgggcatataagatctattatgtctatggcttcatgatgctggtgctggttatcctgtgcattgtgactgtctgtgtgactattgtgtgcacatattttctactaaatgcagaagattaccggtggcaatggacaagttttctctctgctgcatcaactgcaatctatgtttacatgtattccttttactactattttttcaaaacaaagatgtatggcttatttcaaacatcattttactttggatatatggcggtatttagcacagccttggggataatgtgtggagcgattggttacatgggaacaagtgcctttgtccgaaaaatctatactaatgtgaaaattgactagagacccaagaaaacctggaactttggatcaatttctttttcataggggtggaacttgcacagcaaaaacaaacaaacgcaagaagagatttgggctttaacacactgggtactttgtgggtctctctttcgtcggtggcttaaagtaacatctatttccattgatcctaggttcttcctgactgctttctccaactgttcacagcaaatgcttggattttatgcagtaggcattactacagtacatggctaatcttcccaaaaactagctcattaaagatgaaatagaccagctctcttcagtgaagaggacaaatagtttatttaaagcatttgttccaataaaataaatagagggaaacttggatgctaaaattacatgaataggaatcttcctggcacttagtgtttctatgttattgaaaaatgatgttccagaaagattacttttttcctcttatttttactgccattgtcgacctattgtgggacatttttatatattgaatctgggttcttttttgacttttttttttcccaatccaacagcatccttttttttaaaagagagaattagaaaatattaaatcctgcatgtaatatatctgctgtcatcttagttggaccaacttcccatttatttatcttaaaactatacagttacatcttaattccatccaaagaagatacagtttgaagacagaagtgtactctctacaatgcaatttactgtacagttagaaagcaaagtgttaaatggagaagatacttgtttttattaaacattttgagatttagataaacta

SEQ ID NO: 385507 - DNA, 137 bp, Homo sapiens
atcgagccggtaccgaattcgacagtgtgcattcttccacatcctccttttccacactaatacaaatatcatatataaacacatgcatctaagttttggggtctaaaaatgggaccatgcagtatcatcaccacctg

SEQ ID NO: 385508 - DNA, 759 bp, Homo sapiens
cccatgatactcacaaagaaaaatctgtagtatagataacacaaaagataaagaaaaaggaatcaaagcataccactacaaaaaaccagcaaatcacagaggaagagagcaagagaggaagtaacaaaaggactataaaacagtcagaaaacattaacaaaatggttaacagtaaatccttacctatcaatacccagtaaaatgatatagagtggctgaatgaatagaaaaccaagaaccaactctatgttgcccacaagaaaatcactttagctttaaggatgcatatagccaggcatagtggctcacacctgtaatcccagcactttgagaggccaaggcaggcaggtcacttgagcccagaagttcaagaccagcctaggcaacatagggagacctcatctctacaaacaataccaaaattagctgggtatgggggtgcatgcctgtagtcctaactactcaggagactgaggtgggaagattgcttgagtctggcaggtcaaggctgtagtgagcagtgattgcaccactgcactccagcctgggcaacagaataagaacctgtctcaaaaaaataaaaaggatgcatgtaagccataagtgaagaaatgaaaagagatattccatggaaatggcaaccaaaaaggacagagctggctatacttacatcagacaaaatagatgttaaatcaaaaactgtcacaagaggtggcacacacctatagtcccagctactcaggaggctgaagcagtggt

SEQ ID NO: 385509 - DNA, 399 bp, Homo sapiens
tatttgacaaatgaggaaacggaggctaggagaaggcagctcacttgcccagttataaatgctaagctgggtatgggggtgcatgcctgtagtcctaactactcaggagactgaggtgggaagattgcttgagtctggcaggtcaaggctgtagtgagcagtgattgcaccactgcactccagcctgggcaacagaataagaacctgtctcaaaaaaataaaaaggatgcatgtaagccataagtgaagaaatgaaaagagatattccatggaaatggcaaccaaaaaggacagagctggctatacttacatcagacaaaatagatgttaaatcaaaaactgtcacaagaggtggcacacacctatagtcccagctactcaggaggctgaagcagtggt

SEQ ID NO: 385510 - DNA, 1009 bp, Homo sapiens
acctgtaatacctaaagtcagttgctattctagatgtctgttttcttggggattattcccctatcatttcatgccaatggatagacactaagatcttgaaatacgcgtaacacaaggtttatcaacagtggcacttggggcctgataattctttgttgtgggaatcctgctgtgcctagtaggatgtctgagcagcaccccagcctctcccactagatgtcggtaccagcaccacccccacaagaggtggcaaccaaaaatctctccagatattgttctaaataatgccccctgagagaggggagataaaatccccctggtagagaactactgatttatatagaacaactcttccttttacgtaagagaagcttgaaactgccccctttcagcgcctaaaaccaccttaagaagaaagtgctaacctaggttaggaggccgaggctgcttcttggagactaagaaatgcactcaagacctataaggcctttccccacagcctgatcctaagtggaaaggccaggagaagcgtggcagagaactatggatcaggcagcccctctcatctttaccataagctaggtgcactgcaaagtacataggaaataagcaggatctgaaacaggccagctgaaactttcaagaggaaccagttcaggcatttccaggtagcaagggaccaccctgggcagctccgccccaagccccaagcccggcggcctgcagggcctcccggggccgggcgcccgcgcggagctcccgccacgcccaccggacgtcacccgttacacaacgccccccgcccccagcttatgcaattctgccctcccgcggttcccaattgtcccggtgacttttgtgggtgaggaagggagacgccgcctgcccggcctagttgccctcgcgggggattctctccccgccccggcagtcgtttccccgcggcgggcccggcccgagagccaattcccggaaagcgcgcggcaggaagcgagcggccgctcgggat

SEQ ID NO: 385511 - DNA, 721 bp, Homo sapiens
cacgcctgtaatcccagcactttgggaggccgaggtgggagttcaagaacagcctggccaagatggtgaaaccctgtctctaataaaaatgcaaaaattagggccgggcacaatggctcacgcctgtaatcccagcactttgagaggctgaggtgggtggatcacgaggtcaggagattgagaccgtcctggccaacatggtgaaaccccatctctactaaaaatacaaaaattagctgggcgtggcagcgcatgcttgtaatcccagctacttgggaggctgaggcaggcgaattgcttgaacccaggaggtagaggttgcagtgagccaagatcgtgccactgcattccagcctggcgacagagctagactccatctcaaaaaaacagaaacaaaaattagccaggtgtggtggcaggtacctgtaatcccagccacttgggaggctgagacagagaattgcttgaatccaggaggcggaggttgcagtgagccgagatcgcaccactgcactccaggctgggtgacagagcaagactccatctcaaaaagagaaaaagaaaaagtcattctagctactcaggaggctgaggcggaaggatcacttgcgcccaggagtttttgagaccagtccgggcaacacagtgagacctcatctcaaataaatattttaaaaggcaataatacacctaaatttagtattcaagagtttagaaaaag

SEQ ID NO: 385512 - DNA, 393 bp, Homo sapiens
gatgaaaagaaggtttttgctcttcaaatgcttaagtaaactaaaaggcagagctggaaataaagcccgtattgtggactccaagtaatgctctttctgctacaccatactttgtggtgtctgctcccatgtgcttcttcgctaaggctgatcaaaaaagttagtaggttgcttcagctataagaatttgatggtcttccttagtcatcatagtctgcagcaatcatttttgttcatcattgggatgtctgcttactcctgttgagtaaatgtgatctattcacccttggaagctccttgcacaccaacagtattcttggatagggacaagtgttgtctaagtcagtgacgatttctttagcataataaaaggctccatgtaggatgctaata

SEQ ID NO: 385513 - DNA, 679 bp, Homo sapiens
aattttacatccctttttttcagctgggtgatattatatgggctatgataaacttagaaccagcaagacagaggtttttattttcagttagtcacctgtctaaaggttaaccagctttcttcctaatacttgaaagttccacctcacatgttaaaggtttcattcctgcctactgaccccacctccagagtcaagcagttatataattgggtacctcattcaaccgttctcattgcattgttccccaccaagaatccaggatgagaaagcttttgctgcttttccatcatgtgttgctagtgtgtttttttcagttctctgtggtatgttatttgctggttattatgagtttccttgatctttgaacactgcctgggaggtccagtgatttcagccttccagaggtgatttaaaaaaaaataatcagggctgggtgtggtggctcattcctgtaatcccagcactttgggaggcaaaggtgggtggatcacttgaggtcaggagttcaagaccagcctagccaaaatagtgaaacctcgtctctactaaaaatacaaaaattagccaggcattggtggtgtatgcctgtggtcccagctactcaggaggctgaggcacaagaatcacttgaacccgggaggcagaggctgcagtgagcgaagatcacaccactgtgctc

SEQ ID NO: 385514 - DNA, 123 bp, Homo sapiens
tgtatcatgtgacaaatgtatcacactcatgaactgggcatggggtactcacaactctaaattattctaaaaatattgatataaatttaagaccaaaaccatggccaggcgtggtgcctcact

SEQ ID NO: 385515 - DNA, 703 bp, Homo sapiens
aacaaacatattacccatcaaacacgcagcccgcctgctgccatttgctgctgtgtgattgttgagactgaagttctgaaagcaccagtgtttgccggatctgtctccagcttgtctctacaaggtcatttccaaaagactgtcaaaagaatggcatgtcccgccttttccaccaccgacacaccctgcatgaaaaccccaggagcacagaagtcctgcttgggtcccaggaacagcatggctccagcaaaggatgactcttctcttccagaatattcagcctttaacacatctgtccatgctgcaattagacatggaaattggaaactcctcacgggctacccaggctgtggttactggttccctccaccgtctcaatacaatgtttctgagataccctcatcagacccaccaaccaagaccctctggctctttgatattgatcgggaccctgaagaaagacatgacctgtccagagaatatcctcacatcgtcacaaagctcctgtcccgcctacagttctaccataaacactcagtccccgtgtacttccctgcacaggacccccgctgtgatcccaaggccactggggtgtggggcccttggatgtaggatttcagggaggctagaaaacctttcaattggaacgtcgacttccaacaaaaacaacataattgcctccctgcacccattcccgccagtt

SEQ ID NO: 385516 - DNA, 3378 bp, Homo sapiens
taaaagtgaatacatgattttatttaactcattaataaggaaattggtaaggtgttaaaaccaattcaaaggacaatccaaagaacagatcaggaatactaaaataaatgtgcaagcggaggtgaaactgttttccttggtagtggtggaggggaaggattgctactccgctggataaagttcatttgtgtatatataaataagaattattttccattgttatttatctataacttataaagttgtaaacaacttccacggaatcagactcaacctggaagggtatggtctctaggcaatgcaaaaattttcccctacacctgttaacaactataatatctccagacagagtagacagaaagtctggatggcaacgggaatctactggtcatacggctaacttcctaattcaataagcacgtgactaaaggattttttccttccactcacagatatttcaggctaactagatactgtgtgcttcttagtgtcactgcttagtgggggagccagctctgagtggggtcatatccggacaagcgaatgagctatttattcaatgaccacgcaacactccaaatcctcccagggcaacttgaaagtaaccgcaccttccaaagggcaccgtgcaatcagactgaaaccacggtgcaaatttaattgccggggaagataacgggccttggtgccctccaagcgtcagctgagtttccaagaagccgggcagcgggcgcccgcgggttcgtctctggctcctcctccgccacagcagccgggggcccgggtcggaggcggcgggggccgagcgcccggcctcgcaagcccacggcccgctgggggtgccgtcccgcgccggggcggagcaggccccggcagcccagttcctcattctatcagcggtacaaggggctggtggcgccacaggcgctgggaccgcgggcggacaaggatgggtccgcgcggcgcggcgagcttgccccgaggccccggacctcggcggctgctcctccccgtcgtcctcccgctgctgctgctgctgttgttggcgccgccgggctcgggcgccggggccagccggccgccccacctggtcttcttgctggcagacgacctaggctggaacgacgtcggcttccacggctcccgcatccgcacgccgcacctggacgcgctggcggccggcggggtgctcctggacaactactacacgcagccgctgtgcacgccgtcgcggagccagctgctcactggccgctaccagatccgtacaggtttacagcaccaaataatctggccctgtcagcccagctgtgttcctctggatgaaaaactcctgccccagctcctaaaagaagcaggttatactacccatatggtcggaaaatggcacctgggaatgtaccggaaagaatgccttccaacccgccgaggatttgatacctactttggatatctcctgggtagtgaagattattattcccatgaacgctgtacattaattgacgctctgaatgtcacacgatgtgctcttgattttcgagatggcgaagaagttgcaacaggatataaaaatatgtattcaacaaacatattcaccaaaagggctatagccctcataactaaccatccaccagagaagcctctgtttctctaccttgctctccagtctgtgcatgagccccttcaggtccctgaggaatacttgaagccatatgactttatccaagacaagaacaggcatcactatgcaggaatggtgtcccttatggatgaagcagtaggaaatgtcactgcagctttaaaaagcagtgggctctggaacaacacggtgttcatcttttctacagataacggagggcagactttggcagggggtaataactggccccttcgaggaagaaaatggagcctgtgggaaggaggcgtccgaggggtgggctttgtggcaagccccttgctgaagcagaagggcgtgaagaaccgggagctcatccacatctctgactggctgccaacactcgtgaagctggccaggggacacaccaatggcacaaagcctctggatggcttcgacgtgtggaaaaccatcagtgaaggaagcccatcccccagaattgagctgctgcataatattgacccgaacttcgtggactcttcaccgtgtcccaggaacagcatggctccagcaaaggatgactcttctcttccagaatattcagcctttaacacatctgtccatgctgcaattagacatggaaattggaaactcctcacgggctacccaggctgtggttactggttccctccaccgtctcaatacaatgtttctgagataccctcatcagacccaccaaccaagaccctctggctctttgatattgatcgggaccctgaagaaagacatgacctgtccagagaatatcctcacatcgtcacaaagctcctgtcccgcctacagttctaccataaacactcagtccccgtgtacttccctgcacaggacccccgctgtgatcccaaggccactggggtgtggggcccttggatgtaggatttcagggaggctagaaaacctttcaattggaagttggacctcaggccttttctcacgactcttgtctcatttgttatcccaacctgggttcacttggcccttctcttgctcttaaaccacaccgaggtgtctaatttcaacccctaatgcatttaagaagctgataaaatctgcaacactcctgctgttggctggagcatgtgtctagaggtgggggtggctgggtttatccccctttcctaagccttgggacagctgggaacttaacttgaaataggaagttctcactgaatcctggaggctggaacagctggctcttttagactcacaagtcagacgttcgattcccctctgccaatagccagttttattggagtgaatcacatttcttacgcaaatgaagggagcagacagtgattaatggttctgttggccaaggcttctccctgtcggtgaaggatcatgttcaggcactccaagtgaaccacccctcttggttcaccccttactcacttatctcatcacagagcataaggcccattttgttgttcaggtcaacagcaaaatgcctgcaccatgactgtggcttttaaaataaagaaatgtgtttttatcgtaatttatttccccccagccattgctcactctgtctagacttcctgccacttccaattcttctgtggcttttcctgcctttccttttgacctcagtagtcctatccctgggaaggccactttgcttctctacctgagcacccctgatttctggaacgctgctgagccctgccttacttttgcccctagggctgaagctagaggcctcc

SEQ ID NO: 385517 - DNA, 3544 bp, Homo sapiens
taaaagtgaatacatgattttatttaactcattaataaggaaattggtaaggtgttaaaaccaattcaaaggacaatccaaagaacagatcaggaatactaaaataaatgtgcaagcggaggtgaaactgttttccttggtagtggtggaggggaaggattgctactccgctggataaagttcatttgtgtatatataaataagaattattttccattgttatttatctataacttataaagttgtaaacaacttccacggaatcagactcaacctggaagggtatggtctctaggcaatgcaaaaattttcccctacacctgttaacaactataatatctccagacagagtagacagaaagtctggatggcaacgggaatctactggtcatacggctaacttcctaattcaataagcacgtgactaaaggattttttccttccactcacagatatttcaggctaactagatactgtgtgcttcttagtgtcactgcttagtgggggagccagctctgagtggggtcatatccggacaagcgaatgagctatttattcaatgaccacgcaacactccaaatcctcccagggcaacttgaaagtaaccgcaccttccaaagggcaccgtgcaatcagactgtgtgtttggcctcctgtttgctagtggggaggaagcggcttcatgggtgtacactacgcataaatgaatgtgaaaggctatttagacctcatggatttcgacattgctggacctgccacaggctgggctcttgtgctagaaatgacttgctagctagacatcatggttcaggatctgagtcagaggtttaaccatttataagcttttttcttatgaaaaattggcactaattataatgtctaactgtcagagttgttgcaggctttacaggagacgcgggctgtgaagatgctttgtaaattgtgaagcgttattaaagaacacatcttttttttttaggaaaccacggtgcaaatttaattgccggggaagataacgggccttggtgccctccaagcgtcagctgagtttccaagaagccgggcagcgggcgcccgcgggttcgtctctggctcctcctccgccacagcagccgggggcccgggtcggaggcggcgggggccgagcgcccggcctcgcaagcccacggcccgctgggggtgccgtcccgcgccggggcggagcaggccccggcagcccagttcctcattctatcagcggtacaaggggctggtggcgccacaggcgctgggaccgcgggcggacaaggatgggtccgcgcggcgcggcgagcttgccccgaggccccggacctcggcggctgctcctccccgtcgtcctcccgctgctgctgctgctgttgttggcgccgccgggctcgggcgccggggccagccggccgccccacctggtcttcttgctggcagacgacctaggctggaacgacgtcggcttccacggctcccgcatccgcacgccgcacctggacgcgctggcggccggcggggtgctcctggacaactactacacgcagccgctgtgcacgccgtcgcggagccagctgctcactggccgctaccagatccgtacaggtttacagcaccaaataatctggccctgtcagcccagctgtgttcctctggatgaaaaactcctgccccagctcctaaaagaagcaggttatactacccatatggtcggaaaatggcacctgggaatgtaccggaaagaatgccttccaacccgccgaggatttgatacctactttggatatctcctgggtagtgaagattattattcccatgaacgctgtacattaattgacgctctgaatgtcacacgatgtgctcttgattttcgagatggcgaagaagttgcaacaggatataaaaatatgtattcaacaaacatattcaccaaaagggctatagccctcataactaaccatccaccagagaagcctctgtttctctaccttgctctccagtctgtgcatgagccccttcaggtccctgaggaatacttgaagccatatgactttatccaagacaagaacaggcatcactatgcaggaatggtgtcccttatggatgaagcagtaggaaatgtcactgcagctttaaaaagcagtgggctctggaacaacacggtgttcatcttttctacagataacggagggcagactttggcagggggtaataactggccccttcgaggaagaaaatggagcctgtgggaaggaggcgtccgaggggtgggctttgtggcaagccccttgctgaagcagaagggcgtgaagaaccgggagctcatccacatctctgactggctgccaacactcgtgaagctggccaggggacacaccaatggcacaaagcctctggatggcttcgacgtgtggaaaaccatcagtgaaggaagcccatcccccagaattgagctgctgcataatattgacccgaacttcgtggactcttcaccgtgtcccaggaacagcatggctccagcaaaggatgactcttctcttccagaatattcagcctttaacacatctgtccatgctgcaattagacatggaaattggaaactcctcacgggctacccaggctgtggttactggttccctccaccgtctcaatacaatgtttctgagataccctcatcagacccaccaaccaagaccctctggctctttgatattgatcgggaccctgaagaaagacatgacctgtccagagaatatcctcacatcgtcacaaagctcctgtcccgcctacagttctaccataaacactcagtccccgtgtacttccctgcacaggacccccgctgtgatcccaaggccactggggtgtggggcccttggatgtaggatttcagggaggctagaaaacctttcaattggaagttggacctcaggccttttctcacgactcttgtctcatttgttatcccaacctgggttcacttggcccttctcttgctcttaaaccacaccgaggtgtctaatttcaacccctaatgcatttaagaagctgataaaatctgcaacactcctgctgttggctggagcatgtgtctagaggtgggggtggctgggtttatccccctttcctaagccttgggacagctgggaacttaacttgaaataggaagttctcactgaatcctggaggctggaacagctggctcttttagactcacaagtcagacgttcgattcccctctgccaatagccagttttattggagtgaatcacatttcttacgcaaatgaagggagcagacagtgattaatggttctgttggccaaggcttctccctgtcggtgaaggatcatgttcaggcactccaagtgaaccacccctcttggttcaccccttactcacttatctcatcacagagcataaggcccattttgttgttcaggtcaacagcaaaatgcctgcaccatgactgtggcttttaaaataaagaaagatgcgacagatgtcaactcacacaacacacaccactaataacacaa

SEQ ID NO: 385518 - DNA, 1492 bp, Homo sapiens
cctcaagtactagaagtatccatttgtattggagccaaaatatccgcaagcagagaaacaagaagtcaaaaatattttcctctttggtgctaaagatttgctgctgtgtgattgttgagactgaagttctgaaagcaccagtgtttgccggatctgtctccagcttgtctctacaaggtcatttccaaaagactgtcaaaagaatggcatgtcccgccttttccaccaccgacacaccctgcatgaaaaccccaggagcacagaagtcctgcttgggtcccaggaacagcatggctccagcaaaggatgactcttctcttccagaatattcagcctttaacacatctgtccatgctgcaattagacatggaaattggaaactcctcacgggctacccaggctgtggttactggttccctccaccgtctcaatacaatgtttctgagataccctcatcagacccaccaaccaagaccctctggctctttgatattgatcgggaccctgaagaaagacatgacctgtccagagaatatcctcacatcgtcacaaagctcctgtcccgcctacagttctaccataaacactcagtccccgtgtacttccctgcacaggacccccgctgtgatcccaaggccactggggtgtggggcccttggatgtaggatttcagggaggctagaaaacctttcaattggaagttggacctcaggccttttctcacgactcttgtctcatttgttatcccaacctgggttcacttggcccttctcttgctcttaaaccacaccgaggtgtctaatttcaacccctaatgcatttaagaagctgataaaatctgcaacactcctgctgttggctggagcatgtgtctagaggtgggggtggctgggtttatccccctttcctaagccttgggacagctgggaacttaacttgaaataggaagttctcactgaatcctggaggctggaacagctggctcttttagactcacaagtcagacgttcgattcccctctgccaatagccagttttattggagtgaatcacatttcttacgcaaatgaagggagcagacagtgattaatggttctgttggccaaggcttctccctgtcggtgaaggatcatgttcaggcactccaagtgaaccacccctcttggttcaccccttactcacttatctcatcacagagcataaggcccattttgttgttcaggtcaacagcaaaatgcctgcaccatgactgtggcttttaaaataaagaaatgtgtttttatcgtaatttatttccccccagccattgctcactctgtctagacttcctgccacttccaattcttctgtggcttttcctgcctttccttttgacctcagtagtcctatccctgggaaggccactttgcttctctacctgagcacccctgatttctggaacgctgctgagccctgccttacttttgcccctagggctgaagctagaggcctcc

SEQ ID NO: 385519 - DNA, 3601 bp, Homo sapiens
taaaagtgaatacatgattttatttaactcattaataaggaaattggtaaggtgttaaaaccaattcaaaggacaatccaaagaacagatcaggaatactaaaataaatgtgcaagcggaggtgaaactgttttccttggtagtggtggaggggaaggattgctactccgctggataaagttcatttgtgtatatataaataagaattattttccattgttatttatctataacttataaagttgtaaacaacttccacggaatcagactcaacctggaagggtatggtctctaggcaatgcaaaaattttcccctacacctgttaacaactataatatctccagacagagtagacagaaagtctggatggcaacgggaatctactggtcatacggctaacttcctaattcaataagcacgtgactaaaggattttttccttccactcacagatatttcaggctaactagatactgtgtgcttcttagtgtcactgcttagtgggggagccagctctgagtggggtcatatccggacaagcgaatgagctatttattcaatgaccacgcaacactccaaatcctcccagggcaacttgaaagtaaccgcaccttccaaagggcaccgtgcaatcagactgtgtgtttggcctcctgtttgctagtggggaggaagcggcttcatgggtgtacactacgcataaatgaatgtgaaaggctatttagacctcatggatttcgacattgctggacctgccacaggctgggctcttgtgctagaaatgacttgctagctagacatcatggttcaggatctgagtcagaggtttaaccatttataagcttttttcttatgaaaaattggcactaattataatgtctaactgtcagagttgttgcaggctttacaggagacgcgggctgtgaagatgctttgtaaattgtgaagcgttattaaagaacacatcttttttttttaggaaaccacggtgcaaatttaattgccggggaagataacgggccttggtgccctccaagcgtcagctgagtttccaagaagccgggcagcgggcgcccgcgggttcgtctctggctcctcctccgccacagcagccgggggcccgggtcggaggcggcgggggccgagcgcccggcctcgcaagcccacggcccgctgggggtgccgtcccgcgccggggcggagcaggccccggcagcccagttcctcattctatcagcggtacaaggggctggtggcgccacaggcgctgggaccgcgggcggacaaggatgggtccgcgcggcgcggcgagcttgccccgaggccccggacctcggcggctgctcctccccgtcgtcctcccgctgctgctgctgctgttgttggcgccgccgggctcgggcgccggggccagccggccgccccacctggtcttcttgctggcagacgacctaggctggaacgacgtcggcttccacggctcccgcatccgcacgccgcacctggacgcgctggcggccggcggggtgctcctggacaactactacacgcagccgctgtgcacgccgtcgcggagccagctgctcactggccgctaccagatccgtacaggtttacagcaccaaataatctggccctgtcagcccagctgtgttcctctggatgaaaaactcctgccccagctcctaaaagaagcaggttatactacccatatggtcggaaaatggcacctgggaatgtaccggaaagaatgccttccaacccgccgaggatttgatacctactttggatatctcctgggtagtgaagattattattcccatgaacgctgtacattaattgacgctctgaatgtcacacgatgtgctcttgattttcgagatggcgaagaagttgcaacaggatataaaaatatgtattcaacaaacatattcaccaaaagggctatagccctcataactaaccatccaccagagaagcctctgtttctctaccttgctctccagtctgtgcatgagccccttcaggtccctgaggaatacttgaagccatatgactttatccaagacaagaacaggcatcactatgcaggaatggtgtcccttatggatgaagcagtaggaaatgtcactgcagctttaaaaagcagtgggctctggaacaacacggtgttcatcttttctacagataacggagggcagactttggcagggggtaataactggccccttcgaggaagaaaatggagcctgtgggaaggaggcgtccgaggggtgggctttgtggcaagccccttgctgaagcagaagggcgtgaagaaccgggagctcatccacatctctgactggctgccaacactcgtgaagctggccaggggacacaccaatggcacaaagcctctggatggcttcgacgtgtggaaaaccatcagtgaaggaagcccatcccccagaattgagctgctgcataatattgacccgaacttcgtggactcttcaccgtactggcctgagtgctcgctgctgttgtagctaccaccaactttctactgaagatgataacccagggcataagaaatgacttcagacccaaggttctgaaagggcccctcaaggcctcgggtggctcctgcagaagtggcagaagaggcgggaactaggaacctggcatcataggaaaagtgccttctccaagaaagaaggggccccaggaggctgtcttacttagatcaaccataaactaccacagatgggtcatttcttatattatttcaaaatatctttgaagatgagaattcatttgtgtccttcatagaccaaagttctttgtgttaccttttcccaaaagtaaattcctttccctttattcattccttgtggaaataaaatgcaagccctttatacttgtcttacagtaatatggcacatgtagcttacttttgagcatcccagtgaataatgtttggaacttttcttattacctaatagcatatagagaagagtgaagtcagctaaaaacagaaattttgaaaagccatcttcaggaaaatgtaggcccagatgctttcctccaccttttttgacaggctgccacatacagtttcacaggttgctaactgcacaggggcacagcctgtcctccatttgccaagtcacactttctggcacagagaggggtgtcttgttctaatttgtctttgtggcctgctctcttctgttcttgaagctgcaagccacagtgagatgagtgaaaagcagtcagtctcatagaaaaaagcagggaaaaagcaatagagacaagaaggaaagccaaggaaaggattcttggggaaggtcaacagggaagggtggagaaggggaaaggagatgaccattatgatcttctaattaggagtttaggggagatcgtttgccttattcagcaaccatgcgactagaaaataagcaatctctttaaaataatgctttactacagtcaacttcaataatcttttcgataattgggttgtgattaaacttacaggcacaagactaaataatcccaacgcctttaactttgcacattgttttttgtttgtttggttggttttgttgttttagtt

SEQ ID NO: 385520 - DNA, 2906 bp, Homo sapiens
taaaagtgaatacatgattttatttaactcattaataaggaaattggtaaggtgttaaaaccaattcaaaggacaatccaaagaacagatcaggaatactaaaataaatgtgcaagcggaggtgaaactgttttccttggtagtggtggaggggaaggattgctactccgctggataaagttcatttgtgtatatataaataagaattattttccattgttatttatctataacttataaagttgtaaacaacttccacggaatcagactcaacctggaagggtatggtctctaggcaatgcaaaaattttcccctacacctgttaacaactataatatctccagacagagtagacagaaagtctggatggcaacgggaatctactggtcatacggctaacttcctaattcaataagcacgtgactaaaggattttttccttccactcacagatatttcaggctaactagatactgtgtgcttcttagtgtcactgcttagtgggggagccagctctgagtggggtcatatccggacaagcgaatgagctatttattcaatgaccacgcaacactccaaatcctcccagggcaacttgaaagtaaccgcaccttccaaagggcaccgtgcaatcagactgtgtgtttggcctcctgtttgctagtggggaggaagcggcttcatgggtgtacactacgcataaatgaatgtgaaaggctatttagacctcatggatttcgacattgctggacctgccacaggctgggctcttgtgctagaaatgacttgctagctagacatcatggttcaggatctgagtcagaggtttaaccatttataagcttttttcttatgaaaaattggcactaattataatgtctaactgtcagagttgttgcaggctttacaggagacgcgggctgtgaagatgctttgtaaattgtgaagcgttattaaagaacacatcttttttttttaggaaaccacggtgcaaatttaattgccggggaagataacgggccttggtgccctccaagcgtcagctgagtttccaagaagccgggcagcgggcgcccgcgggttcgtctctggctcctcctccgccacagcagccgggggcccgggtcggaggcggcgggggccgagcgcccggcctcgcaagcccacggcccgctgggggtgccgtcccgcgccggggcggagcaggccccggcagcccagttcctcattctatcagcggtacaaggggctggtggcgccacaggcgctgggaccgcgggcggacaaggatgggtccgcgcggcgcggcgagcttgccccgaggccccggacctcggcggctgctcctccccgtcgtcctcccgctgctgctgctgctgttgttggcgccgccgggctcgggcgccggggccagccggccgccccacctggtcttcttgctggcagacgacctaggctggaacgacgtcggcttccacggctcccgcatccgcacgccgcacctggacgcgctggcggccggcggggtgctcctggacaactactacacgcagccgctgtgcacgccgtcgcggagccagctgctcactggccgctaccagatccgtacaggtttacagcaccaaataatctggccctgtcagcccagctgtgttcctctggatgaaaaactcctgccccagctcctaaaagaagcaggttatactacccatatggtcggaaaatggcacctgggaatgtaccggaaagaatgccttccaacccgccgaggatttgatacctactttggatatctcctgggtagtgaagattattattcccatgaacgctgtacattaattgacgctctgaatgtcacacgatgtgctcttgattttcgagatggcgaagaagttgcaacaggatataaaaatatgtattcaacaaacatattcaccaaaagggctatagccctcataactaaccatccaccagagaagcctctgtttctctaccttgctctccagtctgtgcatgagccccttcaggtccctgaggaatacttgaagccatatgactttatccaagacaagaacaggcatcactatgcaggaatggtgtcccttatggatgaagcagtaggaaatgtcactgcagctttaaaaagcagtgggctctggaacaacacggtgttcatcttttctacagataacggagggcagactttggcagggggtaataactggccccttcgaggaagaaaatggagcctgtgggaaggaggcgtccgaggggtgggctttgtggcaagccccttgctgaagcagaagggcgtgaagaaccgggagctcatccacatctctgactggctgccaacactcgtgaagctggccaggggacacaccaatggcacaaagcctctggatggcttcgacgtgtggaaaaccatcagatgctgagaaattaggaatgaacaagtcagtcaagatcctgcctctcaggaagctgtattctagttgggggagaaagatgttggacaaatgaacacacagatgagcaagatgactgccagttgtgataagtgccaggaaggcaaaaaagtatgttgtgatagatagagctggctgatgtgaagaagatacatcagggaacaggacccagactcagatttggaaatcgtgatggtctttttcctgtttaacccccacagtgtagagcaatagcccccaaggttgggaggcacatgccttagaggttgcaagatgttcccttggagtacaggaagaaaatttcaatcttgtatttgtattaatatctaatttcatctcatcctttttaaagtatatgttttttaagacacataatatattagtagacttgtacataaatctaatttataaataaatatgcatatattggagatatta

SEQ ID NO: 385521 - DNA, 128 bp, Homo sapiens
taattctttcaaactatttcttcccaggtcccaggaacagcatggctccagcaaaggatgactcttctcttccagaatattcagcctttaacacatctgtccatgctgcaattagacatggaaattgg

SEQ ID NO: 385522 - DNA, 3718 bp, Homo sapiens
taaaagtgaatacatgattttatttaactcattaataaggaaattggtaaggtgttaaaaccaattcaaaggacaatccaaagaacagatcaggaatactaaaataaatgtgcaagcggaggtgaaactgttttccttggtagtggtggaggggaaggattgctactccgctggataaagttcatttgtgtatatataaataagaattattttccattgttatttatctataacttataaagttgtaaacaacttccacggaatcagactcaacctggaagggtatggtctctaggcaatgcaaaaattttcccctacacctgttaacaactataatatctccagacagagtagacagaaagtctggatggcaacgggaatctactggtcatacggctaacttcctaattcaataagcacgtgactaaaggattttttccttccactcacagatatttcaggctaactagatactgtgtgcttcttagtgtcactgcttagtgggggagccagctctgagtggggtcatatccggacaagcgaatgagctatttattcaatgaccacgcaacactccaaatcctcccagggcaacttgaaagtaaccgcaccttccaaagggcaccgtgcaatcagactgtgtgtttggcctcctgtttgctagtggggaggaagcggcttcatgggtgtacactacgcataaatgaatgtgaaaggctatttagacctcatggatttcgacattgctggacctgccacaggctgggctcttgtgctagaaatgacttgctagctagacatcatggttcaggatctgagtcagaggtttaaccatttataagcttttttcttatgaaaaattggcactaattataatgtctaactgtcagagttgttgcaggctttacaggagacgcgggctgtgaagatgctttgtaaattgtgaagcgttattaaagaacacatcttttttttttaggaaaccacggtgcaaatttaattgccggggaagataacgggccttggtgccctccaagcgtcagctgagtttccaagaagccgggcagcgggcgcccgcgggttcgtctctggctcctcctccgccacagcagccgggggcccgggtcggaggcggcgggggccgagcgcccggcctcgcaagcccacggcccgctgggggtgccgtcccgcgccggggcggagcaggccccggcagcccagttcctcattctatcagcggtacaaggggctggtggcgccacaggcgctgggaccgcgggcggacaaggatgggtccgcgcggcgcggcgagcttgccccgaggccccggacctcggcggctgctcctccccgtcgtcctcccgctgctgctgctgctgttgttggcgccgccgggctcgggcgccggggccagccggccgccccacctggtcttcttgctggcagacgacctaggctggaacgacgtcggcttccacggctcccgcatccgcacgccgcacctggacgcgctggcggccggcggggtgctcctggacaactactacacgcagccgctgtgcacgccgtcgcggagccagctgctcactggccgctaccagatccgtacaggtttacagcaccaaataatctggccctgtcagcccagctgtgttcctctggatgaaaaactcctgccccagctcctaaaagaagcaggttatactacccatatggtcggaaaatggcacctgggaatgtaccggaaagaatgccttccaacccgccgaggatttgatacctactttggatatctcctgggtagtgaagattattattcccatgaacgctgtacattaattgacgctctgaatgtcacacgatgtgctcttgattttcgagatggcgaagaagttgcaacaggatataaaaatatgtattcaacaaacatattcaccaaaagggctatagccctcataactaaccatccaccagagaagcctctgtttctctaccttgctctccagtctgtgcatgagccccttcaggtccctgaggaatacttgaagccatatgactttatccaagacaagaacaggcatcactatgcaggaatggtgtcccttatggatgaagcagtaggaaatgtcactgcagctttaaaaagcagtgggctctggaacaacacggtgttcatcttttctacagataacggagggcagactttggcagggggtaataactggccccttcgaggaagaaaatggagcctgtgggaaggaggcgtccgaggggtgggctttgtggcaagccccttgctgaagcagaagggcgtgaagaaccgggagctcatccacatctctgactggctgccaacactcgtgaagctggccaggggacacaccaatggcacaaagcctctggatggcttcgacgtgtggaaaaccatcagtgaaggaagcccatcccccagaattgagctgctgcataatattgacccgaacttcgtggactcttcaccgtgtcccaggaacagcatggctccagcaaaggatgactcttctcttccagaatattcagcctttaacacatctgtccatgctgcaattagacatggaaattggaaactcctcacgggctacccaggctgtggttactggttccctccaccgtctcaatacaatgtttctgagataccctcatcagacccaccaaccaagaccctctggctctttgatattgatcgggaccctgaagaaagacatgacctgtccagagaatatcctcacatcgtcacaaagctcctgtcccgcctacagttctaccataaacactcagtccccgtgtacttccctgcacaggacccccgctgtgatcccaaggccactggggtgtggggcccttggatgtaggatttcagggaggctagaaaacctttcaattggaagttggacctcaggccttttctcacgactcttgtctcatttgttatcccaacctgggttcacttggcccttctcttgctcttaaaccacaccgaggtgtctaatttcaacccctaatgcatttaagaagctgataaaatctgcaacactcctgctgttggctggagcatgtgtctagaggtgggggtggctgggtttatccccctttcctaagccttgggacagctgggaacttaacttgaaataggaagttctcactgaatcctggaggctggaacagctggctcttttagactcacaagtcagacgttcgattcccctctgccaatagccagttttattggagtgaatcacatttcttacgcaaatgaagggagcagacagtgattaatggttctgttggccaaggcttctccctgtcggtgaaggatcatgttcaggcactccaagtgaaccacccctcttggttcaccccttactcacttatctcatcacagagcataaggcccattttgttgttcaggtcaacagcaaaatgcctgcaccatgactgtggcttttaaaataaagaaatgtgtttttatcgtaatttatttccccccagccattgctcactctgtctagacttcctgccacttccaattcttctgtggcttttcctgcctttccttttgacctcagtagtcctatccctgggaaggccactttgcttctctacctgagcacccctgatttctggaacgctgctgagccctgccttacttttgcccctagggctgaagctagaggcctcc

SEQ ID NO: 385523 - DNA, 3741 bp, Homo sapiens
taaaagtgaatacatgattttatttaactcattaataaggaaattggtaaggtgttaaaaccaattcaaaggacaatccaaagaacagatcaggaatactaaaataaatgtgcaagcggaggtgaaactgttttccttggtagtggtggaggggaaggattgctactccgctggataaagttcatttgtgtatatataaataagaattattttccattgttatttatctataacttataaagttgtaaacaacttccacggaatcagactcaacctggaagggtatggtctctaggcaatgcaaaaattttcccctacacctgttaacaactataatatctccagacagagtagacagaaagtctggatggcaacgggaatctactggtcatacggctaacttcctaattcaataagcacgtgactaaaggattttttccttccactcacagatatttcaggctaactagatactgtgtgcttcttagtgtcactgcttagtgggggagccagctctgagtggggtcatatccggacaagcgaatgagctatttattcaatgaccacgcaacactccaaatcctcccagggcaacttgaaagtaaccgcaccttccaaagggcaccgtgcaatcagactgtgtgtttggcctcctgtttgctagtggggaggaagcggcttcatgggtgtacactacgcataaatgaatgtgaaaggctatttagacctcatggatttcgacattgctggacctgccacaggctgggctcttgtgctagaaatgacttgctagctagacatcatggttcaggatctgagtcagaggtttaaccatttataagcttttttcttatgaaaaattggcactaattataatgtctaactgtcagagttgttgcaggctttacaggagacgcgggctgtgaagatgctttgtaaattgtgaagcgttattaaagaacacatcttttttttttaggaaaccacggtgcaaatttaattgccggggaagataacgggccttggtgccctccaagcgtcagctgagtttccaagaagccgggcagcgggcgcccgcgggttcgtctctggctcctcctccgccacagcagccgggggcccgggtcggaggcggcgggggccgagcgcccggcctcgcaagcccacggcccgctgggggtgccgtcccgcgccggggcggagcaggccccggcagcccagttcctcattctatcagcggtacaaggggctggtggcgccacaggcgctgggaccgcgggcggacaaggatgggtccgcgcggcgcggcgagcttgccccgaggccccggacctcggcggctgctcctccccgtcgtcctcccgctgctgctgctgctgttgttggcgccgccgggctcgggcgccggggccagccggccgccccacctggtcttcttgctggcagacgacctaggctggaacgacgtcggcttccacggctcccgcatccgcacgccgcacctggacgcgctggcggccggcggggtgctcctggacaactactacacgcagccgctgtgcacgccgtcgcggagccagctgctcactggccgctaccagatccgtacaggtttacagcaccaaataatctggccctgtcagcccagctgtgttcctctggatgaaaaactcctgccccagctcctaaaagaagcaggttatactacccatatggtcggaaaatggcacctgggaatgtaccggaaagaatgccttccaacccgccgaggatttgatacctactttggatatctcctgggtagtgaagattattattcccatgaacgctgtacattaattgacgctctgaatgtcacacgatgtgctcttgattttcgagatggcgaagaagttgcaacaggatataaaaatatgtattcaacaaacatattcaccaaaagggctatagccctcataactaaccatccaccagagaagcctctgtttctctaccttgctctccagtctgtgcatgagccccttcaggtccctgaggaatacttgaagccatatgactttatccaagacaagaacaggcatcactatgcaggaatggtgtcccttatggatgaagcagtaggaaatgtcactgcagctttaaaaagcagtgggctctggaacaacacggtgttcatcttttctacagataacggagggcagactttggcagggggtaataactggccccttcgaggaagaaaatggagcctgtgggaaggaggcgtccgaggggtgggctttgtggcaagccccttgctgaagcagaagggcgtgaagaaccgggagctcatccacatctctgactggctgccaacactcgtgaagctggccaggggacacaccaatggcacaaagcctctggatggcttcgacgtgtggaaaaccatcagtgaaggaagcccatcccccagaattgagctgctgcataatattgacccgaacttcgtggactcttcaccgtgtcccaggaacagcatggctccagcaaaggatgactcttctcttccagaatattcagcctttaacacatctgtccatgctgcaattagacatggaaattggaaactcctcacgggctacccaggctgtggttactggttccctccaccgtctcaatacaatgtttctgagataccctcatcagacccaccaaccaagaccctctggctctttgatattgatcgggaccctgaagaaagacatgacctgtccagagaatatcctcacatcgtcacaaagctcctgtcccgcctacagttctaccataaacactcagtccccgtgtacttccctgcacaggacccccgctgtgatcccaaggccactggggtgtggggcccttggatgtaggatttcagggaggctagaaaacctttcaattggaagttggacctcaggccttttctcacgactcttgtctcatttgttatcccaacctgggttcacttggcccttctcttgctcttaaaccacaccgaggtgtctaatttcaacccctaatgcatttaagaagctgataaaatctgcaacactcctgctgttggctggagcatgtgtctagaggtggctggagcatgtgtctagaggtgggggtggctgggtttatccccctttcctaagccttgggacagctgggaacttaacttgaaataggaagttctcactgaatcctggaggctggaacagctggctcttttagactcacaagtcagacgttcgattcccctctgccaatagccagttttattggagtgaatcacatttcttacgcaaatgaagggagcagacagtgattaatggttctgttggccaaggcttctccctgtcggtgaaggatcatgttcaggcactccaagtgaaccacccctcttggttcaccccttactcacttatctcatcacagagcataaggcccattttgttgttcaggtcaacagcaaaatgcctgcaccatgactgtggcttttaaaataaagaaatgtgtttttatcgtaatttatttccccccagccattgctcactctgtctagacttcctgccacttccaattcttctgtggcttttcctgcctttccttttgacctcagtagtcctatccctgggaaggccactttgcttctctacctgagcacccctgatttctggaacgctgctgagccctgccttacttttgcccctagggctgaagctagaggcctcc

SEQ ID NO: 385524 - DNA, 2900 bp, Homo sapiens
taaaagtgaatacatgattttatttaactcattaataaggaaattggtaaggtgttaaaaccaattcaaaggacaatccaaagaacagatcaggaatactaaaataaatgtgcaagcggaggtgaaactgttttccttggtagtggtggaggggaaggattgctactccgctggataaagttcatttgtgtatatataaataagaattattttccattgttatttatctataacttataaagttgtaaacaacttccacggaatcagactcaacctggaagggtatggtctctaggcaatgcaaaaattttcccctacacctgttaacaactataatatctccagacagagtagacagaaagtctggatggcaacgggaatctactggtcatacggctaacttcctaattcaataagcacgtgactaaaggattttttccttccactcacagatatttcaggctaactagatactgtgtgcttcttagtgtcactgcttagtgggggagccagctctgagtggggtcatatccggacaagcgaatgagctatttattcaatgaccacgcaacactccaaatcctcccagggcaacttgaaagtaaccgcaccttccaaagggcaccgtgcaatcagactgtgtgtttggcctcctgtttgctagtggggaggaagcggcttcatgggtgtacactacgcataaatgaatgtgaaaggctatttagacctcatggatttcgacattgctggacctgccacaggctgggctcttgtgctagaaatgacttgctagctagacatcatggttcaggatctgagtcagaggtttaaccatttataagcttttttcttatgaaaaattggcactaattataatgtctaactgtcagagttgttgcaggctttacaggagacgcgggctgtgaagatgctttgtaaattgtgaagcgttattaaagaacacatcttttttttttaggaaaccacggtgcaaatttaattgccggggaagataacgggccttggtgccctccaagcgtcagctgagtttccaagaagccgggcagcgggcgcccgcgggttcgtctctggctcctcctccgccacagcagccgggggcccgggtcggaggcggcgggggccgagcgcccggcctcgcaagcccacggcccgctgggggtgccgtcccgcgccggggcggagcaggccccggcagcccagttcctcattctatcagcggtacaaggggctggtggcgccacaggcgctgggaccgcgggcggacaaggatgggtccgcgcggcgcggcgagcttgccccgaggccccggacctcggcggctgctcctccccgtcgtcctcccgctgctgctgctgctgttgttggcgccgccgggctcgggcgccggggccagccggccgccccacctggtcttcttgctggcagacgacctaggctggaacgacgtcggcttccacggctcccgcatccgcacgccgcacctggacgcgctggcggccggcggggtgctcctggacaactactacacgcagccgctgtgcacgccgtcgcggagccagctgctcactggccgctaccagatccgtacaggtttacagcaccaaataatctggccctgtcagcccagctgtgttcctctggatgaaaaactcctgccccagctcctaaaagaagcaggttatactacccatatggtcggaaaatggcacctgggaatgtaccggaaagaatgccttccaacccgccgaggatttgatacctactttggatatctcctgggtagtgaagattattattcccatgaacgctgtacattaattgacgctctgaatgtcacacgatgtgctcttgattttcgagatggcgaagaagttgcaacaggatataaaaatatgtattcaacaaacatattcaccaaaagggctatagccctcataactaaccatccaccagagaagcctctgtttctctaccttgctctccagtctgtgcatgagccccttcaggtccctgaggaatacttgaagccatatgactttatccaagacaagaacaggcatcactatgcaggaatggtgtcccttatggatgaagcagtaggaaatgtcactgcagctttaaaaagcagtgggctctggaacaacacggtgttcatcttttctacagataacggagggcagactttggcagggggtaataactggccccttcgaggaagaaaatggagcctgtgggaaggaggcgtccgaggggtgggctttgtggcaagccccttgctgaagcagaagggcgtgaagaaccgggagctcatccacatctctgactggctgccaacactcgtgaagctggccaggggacacaccaatggcacaaagcctctggatggcttcgacgtgtggaaaaccatcagtgaaggaagcccatcccccagaattgagctgctgcataatattgacccgaacttcgtggactcttcaccgtactggcctgagtgctcgctgctgttgtagctaccaccaactttctactgaagatgataacccagggcataagaaatgacttcagacccaaggttctgaaagggcccctcaaggcctcgggtggctcctgcagaagtggcagaagaggcgggaactaggaacctggcatcataggaaaagtgccttctccaagaaagaaggggccccaggaggctgtcttacttagatcaaccataaactaccacagatgggtcatttcttatattatttcaaaatatctttgaagatgagaattcatttgtgtccttcatagaccaaagttctttgtgttaccttttcccaaaagtaaattcctttccctttattcattccttgtggaaataaaatgcaagcccttta

SEQ ID NO: 385525 - DNA, 3031 bp, Homo sapiens
taaaagtgaatacatgattttatttaactcattaataaggaaattggtaaggtgttaaaaccaattcaaaggacaatccaaagaacagatcaggaatactaaaataaatgtgcaagcggaggtgaaactgttttccttggtagtggtggaggggaaggattgctactccgctggataaagttcatttgtgtatatataaataagaattattttccattgttatttatctataacttataaagttgtaaacaacttccacggaatcagactcaacctggaagggtatggtctctaggcaatgcaaaaattttcccctacacctgttaacaactataatatctccagacagagtagacagaaagtctggatggcaacgggaatctactggtcatacggctaacttcctaattcaataagcacgtgactaaaggattttttccttccactcacagatatttcaggctaactagatactgtgtgcttcttagtgtcactgcttagtgggggagccagctctgagtggggtcatatccggacaagcgaatgagctatttattcaatgaccacgcaacactccaaatcctcccagggcaacttgaaagtaaccgcaccttccaaagggcaccgtgcaatcagactgtgtgtttggcctcctgtttgctagtggggaggaagcggcttcatgggtgtacactacgcataaatgaatgtgaaaggctatttagacctcatggatttcgacattgctggacctgccacaggctgggctcttgtgctagaaatgacttgctagctagacatcatggttcaggatctgagtcagaggtttaaccatttataagcttttttcttatgaaaaattggcactaattataatgtctaactgtcagagttgttgcaggctttacaggagacgcgggctgtgaagatgctttgtaaattgtgaagcgttattaaagaacacatcttttttttttaggaaaccacggtgcaaatttaattgccggggaagataacgggccttggtgccctccaagcgtcagctgagtttccaagaagccgggcagcgggcgcccgcgggttcgtctctggctcctcctccgccacagcagccgggggcccgggtcggaggcggcgggggccgagcgcccggcctcgcaagcccacggcccgctgggggtgccgtcccgcgccggggcggagcaggccccggcagcccagttcctcattctatcagcggtacaaggggctggtggcgccacaggcgctgggaccgcgggcggacaaggatgggtccgcgcggcgcggcgagcttgccccgaggccccggacctcggcggctgctcctccccgtcgtcctcccgctgctgctgctgctgttgttggcgccgccgggctcgggcgccggggccagccggccgccccacctggtcttcttgctggcagacgacctaggctggaacgacgtcggcttccacggctcccgcatccgcacgccgcacctggacgcgctggcggccggcggggtgctcctggacaactactacacgcagccgctgtgcacgccgtcgcggagccagctgctcactggccgctaccagatccgtacaggtttacagcaccaaataatctggccctgtcagcccagctgtgttcctctggatgaaaaactcctgccccagctcctaaaagaagcaggttatactacccatatggtcggaaaatggcacctgggaatgtaccggaaagaatgccttccaacccgccgaggatttgatacctactttggatatctcctgggtagtgaagattattattcccatgaacgctgtacattaattgacgctctgaatgtcacacgatgtgctcttgattttcgagatggcgaagaagttgcaacaggatataaaaatatgtattcaacaaacatattcaccaaaagggctatagccctcataactaaccatccaccagagaagcctctgtttctctaccttgctctccagtctgtgcatgagccccttcaggtccctgaggaatacttgaagccatatgactttatccaagacaagaacaggcatcactatgcaggaatggtgtcccttatggatgaagcagtaggaaatgtcactgcagctttaaaaagcagtgggctctggaacaacacggtgttcatcttttctacagataacggagggcagactttggcagggggtaataactggccccttcgaggaagaaaatggagcctgtgggaaggaggcgtccgaggggtgggctttgtggcaagccccttgctgaagcagaagggcgtgaagaaccgggagctcatccacatctctgactggctgccaacactcgtgaagctggccaggggacacaccaatggcacaaagcctctggatggcttcgacgtgtggaaaaccatcagtgaaggaagcccatcccccagaattgagctgctgcataatattgacccgaacttcgtggactcttcaccgtgtcccaggaacagcatggctccagcaaaggatgactcttctcttccagaatattcagcctttaacacatctgtccatgctgcaattagacatggaaattggaaactcctcacgggctacccaggctgtggttactggttccctccaccgtctcaatacaatgtttctgagataccctcatcagacccaccaaccaagaccctctggctctttgatattgatcgggaccctgaagaaagacatgacctgtccagagaatatcctcacatcgtcacaaagctcctgtcccgcctacagttctaccataaacactcagtccccgtgtacttccctgcacaggacccccgctgtgatcccaaggccactggggtgtggggcccttggatgtaggatttcagggaggctagaaaacctttcaattggaagttggacctcaggccttttctcacgactcttgtctcatttgttatcccaacctgggttcacttggcccttaactgcggtagccctaaacttacgggatcctctag

SEQ ID NO: 385526 - DNA, 475 bp, Homo sapiens
gcagtgctgttgctaagcctatatttagcaactgaaaatcatgctcagaaatactgtcatgcttttttaaaaaggcatatccatccctccacacatggctgattccagaaccttcatgcccttagcaaaaaattgagctgtccttcagggtttcaaaaaaagtactgtactcctgctgcaccccaggctcttggcaaggaggggacttttgtcctagagaatgttctttcttatgtattattgcaaaacaattttgttcttgcatactgaagcatcactggatgaatttctttcccctgtagacaaaccgagggtgagtattgctctttaaatgtcagtaaatttgttttagcttctggggcaaaccttgttgtatactcattctgttcctcccagcataatatgttaggttgtcataaaatagggcaaattgaggatagtgtaactactgctgctgaataaatgggaaatagtg

SEQ ID NO: 385527 - DNA, 1134 bp, Homo sapiens
cagggatggtgagagatcctgaaagagctgcctatattataaattatatacatttttttttaaggaaaagtgtggaggctagggcaggcaggttgttaggactgaaggtttgcccattctgctgcctccatctcagctccagctccatccccctctccacagaaagcagttggtgacacgaggttctatacttttcttctgttgctctcttgacttaacgtgaaaacagggtatatttgaacaaactgtctgtcccaggcaggggctgggcagggcctgtgtgccttgctcagcctcctgacaggacacttttgttgcacttagaatttacattttaatggatgtaaaaacaactgtgagagatgtctgggcctgcagaagtccagcattgctcaaaaaagcgtgtgttctagtgaacattttcatatatatttattggttatagcctgttaaaatattttcttttttgtattatttatccccctacattatgtatttatatgagggaaaaaaaggaaaaaattgtacttttttagtatttacctgttacaaaggacattgtgtttcctgtcatgtaaaaccagctattttagttactattgtactctagaaaagagctgtagatttatgttaaactcgtacttacgaacaattgtaattagttctaaaaggcatgaactcagctcctaatcgtcactgtatagtcctgaatttgtagaactagagttaattccctcttggaactttctttgttcttcagtagttacttttttccttacctaaaagggttgtctgtcaaacaattcttgaataaactttctgttatcaattttatcttgtcctggtggtccaatttagatagcagagcaaggctgctgactgccaaatttcccccaagggaagaaggacaaggacaaggacactgaagacccttccctggcctttttgtccactgcccaggttcctgtctcccccttgatatgtcttaagtttaaataccattttctcactcataagagcctgtaacattttgccaacttcttcagctgtggtttaagtagcaagttgggaggtaacgggggactcttggatgctctctgtaggtttttctgtttggcctgtatgcctctaggt

SEQ ID NO: 385528 - DNA, 428 bp, Homo sapiens
gcctgtccctctccagcattcgtaaagtaacttcctgaagcaaacactggttgtcctataggcagcaattctgaagtcttcctacccatgctgcattgaaccagcaccaaatcctgctggtatgtgcaaaattctaagtaccagctgcctggtgacaggcccctgagctgagcctatttctcccttactgacccttgtgtgccagcatctcacctccattacacagatgggccagttcatactaatgcttgccgattgctgcctgcaatttgtctgtgcatgtggaggtgcaatttgttgtcattctctgtgcccaggttcatctgccagttgccaagaatatcaggcaactcagaggctcctggaagcatgaatgagaggaggctgagagggaagtctttggctatttccgaagtagagagaggatt

SEQ ID NO: 385529 - DNA, 675 bp, Homo sapiens
gacattgaaaagaggctcaactatagccagatagcctgcacccttaagcttgccatgtttacatgtcccagaaatcaacaggacagacgagactcttctaagatgctgtggaggggtgggatggaaggattgacaggagccatgtttgggtttctcttcccttctcagtatatatttcctaatatcaatatttctcaggggctataaacattttcttctttgtccagctcaagatacagattgaacttcaaacaaggtagaccagagacaattttttatttgaatgaataggaatgggtggactaaaataaaagggaaaaataatgtcttggattgtaactgttatcttagttgtgacaatacattgaggccatcttatctaacactgttggagtattataagggcaataagtttaatctcttccttataagtttggaagcaatggaaaggtgaaaatatcagctttattaccaataaagctgaactgaagaatgtggcttagatggtggccaataagctttttaatatttttccctgaattaaaattatttccagccaggcatggttgctcacacctgtaattccagcacttagggaggcagaggtgggaggattgcttgaatccaggagttaaagaccagcctgggcaacatagcaagaccctgttctccata

SEQ ID NO: 385530 - DNA, 903 bp, Homo sapiens
gcacccagccccatctgacttctatacccgcagccccttcctttaccctcaggctgcctcagtctccacactggggcccagagctgggctggactcagcgcagtcagaacctcgccttgcacgtggcgaaggagcggcaggcaggcaggcaggcaagcaggacagccagcttcctcctagtccgcagtcgcggagcagcctggaaagggaggcccaggcttccctgtctcgtcgcacgtgtgtctgcagtgtctgtgctatctcccaggggcctggatgtcgatggaatgcctgagggtggagagagctgtggctgaggcctaccctggtggcctcagcatctgtggagatgtgtagagacagggagagtgaatggggaccaacctcaggagatgctgggtcccagaagcaccatgtgcttctcctttggtgagacttaattactctctaaaatgtaaggctactcccacttatcaaattatagatgagtttaattacagcacactgagtaaccacactgggctccttcagaaatagcagcaggctggttgctcttctcagcttcagctgtagccaccccagtttcaggaggaagtgcccgtggttcctggggcctggaagtgccgctcaactctgctgccagacaagtgcgggcgtggtggactgcactgggtacactgctgtaccggccaccaccctccggccactctcagccggtgagtgctctgcggggccatctggccacgtgttctgtgactgggtcatttactctgctgcaacctctctttctcctacctacatcgtgttctggataaaggttttggctcataatgtccgaccagaggtggacaaagtggtgtgggacctgccgtaagaaacagggagcatggcgcggggagagaa

SEQ ID NO: 385531 - DNA, 494 bp, Homo sapiens
ttgttataggcaacagtgaaagatcaactgactctttcttggcttatttatattcaggaagcaggaagattgtgtgtaggtaaaggtggatatggtgattataaacttaggattgatttagattttggcaagttgcttctgtgggcttaatccattcaagcctgcctcccatgagacagcctgggctcaagggccagctgggtggaggagcaatcacgggatttgcaggaagcagacagctctgcctacctaggaaggctatccttcgcctctcagagcctatgagatagggataattctaaacctcatagtggttgttatctagataatgtgtggtaagctgtggggaaatgctttgttaactctgaagcattgcatgaaagatactttccatcatagaaatatagactgtttcataatcctagactattttagggaatctgggaaaaggaagatgtatttaactattttccttttctcttaattcctttgtg

SEQ ID NO: 385532 - DNA, 323 bp, Homo sapiens
ggggtttcaccatgttggtcaggctggtcttgaactcctgacctcatgatccgcccgccttggccttccaaagtgctaggattacaggtgtgagccaccgcgcctggccagttgtcattcttttcacctcacagagtcattgatcaatgagttagtatacgtaaaagtcctgaacaccttatggtgctgcacaaatgctaggcatattttaatgagtgactttcatttcacttagttgttgccttctgcccaaatgcagacttaaagttgagtgatttgaggcttatttcactcgtgcacaagccaacgtctcctgaacatgt

SEQ ID NO: 385533 - DNA, 263 bp, Homo sapiens
cctccctgtgtccatgtgttcttattgttcaactctcacttatgagtgagtacgtgccgtgaaaagcaaaaaattctaacttactattcaaaaatgagctgaaagacatgaagaaaaagacgcaaaacatgaaagaacacaaattagaactagaaaaactaagaaatgaggtgataacacatgaaagaattagaaataaagtaaaaaatctttcagaaaatgcagactaagctataaggaaataatagtgactaaatacaaca

SEQ ID NO: 385534 - DNA, 593 bp, Homo sapiens
attgtctggatgtaccacagtttattcatccttccacctactgaaggacatcttggtttcttctgatccctgtctttatttgaaattttgatattttgtttgcattaattgtgatgtttttaaaatttttcacttaaattttatttttcttgatcactaaatttttctggttccttgtaagttttgtgcatgaggcatgctctaatcctggccctggtcttacctctgtttgctcaatattcagaagcgagggaaaggcaggtgataccaagcatggagcagaatccaaaagacacagcccagtacaggtctgggcaccagggggctctgaagcacctttaggggagtccttggaaatactgatgggccccttcttccccattacctctgctgtcccctacatccctcactgcttctaagctcctcccctgtcctctcggctggatatccaatcttggatagcaatgccaagccctgtcttcccaagcagctgcttctgccacgtcttcctccttaagaatccacacagcccctcagtgccttctgcatctggtccaaactccttggcattggaggcccgtgctcagcctgcc

SEQ ID NO: 385535 - DNA, 595 bp, Homo sapiens
attgtctggatgtaccacagtttattcatccttccacctactgaaggacatcttggtttcttctgatccctgtctttatttgaaattttgatattttgtttgcattaattgtgatgttttttgtaagttttgtgcatgaggcatgctctaatcctggccctggtcttacctctgtttgctcaatattcagaagcgagggaaaggcaggtgataccaagcatggagcagaatccaaaagacacagcccagtacaggtctgggcaccagggggctctgaagcacctttaggggagtccttggaaatactgatgggccccttcttccccattacctctgctgtcccctacatccctcactgcttctaagctcctcccctgtcctctcggctggatatccaatcttggatagcaatgccaagccctgtcttcccaagcagctgcttctgccacgtcttcctccttttagtattcattccaccccttctcgcgccttcatgagttctcgtcccctcctttgtcattgtgagagcccttaccttatgactctccatctccttccacttggctctctacacacgcccttagtctcctcccct

SEQ ID NO: 385536 - DNA, 539 bp, Homo sapiens
attgtctggatgtaccacagtttattcatccttccacctactgaaggacatcttggtttcttctgatccctgtctttatttgaaattttgatattttgtttgcattaattgtgatgtttttaaaatttttcacttaaattttatttttcttgatcactaaatttttctggttccttgtaagttttgtgcatgaggcatgctctaatcctggccctggtcttacctctgtttgctcaatattcagaagcgagggaaaggcaggtgataccaagcatggagcagaatccagggagtccttggaaatactgatgggccccttcttccccattacctctgctgtcccctacatccctcactgcttctaagctcctcccctgtcctctcggctggatatccaatcttggatagcaatgccaagccctgtcttcccaagcagctgcttctgccacgtcttcctccttaagaatccacacagcccctcagtgccttctgcatctggtccaaactccttggcattggaggcccgtgctcagcctgcc

SEQ ID NO: 385537 - DNA, 5354 bp, Homo sapiens
ggaacctcaacccggtgtgggaggagaatttccactttgaatgtcacaattcctccgaccgcatcaaggtgcgcgtctgggacgaggatgacgacatcaaatcccgcgtgaaacagaggttcaagagggaatctgacgatttcctggggcagacgatcattgaggtgcggacgctcagcggcgagatggacgtgtggtacaacctggacaagcgaactgacaaatctgccgtgtcgggtgccatccggctccacatcagtgtggagatcaaaggcgaggagaaggtggccccgtaccatgtccagtacacctgtctgcatgagaacctgttccacttcgtgaccgacgtgcagaacaatggggtcgtgaagatcccagatgccaagggtgacgatgcctggaaggtttactacgatgagacagcccaggagattgtggacgagtttgccatgcgctacggcgtcgagtccatctaccaagccatgacccactttgcctgcctctcctccaagtatatgtgcccaggggtgcctgccgtcatgagcaccctgctcgccaacatcaatgcctactacgcacacaccaccgcctccaccaacgtgtctgcctccgaccgcttcgccgcctccaactttgggaaagagcgcttcgtgaaactcctggaccagctgcataactccctgcggattgacctctccatgtaccggaataacttcccagccagcagcccggagagactccaggacctcaaatccactgtggaccttctcaccagcatcaccttctttcggatgaaggtacaagaactccagagcccgccccgagccagccaggtggtaaaggactgtgtgaaagcctgccttaattctacctacgagtacatcttcaataactgccatgaactgtacagccgggagtaccagacagacccggccaagaagggggaagttcccccagaggaacaggggcccagcatcaagaacctcgacttctggtccaagctgattaccctcatagtgtccatcattgaggaagacaagaattcctacactccctgcctcaaccagtttccccaggagctgaatgtgggtaaaatcagcgctgaagtgatgtggaatctgtttgcccaagacatgaagtacgccatggaggagcacgacaagcatcgtctatgcaagagtgccgactacatgaacctccacttcaaggtgaaatggctctacaatgagtatgtgacggaacttccctccttcaaggaccgcgtgcctgagtaccctgcatggtttgaacccttcgtcatccagtggctggatgagaatgaggaggtgtcccgggatttcctgcacggtgccctggagcgagacaagaaggatgggttccagcagacctcagagcatgccctattctcctgctccgtggtggatgttttctcccaactcaaccagagctttgaaatcatcaagaaactcgagtgtcccgaccctcagatcgtggggcactacatgaggcgctttgccaagaccatcagtaatgtgctcctccagtatgcagacatcatctccaaggactttgcctcctactgctccaaggagaaggagaaagtgccctgcattctcatgaataacactcaacagctacgagttcagctggagaagatgttcgaagccatgggaggaaaggagctggatgctgaagccagtgacatcctgaaggagcttcaggtgaaactcaataacgtcttggatgagctcagccgggtgtttgctaccagcttccagccgcacattgaagagtgtgtcaaacagatgggtgacatccttagccaggttaagggcacaggcaatgtgccagccagtgcctgcagcagcgtggcccaggacgcggacaatgtgttgcagcccatcatggacctgctggacagcaacctgaccctctttgccaaaatctgtgagaagactgtgctgaagcgagtgctgaaggagctgtggaagctggttatgaacaccatggagaaaaccatcgtcctgccgcccctcactgaccagacgatgatcgggaacctcttgagaaaacatggcaagggattagaaaagggcagggtgaaattgccaagccactcagacggaacccagatgatcttcaatgcagccaaggagctgggtcagctgtccaaactcaaggatcacatggtacgagaagaagccaagagcttgaccccaaagcagtgcgcggttgttgagttggccctggacaccatcaagcaatatttccacgcgggtggcgtgggcctcaagaagaccttcctggagaagagcccggacctgcaatccttgcgctatgccctgtcgctctacacgcaggccaccgacctgctaatcaagacctttgtacaggcgcaatcggcccagggcttgggtgtagaagaccctgtgggtgaagtctctgtccatgttgagctgttcactcatccaggaactggggaacacaaggtcacagtgaaagtggtggctgccaatgacctcaagtggcagacttctggcatcttccggccgttcatcgaggtcaacatcattgggccccagctcagcgacaagaaacgcaagtttgcgaccaaatccaagaacaatagctgggctcccaagtacaatgagagcttccagttcacgctgagcgccgacgcgggtcccgagtgctatgagctgcaggtgtgcgtcaaggactactgcttcgcgcgcgaggaccgcacggtggggctggccgtgctgcagctgcgtgagctggcccagcgcgggagcgccgcctgctggctgccgctcggccgccgcatccacatggacgacacgggcctcacggtgctgcgaatcctctcgcagcgcagcaacgacgaggtggccaaggagttcgtgaagctcaagtcggacacgcgctccgccgaggagggcggtgccgcgcctgcgccttagcgcgggcggtcggccgagcggcactgcgcctgcgcggagggcgctgggcggggagggacggggcttgcgccttggtgggacctccccaggggcggggctcggggggctccacgccaagggtgggctgcgcctacgcccttgactcagctttcccttttggggaattaggaatggaggatgccccgccctctcgggaggccacgcccaagggcgcgacgaaggaaggagccacatccccaacttgaggccacgcccccagcacctagggggcattttgagctgggatgggggaaacctcgtccctatggaggaggccacatcccggggctctggtaccgggaggcaccacctcatgtcccctggaaaagccataagatgggacccagacccctgggaccccagaccaattgccaagtatggaaatctcagctccctcgagggggggccctgggcaaggggtagggctctctggagcgcccctctaggtggcctggggactggagggaccaggatgctggttggagggccccggaataccggagtccctttagatatttgtgcaaaaaataaatggggggaggggggaggatgggatttcaaaagcacatgcgcccttgggcgcccaaaccctgggggccgaggggacggctctggttccccacgctgcccctacttccctttgggagtttgcctctccctctcccccaacaaacccagtcctcatatcatagagttcaacacacccatttgacagatggcaaaactgaggcttaaagagctgcttgagacttggccaaggttccaggtgccataccctctgtgcccctcccttaggcctgtgtgccccatggaagggtgggctgagatcgggatgacctgacacagctccctattgctgctaattccccctcggcctcctccaaggggtgggaattccaggccaagacccctacttcgcctttccttctccggctgccaagcaggacctttgccctcagccctttctcctgggatctccatgggggatgccatgagggcctcccaccacaaaagagaatttgggatcccctggtcccaggtttctccatcccttcttccttttccagaattttccaaataggaaagaacagaaggagaccagaaactctaggggggagaaagagaatgagagaaagagaatgagagagagagaaacacaaacacagtgacacagtgagagcttagtctccaagagcctattcattgattcaaacacccaagccacaggatacctcagatggccctcttgccagctggaagctctttctccaatgagcaaagttacagtgacctggctggagttacctggtgcacataggaccttaggggaaagttcagcgtggactacacttgctctgggatctgcttttccacatgtgtgtatggcacgcctttttctgctggattgggaaggacaagattttgctgtgctagggagaaatgaaaacggggtgagctgagtagctgggtttctggaggatagaacatcagatggggaggctttccgaggtgaagaatgagagggaaccacttactagagagaaaagagctccaggcctggggaacagcacgtgcgaaggccaggagagaagaactgttgaaacaacgagaagggtggcacggctggagctgagccagcaagggggatcgtgaggagccttggggttggggagatctgcagaagcatcagaccaggcagggcctcgtacgcagtcctgaggagttttacttttattctaagacagttggggagctccaggagctgttttaagttggggagagactggattccagcctgcaaaagctgttttgtgaagactaaaaccagtgaggagaggtggaggtgctttggggacactgaaatggattcttggaaagattctgaaggctgtgttgaaaagacacctatagctgtggggacatgactataatcccagcatttggggagaccgaggctggcagatcacttaaggtcaggagtttgagaccagcctggccaacatggcgaaaccccatctctgctaaaaatacaaaaattagctgggtgcagtggtgcatgcctgtagtcccagctactcaggagactgaggcgggagaattgtttgaaccctggaggcagaggttgtagtgagtcgtgatcacacaactgcactccagcctgggcaacagaacaatactccattccctcccctctaccccaccaaaaaaaaaaaaaaatcctgcccttagatgagctctagggctgctgagtacagttgtcccagttgcacagtgcccaagggtttggcattgctaagaaggccacgtgcaaatcctagatattgagtgttgtatgtttgtgacgttggtttc

SEQ ID NO: 385538 - DNA, 3402 bp, Homo sapiens
ccatgcttggctcagggcctggggcggggtcctgggtagagtcctagccccagagccccagcccctcatgtcctgccgcccctcactgaccagacgatgatcgggaacctcttgagaaaacatggcaagggattagaaaagggcagggtgaaattgccaagccactcagacggaacccagatgatcttcaatgcagccaaggagctgggtcagctgtccaaactcaaggatcacatggtacgagaagaagccaagagcttgaccccaaagcagtgcgcggttgttgagttggccctggacaccatcaagcaatatttccacgcgggtggcgtgggcctcaagaagaccttcctggagaagagcccggacctgcaatccttgcgctatgccctgtcgctctacacgcaggccaccgacctgctaatcaagacctttgtacaggcgcaatcggcccagggcttgggtgtagaagaccctgtgggtgaagtctctgtccatgttgagctgttcactcatccaggaactggggaacacaaggtcacagtgaaagtggtggctgccaatgacctcaagtggcagacttctggcatcttccggccgttcatcgaggtcaacatcattgggccccagctcagcgacaagaaacgcaagtttgcgaccaaatccaagaacaatagctgggctcccaagtacaatgagagcttccagttcacgctgagcgccgacgcgggtcccgagtgctatgagctgcaggtgtgcgtcaaggactactgcttcgcgcgcgaggaccgcacggtggggctggccgtgctgcagctgcgtgagctggcccagcgcgggagcgccgcctgctggctgccgctcggccgccgcatccacatggacgacacgggcctcacggtgctgcgaatcctctcgcagcgcagcaacgacgaggtggccaaggagttcgtgaagctcaagtcggacacgcgctccgccgaggagggcggtgccgcgcctgcgccttagcgcgggcggtcggccgagcggcactgcgcctgcgcggagggcgctgggcggggagggacggggcttgcgccttggtgggacctccccaggggcggggctcggggggctccacgccaagggtgggctgcgcctacgcccttgactcagctttcccttttggggaattaggaatggaggatgccccgccctctcgggaggccacgcccaagggcgcgacgaaggaaggagccacatccccaacttgaggccacgcccccagcacctagggggcattttgagctgggatgggggaaacctcgtccctatggaggaggccacatcccggggctctggtaccgggaggcaccacctcatgtcccctggaaaagccataagatgggacccagacccctgggaccccagaccaattgccaagtatggaaatctcagctccctcgagggggggccctgggcaaggggtagggctctctggagcgcccctctaggtggcctggggactggagggaccaggatgctggttggagggccccggaataccggagtccctttagatatttgtgcaaaaaataaatggggggaggggggaggatgggatttcaaaagcacatgcgcccttgggcgcccaaaccctgggggccgaggggacggctctggttccccacgctgcccctacttccctttgggagtttgcctctccctctcccccaacaaacccagtcctcatatcatagagttcaacacacccatttgacagatggcaaaactgaggcttaaagagctgcttgagacttggccaaggttccaggtgccataccctctgtgcccctcccttaggcctgtgtgccccatggaagggtgggctgagatcgggatgacctgacacagctccctattgctgctaattccccctcggcctcctccaaggggtgggaattccaggccaagacccctacttcgcctttccttctccggctgccaagcaggacctttgccctcagccctttctcctgggatctccatgggggatgccatgagggcctcccaccacaaaagagaatttgggatcccctggtcccaggtttctccatcccttcttccttttccagaattttccaaataggaaagaacagaaggagaccagaaactctaggggggagaaagagaatgagagaaagagaatgagagagagagaaacacaaacacagtgacacagtgagagcttagtctccaagagcctattcattgattcaaacacccaagccacaggatacctcagatggccctcttgccagctggaagctctttctccaatgagcaaagttacagtgacctggctggagttacctggtgcacataggaccttaggggaaagttcagcgtggactacacttgctctgggatctgcttttccacatgtgtgtatggcacgcctttttctgctggattgggaaggacaagattttgctgtgctagggagaaatgaaaacggggtgagctgagtagctgggtttctggaggatagaacatcagatggggaggctttccgaggtgaagaatgagagggaaccacttactagagagaaaagagctccaggcctggggaacagcacgtgcgaaggccaggagagaagaactgttgaaacaacgagaagggtggcacggctggagctgagccagcaagggggatcgtgaggagccttggggttggggagatctgcagaagcatcagaccaggcagggcctcgtacgcagtcctgaggagttttacttttattctaagacagttggggagctccaggagctgttttaagttggggagagactggattccagcctgcaaaagctgttttgtgaagactaaaaccagtgaggagaggtggaggtgctttggggacactgaaatggattcttggaaagattctgaaggctgtgttgaaaagacacctatagctgtggggacatgactataatcccagcatttggggagaccgaggctggcagatcacttaaggtcaggagtttgagaccagcctggccaacatggcgaaaccccatctctgctaaaaatacaaaaattagctgggtgcagtggtgcatgcctgtagtcccagctactcaggagactgaggcgggagaattgtttgaaccctggaggcagaggttgtagtgagtcgtgatcacacaactgcactccagcctgggcaacagaacaatactccattccctcccctctaccccaccaaaaaaaaaaaaaaatcctgcccttagatgagctctagggctgctgagtacagttgtcccagttgcacagtgcccaagggtttggcattgctaagaaggccacgtgcaaatcctagatattgagtgttgtatgtttgtgacgttggtttc

SEQ ID NO: 385539 - DNA, 2233 bp, Homo sapiens
gccccacgctgtcgcaagaagtccccttctcgcccccaaaccagctcaaaatgccccctaggtgctgggggcgtggcctcaagttggggatgtgcccccagcacctagggggcattttgagctgggatgggggaaacctcgtccctatggaggaggccacatcccggggctctggtaccgggaggcaccacctcatgtcccctggaaaagccataagatgggacccagacccctgggaccccagaccaattgccaagtatggaaatctcagctccctcgagggggggccctgggcaaggggtagggctctctggagcgcccctctaggtggcctggggactggagggaccaggatgctggttggagggccccggaataccggagtccctttagatatttgtgcaaaaaataaatggggggaggggggaggatgggatttcaaaagcacatgcgcccttgggcgcccaaaccctgggggccgaggggacggctctggttccccacgctgcccctacttccctttgggagtttgcctctccctctcccccaacaaacccagtcctcatatcatagagttcaacacacccatttgacagatggcaaaactgaggcttaaagagctgcttgagacttggccaaggttccaggtgccataccctctgtgcccctcccttaggcctgtgtgccccatggaagggtgggctgagatcgggatgacctgacacagctccctattgctgctaattccccctcggcctcctccaaggggtgggaattccaggccaagacccctacttcgcctttccttctccggctgccaagcaggacctttgccctcagccctttctcctgggatctccatgggggatgccatgagggcctcccaccacaaaagagaatttgggatcccctggtcccaggtttctccatcccttcttccttttccagaattttccaaataggaaagaacagaaggagaccagaaactctaggggggagaaagagaatgagagaaagagaatgagagagagagaaacacaaacacagtgacacagtgagagcttagtctccaagagcctattcattgattcaaacacccaagccacaggatacctcagatggccctcttgccagctggaagctctttctccaatgagcaaagttacagtgacctggctggagttacctggtgcacataggaccttaggggaaagttcagcgtggactacacttgctctgggatctgcttttccacatgtgtgtatggcacgcctttttctgctggattgggaaggacaagattttgctgtgctagggagaaatgaaaacggggtgagctgagtagctgggtttctggaggatagaacatcagatggggaggctttccgaggtgaagaatgagagggaaccacttactagagagaaaagagctccaggcctggggaacagcacgtgcgaaggccaggagagaagaactgttgaaacaacgagaagggtggcacggctggagctgagccagcaagggggatcgtgaggagccttggggttggggagatctgcagaagcatcagaccaggcagggcctcgtacgcagtcctgaggagttttacttttattctaagacagttggggagctccaggagctgttttaagttggggagagactggattccagcctgcaaaagctgttttgtgaagactaaaaccagtgaggagaggtggaggtgctttggggacactgaaatggattcttggaaagattctgaaggctgtgttgaaaagacacctatagctgtggggacatgactataatcccagcatttggggagaccgaggctggcagatcacttaaggtcaggagtttgagaccagcctggccaacatggcgaaaccccatctctgctaaaaatacaaaaattagctgggtgcagtggtgcatgcctgtagtcccagctactcaggagactgaggcgggagaattgtttgaaccctggaggcagaggttgtagtgagtcgtgatcacacaactgcactccagcctgggcaacagaacaatactccattccctcccctctaccccaccaaaaaaaaaaaaaaatcctgcccttagatgagctctagggctgctgagtacagttgtcccagttgcacagtgcccaagggtttggcattgctaagaaggccacgtgcaaatcctagatattgagtgttgtatgtttgtgacgttggtttc

SEQ ID NO: 385540 - DNA, 3416 bp, Homo sapiens
acccaagtacccacctgcagctcatagcactcgggacccgcgtcggcgctcagcgtgaactggaagctctcattgtacttgggagcccagctattgttcttggatttggtgcaaacttgcgtttcttgtcgctgagctggggcccaatgatgttgacctcgatgaacggccggaagatgccagaagtctgccacttgaggtcattggcagccaaggagctgggtcagctgtccaaactcaaggatcacatggtacgagaagaagccaagagcttgaccccaaagcagtgcgcggttgttgagttggccctggacaccatcaagcaatatttccacgcgggtggcgtgggcctcaagaagaccttcctggagaagagcccggacctgcaatccttgcgctatgccctgtcgctctacacgcaggccaccgacctgctaatcaagacctttgtacaggcgcaatcggcccagggcttgggtgtagaagaccctgtgggtgaagtctctgtccatgttgagctgttcactcatccaggaactggggaacacaaggtcacagtgaaagtggtggctgccaatgacctcaagtggcagacttctggcatcttccggccgttcatcgaggtcaacatcattgggccccagctcagcgacaagaaacgcaagtttgcgaccaaatccaagaacaatagctgggctcccaagtacaatgagagcttccagttcacgctgagcgccgacgcgggtcccgagtgctatgagctgcaggtgtgcgtcaaggactactgcttcgcgcgcgaggaccgcacggtggggctggccgtgctgcagctgcgtgagctggcccagcgcgggagcgccgcctgctggctgccgctcggccgccgcatccacatggacgacacgggcctcacggtgctgcgaatcctctcgcagcgcagcaacgacgaggtggccaaggagttcgtgaagctcaagtcggacacgcgctccgccgaggagggcggtgccgcgcctgcgccttagcgcgggcggtcggccgagcggcactgcgcctgcgcggagggcgctgggcggggagggacggggcttgcgccttggtgggacctccccaggggcggggctcggggggctccacgccaagggtgggctgcgcctacgcccttgactcagctttcccttttggggaattaggaatggaggatgccccgccctctcgggaggccacgcccaagggcgcgacgaaggaaggagccacatccccaacttgaggccacgcccccagcacctagggggcattttgagctgggatgggggaaacctcgtccctatggaggaggccacatcccggggctctggtaccgggaggcaccacctcatgtcccctggaaaagccataagatgggacccagacccctgggaccccagaccaattgccaagtatggaaatctcagctccctcgagggggggccctgggcaaggggtagggctctctggagcgcccctctaggtggcctggggactggagggaccaggatgctggttggagggccccggaataccggagtccctttagatatttgtgcaaaaaataaatggggggaggggggaggatgggatttcaaaagcacatgcgcccttgggcgcccaaaccctgggggccgaggggacggctctggttccccacgctgcccctacttccctttgggagtttgcctctccctctcccccaacaaacccagtcctcatatcatagagttcaacacacccatttgacagatggcaaaactgaggcttaaagagctgcttgagacttggccaaggttccaggtgccataccctctgtgcccctcccttaggcctgtgtgccccatggaagggtgggctgagatcgggatgacctgacacagctccctattgctgctaattccccctcggcctcctccaaggggtgggaattccaggccaagacccctacttcgcctttccttctccggctgccaagcaggacctttgccctcagccctttctcctgggatctccatgggggatgccatgagggcctcccaccacaaaagagaatttgggatcccctggtcccaggtttctccatcccttcttccttttccagaattttccaaataggaaagaacagaaggagaccagaaactctaggggggagaaagagaatgagagaaagagaatgagagagagagaaacacaaacacagtgacacagtgagagcttagtctccaagagcctattcattgattcaaacacccaagccacaggatacctcagatggccctcttgccagctggaagctctttctccaatgagcaaagttacagtgacctggctggagttacctggtgcacataggaccttaggggaaagttcagcgtggactacacttgctctgggatctgcttttccacatgtgtgtatggcacgcctttttctgctggattgggaaggacaagattttgctgtgctagggagaaatgaaaacggggtgagctgagtagctgggtttctggaggatagaacatcagatggggaggctttccgaggtgaagaatgagagggaaccacttactagagagaaaagagctccaggcctggggaacagcacgtgcgaaggccaggagagaagaactgttgaaacaacgagaagggtggcacggctggagctgagccagcaagggggatcgtgaggagccttggggttggggagatctgcagaagcatcagaccaggcagggcctcgtacgcagtcctgaggagttttacttttattctaagacagttggggagctccaggagctgttttaagttggggagagactggattccagcctgcaaaagctgttttgtgaagactaaaaccagtgaggagaggtggaggtgctttggggacactgaaatggattcttggaaagattctgaaggctgtgttgaaaagacacctatagctgtggggacatgactataatcccagcatttggggagaccgaggctggcagatcacttaaggtcaggagtttgagaccagcctggccaacatggcgaaaccccatctctgctaaaaatacaaaaattagctgggtgcagtggtgcatgcctgtagtcccagctactcaggagactgaggcgggagaattgtttgaaccctggaggcagaggttgtagtgagtcgtgatcacacaactgcactccagcctgggcaacagaacaatactccattccctcccctctaccccaccaaaaaaaaaaaaaaatcctgcccttagatgagctctagggctgctgagtacagttgtcccagttgcacagtgcccaagggtttggcattgctaagaaggccacgtgcaaatcctagatattgagtgttgtatgtttgtgacgttggtttc

SEQ ID NO: 385541 - DNA, 1647 bp, Homo sapiens
gcttaaaaggggcccgggaggatgaaccccacagatctgaacctgatttgtgtgtgcaccgcgtctccagcgatcccggatccactgcgctgccaggggcctgggggtgggtctcttgctgtctctgcgacgacatccttacgtttcggcactctaatgctgggtttgtgcgtgtgtgtctgcttagcggtctagcgggctgttaggctccctcgcccccagctccttggctcgctcagctcctccaccgcagcccagcagtgagacgcgcgcgcagccagctccccacgagatggaacagaccgaagtgctgaagccacggaccctggctgatctgatccgcatcctgcaccagctctttgccggcgatgaggtcaatgtagaggaggtgcaggccatcatggaagcctacgagagcgaccccaccgagtgggcaatgtacgccaagttcgaccagtacaggtatacccgaaatcttgtggatcaaggaaatggaaaatttaatctgatgattctctgttggggtgaaggacatggcagcagtattcatgatcataccaactcccactgctttctgaagatgctacagggaaatctaaaggagacattatttgcctggcctgacaaaaaatccaatgagatggtcaagaagtctgaaagagtcttgagggaaaaccagtgtgcctacatcaatgattccattggcttacatcgagtagagaacatcagccatacggaacctgctgtgagccttcacttgtacagtccaccttttgatacatgccatgcctttgatcaaagaacaggacataaaaacaaagtcacaatgacattccatagtaaatttggaatcagaactccaaatgcaacttcgggctcgctggagaacaactaaggggcaccaaaccctctgaggttttactttaaggttcgctgtatgtttgccttggacaaaaaggctacctaccacgtgctatccagtaatatacttaaataagccaatacttagatctactgtaaggcagatgctaattataaggcattaagtaagcaaatagtgccctcagctactgcagaagaaaagtcccactgaggaaaagaaagtcttgtgatttttaaaggcaagttttcaagtgctctcatagttctatcctctaattccattaaatccatactaggagcgtcagtgagggttttcatagcttttggaaatactttggtctctgaactgtaattagcaagaagtaaaaacagaaacgtcaaacgtcaaatgtttgctttgttacctggaggactaaatgtagatgtctttagtatactttgtatgttcttaatattggaagataattttgtgaatctgtagattttattttttcagtcttaccttacaaatttcttttctatgaataatagaggaacttacggcactctgccatttgttaatgaaaggaagtgcagaggatttagaaaagtacatgatccccagaccacaacaaaccaaaacataaactcatgtctgtgtcccatggtcatagtcaaagattttgtactgctaaaattaccaaataatttaaataaagtggatttgaacacaaagggatgcggccgacccttttccgatatatctttccgcccccactttactcc

SEQ ID NO: 385542 - DNA, 1888 bp, Homo sapiens
gcttaaaaggggcccgggaggatgaaccccacagatctgaacctgatttgtgtgtgcaccgcgtctccagcgatcccggatccactgcgctgccaggggcctgggggtgggtctcttgctgtctctgcgacgacatccttacgtttcggcactctaatgctgggtttgtgcgtgtgtgtctgcttagcggtctagcgggctgttaggctccctcgcccccagctccttggctcgctcagctcctccaccgcagcccagcagtgagacgcgcgcgcagccagctccccacgagatggaacagaccgaagtgctgaagccacggaccctggctgatctgatccgcatcctgcaccagctctttgccggcgatgaggtcaatgtagaggaggtgcaggccatcatggaagcctacgagagcgaccccaccgagtgggcaatgtacgccaagttcgaccagtacaggtatacccgaaatcttgtggatcaaggaaatggcagtattcatgatcataccaactcccactgctttctgaagatgctacagggaaatctaaaggagacattatttgcctggcctgacaaaaaatccaatgagatggtcaagaagtctgaaagagtcttgagggaaaaccagtgtgcctacatcaatgattccattggcttacatcgagtagagaacatcagccatacggaacctgctgtgagccttcacttgtacagtccaccttttgatacatgccatgcctttgatcaaagaacaggacataaaaacaaagtcacaatgacattccatagtaaatttggaatcagaactccaaatgcaacttcgggctcgctggagaacaactaaggggcaccaaaccctctgaggttttactttaaggttcgctgtatgtttgccttggacaaaaaggctacctaccacgtgctatccagtaatatacttaaataagccaatacttagatctactgtaaggcagatgctaattataaggcattaagtaagcaaatagtgccctcagctactgcagaagaaaagtcccactgaggaaaagaaagtcttgtgatttttaaaggcaagttttcaagtgctctcatagttctatcctctaattccattaaatccatactaggagcgtcagtgagggttttcatagcttttggaaatactttggtctctgaactgtaattagcaagaagtaaaaacagaaacgtcaaacgtcaaatgtttgctttgttacctggaggactaaatgtagatgtctttagtatactttgtatgttcttaatattggaagataattttgtgaatctgtagattttattttttcagtcttaccttacaaatttcttttctatgaataatagaggaacttacggcactctgccatttgttaatgaaaggaagtgcagaggatttagaaaagtacatgatccccagaccacaacaaaccaaaacataaactcatgtctgtgtcccatggtcatagtcaaagattttgtactgctaaaattaccaaataatttaaataaagtggatttgaacacaaaaaaaaaaaaaaaaaaaaaaaaaaaatttggggggggcggggccctagaaaaaggtttcaaaacacctcccgggggggcgcgcgggggcgcccaagtaggtgtatgggaaccagctggggcgcaaaggcggggtccccaaaggggagaaaccgccgggccaaagacaccagacggggctggggtgttctccccccaaaataaaaaaaaaacggcgcggggggggacaccccggaggggtcctggaccaaacctccagaaggggaggtccagaggaggacaaaccggggctctactaaccgggggggccccacgggaaggccgagaaattaaaatagca

SEQ ID NO: 385543 - DNA, 1667 bp, Homo sapiens
cctagcgctgtgaaggattctgttctctgactttgggagggccagtgcagaagaatcaagacagaatatgctcccgtgtgggccaggctgtgaattctttgaaagaagctgcagagaagcaacaaagattatcctaagacttctggaggaagaattaggatccttctgcaggaactcagtttactgtgaattgaaggtatacccgaaatcttgtggatcaaggaaatggaaaatttaatctgatgattctctgttggggtgaaggacatggcagcagtattcatgatcataccaactcccactgctttctgaagatgctacagggaaatctaaaggagacattatttgcctggcctgacaaaaaatccaatgagatggtcaagaagtctgaaagagtcttgagggaaaaccagtgtgcctacatcaatgattccattggcttacatcgagtagagaacatcagccatacggaacctgctgtgagccttcacttgtacagtccaccttttgatacatgccatgcctttgatcaaagaacaggacataaaaacaaagtcacaatgacattccatagtaaatttggaatcagaactccaaatgcaacttcgggctcgctggagaacaactaaggggcaccaaaccctctgaggttttactttaaggttcgctgtatgtttgccttggacaaaaaggctacctaccacgtgctatccagtaatatacttaaataagccaatacttagatctactgtaaggcagatgctaattataaggcattaagtaagcaaatagtgccctcagctactgcagaagaaaagtcccactgaggaaaagaaagtcttgtgatttttaaaggcaagttttcaagtgctctcatagttctatcctctaattccattaaatccatactaggagcgtcagtgagggttttcatagcttttggaaatactttggtctctgaactgtaattagcaagaagtaaaaacagaaacgtcaaacgtcaaatgtttgctttgttacctggaggactaaatgtagatgtctttagtatactttgtatgttcttaatattggaagataattttgtgaatctgtagattttattttttcagtcttaccttacaaatttcttttctatgaataatagaggaacttacggcactctgccatttgttaatgaaaggaagtgcagaggatttagaaaagtacatgatccccagaccacaacaaaccaaaacataaactcatgtctgtgtcccatggtcatagtcaaagattttgtactgctaaaattaccaaataatttaaataaagtggatttgaacacaaaaaaaaaaaaaaaaaaaaaaaaaaaatttggggggggcggggccctagaaaaaggtttcaaaacacctcccgggggggcgcgcgggggcgcccaagtaggtgtatgggaaccagctggggcgcaaaggcggggtccccaaaggggagaaaccgccgggccaaagacaccagacggggctggggtgttctccccccaaaataaaaaaaaaacggcgcggggggggacaccccggaggggtcctggaccaaacctccagaaggggaggtccagaggaggacaaaccggggctctactaaccgggggggccccacgggaaggccgagaaattaaaatagca

SEQ ID NO: 385544 - DNA, 741 bp, Homo sapiens
agtatggaagcttttgtttaattcacctgtttttcacctgatttccatcagtcccaagttgatctcttacactctttctagagactagaccttagtctgctgctgaaaagaaagaagagagagaattggtaaaagggttttgagactctacttcataaacaagctttaaaccagttcttatatctacagcctatctttaccctcatttccagaagtacctggtgctgtcaattcctgtgctatttggagtttcaagatataaatcaggttatttcttggttttctccatggatagcttaggatttagctttctctgctctgtaaagctatccatcttactttctaagctttcaaatttttgttagtgttttctcttttcctattttgtctttgtatattgatgtcttttttatttttttactgccattggagagggttttcaggaaggagcagaggctaatgcatgcgtgtcacttactatctttaactgcaagttcaattctaattaatatctattccatttgcatcacaattgattcatgatctcagatgactcacagagattttacctacagctgttatctaggctcctttatctatttttccttcccggatattgtttagattccattggcttacatcgagtagagaacatcagccatacggaacctgctgtgagccttcacttgtacagtccaccttttgatacatgccatgcctttgatcaaagaacaggacata

SEQ ID NO: 385545 - DNA, 1933 bp, Homo sapiens
gcttaaaaggggcccgggaggatgaaccccacagatctgaacctgatttgtgtgtgcaccgcgtctccagcgatcccggatccactgcgctgccaggggcctgggggtgggtctcttgctgtctctgcgacgacatccttacgtttcggcactctaatgctgggtttgtgcgtgtgtgtctgcttagcggtctagcgggctgttaggctccctcgcccccagctccttggctcgctcagctcctccaccgcagcccagcagtgagacgcgcgcgcagccagctccccacgagatggaacagaccgaagtgctgaagccacggaccctggctgatctgatccgcatcctgcaccagctctttgccggcgatgaggtcaatgtagaggaggtgcaggccatcatggaagcctacgagagcgaccccaccgagtgggcaatgtacgccaagttcgaccagtacaggtatacccgaaatcttgtggatcaaggaaatggaaaatttaatctgatgattctctgttggggtgaaggacatggcagcagtattcatgatcataccaactcccactgctttctgaagatgctacagggaaatctaaaggagacattatttgcctggcctgacaaaaaatccaatgagatggtcaagaagtctgaaagagtcttgagggaaaaccagtgtgcctacatcaatgattccattggcttacatcgagtagagaacatcagccatacggaacctgctgtgagccttcacttgtacagtccaccttttgatacatgccatgcctttgatcaaagaacaggacataaaaacaaagtcacaatgacattccatagtaaatttggaatcagaactccaaatgcaacttcgggctcgctggagaacaactaaggggcaccaaaccctctgaggttttactttaaggttcgctgtatgtttgccttggacaaaaaggctacctaccacgtgctatccagtaatatacttaaataagccaatacttagatctactgtaaggcagatgctaattataaggcattaagtaagcaaatagtgccctcagctactgcagaagaaaagtcccactgaggaaaagaaagtcttgtgatttttaaaggcaagttttcaagtgctctcatagttctatcctctaattccattaaatccatactaggagcgtcagtgagggttttcatagcttttggaaatactttggtctctgaactgtaattagcaagaagtaaaaacagaaacgtcaaacgtcaaatgtttgctttgttacctggaggactaaatgtagatgtctttagtatactttgtatgttcttaatattggaagataattttgtgaatctgtagattttattttttcagtcttaccttacaaatttcttttctatgaataatagaggaacttacggcactctgccatttgttaatgaaaggaagtgcagaggatttagaaaagtacatgatccccagaccacaacaaaccaaaacataaactcatgtctgtgtcccatggtcatagtcaaagattttgtactgctaaaattaccaaataatttaaataaagtggatttgaacacaaaaaaaaaaaaaaaaaaaaaaaaaaaatttggggggggcggggccctagaaaaaggtttcaaaacacctcccgggggggcgcgcgggggcgcccaagtaggtgtatgggaaccagctggggcgcaaaggcggggtccccaaaggggagaaaccgccgggccaaagacaccagacggggctggggtgttctccccccaaaataaaaaaaaaacggcgcggggggggacaccccggaggggtcctggaccaaacctccagaaggggaggtccagaggaggacaaaccggggctctactaaccgggggggccccacgggaaggccgagaaattaaaatagca

SEQ ID NO: 385546 - DNA, 1646 bp, Homo sapiens
gcttaaaaggggcccgggaggatgaaccccacagatctgaacctgatttgtgtgtgcaccgcgtctccagcgatcccggatccactgcgctgccaggggcctgggggtgggtctcttgctgtctctgcgacgacatccttacgtttcggcactctaatgctgggtttgtgcgtgtgtgtctgcttagcggtctagcgggctgttaggctccctcgcccccagctccttggctcgctcagctcctccaccgcagcccagcagtgagacgcgcgcgcagccagctccccacgagatggaacagaccgaagtgctgaagccacggaccctggctgatctgatccgcatcctgcaccagctctttgccggcgatgaggtcaatgtagaggaggtgcaggccatcatggaagcctacgagagcgaccccaccgagtgggcaatgtacgccaagttcgaccagtacaggtatacccgaaatcttgtggatcaaggaaatggaaaatttaatctgatgattctctgttggggtgaaggacatggcagcagtattcatgatcataccaactcccactgctttctgaagatgctacagggaaatctaaaggagacattatttgcctggcctgacaaaaaatccaatgagatggtcaagaagtctgaaagagtcttgagggaaaaccagtgtgcctacatcaatgattccattggcttacatcgagtagagaacatcagccatacggaacctgctgtgagccttcacttgtacagtccaccttttgatacatgccatgcctttgatcaaagaacaggacataaaaacaaagtcacaatgacattccatagtaaatttggaatcagaactccaaatgcaacttcgggctcgctggagaacaactaaggggcaccaaaccctctgaggttttactttaaggttcgctgtatgtttgccttggacaaaaaggctacctaccacgtgctatccagtaatatacttaaataagccaatacttagatctactgtaaggcagatgctaattataaggcattaagtaagcaaatagtgccctcagctactgcagaagaaaagtcccactgaggaaaagaaagtcttgtgatttttaaaggcaagttttcaagtgctctcatagttctatcctctaattccattaaatccatactaggagcgtcagtgagggttttcatagcttttggaaatactttggtctctgaactgtaattagcaagaagtaaaaacagaaacgtcaaacgtcaaatgtttgctttgttacctggaggactaaatgtagatgtctttagtatactttgtatgttcttaatattggaagataattttgtgaatctgtagattttattttttcagtcttaccttacaaatttcttttctatgaataatagaggaacttacggcactctgccatttgttaatgaaaggaagtgcagaggatttagaaaagtacatgatccccagaccacaacaaaccaaaacataaactcatgtctgtgtcccatggtcatagtcaaagattttgtactgctaaaattaccaaataatttaaataaagtggatttgaacacaacgggatgcggccgccccccccctctctttccctccccccctcgcggtctcc

SEQ ID NO: 385547 - DNA, 1893 bp, Homo sapiens
gcttaaaaggggcccgggaggatgaaccccacagatctgaacctgatttgtgtgtgcaccgcgtctccagcgatcccggatccactgcgctgccaggggcctgggggtgggtctcttgctgtctctgcgacgacatccttacgtttcggcactctaatgctgggtttgtgcgtgtgtgtctgcttagcggtctagcgggctgttaggctccctcgcccccagctccttggctcgctcagctcctccaccgcagcccagcagtgagacgcgcgcgcagccagctccccacgagatggaacagaccgaagtgctgaagccacggaccctggctgatctgatccgcatcctgcaccagctctttgccggcgatgaggtcaatgtagaggaggtgcaggccatcatggaagcctacgagagcgaccccaccgagtgggcaatgtacgccaagttcgaccagtacaggtatacccgaaatcttgtggatcaaggaaatggaaaatttaatctgatgattctctgttggggtgaaggacatggcagatgctacagggaaatctaaaggagacattatttgcctggcctgacaaaaaatccaatgagatggtcaagaagtctgaaagagtcttgagggaaaaccagtgtgcctacatcaatgattccattggcttacatcgagtagagaacatcagccatacggaacctgctgtgagccttcacttgtacagtccaccttttgatacatgccatgcctttgatcaaagaacaggacataaaaacaaagtcacaatgacattccatagtaaatttggaatcagaactccaaatgcaacttcgggctcgctggagaacaactaaggggcaccaaaccctctgaggttttactttaaggttcgctgtatgtttgccttggacaaaaaggctacctaccacgtgctatccagtaatatacttaaataagccaatacttagatctactgtaaggcagatgctaattataaggcattaagtaagcaaatagtgccctcagctactgcagaagaaaagtcccactgaggaaaagaaagtcttgtgatttttaaaggcaagttttcaagtgctctcatagttctatcctctaattccattaaatccatactaggagcgtcagtgagggttttcatagcttttggaaatactttggtctctgaactgtaattagcaagaagtaaaaacagaaacgtcaaacgtcaaatgtttgctttgttacctggaggactaaatgtagatgtctttagtatactttgtatgttcttaatattggaagataattttgtgaatctgtagattttattttttcagtcttaccttacaaatttcttttctatgaataatagaggaacttacggcactctgccatttgttaatgaaaggaagtgcagaggatttagaaaagtacatgatccccagaccacaacaaaccaaaacataaactcatgtctgtgtcccatggtcatagtcaaagattttgtactgctaaaattaccaaataatttaaataaagtggatttgaacacaaaaaaaaaaaaaaaaaaaaaaaaaaaatttggggggggcggggccctagaaaaaggtttcaaaacacctcccgggggggcgcgcgggggcgcccaagtaggtgtatgggaaccagctggggcgcaaaggcggggtccccaaaggggagaaaccgccgggccaaagacaccagacggggctggggtgttctccccccaaaataaaaaaaaaacggcgcggggggggacaccccggaggggtcctggaccaaacctccagaaggggaggtccagaggaggacaaaccggggctctactaaccgggggggccccacgggaaggccgagaaattaaaatagca

SEQ ID NO: 385548 - DNA, 1653 bp, Homo sapiens
gcttaaaaggggcccgggaggatgaaccccacagatctgaacctgatttgtgtgtgcaccgcgtctccagcgatcccggatccactgcgctgccaggggcctgggggtatacccgaaatcttgtggatcaaggaaatggaaaatttaatctgatgattctctgttggggtgaaggacatggcagcagtattcatgatcataccaactcccactgctttctgaagatgctacagggaaatctaaaggagacattatttgcctggcctgacaaaaaatccaatgagatggtcaagaagtctgaaagagtcttgagggaaaaccagtgtgcctacatcaatgatgcaggagtaggggtggagatggatagtgatcagggggaaggatgttgcaagtacaaggaagagcacaagtgaagattccattggcttacatcgagtagagaacatcagccatacggaacctgctgtgagccttcacttgtacagtccaccttttgatacatgccatgcctttgatcaaagaacaggacataaaaacaaagtcacaatgacattccatagtaaatttggaatcagaactccaaatgcaacttcgggctcgctggagaacaactaaggggcaccaaaccctctgaggttttactttaaggttcgctgtatgtttgccttggacaaaaaggctacctaccacgtgctatccagtaatatacttaaataagccaatacttagatctactgtaaggcagatgctaattataaggcattaagtaagcaaatagtgccctcagctactgcagaagaaaagtcccactgaggaaaagaaagtcttgtgatttttaaaggcaagttttcaagtgctctcatagttctatcctctaattccattaaatccatactaggagcgtcagtgagggttttcatagcttttggaaatactttggtctctgaactgtaattagcaagaagtaaaaacagaaacgtcaaacgtcaaatgtttgctttgttacctggaggactaaatgtagatgtctttagtatactttgtatgttcttaatattggaagataattttgtgaatctgtagattttattttttcagtcttaccttacaaatttcttttctatgaataatagaggaacttacggcactctgccatttgttaatgaaaggaagtgcagaggatttagaaaagtacatgatccccagaccacaacaaaccaaaacataaactcatgtctgtgtcccatggtcatagtcaaagattttgtactgctaaaattaccaaataatttaaataaagtggatttgaacacaaaaaaaaaaaaaaaaaaaaaaaaaaaatttggggggggcggggccctagaaaaaggtttcaaaacacctcccgggggggcgcgcgggggcgcccaagtaggtgtatgggaaccagctggggcgcaaaggcggggtccccaaaggggagaaaccgccgggccaaagacaccagacggggctggggtgttctccccccaaaataaaaaaaaaacggcgcggggggggacaccccggaggggtcctggaccaaacctccagaaggggaggtccagaggaggacaaaccggggctctactaaccgggggggccccacgggaaggccgagaaattaaaatagca

SEQ ID NO: 385549 - DNA, 214 bp, Homo sapiens
tttgggcatctctcatggagagctctcccattcacgggcacctctgtgcaggtgggtttccaggagagcccagctgggagcacaattcgggagagtttcagagccctccttctgtgcccagcagagccactctaagatccactggcgctgggactgcgcccactcttggctgcctttccaggccattcagcagcccattgtttgccacagccac

SEQ ID NO: 385550 - DNA, 737 bp, Homo sapiens
tgtccactgaatgcttatcaggaatattaataacattaaacgaagttgttctcttcccgtaagattcatttaggatgcatattgtcaaactcatatttgagattaccaagactaattactagaatcttctgaattttataatagaatagggattatctgataacagaaataaactgtagaaagttgtatttaacctttggagaagagatttagacagtaaactctaagaattaaacatccacaagtacaatatacattagcaaaatctcattctaaaatgggatactacaacaaagcttctgaatgctttcagcaagcttttgacacaacagtagagctaatgagcatgcctctgatggatgagacaaaagttcactatggaatagcaaaagctcatcagatgatgcttacagtgaacaactatatagagtctgcagatctcaccagcctcaactacctgctgtcatggaaggagagcagaggtaacattgaacctgatccagttactgaagagtttagaggatccacagtggaagctgtatctcaaaactcagaacgtttggaagaactcagtaggtttccaggtgatcaaaaaaatgaaacttaaagcagcttttcacttaacatcaaagcaagaagaaatccatcatgtcaccttagacttcaatacttgtaataggagcatgttacagataatatagagttataataaaacggactatgactcttttcattgg

SEQ ID NO: 385551 - DNA, 299 bp, Homo sapiens
  misc_feature (71)..(71): n is a, c, g, or t
aatacacatattaaagattagaatatcaatatgcgcggacagcccccctccctcttgaccagcacactagnaagagtttagaggatccacagtggaagctgtatctcaaaactcagaacgtttggaagaactcagtaggtttccaggtgatcaaaaaaatgaaacttaaagcagcttttcacttaacatcaaagcaagaagaaatccatcatgtcaccttagacttcaatacttgtaataggagcatgttacagataatatagagttataataaaacggactatgactcttttcattgg

SEQ ID NO: 385552 - DNA, 279 bp, Homo sapiens
  misc_feature (39)..(39): n is a, c, g, or t
  misc_feature (47)..(47): n is a, c, g, or t
gctggggtgagggaagggtgctaggggaggggggggggngggttcanaggaaagagtttagaggatccacagtggaagctgtatctcaaaactcagaacgtttggaagaactcagtaggtttccaggtgatcaaaaaaatgaaacttaaagcagcttttcacttaacatcaaagcaagaagaaatccatcatgtcaccttagacttcaatacttgtaataggagcatgttacagataatatagagttataataaaacggactatgactcttttcattgg

SEQ ID NO: 385553 - DNA, 289 bp, Homo sapiens
tatatagcatgctttcattccgtgtttatttttatattcttgttttcttaaagggaactacaagagtttagaggatccacagtggaagctgtatctcaaaactcagaacgtttggaagaactcagtaggtttccaggtgatcaaaaaaatgaaacttaaagcagcttttcacttaacatcaaagcaagaagaaatccatcatgtcaccttagacttcaatacttgtaataggagcatgttacagataatatagagttataataaaacggactatgactcttttcattgg

SEQ ID NO: 385554 - DNA, 312 bp, Homo sapiens
  misc_feature (18)..(18): n is a, c, g, or t
  misc_feature (25)..(25): n is a, c, g, or t
  misc_feature (42)..(42): n is a, c, g, or t
ataacgcgcccacggccnggcgggngcccgcgccggagcccncgccccttaaccagtgtagggctcgcgtttgtttattcttcaaagagtttagaggatccacagtggaagctgtatctcaaaactcagaacgtttggaagaactcagtaggtttccaggtgatcaaaaaaatgaaacttaaagcagcttttcacttaacatcaaagcaagaagaaatccatcatgtcaccttagacttcaatacttgtaataggagcatgttacagataatatagagttataataaaacggactatgactcttttcattgg

SEQ ID NO: 385555 - DNA, 284 bp, Homo sapiens
aactgattcgtttactccataaaatatctgcaagagagagccttgagagaaaccagaagagtttagaggatccacagtggaagctgtatctcaaaactcagaacgtttggaagaactcagtaggtttccaggtgatcaaaaaaatgaaacttaaagcagcttttcacttaacatcaaagcaagaagaaatccatcatgtcaccttagacttcaatacttgtaataggagcatgttacagataatatagagttataataaaacggactatgactcttttcattgg

SEQ ID NO: 385556 - DNA, 461 bp, Homo sapiens
cacagggtgattgaatactgaatgcaaaacttgttctgaatgttagaaatcaccaagaatttcaaatccatatgttaaactttcaaaaagtggtttaagagatgcttttggggtatatcctccatgttgtgcacttgaaacattactatgttgcattgccatagcagggggatttaaatgtgagaattgagtgaggtaggtgcagtcattgtccccccctctgccttaagccatcaaacctgttattttgtgtgttatttttttctagaccaaagtttagaacttgtgtggagtcagcctataaatattaatgcaccatacctgaaaaaggaataagatacagattgaaaagaagaggctttctggtgaagtctaagagtttagaggatccacagtggaagctgtatctcaaaactcagaacgtttggaagaactcagtaggtatgataaatcaagtaaaa

SEQ ID NO: 385557 - DNA, 238 bp, Homo sapiens
  misc_feature (1)..(1): n is a, c, g, or t
  misc_feature (43)..(43): n is a, c, g, or t
ntcgttttatgtgaatcagcaggcaccctttgaaggctaatcnctcaaaactcagaacgttgggaagaactcagtttgtttccaggtgatcaaaaaaatgaaacttaaagcagcttttcacttaacatcaaagcaagaagaaatccatcatgtcaccttagacttcaatacttgtaataggagcatgttacagataatatagagttataataaaacggactatgactcttttcattgg

SEQ ID NO: 385558 - DNA, 2190 bp, Homo sapiens
atgcctcgcctctctgtttccgtggagacgctctcggcgtcccctgtctccgctccggcggagccaggcttcggaatcactgagagaggagggggcagcgccaacgcccagcacctgccgccggtgggggactgacttcggcggaacggaaaactggagttgtttccctgggccagtgcaccgaggctgaagtctataagcctggagagaccatcagcagtaatctgcaaattccgaaatgaccaccctgcccccactgcccatgacacgcccgaagcttacagccttagccagacagaagctgccttgctcctccagaaaaattccaaggtctcaattgatcaaagaaaaagatgacatagatcattatctagaggtaaatttcaaaggattatcaaaagaggaagttgctgcttataggaactcctacaagaagaatatctgtgtggacatgctgcgagatggttatcataagtccttcaccgagctcttcgctctgatggagcggtgggatgccctgagggaggctgcgagagtcaggtccctcttctggctgcagaagcccctggaggagcagcctgataaactggattacctgtaccattacctgaccagggctgaggacgctgagaggaaagaatccttcgaagatgtatataataacttgtatgctctggcctgttacttcaataattctgaagacaagtgggtaaggaaccacttctatgaacgatgttttaagattgctcagctgatcaaaattgactgtgggaagaaagaagccgaggcacacatgcatatgggtcttctctacgaggaagatggtcagcttctggaagctgctgagcattatgaagcattccatcaattgacacaggggcggatatggaaggatgagacaggccgctctctcaacttgttggcctgtgagagtctcctgaggacttacagattactctcagacaaaatgctagaaaataaagaatacaaacaggccatcaaaattctaataaaagcttctgaaatagccaaagaaggaagtgacaaaaagatggaagcggaaacctcttactacttgggcttagcacacttagctgctgaggaatatgaaacagcattaacagtccttgacacttactgtaaaatctccacagacctggatgatgatctcagtctggggagaggctatgaagccatagccaaggtcctgcagagccaaggagagatgacagaagcaattaaatacttgaaaaaatttgtgaaaattgcaagaaacaattttcaaagcctagatttggtgagagcaagtacaatgcttggggacatctacaatgaaaaaggatactacaacaaagcttctgaatgctttcagcaagcttttgacacaacagtagagctaatgagcatgcctctgatggatgagacaaaagttcactatggaatagcaaaagctcatcagatgatgcttacagtgaacaactatatagagtctgcagatctcaccagcctcaactacctgctgtcatggaaggagagcagaggtaacattgaacctgatccagttactgaagagtttagaggatccacagtggaagctgtatctcaaaactcagaacgtttggaagaactcagtaggtttccaggtgatcaaaaaaatgaaacttaaagcagcttttcacttaacatcaaagcaagaagaaatccatcatgtcaccttagacttcaatacttgtaataggagcatgttacagataatatagagttataataaaacggactatgactcttttcattggattttgcatttcagtgtgttactataaatttaatccaaaacatctaaatccatgaaaataaaatatattccaattcttagaaatatcagcaatcatccatgaaataaatgatttcctcttatccactattccacaagaaatagtgataccatgaaaccaaaataagaaaatattttctaatgagaaaataattacaagcttaagaaaatctttcatgctgaattcatgtaggaaaatatttgctaaaactctagggaaacttctcaacatagataaaaggagtataagcaattaagcctaccatactgataagtcttgtttgaaacagttttctttacctgtgtaacagtatattttatgatacttttagctgatagcacataataaaacttat

SEQ ID NO: 385559 - DNA, 1796 bp, Homo sapiens
atgcctcgcctctctgtttccgtggagacgctctcggcgtcccctgtctccgctccggcggagccaggcttcggaatcactgagagaggagggggcagcgccaacgcccagcacctgccgccggtgggggactgacttcggcggaacggaaaactggagttgtttccctgggccagtgcaccgaggctgaagtctataagcctggagagaccatcagcagtaatctgcaaattccgaaatgaccaccctgcccccactgcccatgacacgcccgaagcttacagccttagccagacagaagctgccttgctcctccagaaaaattccaaggtctcaattgatcaaagaaaaagatgacatagatcattatctagaggtaaatttcaaaggattatcaaaagaggaagttgctgcttataggaactcctacaagaagaatatctgtgtggacatgctgcgagatggttatcataagtccttcaccgagctcttcgctctgatggagcggtgggatgccctgagggaggctgcgagagtcaggtccctcttctggctgcagaagcccctggaggagcagcctgataaactggattacctgtaccattacctgaccagggctgaggacgctgagaggaaagaatccttcgaagatgtatataataacttgtatgctctggcctgttacttcaataattctgaagacaagtgggtaaggaaccacttctatgaacgatgttttaagattgctcagctgatcaaaattgactgtgggaagaaagaagccgaggcacacatgcatatgggtcttctctacgaggaagatggtcagcttctggaagctgctgagcattatgaagcattccatcaattgacacaggggcggatatggaaggatgagacaggccgctctctcaacttgttggcctgtgagagtctcctgaggacttacagattactctcagacaaaatgctagaaaataaagaatacaaacaggccatcaaaattctaataaaagcttctgaaatagccaaagaaggaagtgacaaaaagatggaagcggaaacctcttactacttgggcttagcacacttagctgctgaggaatatgaaacagcattaacagtccttgacacttactgtaaaatctccacagacctggatgatgatctcagtctggggagaggctatgaagccatagccaaggtcctgcagagccaaggagagatgacagaagcaattaaatacttgaaaaaatttgtgaaaattgcaagaaacaattttcaaagcctagatttggtgagagcaagtacaatgcttggggacatctacaatgaaaaaggatactacaacaaagcttctgaatgctttcagcaagcttttgacacaacagtagagctaatgagcatgcctctgatggatgagacaaaagttcactatggaatagcaaaagctcatcagatgatgcttacagtgaacaactatatagagtctgcagatctcaccagcctcaactacctgctgtcatggaaggagagcagaggtaacattgaacctgatccagttactgaagagtttagaggatccacagtggaagctgtatctcaaaactcagaacgtttggaagaactcagtaggtttccaggtgatcaaaaaaatgaaacttaaagcagcttttcacttaacatcaaagcaagaagaaatccatcatgtcaccttagacttcaatacttgtaataggagcatgttacagataatatagagttataataaaacggactatgactcttttcattgg

SEQ ID NO: 385560 - DNA, 297 bp, Homo sapiens
  misc_feature (47)..(47): n is a, c, g, or t
  misc_feature (54)..(54): n is a, c, g, or t
atgggtgacgaacacacacgcgcgggggggcgggcgcggcggcgtcnggggggngtgcgggcgtctctaaagagtttagaggatccacagtggaagctgtatctcaaaactcagaacgtttggaagaactcagtaggtttccaggtgatcaaaaaaatgaaacttaaagcagcttttcacttaacatcaaagcaagaagaaatccatcatgtcaccttagacttcaatacttgtaataggagcatgttacagataatatagagttataataaaacggactatgactcttttcattgg

SEQ ID NO: 385561 - DNA, 1709 bp, Homo sapiens
gcaagggagcgacggcctgacgtcggcggagggaagccggcccaggctcggtgaggaggcaaggttctgaggggacaggctgacgtggaggaacagaggcccccggaggagcactgaaggagaagatctgccagtgggtctccattgcccagctcctgcccacactcccgcctgttgccctgaccagagtcatcatgcctcttgagcagaggagtcagcactgcaagcctgaagaaggccttgaggcccgaggagaggccctgggcctggtgggtgcgcaggctcctgctactgaggagcaggaggctgcctcctcctcttctactctagttgaagtcaccctgggggaggtgcctgctgccgagtcaccagatcctccccagagtcctcagggagcctccagcctccccactaccatgaactaccctctctggagccaatcctatgaggactccagcaaccaagaagaggaggggccaagcaccttccctgacctggagtctgagttccaagcagcactcagtaggaaggtggccaagttggttcattttctgctcctcaagtatcgagccagggagccggtcacaaaggcagaaatgctggggagtgtcgtcggaaattggcagtacttctttcctgtgatcttcagcaaagcttccgattccttgcagctggtctttggcatcgagctgatggaagtggaccccatcggccacgtgtacatctttgccacctgcctgggcctctcctacgatggcctgctgggtgacaatcagatcatgcccaagacaggcttcctgataatcatcctggccataatcgcaaaagagggcgactgtgcccctgaggagaaaatctgggaggagctgagtgtgttagaggtgtttgaggggagggaagacagtatcttcggggatcccaagaagctgctcacccaatatttcgtgcaggaaaactacctggagtaccggcaggtccccggcagtgatcctgcatgctatgagttcctgtggggtccaagggccctcattgaaaccagctatgtgaaagtcctgcaccatatggtaaagatcagtggaggacctcgcatttcctacccactcctgcatgagtgggctttgagagagggggaagagtgagtctgagcacgagttgcagccagggccagtgggagggggtttgggccagtgcaccttccggggccccatcccttagtttccactgcctcctgtgacgtgaggcccattcttcactctttgaagcgagcagtcagcattcttagtagtgggtttctgttctgttggatgactttgagattattctttgtttcctgttggagttgttcaaatgttccttttaacggatggttgaatgagcgtcagcatccaggtttatgaatgacagtagtcacacatagtgctgtttatatagtttaggagtaagagtcttgttttttattcagattgggaaatccattccattttgtgaattgtgacataataatagcagtggtaaaagtatttgcttaaaattgtgagcgaattagcaataacatacatgagataactcaagaaatcaaaagatagttgattcttgccttgtacctcaatctattctgtaaaattaaacaaatatgcaaaccaggatttccttgacttctttgagaatgcaagcgaaattaaatctgaataaataattcttcctcttca

SEQ ID NO: 385562 - DNA, 1773 bp, Homo sapiens
gcaagggagcgacggcctgacgtcggcggagggaagccggcccaggctcggtgaggaggcaagtcctgcagcctcagcatgcgctggccggatgtaccctgaggtgccctctcacttcctccttcaggttctgaggggacaggctgacgtggaggaacagaggcccccggaggagcactgaaggagaagatctgccagtgggtctccattgcccagctcctgcccacactcccgcctgttgccctgaccagagtcatcatgcctcttgagcagaggagtcagcactgcaagcctgaagaaggccttgaggcccgaggagaggccctgggcctggtgggtgcgcaggctcctgctactgaggagcaggaggctgcctcctcctcttctactctagttgaagtcaccctgggggaggtgcctgctgccgagtcaccagatcctccccagagtcctcagggagcctccagcctccccactaccatgaactaccctctctggagccaatcctatgaggactccagcaaccaagaagaggaggggccaagcaccttccctgacctggagtctgagttccaagcagcactcagtaggaaggtggccaagttggttcattttctgctcctcaagtatcgagccagggagccggtcacaaaggcagaaatgctggggagtgtcgtcggaaattggcagtacttctttcctgtgatcttcagcaaagcttccgattccttgcagctggtctttggcatcgagctgatggaagtggaccccatcggccacgtgtacatctttgccacctgcctgggcctctcctacgatggcctgctgggtgacaatcagatcatgcccaagacaggcttcctgataatcatcctggccataatcgcaaaagagggcgactgtgcccctgaggagaaaatctgggaggagctgagtgtgttagaggtgtttgaggggagggaagacagtatcttcggggatcccaagaagctgctcacccaatatttcgtgcaggaaaactacctggagtaccggcaggtccccggcagtgatcctgcatgctatgagttcctgtggggtccaagggccctcattgaaaccagctatgtgaaagtcctgcaccatatggtaaagatcagtggaggacctcgcatttcctacccactcctgcatgagtgggctttgagagagggggaagagtgagtctgagcacgagttgcagccagggccagtgggagggggtttgggccagtgcaccttccggggccccatcccttagtttccactgcctcctgtgacgtgaggcccattcttcactctttgaagcgagcagtcagcattcttagtagtgggtttctgttctgttggatgactttgagattattctttgtttcctgttggagttgttcaaatgttccttttaacggatggttgaatgagcgtcagcatccaggtttatgaatgacagtagtcacacatagtgctgtttatatagtttaggagtaagagtcttgttttttattcagattgggaaatccattccattttgtgaattgtgacataataatagcagtggtaaaagtatttgcttaaaattgtgagcgaattagcaataacatacatgagataactcaagaaatcaaaagatagttgattcttgccttgtacctcaatctattctgtaaaattaaacaaatatgcaaaccaggatttccttgacttctttgagaatgcaagcgaaattaaatctgaataaataattcttcctcttca

SEQ ID NO: 385563 - DNA, 1768 bp, Homo sapiens
gcaagggagcgacggcctgacgtcggcggagggaagccggcccaggctcggtgaggaggcaagaatccgggctttgcccctggtatcaagtcacggaagctccgggaatggcggccaggcacgttctgaggggacaggctgacgtggaggaacagaggcccccggaggagcactgaaggagaagatctgccagtgggtctccattgcccagctcctgcccacactcccgcctgttgccctgaccagagtcatcatgcctcttgagcagaggagtcagcactgcaagcctgaagaaggccttgaggcccgaggagaggccctgggcctggtgggtgcgcaggctcctgctactgaggagcaggaggctgcctcctcctcttctactctagttgaagtcaccctgggggaggtgcctgctgccgagtcaccagatcctccccagagtcctcagggagcctccagcctccccactaccatgaactaccctctctggagccaatcctatgaggactccagcaaccaagaagaggaggggccaagcaccttccctgacctggagtctgagttccaagcagcactcagtaggaaggtggccaagttggttcattttctgctcctcaagtatcgagccagggagccggtcacaaaggcagaaatgctggggagtgtcgtcggaaattggcagtacttctttcctgtgatcttcagcaaagcttccgattccttgcagctggtctttggcatcgagctgatggaagtggaccccatcggccacgtgtacatctttgccacctgcctgggcctctcctacgatggcctgctgggtgacaatcagatcatgcccaagacaggcttcctgataatcatcctggccataatcgcaaaagagggcgactgtgcccctgaggagaaaatctgggaggagctgagtgtgttagaggtgtttgaggggagggaagacagtatcttcggggatcccaagaagctgctcacccaatatttcgtgcaggaaaactacctggagtaccggcaggtccccggcagtgatcctgcatgctatgagttcctgtggggtccaagggccctcattgaaaccagctatgtgaaagtcctgcaccatatggtaaagatcagtggaggacctcgcatttcctacccactcctgcatgagtgggctttgagagagggggaagagtgagtctgagcacgagttgcagccagggccagtgggagggggtttgggccagtgcaccttccggggccccatcccttagtttccactgcctcctgtgacgtgaggcccattcttcactctttgaagcgagcagtcagcattcttagtagtgggtttctgttctgttggatgactttgagattattctttgtttcctgttggagttgttcaaatgttccttttaacggatggttgaatgagcgtcagcatccaggtttatgaatgacagtagtcacacatagtgctgtttatatagtttaggagtaagagtcttgttttttattcagattgggaaatccattccattttgtgaattgtgacataataatagcagtggtaaaagtatttgcttaaaattgtgagcgaattagcaataacatacatgagataactcaagaaatcaaaagatagttgattcttgccttgtacctcaatctattctgtaaaattaaacaaatatgcaaaccaggatttccttgacttctttgagaatgcaagcgaaattaaatctgaataaataattcttcctcttca

SEQ ID NO: 385564 - DNA, 1800 bp, Homo sapiens
ggcacgaggtgggaagtgagcaatcagcacgtcccatggacagtggtgaatgggacgtgctgattgctcacttcctgggtgtggaccactgtggccacaagcatggccctcaccaccctgaaatggccaagaaacttagccagatggaccaggtgatccagggacttgtggagcgtctggagaatgacacactgctggtagtggctggggaccatgggatgaccacaaatggagaccatggaggggacagtgagctggaggtctcagctgctctctttctgtatagccccacagcagtcttccccagcaccccaccagaggagccagaggtgattcctcaagttagccttgtgcccacgctggccctgctgctgggcctgcccatcccatttgggaatatcggggaagtgatggctgagctattctcagggggtgaggactcccagccccactcctctgctttagcccaagcctcagctctccatctcaatgctcagcaggtgtcccgatttcttcatacctactcagctgctactcaggaccttcaagctaaggagcttcatcagctgcagaacctcttctccaaggcctctgctgactaccagtggcttctccagagccccaagggggctgaggcgacactgccgactgtgattgctgagctgcagcagttcctgcggggagctcgggccatgtgcatcgagtcttgggctcgtttctctctgagcttccttctcctacatctgcttgctgctgggatacccgtcaccacccctggtccttttactgtgccatggcaggcagtctcggcttgggccctcatggccacacagaccttctactccacaggccaccagcctgtctttccagccatccattggcatgcagccttcgtgggattcccagagggtcatggctcctgtacttggctgcctgctttgctagtgggagccaacacctttgcctcccacctcctctttgcagtaggttgcccactgctcctgctctggcctttcctgtgtgagagtcaagggctgcggaagagacagcagcccccagggaatgaagctgatgccagagtcagacccgaggaggaagaggagccactgatggagatgcggctccgggatgcgcctcagcacttctatgcagcactgctgcagctgggcctcaagtacctctttatccttggtattcagattctggcctgtgccttggcagcctccatccttcgcaggcatctcatggtctggaaagtgtttgcccctaagttcatatttgaggctgtgggcttcattgtgagcagcgtgggacttctcctgggcatagctttggtgatgagagtggatggtgctgtgagctcctggttcaggcagctatttctggcccagcagaggtagcctagtctgtgattactggcacttggctacagagagtgctggagaacagtgtagcctggcctgtacaggtactggatgatctgcaagacaggctcagccatactcttactatcatgcagccaggggccgctgacatctaggacttcattattctataattcaggaccacagtggagtatgatccctaactcctgatttggatgcatctgagggacaaggggggcggtctccgaagtggaataaaataggccgggcgtggtgacttgcacctataatcccagcactttgggaggcagaggtgggaggattgcttggtcccaggagttcaagaccagcctgtggaacataacaagaccccgtctctactatttaaaaaaaagtgtaataaaatgataatata

SEQ ID NO: 385565 - DNA, 551 bp, Homo sapiens
gcacgagctgagcctgtcttgcagatcatccagtacctgtacaggctcagccatactcttactatcatgcagccaggggccgctgacatctaggacttcattattctataattcaggaccacagtggagtatgatccctaactcctgatttggatgcatctgagggacaaggggggcggtctccgaagtggaataaaataggccgggcgtggtgacttgcacctataatcccagcactttgggaggcagaggtgggaggattgcttggtcccaggagttcaagaccagcctgtggaacataacaagaccccgtctctactatttaaaaaaaagtgtaataaaatgataatataattatgtgtgtctgagatgtgggggagccccactgttctataggggttgtgaggaggatcagtctctcctgccaccaggcacagatgagatcagtcatcttaggaaagcctggctgcacctgagaacctttatgaagtggttggagttgtctgaattcactgcctccacctcttcccaaatcaatcctattatcccac

SEQ ID NO: 385566 - DNA, 2520 bp, Homo sapiens
cgccaggcggcgccgtcggctgggcccggattcccctgcggcttcgatccctttccactgggtattgagattggcgaggggagaggcgcagaaacggcgtgatgcagaaagcctcagtgttgctcttcctggcctgggtctgcttcctcttctacgctggcattgccctcttcaccagtggcttcctgctcacccgtttggagctcaccaaccatagcagctgccaagagcccccaggccctgggtccctgccatgggggagccaagggaaacctggggcctgctggatggcttcccgattttcgcgggttgtgttggtgctgatagatgctctgcgatttgacttcgcccagccccagcattcacacgtgcctagagagcctcctgtctccctacccttcctgggcaaactaagctccttgcagaggatcctggagattcagccccaccatgcccggctctaccgatctcaggttgaccctcctaccaccaccatgcagcgcctcaaggccctcaccactggctcactgcctacctttattgatgctggtagtaacttcgccagccacgccatagtggaagacaatctcattaagcagctcaccagtgcaggaaggcgtgtagtcttcatgggagatgatacctggaaagaccttttccctggtgctttctccaaagctttcttcttcccatccttcaatgtcagagacctagacacagtggacaatggcatcctggaacacctctaccccaccatggacagtggtgaatgggacgtgctgattgctcacttcctgggtgtggaccactgtggccacaagcatggccctcaccaccctgaaatggccaagaaacttagccagatggaccaggtgatccagggacttgtggagcgtctggagaatgacacactgctggtagtggctggggaccatgggatgaccacaaatggagaccatggaggggacagtgagctggaggtctcagctgctctctttctgtatagccccacagcagtcttccccagcaccccaccagaggagccagaggtgattcctcaagttagccttgtgcccacgctggccctgctgctgggcctgcccatcccatttgggaatatcggggaagtgatggctgagctattctcagggggtgaggactcccagccccactcctctgctttagcccaagcctcagctctccatctcaatgctcagcaggtgtcccgatttcttcatacctactcagctgctactcaggaccttcaagctaaggagcttcatcagctgcagaacctcttctccaaggcctctgctgactaccagtggcttctccagagccccaagggggctgaggcgacactgccgactgtgattgctgagctgcagcagttcctgcggggagctcgggccatgtgcatcgagtcttgggctcgtttctctctgagcttccttctcctacatctgcttgctgctgggatacccgtcaccacccctggtccttttactgtgccatggcaggcagtctcggcttgggccctcatggccacacagaccttctactccacaggccaccagcctgtctttccagccatccattggcatgcagccttcgtgggattcccagagggtcatggctcctgtacttggctgcctgctttgctagtgggagccaacacctttgcctcccacctcctctttgcagtaggttgcccactgctcctgctctggcctttcctgtgtgagagtcaagggctgcggaagagacagcagcccccagggaatgaagctgatgccagagtcagacccgaggaggaagaggagccactgatggagatgcggctccgggatgcgcctcagcacttctatgcagcactgctgcagctgggcctcaagtacctctttatccttggtattcagattctggcctgtgccttggcagcctccatccttcgcaggcatctcatggtctggaaagtgtttgcccctaagttcatatttgaggctgtgggcttcattgtgagcagcgtgggacttctcctgggcatagctttggtgatgagagtggatggtgctgtgagctcctggttcaggcagctatttctggcccagcagaggtagcctagtctgtgattactggcacttggctacagagagtgctggagaacagtgtagcctggcctgtacaggtactggatgatctgcaagacaggctcagccatactcttactatcatgcagccaggggccgctgacatctaggacttcattattctataattcaggaccacagtggagtatgatccctaactcctgatttggatgcatctgagggacaaggggggcggtctccgaagtggaataaaataggccgggcgtggtgacttgcacctataatcccagcactttgggaggcagaggtgggaggattgcttggtcccaggagttcaagaccagcctgtggaacataacaagaccccgtctctactatttaaaaaaaagtgtaataaaatgataatata

SEQ ID NO: 385567 - DNA, 3493 bp, Homo sapiens
ggcgccgccgccgccgcacttccgggtgccattgcaggatgcagaaagcctcagtgttgctcttcctggcctgggtctgcttcctcttctacgctggcattgccctcttcaccagtggcttcctgctcacccgtttggagctcaccaaccatagcagctgccaagagcccccaggccctgggtccctgccatgggggagccaagggaaacctggggcctgctggatggcttcccgattttcgcgggttgtgttggtgctgatagatgctctgcgatttgacttcgcccagccccagcattcacacgtgcctagagagcctcctgtctccctacccttcctgggcaaactaagctccttgcagaggatcctggagattcagccccaccatgcccggctctaccgatctcaggttgaccctcctaccaccaccatgcagcgcctcaaggccctcaccactggctcactgcctacctttattgatgctggtagtaacttcgccagccacgccatagtggaagacaatctcattaagcagctcaccagtgcaggaaggcgtgtagtcttcatgggagatgatacctggaaagaccttttccctggtgctttctccaaagctttcttcttcccatccttcaatgtcagagacctagacacagtggacaatggcatcctggaacacctctaccccaccatggacagtggtgaatgggacgtgctgattgctcacttcctgggtgtggaccactgtggccacaagcatggccctcaccaccctgaaatggccaagaaacttagccagatggaccaggtgatccagggacttgtggagcgtctggagaatgacacactgctggtagtggctggggaccatgggatgaccacaaatggagaccatggaggggacagtgagctggaggtctcagctgctctctttctgtatagccccacagcagtcttccccagcaccccaccagaggagccagaggtgattcctcaagttagccttgtgcccacgctggccctgctgctgggcctgcccatcccatttgggaatatcggggaagtgatggctgagctattctcagggggtgaggactcccagccccactcctctgctttagcccaagcctcagctctccatctcaatgctcagcaggtgtcccgatttcttcatacctactcagctgctactcaggaccttcaagctaaggagcttcatcagctgcagaacctcttctccaaggcctctgctgactaccagtggcttctccagagccccaagggggctgaggcgacactgccgactgtgattgctgagctgcagcagttcctgcggggagctcgggccatgtgcatcgagtcttgggctcgtttctctctggtccgcatggcggggggtactgctctcttggctgcttcctgctttatctgcctgctggcatctcagtgggcaatatccccaggctttccattctgccctctactcctgacacctgtggcctggggcctggttggggccatagcgtatgctggactcctgggaactattgagctgaagctagatctagtgcttctaggggctgtggctgcagtgagctcattcctcccttttctgtggaaagcctgggctggctgggggtccaagaggcccctggcaaccctgtttcccatccctgggcccgtcctgttactcctgctgtttcgcttggctgtgttcttctctgatagttttgttgtagctgaggccagggccacccccttccttttgggctcattcatcctgctcctggttgtccagcttcactgggagggccagctgcttccacctaagctactcacaatgccccgccttggcacttcagccacaacaaaccccccacggcacaatggtgcatatgccctgaggcttggaattgggttgcttttatgtacaaggctagctgggctttttcatcgttgccctgaagagacacctgtttgccactcctctccctggctgagtcctctggcatccatggtgggtggtcgagccaagaatttgtggtatggagcttgtgtggcggcgctggtggccctgttagctgccgtgcgcttgtggcttcgccgctatggtaatctcaagagccccgagccacccatgctctttgtgcgctggggactgcccctaatggcattgggtactgctgcctactgggcattggcgtcgggggcagatgaggctcccccccgtctccgggtcctggtctctggggcatccatggtgctgcctcgggctgtagcagggctggctgcttcagggctcgcgctgctgctctggaagcctgtgacagtgctggtgaaggctggggcaggcgctccaaggaccaggactgtcctcactcccttctcaggcccccccacttctcaagctgacttggattatgtggtccctcaaatctaccgacacatgcaggaggagttccggggccggttagagaggaccaaatctcagggtcccctgactgtggctgcttatcagttggggagtgtctactcagctgctatggtcacagccctcaccctgttggccttcccacttctgctgttgcatgcggagcgcatcagccttgtgttcctgcttctgtttctgcagagcttccttctcctacatctgcttgctgctgggatacccgtcaccacccctggtccttttactgtgccatggcaggcagtctcggcttgggccctcatggccacacagaccttctactccacaggccaccagcctgtctttccagccatccattggcatgcagccttcgtgggattcccagagggtcatggctcctgtacttggctgcctgctttgctagtgggagccaacacctttgcctcccacctcctctttgcagattctggcctgtgccttggcagcctccatccttcgcaggcatctcatggtctggaaagtgtttgcccctaagttcatatttgaggctgtgggcttcattgtgagcagcgtgggacttctcctgggcatagctttggtgatgagagtggatggtgctgtgagctcctggttcaggcagctatttctggcccagcagaggtagcctagtctgtgattactggcacttggctacagagagtgctggagaacagtgtagcctggcctgtacaggtactggatgatctgcaagacaggctcagccatactcttactatcatgcagccaggggccgctgacatctaggacttcattattctataattcaggaccacagtggagtatgatccctaactcctgatttggatgcatctgagggacaaggggggcggtctccgaagtggaataaaataggccgggcgtggtgacttgcacctataatcccagcactttgggaggcagaggtgggaggattgcttggtcccaggagttcaagaccagcctgtggaacataacaagaccccgtctctactatttaaaaaaaagtgtaataaaatgataatata

SEQ ID NO: 385568 - DNA, 3953 bp, Homo sapiens
ggcgccgccgccgccgcacttccgggtgccattgcaggatgcagaaagcctcagtgttgctcttcctggcctgggtctgcttcctcttctacgctggcattgccctcttcaccagtggcttcctgctcacccgtttggagctcaccaaccatagcagctgccaagagcccccaggccctgggtccctgccatgggggagccaagggaaacctggggcctgctggatggcttcccgattttcgcgggttgtgttggtgctgatagatgctctgcgatttgacttcgcccagccccagcattcacacgtgcctagagagcctcctgtctccctacccttcctgggcaaactaagctccttgcagaggatcctggagattcagccccaccatgcccggctctaccgatctcaggttgaccctcctaccaccaccatgcagcgcctcaaggccctcaccactggctcactgcctacctttattgatgctggtagtaacttcgccagccacgccatagtggaagacaatctcattaagcagctcaccagtgcaggaaggcgtgtagtcttcatgggagatgatacctggaaagaccttttccctggtgctttctccaaagctttcttcttcccatccttcaatgtcagagacctagacacagtggacaatggcatcctggaacacctctaccccaccatggacagtggtgaatgggacgtgctgattgctcacttcctgggtgtggaccactgtggccacaagcatggccctcaccaccctgaaatggccaagaaacttagccagatggaccaggtgatccagggacttgtggagcgtctggagaatgacacactgctggtagtggctggggaccatgggatgaccacaaatggagaccatggaggggacagtgagctggaggtctcagctgctctctttctgtatagccccacagcagtcttccccagcaccccaccagaggtgaggcctgggatgttcctcatctgttctcccagtaatcagcccatgttaccattacagcatcctcatgaatacctctattttaggcccccaaatccatgatcctgggtatcctccactctcatttcttacctaggcccctatgtctgccatcccaaacattgacttcagctttgtgatgaatctgttgaccactgtcaattttcctttaggagccagaggtgattcctcaagttagccttgtgcccacgctggccctgctgctgggcctgcccatcccatttgggaatatcggggaagtgatggctgagctattctcagggggtgaggactcccagccccactcctctgctttagcccaagcctcagctctccatctcaatgctcagcaggtaggtgagcgggctgggtttccaggtgacagagctagggtgggcatgaaagaagcataatgaaccactcttttgtcctttgactagtcttagtcccaccttccatacctatccctcttccgttatccctcccttccccgattctggacagagtttgggtccttgacttccaggtacccccttttgtaatacctattcttgcctctgccccaatttatgtctctgacctgttccccttggcctctgaccttttctctgccaggtgtcccgatttcttcatacctactcagtgcttcctgctttatctgcctgctggcatctcagtgggcaatatccccaggctttccattctgccctctactcctgacacctgtggcctggggcctggttggggccatagcgtatgctggactcctgggaactattgagctgaagctagatctagtgcttctaggggctgtggctgcagtgagctcattcctcccttttctgtggaaagcctgggctggctgggggtccaagaggcccctggcaaccctgtttcccatccctgggcccgtcctgttactcctgctgtttcgcttggctgtgttcttctctgatagttttgttgtagctgaggccagggccacccccttccttttgggctcattcatcctgctcctggttgtccagcttcactgggagggccagctgcttccacctaagctactcacaatgccccgccttggcacttcagccacaacaaaccccccacggcacaatggtgcatatgccctgaggcttggaattgggttgcttttatgtacaaggctagctgggctttttcatcgttgccctgaagagacacctgtttgccactcctctccctggctgagtcctctggcatccatggtgggtggtcgagccaagaatttgtggtatggagcttgtgtggcggcgctggtggccctgttagctgccgtgcgcttgtggcttcgccgctatggtaatctcaagagccccgagccacccatgctctttgtgcgctggggactgcccctaatggcattgggtactgctgcctactgggcattggcgtcgggggcagatgaggctcccccccgtctccgggtcctggtctctggggcatccatggtgctgcctcgggctgtagcagggctggctgcttcagggctcgcgctgctgctctggaagcctgtgacagtgctggtgaaggctggggcaggcgctccaaggaccaggactgtcctcactcccttctcaggcccccccacttctcaagctgacttggattatgtggtccctcaaatctaccgacacatgcaggaggagttccggggccggttagagaggaccaaatctcagggtcccctgactgtggctgcttatcagttggggagtgtctactcagctgctatggtcacagccctcaccctgttggccttcccacttctgctgttgcatgcggagcgcatcagccttgtgttcctgcttctgtttctgcagagcttccttctcctacatctgcttgctgctgggatacccgtcaccacccctggtccttttactgtgccatggcaggcagtctcggcttgggccctcatggccacacagaccttctactccacaggccaccagcctgtctttccagccatccattggcatgcagccttcgtgggattcccagagggtcatggctcctgtacttggctgcctgctttgctagtgggagccaacacctttgcctcccacctcctctttgcagtaggttgcccactgctcctgctctggcctttcctgtgtgagagtcaagggctgcggaagagacagcagcccccagggaatgaagctgatgccagagtcagacccgaggaggaagaggagccactgatggagatgcggctccgggatgcgcctcagcacttctatgcagcactgctgcagctgggcctcaagtacctctttatccttggtattcagattctggcctgtgccttggcagcctccatccttcgcaggcatctcatggtctggaaagtgtttgcccctaagttcatatttgaggctgtgggcttcattgtgagcagcgtgggacttctcctgggcatagctttggtgatgagagtggatggtgctgtgagctcctggttcaggcagctatttctggcccagcagaggtagcctagtctgtgattactggcacttggctacagagagtgctggagaacagtgtagcctggcctgtacaggtactggatgatctgcaagacaggctcagccatactcttactatcatgcagccaggggccgctgacatctaggacttcattattctataattcaggaccacagtggagtatgatccctaactcctgatttggatgcatctgagggacaaggggggcggtctccgaagtggaataaaataggccgggcgtggtgacttgcacctataatcccagcactttgggaggcagaggtgggaggattgcttggtcccaggagttcaagaccagcctgtggaacataacaagaccccgtctctactatttaaaaaaaagtgtaataaaatgataatata

SEQ ID NO: 385569 - DNA, 3159 bp, Homo sapiens
caaaaatatgtagaggcggccgctgtgtaaattatatctgcctgggttcatttaatcgattgctggcgtcgtttaacccatccttcaatgtcagagacctagacacagtggacaatggcatcctggaacacctctaccccaccatggacagtggtgaatgggacgtgctgattgctcacttcctgggtgtggaccactgtggccacaagcatggccctcaccaccctgaaatggccaagaaacttagccagatggaccaggtgatccagggacttgtggagcgtctggagaatgacacactgctggtagtggctggggaccatgggatgaccacaaatggagaccatggaggggacagtgagctggaggtctcagctgctctctttctgtatagccccacagcagtcttccccagcaccccaccagaggagccagaggtgattcctcaagttagccttgtgcccacgctggccctgctgctgggcctgcccatcccatttgggaatatcggggaagtgatggctgagctattctcagggggtgaggactcccagccccactcctctgctttagcccaagcctcagctctccatctcaatgctcagcaggtgtcccgatttcttcatacctactcagctgctactcaggaccttcaagctaaggagcttcatcagctgcagaacctcttctccaaggcctctgctgactaccagtggcttctccagagccccaagggggctgaggcgacactgccgactgtgattgctgagctgcagcagttcctgcggggagctcgggccatgtgcatcgagtcttgggctcgtttctctctggtccgcatggcggggggtactgctctcttggctgcttcctgctttatctgcctgctggcatctcagtgggcaatatccccaggctttccattctgccctctactcctgacacctgtggcctggggcctggttggggccatagcgtatgctggactcctgggaactattgagctgaagctagatctagtgcttctaggggctgtggctgcagtgagctcattcctcccttttctgtggaaagcctgggctggctgggggtccaagaggcccctggcaaccctgtttcccatccctgggcccgtcctgttactcctgctgtttcgcttggctgtgttcttctctgatagttttgttgtagctgaggccagggccacccccttccttttgggctcattcatcctgctcctggttgtccagcttcactgggagggccagctgcttccacctaagctactcacaatgccccgccttggcacttcagccacaacaaaccccccacggcacaatggtgcatatgccctgaggcttggaattgggttgcttttatgtacaaggctagctgggctttttcatcgttgccctgaagagacacctgtttgccactcctctccctggctgagtcctctggcatccatggtgggtggtcgagccaagaatttgtggtatggagcttgtgtggcggcgctggtggccctgttagctgccgtgcgcttgtggcttcgccgctatggtaatctcaagagccccgagccacccatgctctttgtgcgctggggactgcccctaatggcattgggtactgctgcctactgggcattggcgtcgggggcagatgaggctcccccccgtctccgggtcctggtctctggggcatccatggtgctgcctcgggctgtagcagggctggctgcttcagggctcgcgctgctgctctggaagcctgtgacagtgctggtgaaggctggggcaggcgctccaaggaccaggactgtcctcactcccttctcaggcccccccacttctcaagctgacttggattatgtggtccctcaaatctaccgacacatgcaggaggagttccggggccggttagagaggaccaaatctcagggtcccctgactgtggctgcttatcagttggggagtgtctactcagctgctatggtcacagccctcaccctgttggccttcccacttctgctgttgcatgcggagcgcatcagccttgtgttcctgcttctgtttctgcagagcttccttctcctacatctgcttgctgctgggatacccgtcaccacccctggtccttttactgtgccatggcaggcagtctcggcttgggccctcatggccacacagaccttctactccacaggccaccagcctgtctttccagccatccattggcatgcagccttcgtgggattcccagagggtcatggctcctgtacttggctgcctgctttgctagtgggagccaacacctttgcctcccacctcctctttgcagtaggttgcccactgctcctgctctggcctttcctgtgtgagagtcaagggctgcggaagagacagcagcccccagggaatgaagctgatgccagagtcagacccgaggaggaagaggagccactgatggagatgcggctccgggatgcgcctcagcacttctatgcagcactgctgcagctgggcctcaagtacctctttatccttggtattcagattctggcctgtgccttggcagcctccatccttcgcaggcatctcatggtctggaaagtgtttgcccctaagttcatatttgaggctgtgggcttcattgtgagcagcgtgggacttctcctgggcatagctttggtgatgagagtggatggtgctgtgagctcctggttcaggcagctatttctggcccagcagaggtagcctagtctgtgattactggcacttggctacagagagtgctggagaacagtgtagcctggcctgtacaggtactggatgatctgcaagacaggctcagccatactcttactatcatgcagccaggggccgctgacatctaggacttcattattctataattcaggaccacagtggagtatgatccctaactcctgatttggatgcatctgagggacaaggggggcggtctccgaagtggaataaaataggccgggcgtggtgacttgcacctataatcccagcactttgggaggcagaggtgggaggattgcttggtcccaggagttcaagaccagcctgtggaacataacaagaccccgtctctactatttaaaaaaaagtgtaataaaatgataatata

SEQ ID NO: 385570 - DNA, 2671 bp, Homo sapiens
ggacgcgtgggtcgcccacgcgtccgagtgatggctgagctattctcagggggtgaggactcccagccccactcctctgctttagcccaagcctcagctctccatctcaatgctcagcaggtgtcccgatttcttcatacctactcagctgctactcaggaccttcaagctaaggagcttcatcagctgcagaacctcttctccaaggcctctgctgactaccagtggcttctccagagccccaagggggctgaggcgacactgccgactgtgattgctgagctgcagcagttcctgcggggagctcgggccatgtgcatcgagtcttgggctcgtttctctctggtccgcatggcggggggtactgctctcttggctgcttcctgctttatctgcctgctggcatctcagtgggcaatatccccaggctttccattctgccctctactcctgacacctgtggcctggggcctggttggggccatagcgtatgctggactcctgggaactattgagctgaagctagatctagtgcttctaggggctgtggctgcagtgagctcattcctcccttttctgtggaaagcctgggctggctgggggtccaagaggcccctggcaaccctgtttcccatccctgggcccgtcctgttactcctgctgtttcgcttggctgtgttcttctctgatagttttgttgtagctgaggccagggccacccccttccttttgggctcattcatcctgctcctggttgtccagcttcactgggagggccagctgcttccacctaagctactcacaatgccccgccttggcacttcagccacaacaaaccccccacggcacaatggtgcatatgccctgaggcttggaattgggttgcttttatgtacaaggctagctgggctttttcatcgttgccctgaagagacacctgtttgccactcctctccctggctgagtcctctggcatccatggtgggtggtcgagccaagaatttgtggtatggagcttgtgtggcggcgctggtggccctgttagctgccgtgcgcttgtggcttcgccgctatggtaatctcaagagccccgagccacccatgctctttgtgcgctggggactgcccctaatggcattgggtactgctgcctactgggcattggcgtcgggggcagatgaggctcccccccgtctccgggtcctggtctctggggcatccatggtgctgcctcgggctgtagcagggctggctgcttcagggctcgcgctgctgctctggaagcctgtgacagtgctggtgaaggctggggcaggcgctccaaggaccaggactgtcctcactcccttctcaggcccccccacttctcaagctgacttggattatgtggtccctcaaatctaccgacacatgcaggaggagttccggggccggttagagaggaccaaatctcagggtcccctgactgtggctgcttatcagttggggagtgtctactcagctgctatggtcacagccctcaccctgttggccttcccacttctgctgttgcatgcggagcgcatcagccttgtgttcctgcttctgtttctgcagagcttccttctcctacatctgcttgctgctgggatacccgtcaccacccctggtccttttactgtgccatggcaggcagtctcggcttgggccctcatggccacacagaccttctactccacaggccaccagcctgtctttccagccatccattggcatgcagccttcgtgggattcccagagggtcatggctcctgtacttggctgcctgctttgctagtgggagccaacacctttgcctcccacctcctctttgcagtaggttgcccactgctcctgctctggcctttcctgtgtgagagtcaagggctgcggaagagacagcagcccccagggaatgaagctgatgccagagtcagacccgaggaggaagaggagccactgatggagatgcggctccgggatgcgcctcagcacttctatgcagcactgctgcagctgggcctcaagtacctctttatccttggtattcagattctggcctgtgccttggcagcctccatccttcgcaggcatctcatggtctggaaagtgtttgcccctaagttcatatttgaggctgtgggcttcattgtgagcagcgtgggacttctcctgggcatagctttggtgatgagagtggatggtgctgtgagctcctggttcaggcagctatttctggcccagcagaggtagcctagtctgtgattactggcacttggctacagagagtgctggagaacagtgtagcctggcctgtacaggtactggatgatctgcaagacaggctcagccatactcttactatcatgcagccaggggccgctgacatctaggacttcattattctataattcaggaccacagtggagtatgatccctaactcctgatttggatgcatctgagggacaaggggggcggtctccgaagtggaataaaataggccgggcgtggtgacttgcacctataatcccagcactttgggaggcagaggtgggaggattgcttggtcccaggagttcaagaccagcctgtggaacataacaagaccccgtctctactatttaaaaaaaagtgtaataaaatgataatata

SEQ ID NO: 385571 - DNA, 2803 bp, Homo sapiens
ggcgccgccgccgccgcacttccgggtgccattgcaggatgcagaaagcctcagtgttgctcttcctggcctgggtctgcttcctcttctacgctggcattgccctcttcaccagtggcttcctgctcacccgtttggagctcaccaaccatagcagctgccaagagcccccaggccctgggtccctgccatgggggagccaagggaaacctggggcctgctggatggcttcccgattttcgcgggttgtgttggtgctgatagatgctctgcgatttgacttcgcccagccccagcattcacacgtgcctagagagcctcctgtctccctacccttcctgggcaaactaagctccttgcagaggatcctggagattcagccccaccatgcccggctctaccgatctcaggttgaccctcctaccaccaccatgcagcgcctcaaggccctcaccactggctcactgcctacctttattgatgctggtagtaacttcgccagccacgccatagtggaagacaatctcattaagcagctcaccagtgcaggaaggcgtgtagtcttcatgggagatgatacctggaaagaccttttccctggtgctttctccaaagctttcttcttcccatccttcaatgtcagagacctagacacagtggacaatggcatcctggaacacctctaccccaccatggacagtggtgaatgggacgtgctgattgctcacttcctgggtgtggaccactgtggccacaagcatggccctcaccaccctgaaatggccaagaaacttagccagatggaccaggtgatccagggacttgtggagcgtctggagaatgacacactgctggtagtggctggggaccatgggatgaccacaaatggagaccatggaggggacagtgagctggaggtctcagctgctctctttctgtatagccccacagcagtcttccccagcaccccaccagaggagccagaggtgattcctcaagttagccttgtgcccacgctggccctgctgctgggcctgcccatcccatttgggaatatcggggaagtgatggctgagctattctcagggggtgaggactcccagccccactcctctgctttagcccaagcctcagctctccatctcaatgctcagcaggtgtcccgatttcttcatacctactcagctgctactcaggaccttcaagctaaggagcttcatcagctgcagaacctcttctccaaggcctctgctgactaccagtggcttctccagagccccaagggggctgaggcgacactgccgactgtgattgctgagctgcagcagttcctgcggggagctcgggccatgtgcatcgagtcttgggctcgtttctctctggtccgcatggcggggggtactgctctcttggctgcttcctgctttatctgcctgctggcatctcagtgggcaatatccccaggctttccattctgccctctactcctgacacctgtggcctggggcctggttggggccatagcgtatgctggactcctgggaactattgagctgaagctagatctagtgcttctaggggctgtggctgcagtgagctcattcctcccttttctgtggaaagcctgggctggctgggggtccaagaggcccctggcaaccctgtttcccatccctgggcccgtcctgttactcctgctgtttcgcttggctgtgttcttctctgatagttttgttgtagctgaggccagggccacccccttccttttgggctcattcatcctgctcctggttgtccagcttcactgggagggccagctgcttccacctaagctactcacaatgccccgccttggcacttcagccacaacaaaccccccacggcacaatggtgcatatgccctgaggcttggaattgggttgcttttatgtacaaggctagctgggctttttcatcgttgccctgaagagacacctgtttgccactcctctccctggctgagtcctctggcatccatggtgggtggtcgagccaagaatttgtggtatggagcttgtgtggcggcgctggtggccctgttagctgccgtgcgcttgtggcttcgccgctatggtaatctcaagagccccgagccacccatgctctttgtgcgctggggactgcccctaatggcattgggtactgctgcctactgggcattggcgtcgggggcagatgaggctcccccccgtctccgggtcctggtctctggggcatccatggtgctgcctcgggctgtagcagggctggctgcttcagggctcgcgctgctgctctggaagcctgtgacagtgctggtgaaggctggggcaggcgctccaaggaccaggactgtcctcactcccttctcaggcccccccacttctcaagctgacttggattatgtggtccctcaaatctaccgacacatgcaggaggagttccggggccggttagagaggaccaaatctcagggtcccctgactgtggctgcttatcagttggggagtgtctactcagctgctatggtcacagccctcaccctgttggccttcccacttctgctgttgcatgcggagcgcatcagccttgtgttcctgcttctgtttctgcagagcttccttctcctacatctgcttgctggtgacttgcacctataatcccagcactttgggaggcagaggtgggaggattgcttggtcccaggagttcaagaccagcctgtggaacataacaagaccccgtctctactatttaaaaaaaagtgtaataaaatgataatata

SEQ ID NO: 385572 - DNA, 230 bp, Homo sapiens
ctccgggatgcgcctcagcacttctatgcagcactgctgcagctgggcctcaagtacctctttatccttggtattcaggtgggtgtaggagagagatcagggagttggtgttttttctctgtgtgtgcatcactttctttcagaccttcaaaaccgtgggagagagccttgactgagtttcacataagtgaagtggttgcccaagcccagtggcctcaaatggcagttct

SEQ ID NO: 385573 - DNA, 520 bp, Homo sapiens
tcttttttctttttgagaaaaatatttatccgtttctactcctgacacatttattggcccccaggggacttgtggagcgtctggagaatgacacactgctggtagtggctggggaccatgggatgaccacaaatggagaccatggaggggacagtgagctggaggtctcagctgctctctttctgtatagccccacagcagtcttccccagcaccccaccagaggtgaggcctgggatgttcctcatctgttctcccagtaatcagcccatgttaccattacagcatcctcatgaatacctctattttaggcccccaaatccatgatcctgggtatcctccactctcatttcttacctaggcccctatgtctgccatcccaaacattgacttcagctttgtgatgaatctgttgaccactgtcaattttcctttaggagccagaggtgattcctcaagttagccttgtgcccacgctggccctgctgctgggcctgcccatcccatttgggaatatcggg

SEQ ID NO: 385574 - DNA, 2457 bp, Homo sapiens
ggcgccgccgccgccgcacttccgggtgccattgcaggatgcagaaagcctcagtgttgctcttcctggcctgggtctgcttcctcttctacgctggcattgccctcttcaccagtggcttcctgctcacccgtttggagctcaccaaccatagcagctgccaagagcccccaggccctgggtccctgccatgggggagccaagggaaacctggggcctgctggatggcttcccgattttcgcgggttgtgttggtgctgatagatgctctgcgatttgacttcgcccagccccagcattcacacgtgcctagagagcctcctgtctccctacccttcctgggcaaactaagctccttgcagaggatcctggagattcagccccaccatgcccggctctaccgatctcaggttgaccctcctaccaccaccatgcagcgcctcaaggccctcaccactggctcactgcctacctttattgatgctggtagtaacttcgccagccacgccatagtggaagacaatctcattaagcagctcaccagtgcaggaaggcgtgtagtcttcatgggagatgatacctggaaagaccttttccctggtgctttctccaaagctttcttcttcccatccttcaatgtcagagacctagacacagtggacaatggcatcctggaacacctctaccccaccatggacagtggtgaatgggacgtgctgattgctcacttcctgggtgtggaccactgtggccacaagcatggccctcaccaccctgaaatggccaagaaacttagccagatggaccaggtgatccagggacttgtggagcgtctggagaatgacacactgctggtagtggctggggaccatgggatgaccacaaatggagaccatggaggggacagtgagctggaggtctcagctgctctctttctgtatagccccacagcagtcttccccagcaccccaccagaggagccagaggtgattcctcaagttagccttgtgcccacgctggccctgctgctgggcctgcccatcccatttgggaatatcggggaagtgatggctgagctattctcagggggtgaggactcccagccccactcctctgctttagcccaagcctcagctctccatctcaatgctcagcaggtgtcccgatttcttcatacctactcagctgctactcaggaccttcaagctaaggagcttcatcagctgcagaacctcttctccaaggcctctgctgactaccagtggcttctccagagccccaagggggctgaggcgacactgccgactgtgattgctgagctgcagcagttcctgcggggagctcgggccatgtgcatcgagtcttgggctcgtttctctctgagcttccttctcctacatctgcttgctgctgggatacccgtcaccacccctggtccttttactgtgccatggcaggcagtctcggcttgggccctcatggccacacagaccttctactccacaggccaccagcctgtctttccagccatccattggcatgcagccttcgtgggattcccagagggtcatggctcctgtacttggctgcctgctttgctagtgggagccaacacctttgcctcccacctcctctttgcagtaggttgcccactgctcctgctctggcctttcctgtgtgagagtcaagggctgcggaagagacagcagcccccagggaatgaagctgatgccagagtcagacccgaggaggaagaggagccactgatggagatgcggctccgggatgcgcctcagcacttctatgcagcactgctgcagctgggcctcaagtacctctttatccttggtattcagattctggcctgtgccttggcagcctccatccttcgcaggcatctcatggtctggaaagtgtttgcccctaagttcatatttgaggctgtgggcttcattgtgagcagcgtgggacttctcctgggcatagctttggtgatgagagtggatggtgctgtgagctcctggttcaggcagctatttctggcccagcagaggtagcctagtctgtgattactggcacttggctacagagagtgctggagaacagtgtagcctggcctgtacaggtactggatgatctgcaagacaggctcagccatactcttactatcatgcagccaggggccgctgacatctaggacttcattattctataattcaggaccacagtggagtatgatccctaactcctgatttggatgcatctgagggacaaggggggcggtctccgaagtggaataaaataggccgggcgtggtgacttgcacctataatcccagcactttgggaggcagaggtgggaggattgcttggtcccaggagttcaagaccagcctgtggaacataacaagaccccgtctctactatttaaaaaaaagtgtaataaaatgataatata

SEQ ID NO: 385575 - DNA, 2543 bp, Homo sapiens
aacggcgtctccctctgttgtccagactctagtgcagtggttcaatctcggctcactgcaacctccgcctccccgattcaagcgattctcctgcgtcagcctccccagtagctgagactacaggatgcagaaagcctcagtgttgctcttcctggcctgggtctgcttcctcttctacgctggcattgccctcttcaccagtggcttcctgctcacccgtttggagctcaccaaccatagcagctgccaagagcccccaggccctgggtccctgccatgggggagccaagggaaacctggggcctgctggatggcttcccgattttcgcgggttgtgttggtgctgatagatgctctgcgatttgacttcgcccagccccagcattcacacgtgcctagagagcctcctgtctccctacccttcctgggcaaactaagctccttgcagaggatcctggagattcagccccaccatgcccggctctaccgatctcaggttgaccctcctaccaccaccatgcagcgcctcaaggccctcaccactggctcactgcctacctttattgatgctggtagtaacttcgccagccacgccatagtggaagacaatctcattaagcagctcaccagtgcaggaaggcgtgtagtcttcatgggagatgatacctggaaagaccttttccctggtgctttctccaaagctttcttcttcccatccttcaatgtcagagacctagacacagtggacaatggcatcctggaacacctctaccccaccatggacagtggtgaatgggacgtgctgattgctcacttcctgggtgtggaccactgtggccacaagcatggccctcaccaccctgaaatggccaagaaacttagccagatggaccaggtgatccagggacttgtggagcgtctggagaatgacacactgctggtagtggctggggaccatgggatgaccacaaatggagaccatggaggggacagtgagctggaggtctcagctgctctctttctgtatagccccacagcagtcttccccagcaccccaccagaggagccagaggtgattcctcaagttagccttgtgcccacgctggccctgctgctgggcctgcccatcccatttgggaatatcggggaagtgatggctgagctattctcagggggtgaggactcccagccccactcctctgctttagcccaagcctcagctctccatctcaatgctcagcaggtgtcccgatttcttcatacctactcagctgctactcaggaccttcaagctaaggagcttcatcagctgcagaacctcttctccaaggcctctgctgactaccagtggcttctccagagccccaagggggctgaggcgacactgccgactgtgattgctgagctgcagcagttcctgcggggagctcgggccatgtgcatcgagtcttgggctcgtttctctctgagcttccttctcctacatctgcttgctgctgggatacccgtcaccacccctggtccttttactgtgccatggcaggcagtctcggcttgggccctcatggccacacagaccttctactccacaggccaccagcctgtctttccagccatccattggcatgcagccttcgtgggattcccagagggtcatggctcctgtacttggctgcctgctttgctagtgggagccaacacctttgcctcccacctcctctttgcagtaggttgcccactgctcctgctctggcctttcctgtgtgagagtcaagggctgcggaagagacagcagcccccagggaatgaagctgatgccagagtcagacccgaggaggaagaggagccactgatggagatgcggctccgggatgcgcctcagcacttctatgcagcactgctgcagctgggcctcaagtacctctttatccttggtattcagattctggcctgtgccttggcagcctccatccttcgcaggcatctcatggtctggaaagtgtttgcccctaagttcatatttgaggctgtgggcttcattgtgagcagcgtgggacttctcctgggcatagctttggtgatgagagtggatggtgctgtgagctcctggttcaggcagctatttctggcccagcagaggtagcctagtctgtgattactggcacttggctacagagagtgctggagaacagtgtagcctggcctgtacaggtactggatgatctgcaagacaggctcagccatactcttactatcatgcagccaggggccgctgacatctaggacttcattattctataattcaggaccacagtggagtatgatccctaactcctgatttggatgcatctgagggacaaggggggcggtctccgaagtggaataaaataggccgggcgtggtgacttgcacctataatcccagcactttgggaggcagaggtgggaggattgcttggtcccaggagttcaagaccagcctgtggaacataacaagaccccgtctctactatttaaaaaaaagtgtaataaaatgataatata

SEQ ID NO: 385576 - DNA, 3708 bp, Homo sapiens
ggcgccgccgccgccgcacttccgggtgccattgcaggatgcagaaagcctcagtgttgctcttcctggcctgggtctgcttcctcttctacgctggcattgccctcttcaccagtggcttcctgctcacccgtttggagctcaccaaccatagcagctgccaagagcccccaggccctgggtccctgccatgggggagccaagggaaacctggggcctgctggatggcttcccgattttcgcgggttgtgttggtgctgatagatgctctgcgatttgacttcgcccagccccagcattcacacgtgcctagagagcctcctgtctccctacccttcctgggcaaactaagctccttgcagaggatcctggagattcagccccaccatgcccggctctaccgatctcaggttgaccctcctaccaccaccatgcagcgcctcaaggccctcaccactggctcactgcctacctttattgatgctggtagtaacttcgccagccacgccatagtggaagacaatctcattaagcagctcaccagtgcaggaaggcgtgtagtcttcatgggagatgatacctggaaagaccttttccctggtgctttctccaaagctttcttcttcccatccttcaatgtcagagacctagacacagtggacaatggcatcctggaacacctctaccccaccatggacagtggtgaatgggacgtgctgattgctcacttcctgggtgtggaccactgtggccacaagcatggccctcaccaccctgaaatggccaagaaacttagccagatggaccaggtgatccagggacttgtggagcgtctggagaatgacacactgctggtagtggctggggaccatgggatgaccacaaatggagaccatggaggggacagtgagctggaggtctcagctgctctctttctgtatagccccacagcagtcttccccagcaccccaccagaggagccagaggtgattcctcaagttagccttgtgcccacgctggccctgctgctgggcctgcccatcccatttgggaatatcggggaagtgatggctgagctattctcagggggtgaggactcccagccccactcctctgctttagcccaagcctcagctctccatctcaatgctcagcaggtgtcccgatttcttcatacctactcagctgctactcaggaccttcaagctaaggagcttcatcagctgcagaacctcttctccaaggcctctgctgactaccagtggcttctccagagccccaagggggctgaggcgacactgccgactgtgattgctgagctgcagcagttcctgcggggagctcgggccatgtgcatcgagtcttgggctcgtttctctctggtccgcatggcggggggtactgctctcttggctgcttcctgctttatctgcctgctggcatctcagtgggcaatatccccaggctttccattctgccctctactcctgacacctgtggcctggggcctggttggggccatagcgtatgctggactcctgggaactattgagctgaagctagatctagtgcttctaggggctgtggctgcagtgagctcattcctcccttttctgtggaaagcctgggctggctgggggtccaagaggcccctggcaaccctgtttcccatccctgggcccgtcctgttactcctgctgtttcgcttggctgtgttcttctctgatagttttgttgtagctgaggccagggccacccccttccttttgggctcattcatcctgctcctggttgtccagcttcactgggagggccagctgcttccacctaagctactcacaatgccccgccttggcacttcagccacaacaaaccccccacggcacaatggtgcatatgccctgaggcttggaattgggttgcttttatgtacaaggctagctgggctttttcatcgttgccctgaagagacacctgtttgccactcctctccctggctgagtcctctggcatccatggtgggtggtcgagccaagaatttgtggtatggagcttgtgtggcggcgctggtggccctgttagctgccgtgcgcttgtggcttcgccgctatggtaatctcaagagccccgagccacccatgctctttgtgcgctggggactgcccctaatggcattgggtactgctgcctactgggcattggcgtcgggggcagatgaggctcccccccgtctccgggtcctggtctctggggcatccatggtgctgcctcgggctgtagcagggctggctgcttcagggctcgcgctgctgctctggaagcctgtgacagtgctggtgaaggctggggcaggcgctccaaggaccaggactgtcctcactcccttctcaggcccccccacttctcaagctgacttggattatgtggtccctcaaatctaccgacacatgcaggaggagttccggggccggttagagaggaccaaatctcagggtcccctgactgtggctgcttatcagttggggagtgtctactcagctgctatggtcacagccctcaccctgttggccttcccacttctgctgttgcatgcggagcgcatcagccttgtgttcctgcttctgtttctgcagagcttccttctcctacatctgcttgctgctgggatacccgtcaccacccctggtccttttactgtgccatggcaggcagtctcggcttgggccctcatggccacacagaccttctactccacaggccaccagcctgtctttccagccatccattggcatgcagccttcgtgggattcccagagggtcatggctcctgtacttggctgcctgctttgctagtgggagccaacacctttgcctcccacctcctctttgcagtaggttgcccactgctcctgctctggcctttcctgtgtgagagtcaagggctgcggaagagacagcagcccccagggaatgaagctgatgccagagtcagacccgaggaggaagaggagccactgatggagatgcggctccgggatgcgcctcagcacttctatgcagcactgctgcagctgggcctcaagtacctctttatccttggtattcagattctggcctgtgccttggcagcctccatccttcgcaggcatctcatggtctggaaagtgtttgcccctaagttcatatttgaggctgtgggcttcattgtgagcagcgtgggacttctcctgggcatagctttggtgatgagagtggatggtgctgtgagctcctggttcaggcagctatttctggcccagcagaggtagcctagtctgtgattactggcacttggctacagagagtgctggagaacagtgtagcctggcctgtacaggtactggatgatctgcaagacaggctcagccatactcttactatcatgcagccaggggccgctgacatctaggacttcattattctataattcaggaccacagtggagtatgatccctaactcctgatttggatgcatctgagggacaaggggggcggtctccgaagtggaataaaataggccgggcgtggtgacttgcacctataatcccagcactttgggaggcagaggtgggaggattgcttggtcccaggagttcaagaccagcctgtggaacataacaagaccccgtctctactatttaaaaaaaagtgtaataaaatgataatata

SEQ ID NO: 385577 - DNA, 3906 bp, Homo sapiens
ggcgccgccgccgccgcacttccgggtgccattgcaggatgcagaaagcctcagtgttgctcttcctggcctgggtctgcttcctcttctacgctggcattgccctcttcaccagtggcttcctgctcacccgtttggagctcaccaaccatagcagctgccaagagcccccaggccctgggtccctgccatgggggagccaagggaaacctggggcctgctggatggcttcccgattttcgcgggttgtgttggtgctgatagatgctctgcgatttgacttcgcccagccccagcattcacacgtgcctagagagcctcctgtctccctacccttcctgggcaaactaagctccttgcagaggatcctggagattcagccccaccatgcccggctctaccgatctcaggttgaccctcctaccaccaccatgcagcgcctcaaggccctcaccactggctcactgcctacctttattgatgctggtagtaacttcgccagccacgccatagtggaagacaatctcattaagcagctcaccagtgcaggaaggcgtgtagtcttcatgggagatgatacctggaaagaccttttccctggtgctttctccaaagctttcttcttcccatccttcaatgtcagagacctagacacagtggacaatggcatcctggaacacctctaccccaccatggacagtggtgaatgggacgtgctgattgctcacttcctgggtgtggaccactgtggccacaagcatggccctcaccaccctgaaatggccaagaaacttagccagatggaccaggtgatccagggacttgtggagcgtctggagaatgacacactgctggtagtggctggggaccatgggatgaccacaaatggagaccatggaggggacagtgagctggaggtctcagctgctctctttctgtatagccccacagcagtcttccccagcaccccaccagaggagccagaggtgattcctcaagttagccttgtgcccacgctggccctgctgctgggcctgcccatcccatttgggaatatcggggaagtgatggctgagctattctcagggggtgaggactcccagccccactcctctgctttagcccaagcctcagctctccatctcaatgctcagcaggtgtcccgatttcttcatacctactcagctgctactcaggaccttcaagctaaggagcttcatcagctgcagaacctcttctccaaggcctctgctgactaccagtggcttctccagagccccaagggggctgaggcgacactgccgactgtgattgctgagctgcagcagttcctgcggggagctcgggccatgtgcatcgagtcttgggctcgtttctctctggtccgcatggcggggggtactgctctcttggctgcttcctgctttatctgcctgctggcatctcagtgggcaatatccccaggctttccattctgccctctactcctgacacctgtggcctggggcctggttggggccatagcgtatgctggactcctgggaactattgagctgaagctagatctagtgcttctaggggctgtggctgcagtgagctcattcctcccttttctgtggaaagcctgggctggctgggggtccaagaggcccctggcaaccctgtttcccatccctgggcccgtcctgttactcctgctgtttcgcttggctgtgttcttctctgatagttttgttgtagctgaggccagggccacccccttccttttgggctcattcatcctgctcctggttgtccagcttcactgggagggccagctgcttccacctaagctactcacaatgccccgccttggcacttcagccacaacaaaccccccacggcacaatggtgcatatgccctgaggcttggaattgggttgcttttatgtacaaggctagctgggctttttcatcgttgccctgaagagacacctgtttgccactcctctccctggctgagtcctctggcatccatggtgggtggtcgagccaagaatttgtggtatggagcttgtgtggcggcgctggtggccctgttagctgccgtgcgcttgtggcttcgccgctatggtaatctcaagagccccgagccacccatgctctttgtgcgctggggactgcccctaatggcattgggtactgctgcctactgggcattggcgtcgggggcagatgaggctcccccccgtctccgggtcctggtctctggggcatccatggtgctgcctcgggctgtagcagggctggctgcttcagggctcgcgctgctgctctggaagcctgtgacagtgctggtgaaggctggggcaggcgctccaaggaccaggactgtcctcactcccttctcaggcccccccacttctcaagctgacttggattatgtggtccctcaaatctaccgacacatgcaggaggagttccggggccggttagagaggaccaaatctcagggtcccctgactgtggctgcttatcagttggggagtgtctactcagctgctatggtcacagccctcaccctgttggccttcccacttctgctgttgcatgcggagcgcatcagccttgtgttcctgcttctgtttctgcagagcttccttctcctacatctgcttgctgctgggatacccgtcaccacccctggtccttttactgtgccatggcaggcagtctcggcttgggccctcatggccacacagaccttctactccacaggccaccagcctgtctttccagccatccattggcatgcagccttcgtgggattcccagagggtcatggctcctgtacttggctgcctgctttgctagtgggagccaacacctttgcctcccacctcctctttgcagtaggttgcccactgctcctgctctggcctttcctgtgtgagagtcaagggctgcggaagagacagcagcccccagggaatgaagctgatgccagagtcagacccgaggaggaagaggagccactgatggagatgcggctccgggatgcgcctcagcacttctatgcagcactgctgcagctgggcctcaagtacctctttatccttggtattcagattctggcctgtgccttggcagcctccatccttcgcaggcatctcatggtctggaaagtgtttgcccctaagttcatatttgaggctgtgggcttcattgtgagcagcgtgggacttctcctgggcatagctttggtgatgagagtggatggtgctgtgagctcctggttcaggcagctatttctggcccagcagaggtagcctagtctgtgattactggcacttggctacagagagtgctggagaacagtgtagcctggcctgtacaggtactggatgatctgcaagacaggctcagccatactcttactatcatgcagccaggggccgctgacatctaggacttcattattctataattcaggaccacagtggagtatgatccctaactcctgatttggatgcatctgagggacaaggggggcggtctccgaagtggaataaaataggccgggcgtggtgacttgcacctataatcccagcactttgggaggcagaggtgggaggattgcttggtcccaggagttcaagaccagcctgtggaacataacaagaccccgtctctactatttaaaaaaaagtgtaataaaatgataatataattatgtgtgtctgagatgtgggggagccccactgttctataggggttgtgaggaggatcagtctctcctgccaccaggcacagatgagatcagtcatcttaggaaagcctggctgcacctgagaacctttatgaagtggttggagttgtctgaattcactgcctccacctcttcccaaatcaatcctattatcccac

SEQ ID NO: 385578 - DNA, 3920 bp, Homo sapiens
ggcgccgccgccgccgcacttccgggtgccattgcaggatgcagaaagcctcagtgttgctcttcctggcctgggtctgcttcctcttctacgctggcattgccctcttcaccagtggcttcctgctcacccgtttggagctcaccaaccatagcagctgccaagagcccccaggccctgggtccctgccatgggggagccaagggaaacctggggcctgctggatggcttcccgattttcgcgggttgtgttggtgctgatagatgctctgcgatttgacttcgcccagccccagcattcacacgtgcctagagagcctcctgtctccctacccttcctgggcaaactaagctccttgcagaggatcctggagattcagccccaccatgcccggctctaccgatctcaggttgaccctcctaccaccaccatgcagcgcctcaaggccctcaccactggctcactgcctacctttattgatgctggtagtaacttcgccagccacgccatagtggaagacaatctcattaagcagctcaccagtgcaggaaggcgtgtagtcttcatgggagatgatacctggaaagaccttttccctggtgctttctccaaagctttcttcttcccatccttcaatgtcagagacctagacacagtggacaatggcatcctggaacacctctaccccaccatggacagtggtgaatgggacgtgctgattgctcacttcctgggtgtggaccactgtggccacaagcatggccctcaccaccctgaaatggccaagaaacttagccagatggaccaggtgatccagggacttgtggagcgtctggagaatgacacactgctggtagtggctggggaccatgggatgaccacaaatggagaccatggaggggacagtgagctggaggtctcagctgctctctttctgtatagccccacagcagtcttccccagcaccccaccagaggtgaggcctgggatgttcctcatctgttctcccagtaatcagcccatgttaccattacagcatcctcatgaatacctctattttaggcccccaaatccatgatcctgggtatcctccactctcatttcttacctaggcccctatgtctgccatcccaaacattgacttcagctttgtgatgaatctgttgaccactgtcaattttcctttaggagccagaggtgattcctcaagttagccttgtgcccacgctggccctgctgctgggcctgcccatcccatttgggaatatcggggaagtgatggctgagctattctcagggggtgaggactcccagccccactcctctgctttagcccaagcctcagctctccatctcaatgctcagcaggtgtcccgatttcttcatacctactcagctgctactcaggaccttcaagctaaggagcttcatcagctgcagaacctcttctccaaggcctctgctgactaccagtggcttctccagagccccaagggggctgaggcgacactgccgactgtgattgctgagctgcagcagttcctgcggggagctcgggccatgtgcatcgagtcttgggctcgtttctctctggtccgcatggcggggggtactgctctcttggctgcttcctgctttatctgcctgctggcatctcagtgggcaatatccccaggctttccattctgccctctactcctgacacctgtggcctggggcctggttggggccatagcgtatgctggactcctgggaactattgagctgaagctagatctagtgcttctaggggctgtggctgcagtgagctcattcctcccttttctgtggaaagcctgggctggctgggggtccaagaggcccctggcaaccctgtttcccatccctgggcccgtcctgttactcctgctgtttcgcttggctgtgttcttctctgatagttttgttgtagctgaggccagggccacccccttccttttgggctcattcatcctgctcctggttgtccagcttcactgggagggccagctgcttccacctaagctactcacaatgccccgccttggcacttcagccacaacaaaccccccacggcacaatggtgcatatgccctgaggcttggaattgggttgcttttatgtacaaggctagctgggctttttcatcgttgccctgaagagacacctgtttgccactcctctccctggctgagtcctctggcatccatggtgggtggtcgagccaagaatttgtggtatggagcttgtgtggcggcgctggtggccctgttagctgccgtgcgcttgtggcttcgccgctatggtaatctcaagagccccgagccacccatgctctttgtgcgctggggactgcccctaatggcattgggtactgctgcctactgggcattggcgtcgggggcagatgaggctcccccccgtctccgggtcctggtctctggggcatccatggtgctgcctcgggctgtagcagggctggctgcttcagggctcgcgctgctgctctggaagcctgtgacagtgctggtgaaggctggggcaggcgctccaaggaccaggactgtcctcactcccttctcaggcccccccacttctcaagctgacttggattatgtggtccctcaaatctaccgacacatgcaggaggagttccggggccggttagagaggaccaaatctcagggtcccctgactgtggctgcttatcagttggggagtgtctactcagctgctatggtcacagccctcaccctgttggccttcccacttctgctgttgcatgcggagcgcatcagccttgtgttcctgcttctgtttctgcagagcttccttctcctacatctgcttgctgctgggatacccgtcaccacccctggtccttttactgtgccatggcaggcagtctcggcttgggccctcatggccacacagaccttctactccacaggccaccagcctgtctttccagccatccattggcatgcagccttcgtgggattcccagagggtcatggctcctgtacttggctgcctgctttgctagtgggagccaacacctttgcctcccacctcctctttgcagtaggttgcccactgctcctgctctggcctttcctgtgtgagagtcaagggctgcggaagagacagcagcccccagggaatgaagctgatgccagagtcagacccgaggaggaagaggagccactgatggagatgcggctccgggatgcgcctcagcacttctatgcagcactgctgcagctgggcctcaagtacctctttatccttggtattcagattctggcctgtgccttggcagcctccatccttcgcaggcatctcatggtctggaaagtgtttgcccctaagttcatatttgaggctgtgggcttcattgtgagcagcgtgggacttctcctgggcatagctttggtgatgagagtggatggtgctgtgagctcctggttcaggcagctatttctggcccagcagaggtagcctagtctgtgattactggcacttggctacagagagtgctggagaacagtgtagcctggcctgtacaggtactggatgatctgcaagacaggctcagccatactcttactatcatgcagccaggggccgctgacatctaggacttcattattctataattcaggaccacagtggagtatgatccctaactcctgatttggatgcatctgagggacaaggggggcggtctccgaagtggaataaaataggccgggcgtggtgacttgcacctataatcccagcactttgggaggcagaggtgggaggattgcttggtcccaggagttcaagaccagcctgtggaacataacaagaccccgtctctactatttaaaaaaaagtgtaataaaatgataatata

SEQ ID NO: 385579 - DNA, 3000 bp, Homo sapiens
ggcgccgccgccgccgcacttccgggtgccattgcaggatgcagaaagcctcagtgttgctcttcctggcctgggtctgcttcctcttctacgctggcattgccctcttcaccagtggcttcctgctcacccgtttggagctcaccaaccatagcagctgccaagagcccccaggccctgggtccctgccatgggggagccaagggaaacctggggcctgctggatggcttcccgattttcgcgggttgtgttggtgctgatagatgctctgcgatttgacttcgcccagccccagcattcacacgtgcctagagagcctcctgtctccctacccttcctgggcaaactaagctccttgcagaggatcctggagattcagccccaccatgcccggctctaccgatctcaggttgaccctcctaccaccaccatgcagcgcctcaaggccctcaccactggctcactgcctacctttattgatgctggtagtaacttcgccagccacgccatagtggaagacaatctcattaagcagctcaccagtgcaggaaggcgtgtagtcttcatgggagatgatacctggaaagaccttttccctggtgctttctccaaagctttcttcttcccatccttcaatgtcagagacctagacacagtggacaatggcatcctggaacacctctaccccaccatggacagtggtgaatgggacgtgctgattgctcacttcctgggtgtggaccactgtggccacaagcatggccctcaccaccctgaaatggccaagaaacttagccagatggaccaggtgatccagggacttgtggagcgtctggagaatgacacactgctggtagtggctggggaccatgggatgaccacaaatggagaccatggaggggacagtgagctggaggtctcagctgctctctttctgtatagccccacagcagtcttccccagcaccccaccagaggagccagaggtgattcctcaagttagccttgtgcccacgctggccctgctgctgggcctgcccatcccatttgggaatatcggggaagtgatggctgagctattctcagggggtgaggactcccagccccactcctctgctttagcccaagcctcagctctccatctcaatgctcagcaggtgtcccgatttcttcatacctactcagctgctactcaggaccttcaagctaaggagcttcatcagctgcagaacctcttctccaaggcctctgctgactaccagtggcttctccagagccccaagggggctgaggcgacactgccgactgtgattgctgagctgcagcagttcctgcggggagctcgggccatgtgcatcgagtcttgggctcgtttctctctggtccgcatggcggggggtactgctctcttggctgcttcctgctttatctgcctgctggcatctcagtgggcaatatccccaggctttccattctgccctctactcctgacacctgtggcctggggcctggttggggccatagcgtatgctggactcctgggaactattgagctgaagctagatctagtgcttctaggggctgtggctgcagtgagctcattcctcccttttctgtggaaagcctgggctggctgggggtccaagaggcccctggcaaccctgtttcccatccctgggcccgtcctgttactcctgctgtttcgcttggctgtgttcttctctgatagttttgttgtagctgaggccagggccacccccttccttttgggctcattcatcctgctcctggttgtccagcttcactgggagggccagctgcttccacctaagctactcacaatgccccgccttggcacttcagccacaacaaaccccccacggcacaatggtgcatatgccctgaggcttggaattgggttgcttttatgtacaaggctagctgggctttttcatcgttgccctgaagagacacctgtttgccactcctctccctggctgagtcctctggcatccatggtgggtggtcgagccaagaatttgtggtatggagcttgtgtggcggcgctggtggccctgttagctgccgtgcgcttgtggcttcgccgctatggtaatctcaagagccccgagccacccatgctctttgtgcgctggggactgcccctaatggcattgggtactgctgcctactgggcattggcgtcgggggcagatgaggctcccccccgtctccgggtcctggtctctggggcatccatggtgctgcctcgggctgtagcagggctggctgcttcagggctcgcgctgctgctctggaagcctgtgacagtgctggtgaaggctggggcaggcgctccaaggaccaggactgtcctcactcccttctcaggcccccccacttctcaagctgacttggattatgtggtccctcaaatctaccgacacatgcaggaggagttccggggccggttagagaggaccaaatctcagggtcccctgactgtggctgcttatcagttggggagtgtctactcagctgctatggtcacagccctcaccctgttggccttcccacttctgctgttgcatgcggagcgcatcagccttgtgttcctgcttctgtttctgcagagcttccttctcctacatctgcttgctgctgggatacccgtcaccacccctggtaaatatctcagctctgattcacttaaagacaatagtgatgtgagttcggcccctcttgttttcaaggaggtgttgctcctcatgttcctgagcttgacagagggtcccatgccccacacaactaggaaggtcttcttggtgtcctctctcttacctgccatagccaagcaaattgatccctcctgttggttcccagggttcatggagaggagagacaaggagtcctctaagactccctgtggaaatgctgcatcctcatgagcacatttcttgattttccagtgatggaagtagtaaattgtgaatatataat

SEQ ID NO: 385580 - DNA, 2555 bp, Homo sapiens
ggcgccgccgccgccgcacttccgggtgccattgcaggatgcagaaagcctcagtgttgctcttcctggcctgggtctgcttcctcttctacgctggcattgccctcttcaccagtggcttcctgctcacccgtttggagctcaccaaccatagcagctgccaagagcccccaggccctgggtccctgccatgggggagccaagggaaacctggggcctgctggatggcttcccgattttcgcgggttgtgttggtgctgatagatgctctgcgatttgacttcgcccagccccagcattcacacgtgcctagagagcctcctgtctccctacccttcctgggcaaactaagctccttgcagaggatcctggagattcagccccaccatgcccggctctaccgatctcaggttgaccctcctaccaccaccatgcagcgcctcaaggccctcaccactggctcactgcctacctttattgatgctggtagtaacttcgccagccacgccatagtggaagacaatctcattaagcagctcaccagtgcaggaaggcgtgtagtcttcatgggagatgatacctggaaagaccttttccctggtgctttctccaaagctttcttcttcccatccttcaatgtcagagacctagacacagtggacaatggcatcctggaacacctctaccccaccatggacagtggtgaatgggacgtgctgattgctcacttcctgggtgtggaccactgtggccacaagcatggccctcaccaccctgaaatggccaagaaacttagccagatggaccaggtgatccagggacttgtggagcgtctggagaatgacacactgctggtagtggctggggaccatgggatgaccacaaatggagaccatggaggggacagtgagctggaggtctcagctgctctctttctgtatagccccacagcagtcttccccagcaccccaccagaggagccagaggtgattcctcaagttagccttgtgcccacgctggccctgctgctgggcctgcccatcccatttgggaatatcggggaagtgatggctgagctattctcagggggtgaggactcccagccccactcctctgctttagcccaagcctcagctctccatctcaatgctcagcaggtgtcccgatttcttcatacctactcagctgctactcaggaccttcaagctaaggagcttcatcagctgcagaacctcttctccaaggcctctgctgactaccagtggcttctccagagccccaagggggctgaggcgacactgccgactgtgattgctgagctgcagcagttcctgcggggagctcgggccatgtgcatcgagtcttgggctcgtttctctctggtccgcatggcggggggtactgctctcttggctgcttcctgctttatctgcctgctggcatctcagtgggcaatatccccaggctttccattctgccctctactcctgacacctgtggcctggggcctggttggggccatagcgtatgctggactcctgggaactattgagctgaagctagatctagtgcttctaggggctgtggctgcagtgagctcattcctcccttttctgtggaaagcctgggctggctgggggtccaagaggcccctggcaaccctgtttcccatccctgggcccgtcctgttactcctgctgtttcgcttggctgtgttcttctctgatagttttgttgtagctgaggccagggccacccccttccttttgggctcattcatcctgctcctggttgtccagcttcactgggagggccagctgcttccacctaagctactcacaatgccccgccttggcacttcagccacaacaaaccccccacggcacaatggtgcatatgccctgaggcttggaattgggttgcttttatgtacaaggctagctgggctttttcatcgttgccctgaagagacacctgtttgccactcctctccctggctgagtcctctggcatccatggtgggtggtcgagccaagaatttgtggtatggagcttgtgtggcggcgctggtggccctgttagctgccgtgcgcttgtggcttcgccgctatggtaatctcaagagccccgagccacccatgctctttgtgcgctggggactgcccctaatggcattgggtactgctgcctactgggcattggcgtcgggggcagatgaggctcccccccgtctccgggtcctggtctctggggcatccatggtgctgcctcgggctgtagcagggctggctgcttcagggctcgcgctgctgctctggaagcctgtgacagtgctggtgaaggctggggcaggcgctccaaggaccaggactgtcctcactcccttctcaggcccccccacttctcaagctgagtgacttgcacctataatcccagcactttgggaggcagaggtgggaggattgcttggtcccaggagttcaagaccagcctgtggaacataacaagaccccgtctctactatttaaaaaaaagtgtaataaaatgataatata

SEQ ID NO: 385581 - DNA, 1987 bp, Homo sapiens
gtacatggtggtggcaagagaaaatgaagaagaagcaaaagtggaaacccctgataaacccatcagatcctcatgagaccttactatcatgagaaatagcacaggaaagactggcccccccctgattcgatgaccctccccccgggtcccctccccacaacatgtgggaattcccagaagataaattcaagttgcaatttcagtggggacatagccaaaccatatcactggtgatgccacttcttcagtattagggattctcagtcagaagagaccccctgtgtggcctgagtcccctcaggaggaaggtggacaacagagaaatgagagttttgatattttctgaaagaggaacatgtgttagagatgaagaatcttccaaggctcatgcagttgcttagaataatcattactgttatatgagaaacattttagtaatttaataaaaggataatgtttatttaaaaaacctgacttttccagagtaattttgttttgcacattcatgtttattgaagtggactaatttctataatgcaaatcagagttaaatattaaaaattgtgtaaatacaattgacataggaattacattaaaatattaggaagaaacaaggacaaatttagaccttgaatccgaagagataaagcttacttgactttcaaatggagagatgatgaaaacccactcattcagtctttcagaacaaaaagacagtcatctgataagagtatgacatggatgaaatgccctacaggggccttggacatctttaatttctgcgattatgtgaaagaggtggactttacagataatggagcagaagccaacattagtaaaaggaatcccaacttcttcccatagaattagaaacatgtgaaagtacaataaacttcttgttcaaattaccagcatcagagagcttcccatttgcatctagaccttgaatttatatttattgatcaagttctaatttgtatgtatattttgtgcatattcaccaataacagttaaaattaattatgtgttatagttaatatatgcacctaccttcttccgttagtgcatcagtaaatgtgttattttgtcatttttccaaagagagtgttgtaggttttccctgtagttcttcctttatagcttttcttctgataaccatgacttcaggagctttaaaactatctatcttgcatttgtgtctggcggagaactagccatcagcctcctgaagcctgccatcattgttaatttgaggactgggctgtcttggggctcagaaggtaaagaactatttgagcagatgtgtgtgggtggcactggattccacccaactgccaagttagtattgttagagatttcattttacaacacaaaaataagcctgtgtcaaagattttaaaatcatggaaagttaaaatctagaaagaccttagagaaccagccaaccaactctctcattttaaaagtgaaggattcatagcacagattacttgcctaagatcatccaggaacgaagacaagaatccaaatgtacttggggacaagaattagtccccaaattcagtgttcttcctagtattaaacattgcccctttcgacaaattttggatttcattcttgttatatttcagtactcttgctgatttattttaggtttaactggtaaagaatgaacatttcagaagtgttaggattagtcagtgtcatcgcttatgtatatgaatcacttgccaaagacactggctctcctcagctgtaaccagcatgtcaaatgtgaagattattgtgtgggatcctttggtttcattgttatgatgtattttataaatgtactagttatatccttgtttatgtatttttgctgatctttcataaagcagaatggtatgtatcggattgttttaatgttatatattggattgtattcgatgttacaaaaccaatattctatggagaatgaaaaaaataaaggactaaattaactgga

SEQ ID NO: 385582 - DNA, 1933 bp, Homo sapiens
gtacatggtggtggcaagagaaaatgaagaagaagcaaaagtggaaacccctgataaacccatcagatcctcatgagaccttactatcatgagaaatagcacaggaaagactggcccccccctgattcgatgaccctccccccgggtcccctccccacaacatgtgggaattcccagaagataaattcaagttgcaatttcagtggggacatagccaaaccatatcactggtgatgccacttcttcagtattagggattctcagtcagaagagaccccctgtgtggcctgagtcccctcaggaggaaggtggacaacagagaaatgagagttttgatattttctgaaagaggaacatgtgttagagatgaagaatcttccaaggctcatgcagttgcttagaataatcattactgttatatgagaaacattttagtaatttaataaaaggataatgtttatttaaaaaacctgacttttccagagtaattttgttttgcacattcatgtttattgaagtggactaatttctataatgcaaatcagagttaaatattaaaaattgtgtaaatacaattgacataggaattacattaaaatattaggaagaaacaaggacaaatttagaccttgaatccgaagagataaagcttacttgactttcaaatggagagatgatgaaaacccactcattcagtctttcagaacaaaaagacagtcatctgataagagtatgacatggatgaaatgccctacaggggccttggacatctttaatttctgcgattatgtgaaagaggtggactttacagataatggagcagaagccaacattagtaaaaggaatcccaacttcttcccatagaattagaaacatgtgaaagtacaataaacttcttgttcaaattaccagcatcagagagcttcccatttgcatctagaccttgaatttatatttattgatcaagttctaatttgtatgtatattttgtgcatattcaccaataacagttaaaattaattatgtgttatagttaatatatgcacctaccttcttccgttagtgcatcagtaaatgtgttattttgtcatttttccaaagagagtgttgtaggttttccctgtagttcttcctttatagcttttcttctgataaccatgacttcaggagctttaaaactgccatcattgttaatttgaggactgggctgtcttggggctcagaaggtaaagaactatttgagcagatgtgtgtgggtggcactggattccacccaactgccaagttagtattgttagagatttcattttacaacacaaaaataagcctgtgtcaaagattttaaaatcatggaaagttaaaatctagaaagaccttagagaaccagccaaccaactctctcattttaaaagtgaaggattcatagcacagattacttgcctaagatcatccaggaacgaagacaagaatccaaatgtacttggggacaagaattagtccccaaattcagtgttcttcctagtattaaacattgcccctttcgacaaattttggatttcattcttgttatatttcagtactcttgctgatttattttaggtttaactggtaaagaatgaacatttcagaagtgttaggattagtcagtgtcatcgcttatgtatatgaatcacttgccaaagacactggctctcctcagctgtaaccagcatgtcaaatgtgaagattattgtgtgggatcctttggtttcattgttatgatgtattttataaatgtactagttatatccttgtttatgtatttttgctgatctttcataaagcagaatggtatgtatcggattgttttaatgttatatattggattgtattcgatgttacaaaaccaatattctatggagaatgaaaaaaataaaggactaaattaactgga

SEQ ID NO: 385583 - DNA, 2081 bp, Homo sapiens
gtacatggtggtggcaagagaaaatgaagaagaagcaaaagtggaaacccctgataaacccatcagatcctcatgagaccttactatcatgagaaatagcacaggaaagactggcccccccctgattcgatgaccctccccccgggtcccctccccacaacatgtgggaattcccagaagataaattcaagttgcaatttcagtggggacatagccaaaccatatcactggtgatgccacttcttcagtattagggattctcagtcagaagagaccccctgtgtggcctgagtcccctcaggaggaaggtggacaacagagaaatgagagttttgatattttctgaaagaggaacatgtgttagagatgaagaatcttccaaggctcatgcagttgcttagaataatcattactgttatatgagaaacattttagtaatttaataaaaggataatgtttatttaaaaaacctgacttttccagagtaattttgttttgcacattcatgtttattgaagtggactaatttctataatgcaaatcagagttaaatattaaaaattgtgtaaatacaattgacataggaattacattaaaatattaggaagaaacaaggacaaatttagaccttgaatccgaagagataaagcttacttgactttcaaatggagagatgatgaaaacccactcattcagtctttcagaacaaaaagacagtcatctgataagagtatgacatggatgaaatgccctacaggggccttggacatctttaatttctgcgattatgtgaaagaggtggactttacagataatggagcagaagccaacattagtaaaaggaatcccaacttcttcccatagaattagaaacatgtgaaagtacaataaacttcttgttcaaattaccagcatcagagagcttcccatttgcatctagaccttgaatttatatttattgatcaagttctaatttgtatgtatattttgtgcatattcaccaataacagttaaaattaattatgtgttatagttaatatatgcacctaccttcttccgttagtgcatcagtaaatgtgttattttgtcatttttccaaagagagtgttgtaggttttccctgtagttcttcctttatagcttttcttctgataaccatgacttcaggagctttaaaactatctatcttgcatttgtgtctggcggagaactagccatcagcctcctgaagcctgccatcattgttaatttgaggactgggctgtcttggggctcagaaggtaaagaactatttgagcagatgtgtgtgggtggcactggattccacccaactgccaagttagtattgttagagatttcattttacaacacaaaaataagcctgtgtcaaagattttaaaatcatggaaagttaaaatctagaaagaccttagagaaccagccaaccaactctctcattttaaaagtgaaggattcatagcacagattacttgcctaagatcatccaggaacgaagacaagaatccaaatgtacttggggacaagaattagtccccaaattcagtgttcttcctagtattaaacattgcccctttcgacaaattttggatttcattcttgttatatttcagtactcttgctgatttattttaggtttaactggtaaagaatgaacatttcagaagtgttaggattagtcagtgtcatcgcttatgtatatgaatcacttgccaaagacactggctctcctcagctgtaaccagcatgtcaaatgtgaagattattgtgtgggatcctttggtttcattgttatgatgtattttataaatgtactagttatatccttgtttatgtatttttgctgatctttcataaagcagaatggtatgtatcggattgttttaatgttatatattggattgtattcgatgttacaaaaccaatattctatggagaatgaaaaaaataaaggactaaattaactggaaaaaaaagaacctcaactcgagggggggcccggacccaatttgccctataggagtggattacaattactgggccgcgtttacacgtcgggtggg

SEQ ID NO: 385584 - DNA, 1957 bp, Homo sapiens
gtacatggtggtggcaagagaaaatgaagaagaagcaaaagtggaaacccctgataaacccatcagatcctcatgagaccttactatcatgagaaatagcacaggaaagactggcccccccctgattcgatgaccctccccccgggtcccctccccacaacatgtgggaattcccagaagataaattcaagttgcaatttcagtggggacatagccaaaccatatcactggtgatgccacttcttcagtattagggattctcagtcagaagagaccccctgtgtggcctgagtcccctcaggaggaaggtggacaacagagaaatgagagttttgatattttctgaaagaggaacatgtgttagagatgaagaatcttccaaggctcatgcagttgcttagaataatcattactgttatatgagaaacattttagtaatttaataaaaggataatgtttatttaaaaaacctgacttttccagagtaattttgttttgcacattcatgtttattgaagtggactaatttctataatgcaaatcagagttaaatattaaaaattgtgtaaatacaattgacataggaattacattaaaatattaggaagaaacaaggacaaatttagaccttgaatccgaagagataaagcttacttgactttcaaatggagagatgatgaaaacccactcattcagtctttcagaacaaaaagacagtcatctgataagagtatgacatggatgaaatgccctacaggggccttggacatctttaatttctgcgattatgtgaaagaggtggactttacagataatggagcagaagccaacattagtaaaaggaatcccaacttcttcccatagaattagaaacatgtgaaagtacaataaacttcttgttcaaattaccagcatcagagagcttcccatttgcatctagaccttgaatttatatttattgatcaagttctaatttgtatgtatattttgtgcatattcaccaataacagttaaaattaattatgtgttatagttaatatatgcacctaccttcttccgttagtgcatcagtaaatgtgttattttgtcatttttccaaagagagtgttgtaggttttccctgtagttcttcctttatagcttttcttctgataaccatgacttcaggagctttaaaactatctatcttgcatttgtgtctggcggagaactagccatcagcctcctgaagcctgccatcattgttaatttgaggactgggctgtcttggggctcagaaggtaaagaactatttgagcagatgtgtgtgggtggcactggattccacccaactgccaagttagtattgttagagatttcattttacaacacaaaaataagcctgtgtcaaagattttaaaatcatggaaagttaaaatctagaaagaccttagagaaccagccaaccaactctctcattttaaaagtgaaggattcatagcacagattacttgcctaagatcatccaggaacgaagacaagaatccaaattcagtgttcttcctagtattaaacattgcccctttcgacaaattttggatttcattcttgttatatttcagtactcttgctgatttattttaggtttaactggtaaagaatgaacatttcagaagtgttaggattagtcagtgtcatcgcttatgtatatgaatcacttgccaaagacactggctctcctcagctgtaaccagcatgtcaaatgtgaagattattgtgtgggatcctttggtttcattgttatgatgtattttataaatgtactagttatatccttgtttatgtatttttgctgatctttcataaagcagaatggtatgtatcggattgttttaatgttatatattggattgtattcgatgttacaaaaccaatattctatggagaatgaaaaaaataaaggactaaattaactgga

SEQ ID NO: 385585 - DNA, 2064 bp, Homo sapiens
gtacatggtggtggcaagagaaaatgaagaagaagcaaaagtggaaacccctgataaacccatcagatcctcatgagaccttactatcatgagaaatagcacaggaaagactggcccccccctgattcgatgaccctccccccgggtcccctccccacaacatgtgggaattcccagaagataaattcaagttgcaatttcagtggggacatagccaaaccatatcactggtgatgccacttcttcagtattagggattctcagtcagaagagaccccctgtgtggcctgagtcccctcaggaggaaggtggacaacagagaaatgagagttttgatattttctgaaagaggaacatgtgttagagatgaagaatcttccaaggctcatgcagttgcttagaataatcattactgttatatgagaaacattttagtaatttaataaaaggataatgtttatttaaaaaacctgacttttccagagtaattttgttttgcacattcatgtttattgaagtggactaatttctataatgcaaatcagagttaaatattaaaaattgtgtaaatacaattgacataggaattacattaaaatattaggaagaaacaaggacaaatttagaccttgaatccgaagagataaagcttacttgactttcaaatggagagatgatgaaaacccactcattcagtctttcagaacaaaaagacagtcatctgataagagtatgacatggatgaaatgccctacaggggccttggacatctttaatttctgcgattatgtgaaagaggtggactttacagataatggagcagaagccaacattagtaaaaggaatcccaacttcttcccatagaattagaaacatgtgaaagtacaataaacttcttgttcaaattaccagcatcagagagcttcccatttgcatctagaccttgaatttatatttattgatcaagttctaatttgtatgtatattttgtgcatattcaccaataacagttaaaattaattatgtgttatagttaatatatgcacctaccttcttccgttagtgcatcagtaaatgtgttattttgtcatttttccaaagagagtgttgtaggttttccctgtagttcttcctttatagcttttcttctgataaccatgacttcaggagctttaaaactatctatcttgcatttgtgtctggcggagaactagccatcagcctcctgaagcctgccatcattgttaatttgaggactgggctgtcttggggctcagaaggtaaagaactatttgagcagatgtgtgtgggtggcactggattccacccaactgccaagttagtattgttagagatttcattttacaacacaaaaataagcctgtgtcaaagattttaaaatcatggaaagttaaaatctagaaagaccttagagaaccagccaaccaactctctcattttaaaagtgaaggattcatagcacagattacttgcctaagatcatccaggaacgaagacaagaatccaaatgtacttggggacaagaattagtccccaaattcagtgttcttcctagtattaaacattgcccctttcgacaaattttggatttcattcttgttatatttcagtactcttgctgatttattttaggtttaactggtaaagaatgaacatttcagaagtgttaggattagtcagtgtcatcgcttatgtatatgaatcacttgccaaagacactggctctcctcagctgtaaccagcatgtcaaatgtgaagattattgtgtgggatcctttggtttcattgttatgatgtattttataaatgtactagttatatccttgtttatgtatttttgctgatctttcataaagcagaatggtatgtatcggattgttttaatgttatatattggattgtattcgatgttacaaaaccaatattctatggagaatgaaaaaaataaaggactaaattaactggagatttttggtactcttataaagcaaaattgtttgttatacatacagatgaaataagaaaataatgtaatctttctgt

SEQ ID NO: 385586 - DNA, 426 bp, Homo sapiens
actttctgtctctatgaagttgtctactctagtaacctcatataagtgaaatcacgtatttgtctttctgtgactggcttatttcacttagcataatgtcctcaatgtttatccatgttatagcatgtgtcacaatttccttcctttaaaaaaattgaataatgtcccattgtgtttatatgccacattttgtatatccattcattcattcgatacttgggttgcttccaccttttgtcttgcccttgtttttgagaggttaatccatctatgaggtcctccaggcatcaaaagagttccccagttccctactttggagaagttcactatccctagcaaagatgcaaagaacagatacatgaaaaagtaaatcatggtgcaaaagttgtatgagacaacactttaagatgtatcctatgagcgtag

SEQ ID NO: 385587 - DNA, 908 bp, Homo sapiens
tgaaagaggatggcaatctcgctgaagctgtttctttttcttcacaacatataggaaagtgttgcccctttttggagaaagtaacaacctccaccaacactacttgaatcagtactgaacgaatgtcaggtccttgggaaattctccaatcctgtctcctgtcctggccgggtgtgctcctggtgcaccattcgactaagtcaatttgaactatttgggagacctttgtacctacgtttccttctgcttggaagatcctttctgttttgtcagctcttacttccatgttgtggaaaactgatctgacctcctagtcctgaatcaggggccataaagaaaattgatgaggacaactggcctcccagtatgtggattcagtttccatatgtcaatttaccaactcccactggtagtctgaagagatatggctactggagaacagaaaatcaccagtattaataaaagcaattttaagtgtttaccttttagtatttgaatagctttgttaaagagacgtactcaagaatactatgaagagactcttattgtactccttacctggagataattgtgatgccagaaattcaaatttatattcaacaatatggtttttcaaccatcaatattataaacatctaggcagtgtctattgtttgcgcatttgccatcctctaaaatgagattattctaagcataaattatacttcatcattcaagattataaacatttataataatcataatattcacagacatttccctgctctcaaatcactagagctaataggcaaagtagatacagctacaaacagtgggagaaaatatttctggctgacctacaaatagctgtgcaataatgtagagaggaaaatatagtctcacttacagtgtctgaaattgagtttccc

SEQ ID NO: 385588 - DNA, 191 bp, Homo sapiens
ggaaagagttatttcatggaaagcctttagcttttttctgtgaaaactaaggacaattaaatgtaggtaagttagactgtaaatagccattgtaataatagtatacaattttattttattcacaagttctatattatttaataatgtcatacattgcatttattaaataaaaattaatctggttcctgtga

SEQ ID NO: 385589 - DNA, 3244 bp, Homo sapiens
gcggaggaaggggaccgcttgggggcactgggaagccagggatcctccgccaggaaggcagggacactcccgagcgcaggcgagaaggctgggggagggggcgcggtgggaggagtaggagaagacaaaagccgaaagcgaagagggcccgggctgcacacaccggctgggaggcagccgtctgtgcagcgagcagccggcgcggggaggccgcagtgcacggggcgtcacagtcggcaggcagcatggggaagggagggaaccagggcgagggggccgccgagcgcgaggtgtcggtgcccaccttcagctgggaggagattcagaagcataacctgcgcaccgacaggtggctggtcattgaccgcaaggtttacaacatcaccaaatggtccatccagcacccggggggccagcgggtcatcgggcactacgctggagaagatgcaacggatgccttccgcgccttccaccctgacctggaattcgtgggcaagttcttgaaacccctgctgattggtgaactggccccggaggagcccagccaggaccacggcaagaactcaaagatcactgaggacttccgggccctgaggaagacggctgaggacatgaacctgttcaagaccaaccacgtgttcttcctcctcctcctggcccacatcatcgccctggagagcattgcatggttcactgtcttttactttggcaatggctggattcctaccctcatcacggcctttgtccttgctacctctcaggcccaagctggatggctgcaacatgattatggccacctgtctgtctacagaaaacccaagtggaaccaccttgtccacaaattcgtcattggccacttaaagggtgcctctgccaactggtggaatcatcgccacttccagcaccacgccaagcctaacatcttccacaaggatcccgatgtgaacatgctgcacgtgtttgttctgggcgaatggcagcccatcgagtacggcaagaagaagctgaaatacctgccctacaatcaccagcacgaatacttcttcctgattgggccgccgctgctcatccccatgtatttccagtaccagatcatcatgaccatgatcgtccataagaactgggtggacctggcctgggccgtcagctactacatccggttcttcatcacctacatccctttctacggcatcctgggagccctccttttcctcaacttcatcaggttcctggagagccactggtttgtgtgggtcacacagatgaatcacatcgtcatggagattgaccaggaggcctaccgtgactggttcagtagccagctgacagccacctgcaacgtggagcagtccttcttcaacgactggttcagtggacaccttaacttccagattgagcaccacctcttccccaccatgccccggcacaacttacacaagatcgccccgctggtgaagtctctatgtgccaagcatggcattgaataccaggagaagccgctactgagggccctgctggacatcatcaggtccctgaagaagtctgggaagctgtggctggacgcctaccttcacaaatgaagccacagcccccgggacaccgtggggaaggggtgcaggtggggtgatggccagaggaatgatgggcttttgttctgaggggtgtccgagaggctggtgtatgcactgctcacggaccccatgttggatctttctccctttctcctctcctttttctcttcacatctcccccatagcaccctgccctcatgggacctgccctccctcagccgtcagccatcagccatggccctcccagtgcctcctagccccttcttccaaggagcagagaggtggccaccgggggtggctctgtcctacctccactctctgcccctaaagatgggaggagaccagcggtccatgggtctggcctgtgagtctccccttgcagcctggtcactaggcatcacccccgctttggttcttcagatgctcttggggttcataggggcaggtcctagtcgggcagggcccctgaccctcccggcctggcttcactctccctgacggctgccattggtccaccctttcatagagaggcctgctttgttacaaagctcgggtctccctcctgcagctcggttaagtacccgaggcctctcttaagatgtccaggccccaggcccgcgggcacagccagcccaaaccttgggccctggaagagtcctccaccccatcactagagtgctctgaccctgggctttcacgggccccattccaccgcctccccaacttgagcctgtgaccttgggaccaaagggggagtccctcgtctcttgtgactcagcagaggcagtggccacgttcagggaggggccggctggcctggaggctcagcccaccctccagcttttcctcagggtgtcctgaggtccaagattctggagcaatctgacccttctccaaaggctctgttatcagctgggcagtgccagccaatccctggccatttggccccaggggacgtgggccctgcaggctgcaggagggcactggagctgggaggtctcgtcccagccctccccatctcggggctgctgtgtggacggcgctgcctcaggcactctcctgtctgaacctgcccttactgtgtttaacctgttgctccaggatgcattctgataggagggggcggcagggctgggccttgtgacaatctgcctttcaccacatggccttgcctcggtggccctgactgtcagggagggccagggaggcagagcgggagggagtctcaggaggaggctgccctgaggggctggggagggggtacctcatgaggaccagggtggagctgagaagaggaggaggtgggggctggaggtgctggtagctgaggggacgggcaagtgagaggggagggagggaagtcctgggaggatcctgagctgctgttgcagtctaacccactaatcagttcttagattcaggggaagggcaggcaccaacaactcagaatgggggctttcggggagggcgcctagtccccccagctctaagcagccaggagggacctgcatctaagcatctgggttgccatggcaatggcatgccccccagctactgtatgcccccgacccccgcagaggcagaatgaacccatagggagctgatcgtaatgtttatcatgttacttccccacccctacattttttgaaataaaataaggaattttattctca

SEQ ID NO: 385590 - DNA, 690 bp, Homo sapiens
ggatggtggctgcaggatgggttggggaacatgggaggctgggagctgaggctactgggtgctcatgatctctcctctctcctcagtacggcaagaagaagctgaaatacctgccctacaatcaccagcacgaatacttcttcctgattgggccgccgctgctcatccccatgtatttccagtaccagatcatcatgaccatgatcgtccataagaactgggtggacctggcctgggccgtcagctactacatccggttcttcatcacctacatccctttctacggcatcctgggagccctccttttcctcaacttcatcaggttcctggagagccactggtttgtgtgggtcacacagatgaatcacatcgtcatggagattgaccaggaggcctaccgtgactggttcagtagccagctgacagccacctgcaacgtggagcagtccttcttcaacgactggttcagtggacaccttaacttccagattgagcaccaagctctaagcagccaggagggacctgcatctaagcatctgggttgccatggcaatggcatgccccccagctactgtatgcccccgacccccgcagaggcagaatgaacccatagggagctgatcgtaatgtttatcatgttacttccccacccctacattttttgaaataaaataaggaattttattctca

SEQ ID NO: 385591 - DNA, 286 bp, Homo sapiens
ggatggtggctgcaggatgggttggggaacatgggaggctgggagctgaggctactgggtgctcatgatctctcctctctcctcagtacggcaagaagaagctgaaatacctgccctacaatcaccagcacgaatacttcttcctgattgggccgccgctgctcatccccatgtatttccagtaccagatcatcatgaccatgatcgtccataagaactgggtggtgagttggggacacagctggcttggcatggggaggagggtgactgggacagggggacccgg

SEQ ID NO: 385592 - DNA, 3582 bp, Homo sapiens
gcggaggaaggggaccgcttgggggcactgggaagccagggatcctccgccaggaaggcagggacactcccgagcgcaggcgagaaggctgggggagggggcgcggtgggaggagtaggagaagacaaaagccgaaagcgaagagggcccgggctgcacacaccggctgggaggcagccgtctgtgcagcgagcagccggcgcggggaggccgcagtgcacggggcgtcacagtcggcaggcagcatggggaagggagggaaccagggcgagggggccgccgagcgcgaggtgtcggtgcccaccttcagctgggaggagattcagaagcataacctgcgcaccgacaggtggctggtcattgaccgcaaggtttacaacatcaccaaatggtccatccagcacccggggggccagcgggtcatcgggcactacgctggagaagatgcaacggatgccttccgcgccttccaccctgacctggaattcgtgggcaagttcttgaaacccctgctgattggtgaactggccccggaggagcccagccaggaccacggcaagaactcaaagatcactgaggacttccgggccctgaggaagacggctgaggacatgaacctgttcaagaccaaccacgtgttcttcctcctcctcctggcccacatcatcgccctggagagcattgcatggttcactgtcttttactttggcaatggctggattcctaccctcatcacggcctttgtccttgctacctctcaggcccaagctggatggctgcaacatgattatggccacctgtctgtctacagaaaacccaagtggaaccaccttgtccacaaattcgtcattggccacttaaagctctggttccacacctggtgacggagaggcagagactggctgccacacctgctggagcgctcaccgtgtggtccctcagcagcacgcctcatctgccaccatcgtcttatgatcagggaaactgaagcctagagagataaagtgacttcactccatctggggctggcgcatgctctgagctcagtcatggcagggctggattctggccttgtgggggcctgaagtgctatccccgagggttgaaggttccgggaactgctcctaagaagggcctgttacaagcgagctcggttccctggtggcttgcatggctcatccccacccctctctccccacagggtgcctctgccaactggtggaatcatcgccacttccagcaccacgccaagcctaacatcttccacaaggatcccgatgtgaacatgctgcacgtgtttgttctgggcgaatggcagcccatcgagtacggcaagaagaagctgaaatacctgccctacaatcaccagcacgaatacttcttcctgattgggccgccgctgctcatccccatgtatttccagtaccagatcatcatgaccatgatcgtccataagaactgggtggacctggcctgggccgtcagctactacatccggttcttcatcacctacatccctttctacggcatcctgggagccctccttttcctcaacttcatcaggttcctggagagccactggtttgtgtgggtcacacagatgaatcacatcgtcatggagattgaccaggaggcctaccgtgactggttcagtagccagctgacagccacctgcaacgtggagcagtccttcttcaacgactggttcagtggacaccttaacttccagattgagcaccacctcttccccaccatgccccggcacaacttacacaagatcgccccgctggtgaagtctctatgtgccaagcatggcattgaataccaggagaagccgctactgagggccctgctggacatcatcaggtccctgaagaagtctgggaagctgtggctggacgcctaccttcacaaatgaagccacagcccccgggacaccgtggggaaggggtgcaggtggggtgatggccagaggaatgatgggcttttgttctgaggggtgtccgagaggctggtgtatgcactgctcacggaccccatgttggatctttctccctttctcctctcctttttctcttcacatctcccccatagcaccctgccctcatgggacctgccctccctcagccgtcagccatcagccatggccctcccagtgcctcctagccccttcttccaaggagcagagaggtggccaccgggggtggctctgtcctacctccactctctgcccctaaagatgggaggagaccagcggtccatgggtctggcctgtgagtctccccttgcagcctggtcactaggcatcacccccgctttggttcttcagatgctcttggggttcataggggcaggtcctagtcgggcagggcccctgaccctcccggcctggcttcactctccctgacggctgccattggtccaccctttcatagagaggcctgctttgttacaaagctcgggtctccctcctgcagctcggttaagtacccgaggcctctcttaagatgtccaggccccaggcccgcgggcacagccagcccaaaccttgggccctggaagagtcctccaccccatcactagagtgctctgaccctgggctttcacgggccccattccaccgcctccccaacttgagcctgtgaccttgggaccaaagggggagtccctcgtctcttgtgactcagcagaggcagtggccacgttcagggaggggccggctggcctggaggctcagcccaccctccagcttttcctcagggtgtcctgaggtccaagattctggagcaatctgacccttctccaaaggctctgttatcagctgggcagtgccagccaatccctggccatttggccccaggggacgtgggccctgcaggctgcaggagggcactggagctgggaggtctcgtcccagccctccccatctcggggctgctgtgtggacggcgctgcctcaggcactctcctgtctgaacctgcccttactgtgtttaacctgttgctccaggatgcattctgataggagggggcggcagggctgggccttgtgacaatctgcctttcaccacatggccttgcctcggtggccctgactgtcagggagggccagggaggcagagcgggagggagtctcaggaggaggctgccctgaggggctggggagggggtacctcatgaggaccagggtggagctgagaagaggaggaggtgggggctggaggtgctggtagctgaggggacgggcaagtgagaggggagggagggaagtcctgggaggatcctgagctgctgttgcagtctaacccactaatcagttcttagattcaggggaagggcaggcaccaacaactcagaatgggggctttcggggagggcgcctagtccccccagctctaagcagccaggagggacctgcatctaagcatctgggttgccatggcaatggcatgccccccagctactgtatgcccccgacccccgcagaggcagaatgaacccatagggagctgatcgtaatgtttatcatgttacttccccacccctacattttttgaaataaaataaggaattttattctca

SEQ ID NO: 385593 - DNA, 3604 bp, Homo sapiens
gcggaggaaggggaccgcttgggggcactgggaagccagggatcctccgccaggaaggcagggacactcccgagcgcaggcgagaaggctgggggagggggcgcggtgggaggagtaggagaagacaaaagccgaaagcgaagagggcccgggctgcacacaccggctgggaggcagccgtctgtgcagcgagcagccggcgcggggaggccgcagtgcacggggcgtcacagtcggcaggcagcatggggaagggagggaaccagggcgagggggccgccgagcgcgaggtgtcggtgcccaccttcagctgggaggagattcagaagcataacctgcgcaccgacaggtggctggtcattgaccgcaaggtttacaacatcaccaaatggtccatccagcacccggggggccagcgggtcatcgggcactacgctggagaagatgcaacggatgccttccgcgccttccaccctgacctggaattcgtgggcaagttcttgaaacccctgctgattggtgaactggccccggaggagcccagccaggaccacggcaagaactcaaagatcactgaggacttccgggccctgaggaagacggctgaggacatgaacctgttcaagaccaaccacgtgttcttcctcctcctcctggcccacatcatcgccctggagagcattgcatggttcactgtcttttactttggcaatggctggattcctaccctcatcacggcctttgtccttgctacctctcaggcccaagctggatggctgcaacatgattatggccacctgtctgtctacagaaaacccaagtggaaccaccttgtccacaaattcgtcattggccacttaaagggtgcctctgccaactggtggaatcatcgccacttccagcaccacgccaagcctaacatcttccacaaggatcccgatgtgaacatgctgcacgtgtttgttctgggcgaatggcagcccatcgagtacggcaagaagaagctgaaatacctgccctacaatcaccagcacgaatacttcttcctgattgggccgccgctgctcatccccatgtatttccagtaccagatcatcatgaccatgatcgtccataagaactgggtggacctggcctgggccgtcagctactacatccggttcttcatcacctacatccctttctacggcatcctgggagccctccttttcctcaacttcatcaggttcctggagagccactggtttgtgtgggtcacacagatgaatcacatcgtcatggagattgaccaggaggcctaccgtgactggttcagtagccagctgacagccacctgcaacgtggagcagtccttcttcaacgactggttcagtggacaccttaacttccagattgagcaccacctcttccccaccatgccccggcacaacttacacaagatcgccccgctggtgaagtctctatgtgccaagcatggcattgaataccaggagaagccgctactgagggccctgctggacatcatcaggtgaggggtggaggtccacaggcgctgggccctgggatcacccgtggtgcagacagtgggatcacaagaggggctgggccctcctggcacagtcacccaccagggcacctgccttactcccgagcctgtgttaggagctgttgggcttttctccctgggctgcgagaagaccatccctttctgtgtggggttcctggtgggctctgagctgacagccccacaggcccagtggcagtggtaagccctggttagggccaaggggacatacatgccaccttaatgatggcctcctcagcccttgcactccctggggccactcccgtcctggtccctgaccctggtccatccccaactttgcaggtccctgaagaagtctgggaagctgtggctggacgcctaccttcacaaatgaagccacagcccccgggacaccgtggggaaggggtgcaggtggggtgatggccagaggaatgatgggcttttgttctgaggggtgtccgagaggctggtgtatgcactgctcacggaccccatgttggatctttctccctttctcctctcctttttctcttcacatctcccccatagcaccctgccctcatgggacctgccctccctcagccgtcagccatcagccatggccctcccagtgcctcctagccccttcttccaaggagcagagaggtggccaccgggggtggctctgtcctacctccactctctgcccctaaagatgggaggagaccagcggtccatgggtctggcctgtgagtctccccttgcagcctggtcactaggcatcacccccgctttggttcttcagatgctcttggggttcataggggcaggtcctagtcgggcagggcccctgaccctcccggcctggcttcactctccctgacggctgccattggtccaccctttcatagagaggcctgctttgttacaaagctcgggtctccctcctgcagctcggttaagtacccgaggcctctcttaagatgtccaggccccaggcccgcgggcacagccagcccaaaccttgggccctggaagagtcctccaccccatcactagagtgctctgaccctgggctttcacgggccccattccaccgcctccccaacttgagcctgtgaccttgggaccaaagggggagtccctcgtctcttgtgactcagcagaggcagtggccacgttcagggaggggccggctggcctggaggctcagcccaccctccagcttttcctcagggtgtcctgaggtccaagattctggagcaatctgacccttctccaaaggctctgttatcagctgggcagtgccagccaatccctggccatttggccccaggggacgtgggccctgcaggctgcaggagggcactggagctgggaggtctcgtcccagccctccccatctcggggctgctgtgtggacggcgctgcctcaggcactctcctgtctgaacctgcccttactgtgtttaacctgttgctccaggatgcattctgataggagggggcggcagggctgggccttgtgacaatctgcctttcaccacatggccttgcctcggtggccctgactgtcagggagggccagggaggcagagcgggagggagtctcaggaggaggctgccctgaggggctggggagggggtacctcatgaggaccagggtggagctgagaagaggaggaggtgggggctggaggtgctggtagctgaggggacgggcaagtgagaggggagggagggaagtcctgggaggatcctgagctgctgttgcagtctaacccactaatcagttcttagattcaggggaagggcaggcaccaacaactcagaatgggggctttcggggagggcgcctagtccccccagctctaagcagccaggagggacctgcatctaagcatctgggttgccatggcaatggcatgccccccagctactgtatgcccccgacccccgcagaggcagaatgaacccatagggagctgatcgtaatgtttatcatgttacttccccacccctacattttttgaaataaaataaggaattttattctca

SEQ ID NO: 385594 - DNA, 3055 bp, Homo sapiens
gcggaggaaggggaccgcttgggggcactgggaagccagggatcctccgccaggaaggcagggacactcccgagcgcaggcgagaaggctgggggagggggcgcggtgggaggagtaggagaagacaaaagccgaaagcgaagagggcccgggctgcacacaccggctgggaggcagccgtctgtgcagcgagcagccggcgcggggaggccgcagtgcacggggcgtcacagtcggcaggcagcatggggaagggagggaaccagggcgagggggccgccgagcgcgaggtgtcggtgcccaccttcagctgggaggagattcagaagcataacctgcgcaccgacaggtggctggtcattgaccgcaaggtttacaacatcaccaaatggtccatccagcacccggggggccagcgggtcatcgggcactacgctggagaagatgcaacggatgccttccgcgccttccaccctgacctggaattcgtgggcaagttcttgaaacccctgctgattggtgaactggccccggaggagcccagccaggaccacggcaagaactcaaagatcactgaggacttccgggccctgaggaagacggctgaggacatgaacctgttcaagaccaaccacgtgttcttcctcctcctcctggcccacatcatcgccctggagagcattgcatggttcactgtcttttactttggcaatggctggattcctaccctcatcacggcctttgtccttgctacctctcaggcccaagctggatggctgcaacatgattatggccacctgtctgtctacagaaaacccaagtggaaccaccttgtccacaaattcgtcattggccacttaaagggtgcctctgccaactggtggaatcatcgccacttccagcaccacgccaagcctaacatcttccacaaggatcccgatgtgaacatgctgcacgtgtttgttctgggcgaatggcagcccatcgagtacggcaagaagaagctgaaatacctgccctacaatcaccagcacgaatacttcttcctgattgggccgccgctgctcatccccatgtatttccagtaccagatcatcatgaccatgatcgtccataagaactgggtggacctggcctgggccgtcagctactacatccggttcttcatcacctacatccctttctacggcatcctgggagccctccttttcctcaacttcatcaggttcctggagagccactggtttgtgtgggtcacacagatgaatcacatcgtcatggagattgaccaggaggcctaccgtgactggttcagtagccagctgacagccacctgcaacgtggagcagtccttcttcaacgactggttcagtggacaccttaacttccagattgagcaccacctcttccccaccatgccccggcacaacttacacaagatcgccccgctggtgaagtctctatgtgccaagcatggcattgaataccaggagaagccgctactgagggccctgctggacatcatcaggtccctgaagaagtctgggaagctgtggctggacgcctaccttcacaaatgaagccacagcccccgggacaccgtggggaaggggtgcaggtggggtgatggccagaggaatgatgggcttttgttctgaggggtgtccgagaggctggtgtatgcactgctcacggaccccatgttggatctttctccctttctcctctcctttttctcttcacatctcccccatagcaccctgccctcatgggacctgccctccctcagccgtcagccatcagccatggccctcccagtgcctcctagccccttcttccaaggagcagagaggtggccaccgggggtggctctgtcctacctccactctctgcccctaaagatgggaggagaccagcggtccatgggtctggcctgtgagtctccccttgcagcctggtcactaggcatcacccccgctttggttcttcagatgctcttggggttcataggggcaggtcctagtcgggcagggcccctgaccctcccggcctggcttcactctccctgacggctgccattggtccaccctttcatagagaggcctgctttgttacaaagctcgggtctccctcctgcagctcggttaagtacccgaggcctctcttaagatgtccaggccccaggcccgcgggcacagccagcccaaaccttgggccctggaagagtcctccaccccatcactagagtgctctgaccctgggctttcacgggccccattccaccgcctccccaacttgagcctgtgaccttgggaccaaagggggagtccctcgtctcttgtgactcagcagaggcagtggccacgttcagggaggggccggctggcctggaggctcagcccaccctccagcttttcctcagggtgtcctgaggtccaagattctggagcaatctgacccttctccaaaggctctgttatcagctgggcagtgccagccaatccctggccatttggccccaggggacgtgggccctgcaggctgcaggagggcactggagctgggaggtctcgtcccagccctccccatctcggggctgctgtgtggacggcgctgcctcaggcactctcctgtctgaacctgcccttactgtgtttaacctgttgctccaggatgcattctgataggagggggcggcagggctgggccttgtgacaatctgcctttcaccacatggccttgcctcggtggccctgactgtcagggagtgcagtctaacccactaatcagttcttagattcaggggaagggcaggcaccaacaactcagaatgggggctttcggggagggcgcctagtccccccagctctaagcagccaggagggacctgcatctaagcatctgggttgccatggcaatggcatgccccccagctactgtatgcccccgacccccgcagaggcagaatgaacccatagggagctgatcgtaatgtttatcatgttacttccccacccctacattttttgaaataaaataaggaattttattctca

SEQ ID NO: 385595 - DNA, 1560 bp, Homo sapiens
tcgcccctgttatctgaccatcttcaaggtacagggaactgatctgggctccctcctacttgtgtcccatagcaccctgccctcatgggacctgccctccctcagccgtcagccatcagccatggccctcccagtgcctcctagccccttcttccaaggagcagagaggtggccaccgggggtggctctgtcctacctccactctctgcccctaaagatgggaggagaccagcggtccatgggtctggcctgtgagtctccccttgcagcctggtcactaggcatcacccccgctttggttcttcagatgctcttggggttcataggggcaggtcctagtcgggcagggcccctgaccctcccggcctggcttcactctccctgacggctgccattggtccaccctttcatagagaggcctgctttgttacaaagctcgggtctccctcctgcagctcggttaagtacccgaggcctctcttaagatgtccaggccccaggcccgcgggcacagccagcccaaaccttgggccctggaagagtcctccaccccatcactagagtgctctgaccctgggctttcacgggccccattccaccgcctccccaacttgagcctgtgaccttgggaccaaagggggagtccctcgtctcttgtgactcagcagaggcagtggccacgttcagggaggggccggctggcctggaggctcagcccaccctccagcttttcctcagggtgtcctgaggtccaagattctggagcaatctgacccttctccaaaggctctgttatcagctgggcagtgccagccaatccctggccatttggccccaggggacgtgggccctgcaggctgcaggagggcactggagctgggaggtctcgtcccagccctccccatctcggggctgctgtgtggacggcgctgcctcaggcactctcctgtctgaacctgcccttactgtgtttaacctgttgctccaggatgcattctgataggagggggcggcagggctgggccttgtgacaatctgcctttcaccacatggccttgcctcggtggccctgactgtcagggagggccagggaggcagagcgggagggagtctcaggaggaggctgccctgaggggctggggagggggtacctcatgaggaccagggtggagctgagaagaggaggaggtgggggctggaggtgctggtagctgaggggacgggcaagtgagaggggagggagggaagtcctgggaggatcctgagctgctgttgcagtctaacccactaatcagttcttagattcaggggaagggcaggcaccaacaactcagaatgggggctttcggggagggcgcctagtccccccagctctaagcagccaggagggacctgcatctaagcatctgggttgccatggcaatggcatgccccccagctactgtatgcccccgacccccgcagaggcagaatgaacccatagggagctgatcgtaatgtttatcatgttacttccccacccctacattttttgaaataaaataaggaattttattctca

SEQ ID NO: 385596 - DNA, 2940 bp, Homo sapiens
gcggaggaaggggaccgcttgggggcactgggaagccagggatcctccgccaggaaggcagggacactcccgagcgcaggcgagaaggctgggggagggggcgcggtgggaggagtaggagaagacaaaagccgaaagcgaagagggcccgggctgcacacaccggctgggaggcagccgtctgtgcagcgagcagccggcgcggggaggccgcagtgcacggggcgtcacagtcggcaggcagcatggggaagggagggaaccagggcgagggggccgccgagcgcgaggtgtcggtgcccaccttcagctgggaggagattcagaagcataacctgcgcaccgacaggtggctggtcattgaccgcaaggtttacaacatcaccaaatggtccatccagcacccggggggccagcgggtcatcgggcactacgctggagaagatgcaacggatgccttccgcgccttccaccctgacctggaattcgtgggcaagttcttgaaacccctgctgattggtgaactggccccggaggagcccagccaggaccacggcaagaactcaaagatcactgaggacttccgggccctgaggaagacggctgaggacatgaacctgttcaagaccaaccacgtgttcttcctcctcctcctggcccacatcatcgccctggagagcattgcatggttcactgtcttttactttggcaatggctggattcctaccctcatcacggcctttgtccttgctacctctcaggcccaagctggatggctgcaacatgattatggccacctgtctgtctacagaaaacccaagtggaaccaccttgtccacaaattcgtcattggccacttaaagggtgcctctgccaactggtggaatcatcgccacttccagcaccacgccaagcctaacatcttccacaaggatcccgatgtgaacatgctgcacgtgtttgttctgggcgaatggcagcccatcgagtacggcaagaagaagctgaaatacctgccctacaatcaccagcacgaatacttcttcctgattgggccgccgctgctcatccccatgtatttccagtaccagatcatcatgaccatgatcgtccataagaactgggtggacctggcctgggccgtcagctactacatccggttcttcatcacctacatccctttctacggcatcctgggagccctccttttcctcaacttcatcaggttcctggagagccactggtttgtgtgggtcacacagatgaatcacatcgtcatggagattgaccaggaggcctaccgtgactggttcagtagccagctgacagccacctgcaacgtggagcagtccttcttcaacgactggttcagtggacaccttaacttccagattgagcaccacctcttccccaccatgccccggcacaacttacacaagatcgccccgctggtgaagtctctatgtgccaagcatggcattgaataccaggagaagccgctactgagggccctgctggacatcatcaggtccctgaagaagtctgggaagctgtggctggacgcctaccttcacaaatgaagccacagcccccgggacaccgtggggaaggggtgcaggtggggtgatggccagaggaatgatgggcttttgttctgaggggtgtccgagaggctggtgtatgcactgctcacggaccccatgttggatctttctccctttctcctctcctttttctcttcacatctccccttcactctccctgacggctgccattggtccaccctttcatagagaggcctgctttgttacaaagctcgggtctccctcctgcagctcggttaagtacccgaggcctctcttaagatgtccaggccccaggcccgcgggcacagccagcccaaaccttgggccctggaagagtcctccaccccatcactagagtgctctgaccctgggctttcacgggccccattccaccgcctccccaacttgagcctgtgaccttgggaccaaagggggagtccctcgtctcttgtgactcagcagaggcagtggccacgttcagggaggggccggctggcctggaggctcagcccaccctccagcttttcctcagggtgtcctgaggtccaagattctggagcaatctgacccttctccaaaggctctgttatcagctgggcagtgccagccaatccctggccatttggccccaggggacgtgggccctgcaggctgcaggagggcactggagctgggaggtctcgtcccagccctccccatctcggggctgctgtgtggacggcgctgcctcaggcactctcctgtctgaacctgcccttactgtgtttaacctgttgctccaggatgcattctgataggagggggcggcagggctgggccttgtgacaatctgcctttcaccacatggccttgcctcggtggccctgactgtcagggagggccagggaggcagagcgggagggagtctcaggaggaggctgccctgaggggctggggagggggtacctcatgaggaccagggtggagctgagaagaggaggaggtgggggctggaggtgctggtagctgaggggacgggcaagtgagaggggagggagggaagtcctgggaggatcctgagctgctgttgcagtctaacccactaatcagttcttagattcaggggaagggcaggcaccaacaactcagaatgggggctttcggggagggcgcctagtccccccagctctaagcagccaggagggacctgcatctaagcatctgggttgccatggcaatggcatgccccccagctactgtatgcccccgacccccgcagaggcagaatgaacccatagggagctgatcgtaatgtttatcatgttacttccccacccctacattttttgaaataaaataaggaattttattctca

SEQ ID NO: 385597 - DNA, 1796 bp, Homo sapiens
gcggaggaaggggaccgcttgggggcactgggaagccagggatcctccgccaggaaggcagggacactcccgagcgcaggcgagaaggctgggggagggggcgcggtgggaggagtaggagaagacaaaagccgaaagcgaagagggcccgggctgcacacaccggctgggaggcagccgtctgtgcagcgagcagccggcgcggggaggccgcagtgcacggggcgtcacagtcggcaggcagcatggggaagggagggaaccagggcgagggggccgccgagcgcgaggtgtcggtgcccaccttcagctgggaggagattcagaagcataacctgcgcaccgacaggtggctggtcattgaccgcaaggtttacaacatcaccaaatggtccatccagcacccggggggccagcgggtcatcgggcactacgctggagaagatgcaacggatgccttccgcgccttccaccctgacctggaattcgtgggcaagttcttgaaacccctgctgattggtgaactggccccggaggagcccagccaggaccacggcaagaactcaaagatcactgaggacttccgggccctgaggaagacggctgaggacatgaacctgttcaagaccaaccacgtgttcttcctcctcctcctggcccacatcatcgccctggagagcattgcatggttcactgtcttttactttggcaatggctggattcctaccctcatcacggcctttgtccttgctacctctcaggcccaagctggatggctgcaacatgattatggccacctgtctgtctacagaaaacccaagtggaaccaccttgtccacaaattcgtcattggccacttaaagggtgcctctgccaactggtggaatcatcgccacttccagcaccacgccaagcctaacatcttccacaaggatcccgatgtgaacatgctgcacgtgtttgttctgggcgaatggcagcccatcgagtacggcaagaagaagctgaaatacctgccctacaatcaccagcacgaatacttcttcctgattgggccgccgctgctcatccccatgtatttccagtaccagatcatcatgaccatgatcgtccataagaactgggtggacctggcctgggccgtcagctactacatccggttcttcatcacctacatccctttctacggcatcctgggagccctccttttcctcaacttcatcaggttcctggagagccactggtttgtgtgggtcacacagatgaatcacatcgtcatggagattgaccaggaggcctaccgtgactggttcagtagccagctgacagccacctgcaacgtggagcagtccttcttcaacgactggttcagtggacaccttaacttccagattgagcaccacctcttccccaccatgccccggcacaacttacacaagatcgccccgctggtgaagtctctatgtgccaagcatggcattgaataccaggagaagccgctactgagggccctgctggacatcatcaggtccctgaagaagtctgggaagctgtggctggacgcctaccttcacaaatgaagccacagcccccgggacaccgtggggaaggggtgcaggtggggtgatggccagaggaatgatgggcttttgttctgaggggtgtccgagaggctggttgtatgcccccgacccccgcagaggcagaatgaacccatagggagctgatcgtaatgtttatcatgttacttccccacccctacattttttgaaataaaataaggaattttattctca

SEQ ID NO: 385598 - DNA, 2163 bp, Homo sapiens
gcggaggaaggggaccgcttgggggcactgggaagccagggatcctccgccaggaaggcagggacactcccgagcgcaggcgagaaggctgggggagggggcgcggtgggaggagtaggagaagacaaaagccgaaagcgaagagggcccgggctgcacacaccggctgggaggcagccgtctgtgcagcgagcagccggcgcggggaggccgcagtgcacggggcgtcacagtcggcaggcagcatggggaagggagggaaccagggcgagggggccgccgagcgcgaggtgtcggtgcccaccttcagctgggaggagattcagaagcataacctgcgcaccgacaggtggctggtcattgaccgcaaggtttacaacatcaccaaatggtccatccagcacccggggggccagcgggtcatcgggcactacgctggagaagatgcaacggatgccttccgcgccttccaccctgacctggaattcgtgggcaagttcttgaaacccctgctgattggtgaactggccccggaggagcccagccaggaccacggcaagaactcaaagatcactgaggacttccgggccctgaggaagacggctgaggacatgaacctgttcaagaccaaccacgtgttcttcctcctcctcctggcccacatcatcgccctggagagcattgcatggttcactgtcttttactttggcaatggctggattcctaccctcatcacggcctttgtccttgctacctctcaggcccaagctggatggctgcaacatgattatggccacctgtctgtctacagaaaacccaagtggaaccaccttgtccacaaattcgtcattggccacttaaagggtgcctctgccaactggtggaatcatcgccacttccagcaccacgccaagcctaacatcttccacaaggatcccgatgtgaacatgctgcacgtgtttgttctgggcgaatggcagcccatcgagtacggcaagaagaagctgaaatacctgccctacaatcaccagcacgaatacttcttcctgattgggccgccgctgctcatccccatgtatttccagtaccagatcatcatgaccatgatcgtccataagaactgggtggacctggcctgggccgtcagctactacatccggttcttcatcacctacatccctttctacggcatcctgggagccctccttttcctcaacttcatcaggttcctggagagccactggtttgtgtgggtcacacagatgaatcacatcgtcatggagattgaccaggaggcctaccgtgactggttcagtagccagctgacagccacctgcaacgtggagcagtccttcttcaacgactggttcagtggacaccttaacttccagattgagcaccacctcttccccaccatgccccggcacaacttacacaagatcgccccgctggtgaagtctctatgtgccaagcatggcattgaataccaggagaagccgctactgagggccctgctggacatcatcaggtccctgaagaagtctgggaagctgtggctggacgcctaccttcacagaaagtgaaaggccccacagcccccccgtgtggaaacccaaaaaccccccgggggttgggggaaggggtgcaggtggcggtgaatgtgccacgagggaaatgactgtggcttttgttctgaagtggggggtttggttcccccggaacggaatggggcctttgggggttgggttaaattttgggccacaaacctttggggtctttttccccaaaaacccggggggggaaaagcacaacacacaaaacacgacagaccggagagaaacactttttggcgttttggggcatcctttttcattccccctttttcttcccttcttccgtttttttccgtctttcgaccattcttcgccgccattaggcagcgcccttttgggttggggggttgccccaccacgcagatcaaccccgacgagcagcttggcattttctttttcttttccacgccaaaaattcttttggtgtgctgttgggataaaaaaaaacccgccctttgttggggtgcaccccgccctgttttacaccgcaccttgttcaaaaggggacccgggtacaagagcgcaatttcctcaaatgggccgcccaaag

SEQ ID NO: 385599 - DNA, 1902 bp, Homo sapiens
gcggaggaaggggaccgcttgggggcactgggaagccagggatcctccgccaggaaggcagggacactcccgagcgcaggcgagaaggctgggggagggggcgcggtgggaggagtaggagaagacaaaagccgaaagcgaagagggcccgggctgcacacaccggctgggaggcagccgtctgtgcagcgagcagccggcgcggggaggccgcagtgcacggggcgtcacagtcggcaggcagcatggggaagggagggaaccagggcgagggggccgccgagcgcgaggtgtcggtgcccaccttcagctgggaggagattcagaagcataacctgcgcaccgacaggtggctggtcattgaccgcaaggtttacaacatcaccaaatggtccatccagcacccggggggccagcgggtcatcgggcactacgctggagaagatgcaacggatgccttccgcgccttccaccctgacctggaattcgtgggcaagttcttgaaacccctgctgattggtgaactggccccggaggagcccagccaggaccacggcaagaactcaaagatcactgaggacttccgggccctgaggaagacggctgaggacatgaacctgttcaagaccaaccacgtgttcttcctcctcctcctggcccacatcatcgccctggagagcattgcatggttcactgtcttttactttggcaatggctggattcctaccctcatcacggcctttgtccttgctacctctcaggcccaagctggatggctgcaacatgattatggccacctgtctgtctacagaaaacccaagtggaaccaccttgtccacaaattcgtcattggccacttaaagggtgcctctgccaactggtggaatcatcgccacttccagcaccacgccaagcctaacatcttccacaaggatcccgatgtgaacatgctgcacgtgtttgttctgggcgaatggcagcccatcgagtacggcaagaagaagctgaaatacctgccctacaatcaccagcacgaatacttcttcctgattgggccgccgctgctcatccccatgtatttccagtaccagatcatcatgaccatgatcgtccataagaactgggtggacctggcctgggccgtcagctactacatccggttcttcatcacctacatccctttctacggcatcctgggagccctccttttcctcaacttcatcaggttcctggagagccactggtttgtgtgggtcacacagatgaatcacatcgtcatggagattgaccaggaggcctaccgtgactggttcagtagccagctgacagccacctgcaacgtggagcagtccttcttcaacgactggttcagtggacaccttaacttccagattgagcaccacagtgagcgcggggctgcggggaggcggggagacccacagcgggagggaagtggccgctatcccactgggcagaatgcagaatgtgggggccacctctttgtctctctgacaaggtctctgcccaatatagagcaaggctcccagccagccccgctgaggtcaggagaggggctcccctattccatctccctgagggtcatcctgtgcccctcatgctgtgccacttggtcatagtggttaccacctccctccatgtgggcctgggactttgtagttatggagcctgcacacgcacctcatgaccctgtgaggctagcagggcagggctacgtagcttgcctggaacatcggccgagggactgccctgctgccccttgtccttgcttcacctcttgtcactgttttttttttttttattaaaaaataaaaaatgtagagacagagtctcaccctgtttccttgcactccagcctgggcaacagagcaagactccatctca

SEQ ID NO: 385600 - DNA, 1273 bp, Homo sapiens
gcggaggaaggggaccgcttgggggcactgggaagccagggatcctccgccaggaaggcagggacactcccgagcgcaggcgagaaggctgggggagggggcgcggtgggaggagtaggagaagacaaaagccgaaagcgaagagggcccgggctgcacacaccggctgggaggcagccgtctgtgcagcgagcagccggcgcggggaggccgcagtgcacggggcgtcacagtcggcaggcagcatggggaagggagggaaccagggcgagggggccgccgagcgcgaggtgtcggtgcccaccttcagctgggaggagattcagaagcataacctgcgcaccgacaggtggctggtcattgaccgcaaggtttacaacatcaccaaatggtccatccagcacccggggggccagcgggtcatcgggcactacgctggagaagatgcaacggatgccttccgcgccttccaccctgacctggaattcgtgggcaagttcttgaaacccctgctgattggtgaactggccccggaggagcccagccaggaccacggcaagaactcaaagatcactgaggacttccgggccctgaggaagacggctgaggacatgaacctgttcaagaccaaccacgtgttcttcctcctcctcctggcccacatcatcgccctggagagcattgcatggttcactgtcttttactttggcaatggctggattcctaccctcatcacggcctttgtccttgctacctctcaggcccaagctggatggctgcaacatgattatggccacctgtctgtctacagaaaacccaagtggaaccaccttgtccacaaattcgtcattggccacttaaagggtgcctctgccaactggtggaatcatcgccacttccagcaccacgccaagcctaacatcttccacaaggatcccgatgtgaacatgctgcacgtgtttgttctgggcgaatggcagcccatcgaggccagctgtggtggctcacacctgtaatcccagcgctttgggaggctgaagtgggagaagtgcttgagcccaggagttcaagaccagcctgggctacatagtgagaccccatctctgcgaaaaatacaaaagattagccaggtgtagtggtgtgcgtctgtggtcccaggtgcaggggaggctgaggtgggggaatcacttgagcctgggagcctcaaggctgcaatgagctatgattgcaccactgcactccagcggggacagaagagggagactctgtctca

SEQ ID NO: 385601 - DNA, 1312 bp, Homo sapiens
gcggaggaaggggaccgcttgggggcactgggaagccagggatcctccgccaggaaggcagggacactcccgagcgcaggcgagaaggctgggggagggggcgcggtgggaggagtaggagaagacaaaagccgaaagcgaagagggcccgggctgcacacaccggctgggaggcagccgtctgtgcagcgagcagccggcgcggggaggccgcagtgcacggggcgtcacagtcggcaggcagcatggggaagggagggaaccagggcgagggggccgccgagcgcgaggtgtcggtgcccaccttcagctgggaggagattcagaagcataacctgcgcaccgacaggtggctggtcattgaccgcaaggtttacaacatcaccaaatggtccatccagcacccggggggccagcgggtcatcgggcactacgctggagaagatgcaacggatgccttccgcgccttccaccctgacctggaattcgtgggcaagttcttgaaacccctgctgattggtgaactggccccggaggagcccagccaggaccacggcaagaactcaaagatcactgaggacttccgggccctgaggaagacggctgaggacatgaacctgttcaagaccaaccacgtgttcttcctcctcctcctggcccacatcatcgccctggagagcattgcatggttcactgtcttttactttggcaatggctggattcctaccctcatcacggcctttgtccttgctacctctcaggcccaagctggatggctgcaacatgattatggccacctgtctgtctacagaaaacccaagtggaaccaccttgtccacaaattcgtcattggccacttaaagcgatggagtttcactcttgctgctcaggctggagtgtagtggcgtggtctcagctgattgcagcctccgcctcctgtgtctttgtgttgacaaacctctaatcttccatgtctttgtgttgacaaacctaaccttccatgtctttttgttgacaaacctctaaccttccatgtctttgtgttgacaaacctctccatgggtggtgcatctgaccctatcccaacatgccttaggacgctcatctccttgactgtctgccatcccctcccaaaactaagtggaggctctgtcttttcctcctagtttgaggttctcttctcccagtgtctaaaatgatcaatatgcctagagtagatgctgctgaagaggcaaagtagtaatcctgccacctggaagcaaaggctgtgggttggagggggaagcgggtgtgagggctgatgataagccct

SEQ ID NO: 385602 - DNA, 608 bp, Homo sapiens
gggggtacctcatgaggaccagggtggagctgagaagaggaggaggtgggggctggaggtgctggtagctgaggggacgggcaagtgagaggggagggagggaagtcctgggaggatcctgagctgctgttgcagtctaacccactaatcagttcttagattcaggggaagggcaggcaccaacaactcagaatgggggctttcggggagggcgcctagtccccccagctctaagcagccaggagggacctgcatctaagcatctgggttgccatggcaatggcatgccccccagctactgtatgcccccgacccccgcagaggcagaatgaacccatagggagctgatcgtaatgtttatcatgttacttccccacccctacattttttgaaataaaataaggaattttattctcacacttcctgtgtttcctgcacgccaatgccaggccatggtattgggtgatagatgaggcccttctagctgggcctgggcaccaggaggggtccccatgcttgcatctctctgtatcccctccctcccctgtggccatcccacccgcctctccctgctgcctctgaaattcattctggggcccggaacttgg

SEQ ID NO: 385603 - DNA, 2942 bp, Homo sapiens
gcagatggaatgcacggcagggaggcgggaccctttgtttgtgtgtgcgtgttgttggcctccatccccactccccagactccacttctccaggcctctctcccgccttttcatcccgcatccgcaggacacccaatcaccgggcaacaggatgccttccgcgccttccaccctgacctggaattcgtgggcaagttcttgaaacccctgctgattggtgaactggccccggaggagcccagccaggaccacggcaagaactcaaagatcactgaggacttccgggccctgaggaagacggctgaggacatgaacctgttcaagaccaaccacgtgttcttcctcctcctcctggcccacatcatcgccctggagagcattgcatggttcactgtcttttactttggcaatggctggattcctaccctcatcacggcctttgtccttgctacctctcaggcccaagctggatggctgcaacatgattatggccacctgtctgtctacagaaaacccaagtggaaccaccttgtccacaaattcgtcattggccacttaaagggtgcctctgccaactggtggaatcatcgccacttccagcaccacgccaagcctaacatcttccacaaggatcccgatgtgaacatgctgcacgtgtttgttctgggcgaatggcagcccatcgagtacggcaagaagaagctgaaatacctgccctacaatcaccagcacgaatacttcttcctgattgggccgccgctgctcatccccatgtatttccagtaccagatcatcatgaccatgatcgtccataagaactgggtggacctggcctgggccgtcagctactacatccggttcttcatcacctacatccctttctacggcatcctgggagccctccttttcctcaacttcatcaggttcctggagagccactggtttgtgtgggtcacacagatgaatcacatcgtcatggagattgaccaggaggcctaccgtgactggttcagtagccagctgacagccacctgcaacgtggagcagtccttcttcaacgactggttcagtggacaccttaacttccagattgagcaccacctcttccccaccatgccccggcacaacttacacaagatcgccccgctggtgaagtctctatgtgccaagcatggcattgaataccaggagaagccgctactgagggccctgctggacatcatcaggtccctgaagaagtctgggaagctgtggctggacgcctaccttcacaaatgaagccacagcccccgggacaccgtggggaaggggtgcaggtggggtgatggccagaggaatgatgggcttttgttctgaggggtgtccgagaggctggtgtatgcactgctcacggaccccatgttggatctttctccctttctcctctcctttttctcttcacatctcccccatagcaccctgccctcatgggacctgccctccctcagccgtcagccatcagccatggccctcccagtgcctcctagccccttcttccaaggagcagagaggtggccaccgggggtggctctgtcctacctccactctctgcccctaaagatgggaggagaccagcggtccatgggtctggcctgtgagtctccccttgcagcctggtcactaggcatcacccccgctttggttcttcagatgctcttggggttcataggggcaggtcctagtcgggcagggcccctgaccctcccggcctggcttcactctccctgacggctgccattggtccaccctttcatagagaggcctgctttgttacaaagctcgggtctccctcctgcagctcggttaagtacccgaggcctctcttaagatgtccaggccccaggcccgcgggcacagccagcccaaaccttgggccctggaagagtcctccaccccatcactagagtgctctgaccctgggctttcacgggccccattccaccgcctccccaacttgagcctgtgaccttgggaccaaagggggagtccctcgtctcttgtgactcagcagaggcagtggccacgttcagggaggggccggctggcctggaggctcagcccaccctccagcttttcctcagggtgtcctgaggtccaagattctggagcaatctgacccttctccaaaggctctgttatcagctgggcagtgccagccaatccctggccatttggccccaggggacgtgggccctgcaggctgcaggagggcactggagctgggaggtctcgtcccagccctccccatctcggggctgctgtgtggacggcgctgcctcaggcactctcctgtctgaacctgcccttactgtgtttaacctgttgctccaggatgcattctgataggagggggcggcagggctgggccttgtgacaatctgcctttcaccacatggccttgcctcggtggccctgactgtcagggagggccagggaggcagagcgggagggagtctcaggaggaggctgccctgaggggctggggagggggtacctcatgaggaccagggtggagctgagaagaggaggaggtgggggctggaggtgctggtagctgaggggacgggcaagtgagaggggagggagggaagtcctgggaggatcctgagctgctgttgcagtctaacccactaatcagttcttagattcaggggaagggcaggcaccaacaactcagaatgggggctttcggggagggcgcctagtccccccagctctaagcagccaggagggacctgcatctaagcatctgggttgccatggcaatggcatgccccccagctactgtatgcccccgacccccgcagaggcagaatgaacccatagggagctgatcgtaatgtttatcatgttacttccccacccctacattttttgaaataaaataaggaattttattctca

SEQ ID NO: 385604 - DNA, 3333 bp, Homo sapiens
gcggaggaaggggaccgcttgggggcactgggaagccagggatcctccgccaggaaggcagggacactcccgagcgcaggcgagaaggctgggggagggggcgcggtgggaggagtaggagaagacaaaagccgaaagcgaagagggcccgggctgcacacaccggctgggaggcagccgtctgtgcagcgagcagccggcgcggggaggccgcagtgcacggggcgtcacagtcggcaggcagcatggggaagggagggaaccagggcgagggggccgccgagcgcgaggtgtcggtgcccaccttcagctgggaggagattcagaagcataacctgcgcaccgacaggtggctggtcattgaccgcaaggtttacaacatcaccaaatggtccatccagcacccggggggccagcgggtcatcgggcactacgctggagaagatgcaacggatgccttccgcgccttccaccctgacctggaattcgtgggcaagttcttgaaacccctgctgattggtgaactggccccggaggagcccagccaggaccacggcaagaactcaaagatcactgaggacttccgggccctgaggaagacggctgaggacatgaacctgttcaagaccaaccacgtgttcttcctcctcctcctggcccacatcatcgccctggagagcattgcatggttcactgtcttttactttggcaatggctggattcctaccctcatcacggcctttgtccttgctacctctcaggcccaagctggatggctgcaacatgattatggccacctgtctgtctacagaaaacccaagtggaaccaccttgtccacaaattcgtcattggccacttaaagggtgcctctgccaactggtggaatcatcgccacttccagcaccacgccaagcctaacatcttccacaaggatcccgatgtgaacatgctgcacgtgtttgttctgggcgaatggcagcccatcgagtacggcaagaagaagctgaaatacctgccctacaatcaccagcacgaatacttcttcctgattgggccgccgctgctcatccccatgtatttccagtaccagatcatcatgaccatgatcgtccataagaactgggtggacctggcctgggccgtcagctactacatccggttcttcatcacctacatccctttctacggcatcctgggagccctccttttcctcaacttcatcaggttcctggagagccactggtttgtgtgggtcacacagatgaatcacatcgtcatggagattgaccaggaggcctaccgtgactggttcagtagccagctgacagccacctgcaacgtggagcagtccttcttcaacgactggttcagtggacaccttaacttccagattgagcaccacctcttccccaccatgccccggcacaacttacacaagatcgccccgctggtgaagtctctatgtgccaagcatggcattgaataccaggagaagccgctactgagggccctgctggacatcatcaggtccctgaagaagtctgggaagctgtggctggacgcctaccttcacaaatgaagccacagcccccgggacaccgtggggaaggggtgcaggtggggtgatggccagaggaatgatgggcttttgttctgaggggtgtccgagaggctggtgtatgcactgctcacggaccccatgttggatctttctccctttctcctctcctttttctcttcacatctcccccatagcaccctgccctcatgggacctgccctccctcagccgtcagccatcagccatggccctcccagtgcctcctagccccttcttccaaggagcagagaggtggccaccgggggtggctctgtcctacctccactctctgcccctaaagatgggaggagaccagcggtccatgggtctggcctgtgagtctccccttgcagcctggtcactaggcatcacccccgctttggttcttcagatgctcttggggttcataggggcaggtcctagtcgggcagggcccctgaccctcccggcctggcttcactctccctgacggctgccattggtccaccctttcatagagaggcctgctttgttacaaagctcgggtctccctcctgcagctcggttaagtacccgaggcctctcttaagatgtccaggccccaggcccgcgggcacagccagcccaaaccttgggccctggaagagtcctccaccccatcactagagtgctctgaccctgggctttcacgggccccattccaccgcctccccaacttgagcctgtgaccttgggaccaaagggggagtccctcgtctcttgtgactcagcagaggcagtggccacgttcagggaggggccggctggcctggaggctcagcccaccctccagcttttcctcagggtgtcctgaggtccaagattctggagcaatctgacccttctccaaaggctctgttatcagctgggcagtgccagccaatccctggccatttggccccaggggacgtgggccctgcaggctgcaggagggcactggagctgggaggtctcgtcccagccctccccatctcggggctgctgtgtggacggcgctgcctcaggcactctcctgtctgaacctgcccttactgtgtttaacctgttgctccaggatgcattctgataggagggggcggcagggctgggccttgtgacaatctgcctttcaccacatggccttgcctcggtggccctgactgtcagggagggccagggaggcagagcgggagggagtctcaggaggaggctgccctgaggggctggggagggggtacctcatgaggaccagggtggagctgagaagaggaggaggtgggggctggaggtgctggtagctgaggggacgggcaagtgagaggggagggagggaagtcctgggaggatcctgagctgctgttgcagtctaacccactaatcagttcttagattcaggggaagggcaggcaccaacaactcagaatgggggctttcggggagggcgcctagtccccccagctctaagcagccaggagggacctgcatctaagcatctgggttgccatggcaatggcatgccccccagctactgtatgcccccgacccccgcagaggcagaatgaacccatagggagctgatcgtaatgtttatcatgttacttccccacccctacattttttgaaataaaataaggaattttattctcaaaaaaaaaaggataaacaaaaaaaaggggggccccataaaatttggtgcgcacagcactatgggacaaaaggggcacacccaccattag

SEQ ID NO: 385605 - DNA, 3148 bp, Homo sapiens
gcggaggaaggggaccgcttgggggcactgggaagccagggatcctccgccaggaaggcagggacactcccgagcgcaggcgagaaggctgggggagggggcgcggtgggaggagtaggagaagacaaaagccgaaagcgaagagggcccgggctgcacacaccggctgggaggcagccgtctgtgcagcgagcagccggcgcggggaggccgcagtgcacggggcgtcacagtcggcaggcagcatggggaagggagggaaccagggcgagggggccgccgagcgcgaggtgtcggtgcccaccttcagctgggaggagattcagaagcataacctgcgcaccgacaggtggctggtcattgaccgcaaggtttacaacatcaccaaatggtccatccagcacccggggggccagcgggtcatcgggcactacgctggagaagatgcaacggatgccttccgcgccttccaccctgacctggaattcgtgggcaagttcttgaaacccctgctgattggtgaactggccccggaggagcccagccaggaccacggcaagaactcaaagatcactgaggacttccgggccctgaggaagacggctgaggacatgaacctgttcaagaccaaccacgtgttcttcctcctcctcctggcccacatcatcgccctggagagcattgcatggttcactgtcttttactttggcaatggctggattcctaccctcatcacggcctttgtccttgctacctctcaggcccaagctggatggctgcaacatgattatggccacctgtctgtctacagaaaacccaagtggaaccaccttgtccacaaattcgtcattggccacttaaagggtgcctctgccaactggtggaatcatcgccacttccagcaccacgccaagcctaacatcttccacaaggatcccgatgtgaacatgctgcacgtgtttgttctgggcgaatggcagcccatcgagtacggcaagaagaagctgaaatacctgccctacaatcaccagcacgaatacttcttcctgattgggccgccgctgctcatccccatgtatttccagtaccagatcatcatgaccatgatcgtccataagaactgggtggacctggcctgggccgtcagctactacatccggttcttcatcacctacatccctttctacggcatcctgggagccctccttttcctcaacttcatcaggttcctggagagccactggtttgtgtgggtcacacagatgaatcacatcgtcatggagattgaccaggaggcctaccgtgactggttcagtagccagctgacagccacctgcaacgtggagcagtccttcttcaacgactggttcagtggacaccttaacttccagattgagcaccacctcttccccaccatgccccggcacaacttacacaagatcgccccgctggtgaagtctctatgtgccaagcatggcattgaataccaggagaagccgctactgagggccctgctggacatcatcaggtccctgaagaagtctgggaagctgtggctggacgcctaccttcacaaatgaagccacagcccccgggacaccgtggggaaggggtgcaggtggggtgatggccagaggaatgatgggcttttgttctgaggggtgtccgagaggctggtgtatgcactgctcacggaccccatgttggatctttctccctttctcctctcctttttctcttcacatctcccccatagcaccctgccctcatgggacctgccctccctcagccgtcagccatcagccatggccctcccagtgcctcctagccccttcttccaaggagcagagaggtggccaccgggggtggctctgtcctacctccactctctgcccctaaagatgggaggagaccagcggtccatgggtctggcctgtgagtctccccttgcagcctggtcactaggcatcacccccgctttggttcttcagatgctcttggggttcataggggcaggtcctagtcgggcagggcccctgaccctcccggcctggcttcactctccctgacggctgccattggtccaccctttcatagagaggcctgctttgttacaaagctcgggtctccctcctgcagctcggttaagtacccgaggcctctcttaagatgtccaggccccaggcccgcgggcacagccagcccaaaccttgggccctggaagagtcctccaccccatcactagagtgctctgaccctgggctttcacgggccccattccaccgcctccccaacttgagcctgtgaccttgggaccaaagggggagtccctcgtctcttgtgactcagcagaggcagtggccacgttcagggaggggccggctggcctggaggctcagcccaccctccagcttttcctcagggtgtcctgaggtccaagattctggagcaatctgacccttctccaaaggctctgttatcagctgggcagtgccagccaatccctggccatttggccccaggggacgtgggccctgcaggctgcaggagggcactggagctgggaggtctcgtcccagccctccccatctcggggctgctgtgtggacggcgctgcctcaggcactctcctgtctgaacctgcccttactgtgtttaacctgttgctccaggatgcattctgataggagggggcggcagggctgggccttgtgacaatctgcctttcaccacatggccttgcctcggtggccctgactgtcagggagggccagggaggcagagcgggagggagtctcaggaggaggctgccctgaggggctggggagggggtacctcatgaggaccagggtggagctgagaagaggaggaggtgggggctggaggtgctggtagctgaggggacgggcaagtgagaggggagggagggaagtcctgggaggatcctgagctgctgtagctctaagcagccaggagggacctgcatctaagcatctgggttgccatggcaatggcatgccccccagctactgtatgcccccgacccccgcagaggcagaatgaacccatagggagctgatcgtaatgtttatcatgttacttccccacccctacattttttgaaataaaataaggaattttattctca

SEQ ID NO: 385606 - DNA, 1775 bp, Homo sapiens
ctgtacggtcccgagtgttgtgattagccgctactgagggccctgctggacatcatcaggtccctgaagaagtctgggaagctgtggctggacgcctaccttcacaaatgaagccacagcccccgggacaccgtggggaaggggtgcaggtggggtgatggccagaggaatgatgggcttttgttctgaggggtgtccgagaggctggtgtatgcactgctcacggaccccatgttggatctttctccctttctcctctcctttttctcttcacatctcccccatagcaccctgccctcatgggacctgccctccctcagccgtcagccatcagccatggccctcccagtgcctcctagccccttcttccaaggagcagagaggtggccaccgggggtggctctgtcctacctccactctctgcccctaaagatgggaggagaccagcggtccatgggtctggcctgtgagtctccccttgcagcctggtcactaggcatcacccccgctttggttcttcagatgctcttggggttcataggggcaggtcctagtcgggcagggcccctgaccctcccggcctggcttcactctccctgacggctgccattggtccaccctttcatagagaggcctgctttgttacaaagctcgggtctccctcctgcagctcggttaagtacccgaggcctctcttaagatgtccaggccccaggcccgcgggcacagccagcccaaaccttgggccctggaagagtcctccaccccatcactagagtgctctgaccctgggctttcacgggccccattccaccgcctccccaacttgagcctgtgaccttgggaccaaagggggagtccctcgtctcttgtgactcagcagaggcagtggccacgttcagggaggggccggctggcctggaggctcagcccaccctccagcttttcctcagggtgtcctgaggtccaagattctggagcaatctgacccttctccaaaggctctgttatcagctgggcagtgccagccaatccctggccatttggccccaggggacgtgggccctgcaggctgcaggagggcactggagctgggaggtctcgtcccagccctccccatctcggggctgctgtgtggacggcgctgcctcaggcactctcctgtctgaacctgcccttactgtgtttaacctgttgctccaggatgcattctgataggagggggcggcagggctgggccttgtgacaatctgcctttcaccacatggccttgcctcggtggccctgactgtcagggagggccagggaggcagagcgggagggagtctcaggaggaggctgccctgaggggctggggagggggtacctcatgaggaccagggtggagctgagaagaggaggaggtgggggctggaggtgctggtagctgaggggacgggcaagtgagaggggagggagggaagtcctgggaggatcctgagctgctgttgcagtctaacccactaatcagttcttagattcaggggaagggcaggcaccaacaactcagaatgggggctttcggggagggcgcctagtccccccagctctaagcagccaggagggacctgcatctaagcatctgggttgccatggcaatggcatgccccccagctactgtatgcccccgacccccgcagaggcagaatgaacccatagggagctgatcgtaatgtttatcatgttacttccccacccctacattttttgaaataaaataaggaattttattctca

SEQ ID NO: 385607 - DNA, 2241 bp, Homo sapiens
gcggaggaaggggaccgcttgggggcactgggaagccagggatcctccgccaggaaggcagggacactcccgagcgcaggcgagaaggctgggggagggggcgcggtgggaggagtaggagaagacaaaagccgaaagcgaagagggcccgggctgcacacaccggctgggaggcagccgtctgtgcagcgagcagccggcgcggggaggccgcagtgcacggggcgtcacagtcggcaggcagcatggggaagggagggaaccagggcgagggggccgccgagcgcgaggtgtcggtgcccaccttcagctgggaggagattcagaagcataacctgcgcaccgacaggtggctggtcattgaccgcaaggtttacaacatcaccaaatggtccatccagcacccggggggccagcgggtcatcgggcactacgctggagaagatgcaacggatgccttccgcgccttccaccctgacctggaattcgtgggcaagttcttgaaacccctgctgattggtgaactggccccggaggagcccagccaggaccacggcaagaactcaaagatcactgaggacttccgggccctgaggaagacggctgaggacatgaacctgttcaagaccaaccacgtgttcttcctcctcctcctggcccacatcatcgccctggagagcattgcatggttcactgtcttttactttggcaatggctggattcctaccctcatcacggcctttgtccttgctacctctcaggcccaagctggatggctgcaacatgattatggccacctgtctgtctacagaaaacccaagtggaaccaccttgtccacaaattcgtcattggccacttaaagggtgcctctgccaactggtggaatcatcgccacttccagcaccacgccaagcctaacatcttccacaaggatcccgatgtgaacatgctgcacgtgtttgttctgggcgaatggcagcccatcgagtacggcaagaagaagctgaaatacctgccctacaatcaccagcacgaatacttcttcctgattgggccgccgctgctcatccccatgtatttccagtaccagatcatcatgaccatgatcgtccataagaactgggtggacctggcctgggccgtcagctactacatccggttcttcatcacctacatccctttctacggcatcctgggagccctccttttcctcaacttcatcaggttcctggagagccactggtttgtgtgggtcacacagatgaatcacatcgtcatggagattgaccaggaggcctaccgtgactggttcagtagccagctgacagccacctgcaacgtggagcagtccttcttcaacgactggttcagtggacaccttaacttccagattgagcaccacctcttccccaccatgccccggcacaacttacacaagatcgccccgctggtgaagtctctatgtgccaagcatggcattgaataccaggagaagccgctactgagggccctgctggacatcatcaggtccctgaagaagtctgggaagctgtggctggacgcctaccttcacaaatgaagccacagcccccgggacaccgtggggaaggggtgcaggtggggtgatggccagaggaatgatgggcttttgttctgaggggtgtccgagaggctggtgtatgcactgctcacggaccccatgttggatctttctccctttctcctctcctttttctcttcacatctcccccatagcaccctgccctcatgggacctgccctccctcagccgtcagccatcagccatggccctcccagtgcctcctagccccttcttccaaggagcagagaggtggccaccgggggtggctctgtcctacctccactctctgcccctaaagatgggaggagaccagcggtccatgggtctggcctgtgagtctccccttgcagctgcagtctaacccactaatcagttcttagattcaggggaagggcaggcaccaacaactcagaatgggggctttcggggagggcgcctagtccccccagctctaagcagccaggagggacctgcatctaagcatctgggttgccatggcaatggcatgccccccagctactgtatgcccccgacccccgcagaggcagaatgaacccatagggagctgatcgtaatgtttatcatgttacttccccacccctacattttttgaaataaaataaggaattttattctca

SEQ ID NO: 385608 - DNA, 1863 bp, Homo sapiens
gcggaggaaggggaccgcttgggggcactgggaagccagggatcctccgccaggaaggcagggacactcccgagcgcaggcgagaaggctgggggagggggcgcggtgggaggagtaggagaagacaaaagccgaaagcgaagagggcccgggctgcacacaccggctgggaggcagccgtctgtgcagcgagcagccggcgcggggaggccgcagtgcacggggcgtcacagtcggcaggcagcatggggaagggagggaaccagggcgagggggccgccgagcgcgaggtgtcggtgcccaccttcagctgggaggagattcagaagcataacctgcgcaccgacaggtggctggtcattgaccgcaaggtttacaacatcaccaaatggtccatccagcacccggggggccagcgggtcatcgggcactacgctggagaagatgcaacggatgccttccgcgccttccaccctgacctggaattcgtgggcaagttcttgaaacccctgctgattggtgaactggccccggaggagcccagccaggaccacggcaagaactcaaagatcactgaggacttccgggccctgaggaagacggctgaggacatgaacctgttcaagaccaaccacgtgttcttcctcctcctcctggcccacatcatcgccctggagagcattgcatggttcactgtcttttactttggcaatggctggattcctaccctcatcacggcctttgtccttgctacctctcaggcccaagctggatggctgcaacatgattatggccacctgtctgtctacagaaaacccaagtggaaccaccttgtccacaaattcgtcattggccacttaaagggtgcctctgccaactggtggaatcatcgccacttccagcaccacgccaagcctaacatcttccacaaggatcccgatgtgaacatgctgcacgtgtttgttctgggcgaatggcagcccatcgagtacggcaagaagaagctgaaatacctgccctacaatcaccagcacgaatacttcttcctgattgggccgccgctgctcatccccatgtatttccagtaccagatcatcatgaccatgatcgtccataagaactgggtggacctggcctgggccgtcagctactacatccggttcttcatcacctacatccctttctacggcatcctgggagccctccttttcctcaacttcatcaggttcctggagagccactggtttgtgtgggtcacacagatgaatcacatcgtcatggagattgaccaggaggcctaccgtgactggttcagtagccagctgacagccacctgcaacgtggagcagtccttcttcaacgactggttcagtggacaccttaacttccagattgagcaccacagtgagcgcggggctgcggggaggcggggagacccacagcgggagggaagtggccgctatcccactgggcagaatgcagaatgtgggggccacctctttgtctctctgacaaggtctctgcccaatatagagcaaggctcccagccagccccgctgaggtcaggagaggggctcccctattccatctccctgagggtcatcctgtgcccctcatgctgtgccacttggtcatagtggttaccacctccctccatgtgggcctgggactttgtagttatggagcctgcacacgcacctcatgaccctgtgaggctagcagggcagggctacgtagcttgcctggaacatcggccgagggactgccctgctgccccttgtccttgcttcacctcttgtcactgttttttttttttttattaaaaaataaaaaatgtagagacagagtctcaccctgtttcct

SEQ ID NO: 385609 - DNA, 1956 bp, Homo sapiens
gcggaggaaggggaccgcttgggggcactgggaagccagggatcctccgccaggaaggcagggacactcccgagcgcaggcgagaaggctgggggagggggcgcggtgggaggagtaggagaagacaaaagccgaaagcgaagagggcccgggctgcacacaccggctgggaggcagccgtctgtgcagcgagcagccggcgcggggaggccgcagtgcacggggcgtcacagtcggcaggcagcatggggaagggagggaaccagggcgagggggccgccgagcgcgaggtgtcggtgcccaccttcagctgggaggagattcagaagcataacctgcgcaccgacaggtggctggtcattgaccgcaaggtttacaacatcaccaaatggtccatccagcacccggggggccagcgggtcatcgggcactacgctggagaagatgcaacggatgccttccgcgccttccaccctgacctggaattcgtgggcaagttcttgaaacccctgctgattggtgaactggccccggaggagcccagccaggaccacggcaagaactcaaagatcactgaggacttccgggccctgaggaagacggctgaggacatgaacctgttcaagaccaaccacgtgttcttcctcctcctcctggcccacatcatcgccctggagagcattgcatggttcactgtcttttactttggcaatggctggattcctaccctcatcacggcctttgtccttgctacctctcaggcccaagctggatggctgcaacatgattatggccacctgtctgtctacagaaaacccaagtggaaccaccttgtccacaaattcgtcattggccacttaaagggtgcctctgccaactggtggaatcatcgccacttccagcaccacgccaagcctaacatcttccacaaggatcccgatgtgaacatgctgcacgtgtttgttctgggcgaatggcagcccatcgagtacggcaagaagaagctgaaatacctgccctacaatcaccagcacgaatacttcttcctgattgggccgccgctgctcatccccatgtatttccagtaccagatcatcatgaccatgatcgtccataagaactgggtggacctggcctgggccgtcagctactacatccggttcttcatcacctacatccctttctacggcatcctgggagccctccttttcctcaacttcatcaggttcctggagagccactggtttgtgtgggtcacacagatgaatcacatcgtcatggagattgaccaggaggcctaccgtgactggttcagtagccagctgacagccacctgcaacgtggagcagtccttcttcaacgactggttcagtggacaccttaacttccagattgagcaccacagtgagcgcggggctgcggggaggcggggagacccacagcgggagggaagtggccgctatcccactgggcagaatgcagaatgtgggggccacctctttgtctctctgacaaggtctctgcccaatatagagcaaggctcccagccagccccgctgaggtcaggagaggggctcccctattccatctccctgagggtcatcctgtgcccctcatgctgtgccacttggtcatagtggttaccacctccctccatgtgggcctgggactttgtagttatggagcctgcacacgcacctcatgaccctgtgaggctagcagggcagggctacgtagcttgcctggaacatcggccgagggactgccctgctgccccttgtccttgcttcacctcttgtcactgttttttttttttttattaaaaaataaaaaatgtagagacagagtctcaccctgtttcctgttgcagtgagccaagatcgctcactccagcctagcgacagagtgagactccatctcaaataaataaataaattaattaattaaattaaatta

SEQ ID NO: 385610 - DNA, 1454 bp, Homo sapiens
gcggaggaaggggaccgcttgggggcactgggaagccagggatcctccgccaggaaggcagggacactcccgagcgcaggcgagaaggctgggggagggggcgcggtgggaggagtaggagaagacaaaagccgaaagcgaagagggcccgggctgcacacaccggctgggaggcagccgtctgtgcagcgagcagccggcgcggggaggccgcagtgcacggggcgtcacagtcggcaggcagcatggggaagggagggaaccagggcgagggggccgccgagcgcgaggtgtcggtgcccaccttcagctgggaggagattcagaagcataacctgcgcaccgacaggtggctggtcattgaccgcaaggtttacaacatcaccaaatggtccatccagcacccggggggccagcgggtcatcgggcactacgctggagaagatgcaacggatgccttccgcgccttccaccctgacctggaattcgtgggcaagttcttgaaacccctgctgattggtgaactggccccggaggagcccagccaggaccacggcaagaactcaaagatcactgaggacttccgggccctgaggaagacggctgaggacatgaacctgttcaagaccaaccacgtgttcttcctcctcctcctggcccacatcatcgccctggagagcattgcatggttcactgtcttttactttggcaatggctggattcctaccctcatcacggcctttgtccttgctacctctcaggcccaagctggatggctgcaacatgattatggccacctgtctgtctacagaaaacccaagtggaaccaccttgtccacaaattcgtcattggccacttaaagggtgcctctgccaactggtggaatcatcgccacttccagcaccacgccaagcctaacatcttccacaaggatcccgatgtgaacatgctgcacgtgtttgttctgggcgaatggcagcccatcgagggtagagggaaatcttgttccagttcagcaggaaggcaagatttcaggggctcaagcttggtcgccaaccgactagctcatgttgagaaaaccttatttggagaatcatcatcctgtacactgggaggagcctcaacgtggcttggtccaatctgcttcaccagtggataagaaattgaaggccagctgtggtggctcacacctgtaatcccagcgctttgggaggctgaagtgggagaagtgcttgagcccaggagttcaagaccagcctgggctacatagtgagaccccatctctgcgaaaaatacaaaagattagccaggtgtagtggtgtgcgtctgtggtcccaggtgcaggggaggctgaggtgggggaatcacttgagcctgggagcctcaaggctgcaatgagctatgattgcaccactgcactccagcggggacagaagagggagactctgtctca

SEQ ID NO: 385611 - DNA, 651 bp, Homo sapiens
tcaacttgaaataatttcacttacaaaatagctggaaaaatagtaaagataattcctgtattttgttcacccacgtattccaaatgtgtaacactacaatcagcaaaatcagcacattaatattattacctaatctacagacctcattcacattttgccagttgttctgctggtgtgctgtatgtagtgcaggatccagtctaggcccgtatgttgcattttgctgtcatgtcttcttagtctcctttcatctcagtggtcttttcttttccatgactatgacagaaatgatttgtatccttcatatatctgcagtcacatgaagtctatttgtcccactactggtgacgtaaattttggtaacttggttgagggtggtaccgtctaggtttctccatattaagttgctatttttccttgtgtatttaataagtatcttatagggaaatcctttgagactatgtaaatatcatattacatgtattttgcctgttttagcatcttttgaagataattgcctgaaacattttttactgtgatgattttctaattctatcattctgcatttattagtttggaattcgattgtaaggaattatattcccttgtttcctattattttattaaagaaatttacatccaaatagtgtg

SEQ ID NO: 385612 - DNA, 904 bp, Homo sapiens
ccaaattagacaggaaaaagtcaaatcaattgttgggcgaaaatttatcggttggtttaatagctctgcacaaagacagcctgacttgaatgtctatattacacatacactgttatttgaaacactctgctttagtacagatggtggttgatgcgtttatcctgccattagcaccaattgggagaaattttactacagcattttaaataatcacaagagtaaatagatttctattattttatctaataacaacaatagaatatagaatacaaaggacttcctctagatacattttattttatctaataacaacaatggaatatagaatacaaaggacttcctttagatacattttccacaaattatctgcttatttaaatacaaagggtttaatatctatgaaggtaataactcaccgtgtttaaaggatttatttcttcatctcagaggtagtcttcaagtatttgcagttaaacagtatgcaaatagccctttgcttacacaattatccaggtaaaaagactatgtcaggtgttgagatttctttgaattttctaagagttttcattatttacgcctttgtcagattaattttaaaggcaactcttgactgttagcttggtgtgaagagatccactcaggcagctcatgtctcctaagtgccctcagacagcagtgacgggacacttcacatgacgctagcatgttggctccgtccgcatggcggaatgcattccctgctgttagttatctgaatttttctcctgaattacaaatatatggatttggctcccctgatgctgggcttctgctgagacctgttccagtacattcacgtatgctttgctccccttcattgttaagaaattaattcaagaaggtttttgctgttaaacataaggaa

SEQ ID NO: 385613 - DNA, 850 bp, Homo sapiens
ccaaattagacaggaaaaagtcaaatcaattgttgggcgaaaatttatcggttggtttaatagctctgcacaaagacagcctgacttgaatgtctatattacacatacactgttatttgaaacactctgctttagtaactacagcattttaaataatcacaagagtaaatagatttctattattttatctaataacaacaatagaatatagaatacaaaggacttcctctagatacattttattttatctaataacaacaatggaatatagaatacaaaggacttcctttagatacattttccacaaattatctgcttatttaaatacaaagggtttaatatctatgaaggtaataactcaccgtgtttaaaggatttatttcttcatctcagaggtagtcttcaagtatttgcagttaaacagtatgcaaatagccctttgcttacacaattatccaggtaaaaagactatgtcaggtgttgagatttctttgaattttctaagagttttcattatttacgcctttgtcagattaattttaaaggcaactcttgactgttagcttggtgtgaagagatccactcaggcagctcatgtctcctaagtgccctcagacagcagtgacgggacacttcacatgacgctagcatgttggctccgtccgcatggcggaatgcattccctgctgttagttatctgaatttttctcctgaattacaaatatatggatttggctcccctgatgctgggcttctgctgagacctgttccagtacattcacgtatgctttgctccccttcattgttaagaaattaattcaagaaggtttttgctgttaaacataaggaa

SEQ ID NO: 385614 - DNA, 314 bp, Homo sapiens
ttcctttttataaaaatgaataacctcccaaacagattaaacattattgacagatttgcttccatctaatagaaaatgtagcatgatagtcaagcagcatgcctcaagcatgatggtcttggatgaccagcataagaatcaccttggaacttattgaaaatatagtgatttacatcccattcaaaatctactgaatcaaaatattcattttaacaaactcttcagataatttatttgcacattaaagtttaagaaacacagtactaaagcaattcattatcaccaactgtataagaacccgtatgtgtttgtgt

SEQ ID NO: 385615 - DNA, 991 bp, Homo sapiens
ttcattatctttataaatatagctcacactttagtgtttaatatagagtagttatgcttcaagtaaggtatatgtccttatcatgaaattgattctaggccattttttttcttgctctgttttcctctacgtacttcttgtattgtgtgcttgcctatatgattcagttttctgttagctattgttaaagaaaaaaaatttatgaacatgttgaacattcaagcaatataaaaggatatgcagtgacagtgtaataaggttattattactatggttattactatgaataggttcttgtggatacttctgacagtttttgtgcatatgtcaacatatgtatgaagatatcctcattttaaaaaaccacatgaaggggagcctgttacatgtatttctctaccttgagttttacacttaacacatagtgtctcacattgttggtatccaacaaatacttattgaataattaaaaaataatacatctatagcaatgtttacagtcagcatatacattccagctccttcttttggtagataatagatccatataactgtattttgtaatatagatgtgctctaattcattggctatgtcccctaaggaaacacacatagattgttttgtagtctttctattacaaacaattctttaatgaatctctttggctattttgagtctcttgcattttcaaaacaattttaggataagcttgtcgacgttcacaaaaagctgattaggattttgatagggattttgttgaatctgtatatcaatttaggaagtgttgtcctcttaacaaaattaagctttccagtccatgaacatataatgtctttttgtttacttaggtctttaatttcttaatgatgtttcatagttttcaatttataagtcttgtacttcttttattaaatgtattagtattcttttcaatatgattataaacagaattgttttcttaatttcattttcatcttaatgtatatcttt

SEQ ID NO: 385616 - DNA, 270 bp, Homo sapiens
ttcccatggtattcacaaggctcacaccccaccttttcatacataaatcaccccctttatttcacatgaacatctttgttgtattttgcagaaagttacccttactgaaacacagaggacgctctgttggtagctttggaaatggcccttggggctccagctgggagcatctcatgttcttgttcctacgtagttactttctggggatagtcacacatgttgaatgttggcagggaagagttaccctagtccaacactttcatttgccaa

SEQ ID NO: 385617 - DNA, 437 bp, Homo sapiens
aaaataggagtttttaggaaagcggctaaacagctttaagaaaaagtaaatgaggtcaaacctgttcaaccaggcccttgtgcattaagtagctcaaatagagggcaactgattaaccatttgacacttcacacacctgcaaagttgacctgaccaggctggctccagccaattttgcaatcattttctcgccacccattccctatttcacatcagcccccctcccccacttcaggctccttggccacctccctcctctccacttacacaacctgaattcatctgtaccaaaatattcacccctctctgacttctttttttgggttttatgaggcaggtggtctgagaaattgcttatgactgttggtcctaattatgaagctaattcattcagactatggaatacttagaaaacacaaagtgcaaagaaaaaacaa

SEQ ID NO: 385618 - DNA, 322 bp, Homo sapiens
agctgacgccatgcttgtacagcctgcacaactatcagctaattaagcctcttttctttataaattatacggccccgggtgtttacagcaatgcaagaacaacctaatatagtcatgctagcaaaaattaaaaactacgtagttaatgaaacatagaaaataaaatttctaatgatttgtaaaatgttagcagggatgagttgtaccttggtaaattgatataaataaacattatctgactaattcactctttgtttgataagaactatctttaagaaactgataataatgaggcaagaaaatttctattaaaataacaata

SEQ ID NO: 385619 - DNA, 361 bp, Homo sapiens
  misc_feature (299)..(299): n is a, c, g, or t
cgtggcacaccaacacaaaggaacattattcaaccctgaaaaggaatgaagtgccgttacggattcgtgctacaatgtggatgaatgctggctaagtggaagaagccacacacagaccaccacctactgtgtgattccatctacacactgagcatcccaaatccaaaaagctgaaatccaaaatgctcccaaatcctaaactttttcagtgccaacatggtgctcaaaggaaatgcacactggcacattttttcttttttttttttttgaggcagagtctcactctgtcccccaggctnggagtgcagtggcacgatctcggctcactccagcctctgcctcccaggttcaagcaatcctc

SEQ ID NO: 385620 - DNA, 140 bp, Homo sapiens
tgaaaggagctataccaaggttctctgtcattagcaacgcctacccaggatccacaactaagaaaaccacacagggagcaatgagcctttcaagaagccacagggttcagaaactgttgagttttaaacaggtagtaatt

SEQ ID NO: 385621 - DNA, 4097 bp, Homo sapiens
acacacacacacacacacacacacaccccaacacacacacacacacacacacacacacacacacacacacacacacacacacacacacacacacacacacagcgggatggccgagcgccgcacgcgtagcacgccgggactagctatccagcctcccagcagcctctgcgacgggcgcggtgcgtaagtacctcgccggtggtggccgttctccgtaagatggcggaccggcggcggcagcgcgcttcgcaagacaccgaggacgaggaatctggtgcttcgggctccgacagcggcggctccccgttgcggggaggcgggagctgcagcggtagcgccggaggcggcggcagcggctctctgccttcacagcgcggaggccgaaccggggcccttcatctgcggcgggtggagagcgggggcgccaagagtgctgaggagtcggagtgtgagagtgaagatggcattgaaggtgatgctgttctctcggattatgaaagtgcagaagactcggaaggtgaagaaggtgaatacagtgaagaggaaaactccaaagtggagctgaaatcagaagctaatgatgctgttaattcttcaacaaaagaagagaagggagaagaaaagcctgacaccaaaagcactgtgactggagagaggcaaagtggggacggacaggagagcacagagcctgtggagaacaaagtgggtaaaaagggccctaagcatttggatgatgatgaagatcggaagaatccagcatacatacctcggaaagggctcttctttgagcatgatcttcgagggcaaactcaggaggaggaagtcagacccaaggggcgtcagcgaaagctatggaaggatgagggtcgctgggagcatgacaagttccgggaagatgagcaggccccaaagtcccgacaggagctcattgctctttatggttatgacattcgctcagctcataatcctgatgacatcaaacctcgaagaatccggaaaccccgatatgggagtcctccacaaagagatccaaactggaacggtgagcggctaaacaagtctcatcgccaccagggtcttgggggcaccctaccaccaaggacatttattaacaggaatgctgcaggtaccggccgtatgtctgcacccaggaattattctcgatctgggggcttcaaggaaggtcgtgctggttttaggcctgtggaagctggtgggcagcatggtggccggtctggtgagactgttaagcatgagattagttaccggtcacggcgcctagagcagacttctgtgagggatccatctccagaagcagatgctccagtgcttggcagtcctgagaaggaagaggcagcctcagagccaccagctgctgctcctgatgctgcaccaccaccccctgataggcccattgagaagaaatcctattcccgggcaagaagaactcgaaccaaagttggagatgcagtcaagcttgcagaggaggtgccccctcctcctgaaggactgattccagcacctccagtcccagaaaccaccccaactccacctactaagactgggacctgggaagctccggtggattctagtacaagtggacttgagcaagatgtggcacaactaaatatagcagaacagaattggagtccggggcagccttctttcctgcaaccacgggaacttcgaggtatgcccaaccatatacacatgggagcaggacctccacctcagtttaaccggatggaagaaatgggtgtccagggtggtcgagccaaacgctattcatcccagcggcaaagacctgtgccagagccccccgcccctccagtgcatatcagtatcatggagggacattactatgatccactgcagttccagggaccaatctatacccatggtgacagccctgccccgctgcctccacagggcatgcttgtgcagccaggaatgaaccttccccacccaggtttacatccccaccagacaccagctcctctgcccaatccaggcctctatcccccaccagtgtccatgtctccaggacagccaccacctcagcagttgcttgctcctacttacttttctgctccaggcgtcatgaactttggtaatcccagttacccttatgctccaggggcactgcctcccccaccaccgcctcatctgtatcctaatacacaggccccatcacaggtatatggaggagtgacctactataaccccgcccagcagcaggtgcagccaaagccctccccaccccggaggactccccagccagtcaccatcaagccccctccacctgaggttgtaagcaggggttccagttaatacaagtttctgaatattttaaatcttaacatcatataaaaagcagcagaggtgagaactcagaagagaaatacagctggctatctactaccagaagggcttcaaagatatagggtgtggctcctaccagcaaacagctgaaagaggaggacccctgccttcctctgaggacaggctctagagagagggagaaacaagtggacctcgtcccatcttcactcttcacttgagttggctgtgttcgggggagcagagagagccagacagccccaagcttctgagtctagatacagaagcccatgtcttctgctgttcttcacttctgggaaattgaagtgtcttctgttcccaaggaagctccttcctgtttgttttgttttctaagatgttcatttttaaagcctggcttcttatccttaatattattttaattttttctctttgtttctgtttcttgctctctctccctgcctttaaatgaaacaagtctagtcttctggttttctagcccctctggattcccttttgactcttccgtgcatcccagataatggagaatgtatcagccagccttccccaccaagtctaaaaagacctggcctttcacttttagttggcatttgttatcctcttgtatacttgtattcccttaactctaaccctgtggaagcatggctgtctgcacagagggtcccattgtgcagaaaagctcagagtaggtgggtaggagcccttctctttgacttaggtttttaggagtctgagcatccatcaatacctgtactatgatgggcttctgttctctgctgagggccaataccctactgtggggagagatggcacaccagatgcttttgtgagaaagggatggtggagtgagagcctttgcctttaggggtgtgtattcacatagtcctcagggctcagtcttttgaggtaagtggaattagagggccttgcttctcttctttccattcttcttgctacaccccttttccagttgctgtggaccaatgcatctctttaaaggcaaatattatccagcaagcagtctaccctgtcctttgcaattgctcttctccacgtctttcctgctacaagtgttttagatgttactaccttattttccccgaattctatttttgtccttgcagacagaatataaaaactcctgggcttaaggcctaaggaagccagtcaccttctgggcaagggctcctatctttcctccctatccatggcactaaaccacttctctgctgcctctgtggaagagattcctattactgcagtacatacgtctgccaggggtaacctggccactgtccctgtccttctacagaacctgagggcaaagatggtggctgtgtctctccccggtaatgtcactgtttttattccttccatctagcagctggcctaatcactctgagtcacaggtgtgggatggagagtggggagaggcacttaatctgtaacccccaaggaggaaataactaagagattcttctaggggtagctggtggttgtgccttttgtaggctgttccctttgccttaaacctgaagatgtctcctcaagcctgtgggcagcatgcccagattcccagaccttaagacactgtgagagttgtctctgttggtccactgtgtttagttgcaaggatttttccatgtgtggtggtgttttttgttactgttttaaagggtgcccatttgtgatcagcattgtgacttggagataataaaatttagactataaacttg

SEQ ID NO: 385622 - DNA, 4149 bp, Homo sapiens
acacacacacacacacacacacacaccccaacacacacacacacacacacacacacacacacacacacacacacacacacacacacacacacacacacacagcgggatggccgagcgccgcacgcgtagcacgccgggactagctatccagcctcccagcagcctctgcgacgggcgcggtgcgtaagtacctcgccggtggtggccgttctccgtaagatggcggaccggcggcggcagcgcgcttcgcaagacaccgaggacgaggaatctggtgcttcgggctccgacagcggcggctccccgttgcggggaggcgggagctgcagcggtagcgccggaggcggcggcagcggctctctgccttcacagcgcggaggccgaaccggggcccttcatctgcggcgggtggagagcgggggcgccaagagtgctgaggagtcggagtgtacagtgaagatggcattgaagggtgatgctggtctctcggattatgaaggtgcagaaagaatcggaaagagaaagtttgctgtctttggggataaactactagagaattgcgtcagaaggtgaagaaggtgaatacagtgaagaggaaaactccaaagtggagctgaaatcagaagctaatgatgctgttaattcttcaacaaaagaagagaagggagaagaaaagcctgacaccaaaagcactgtgactggagagaggcaaagtggggacggacaggagagcacagagcctgtggagaacaaagtgggtaaaaagggccctaagcatttggatgatgatgaagatcggaagaatccagcatacatacctcggaaagggctcttctttgagcatgatcttcgagggcaaactcaggaggaggaagtcagacccaaggggcgtcagcgaaagctatggaaggatgagggtcgctgggagcatgacaagttccgggaagatgagcaggccccaaagtcccgacaggagctcattgctctttatggttatgacattcgctcagctcataatcctgatgacatcaaacctcgaagaatccggaaaccccgatatgggagtcctccacaaagagatccaaactggaacggtgagcggctaaacaagtctcatcgccaccagggtcttgggggcaccctaccaccaaggacatttattaacaggaatgctgcaggtaccggccgtatgtctgcacccaggaattattctcgatctgggggcttcaaggaaggtcgtgctggttttaggcctgtggaagctggtgggcagcatggtggccggtctggtgagactgttaagcatgagattagttaccggtcacggcgcctagagcagacttctgtgagggatccatctccagaagcagatgctccagtgcttggcagtcctgagaaggaagaggcagcctcagagccaccagctgctgctcctgatgctgcaccaccaccccctgataggcccattgagaagaaatcctattcccgggcaagaagaactcgaaccaaagttggagatgcagtcaagcttgcagaggaggtgccccctcctcctgaaggactgattccagcacctccagtcccagaaaccaccccaactccacctactaagactgggacctgggaagctccggtggattctagtacaagtggacttgagcaagatgtggcacaactaaatatagcagaacagaattggagtccggggcagccttctttcctgcaaccacgggaacttcgaggtatgcccaaccatatacacatgggagcaggacctccacctcagtttaaccggatggaagaaatgggtgtccagggtggtcgagccaaacgctattcatcccagcggcaaagacctgtgccagagccccccgcccctccagtgcatatcagtatcatggagggacattactatgatccactgcagttccagggaccaatctatacccatggtgacagccctgccccgctgcctccacagggcatgcttgtgcagccaggaatgaaccttccccacccaggtttacatccccaccagacaccagctcctctgcccaatccaggcctctatcccccaccagtgtccatgtctccaggacagccaccacctcagcagttgcttgctcctacttacttttctgctccaggcgtcatgaactttggtaatcccagttacccttatgctccaggggcactgcctcccccaccaccgcctcatctgtatcctaatacacaggccccatcacaggtatatggaggagtgacctactataaccccgcccagcagcaggtgcagccaaagccctccccaccccggaggactccccagccagtcaccatcaagccccctccacctgaggttgtaagcaggggttccagttaatacaagtttctgaatattttaaatcttaacatcatataaaaagcagcagaggtgagaactcagaagagaaatacagctggctatctactaccagaagggcttcaaagatatagggtgtggctcctaccagcaaacagctgaaagaggaggacccctgccttcctctgaggacaggctctagagagagggagaaacaagtggacctcgtcccatcttcactcttcacttgagttggctgtgttcgggggagcagagagagccagacagccccaagcttctgagtctagatacagaagcccatgtcttctgctgttcttcacttctgggaaattgaagtgtcttctgttcccaaggaagctccttcctgtttgttttgttttctaagatgttcatttttaaagcctggcttcttatccttaatattattttaattttttctctttgtttctgtttcttgctctctctccctgcctttaaatgaaacaagtctagtcttctggttttctagcccctctggattcccttttgactcttccgtgcatcccagataatggagaatgtatcagccagccttccccaccaagtctaaaaagacctggcctttcacttttagttggcatttgttatcctcttgtatacttgtattcccttaactctaaccctgtggaagcatggctgtctgcacagagggtcccattgtgcagaaaagctcagagtaggtgggtaggagcccttctctttgacttaggtttttaggagtctgagcatccatcaatacctgtactatgatgggcttctgttctctgctgagggccaataccctactgtggggagagatggcacaccagatgcttttgtgagaaagggatggtggagtgagagcctttgcctttaggggtgtgtattcacatagtcctcagggctcagtcttttgaggtaagtggaattagagggccttgcttctcttctttccattcttcttgctacaccccttttccagttgctgtggaccaatgcatctctttaaaggcaaatattatccagcaagcagtctaccctgtcctttgcaattgctcttctccacgtctttcctgctacaagtgttttagatgttactaccttattttccccgaattctatttttgtccttgcagacagaatataaaaactcctgggcttaaggcctaaggaagccagtcaccttctgggcaagggctcctatctttcctccctatccatggcactaaaccacttctctgctgcctctgtggaagagattcctattactgcagtacatacgtctgccaggggtaacctggccactgtccctgtccttctacagaacctgagggcaaagatggtggctgtgtctctccccggtaatgtcactgtttttattccttccatctagcagctggcctaatcactctgagtcacaggtgtgggatggagagtggggagaggcacttaatctgtaacccccaaggaggaaataactaagagattcttctaggggtagctggtggttgtgccttttgtaggctgttccctttgccttaaacctgaagatgtctcctcaagcctgtgggcagcatgcccagattcccagaccttaagacactgtgagagttgtctctgttggtccactgtgtttagttgcaaggatttttccatgtgtggtggtgttttttgttactgttttaaagggtgcccatttgtgatcagcattgtgacttggagataataaaatttagactataaacttg

SEQ ID NO: 385623 - DNA, 3710 bp, Homo sapiens
gttgcgctgtcgtgaaagaacagcgggggcgcctagcatttgctgaggagtcggagttgtgagagtgaagatagcattgaaggtgatgcttgtctctcgcgagacatgatatgtgcagaagactcggaaggtgaagaaggtgaatacagtgaagaggaaaactccaaagtggagctgaaatcagaagctaatgatgctgttaattcttcaacaaaagaagagaagggagaagaaaagcctgacaccaaaagcactgtgactggagagaggcaaagtggggacggacaggagagcacagagcctgtggagaacaaagtgggtaaaaagggccctaagcatttggatgatgatgaagatcggaagaatccagcatacatacctcggaaagggctcttctttgagcatgatcttcgagggcaaactcaggaggaggaagtcagacccaaggggcgtcagcgaaagctatggaaggatgagggtcgctgggagcatgacaagttccgggaagatgagcaggccccaaagtcccgacaggagctcattgctctttatggttatgacattcgctcagctcataatcctgatgacatcaaacctcgaagaatccggaaaccccgatatgggagtcctccacaaagagatccaaactggaacggtgagcggctaaacaagtctcatcgccaccagggtcttgggggcaccctaccaccaaggacatttattaacaggaatgctgcaggtaccggccgtatgtctgcacccaggaattattctcgatctgggggcttcaaggaaggtcgtgctggttttaggcctgtggaagctggtgggcagcatggtggccggtctggtgagactgttaagcatgagattagttaccggtcacggcgcctagagcagacttctgtgagggatccatctccagaagcagatgctccagtgcttggcagtcctgagaaggaagaggcagcctcagagccaccagctgctgctcctgatgctgcaccaccaccccctgataggcccattgagaagaaatcctattcccgggcaagaagaactcgaaccaaagttggagatgcagtcaagcttgcagaggaggtgccccctcctcctgaaggactgattccagcacctccagtcccagaaaccaccccaactccacctactaagactgggacctgggaagctccggtggattctagtacaagtggacttgagcaagatgtggcacaactaaatatagcagaacagaattggagtccggggcagccttctttcctgcaaccacgggaacttcgaggtatgcccaaccatatacacatgggagcaggacctccacctcagtttaaccggatggaagaaatgggtgtccagggtggtcgagccaaacgctattcatcccagcggcaaagacctgtgccagagccccccgcccctccagtgcatatcagtatcatggagggacattactatgatccactgcagttccagggaccaatctatacccatggtgacagccctgccccgctgcctccacagggcatgcttgtgcagccaggaatgaaccttccccacccaggtttacatccccaccagacaccagctcctctgcccaatccaggcctctatcccccaccagtgtccatgtctccaggacagccaccacctcagcagttgcttgctcctacttacttttctgctccaggcgtcatgaactttggtaatcccagttacccttatgctccaggggcactgcctcccccaccaccgcctcatctgtatcctaatacacaggccccatcacaggtatatggaggagtgacctactataaccccgcccagcagcaggtgcagccaaagccctccccaccccggaggactccccagccagtcaccatcaagccccctccacctgaggttgtaagcaggggttccagttaatacaagtttctgaatattttaaatcttaacatcatataaaaagcagcagaggtgagaactcagaagagaaatacagctggctatctactaccagaagggcttcaaagatatagggtgtggctcctaccagcaaacagctgaaagaggaggacccctgccttcctctgaggacaggctctagagagagggagaaacaagtggacctcgtcccatcttcactcttcacttgagttggctgtgttcgggggagcagagagagccagacagccccaagcttctgagtctagatacagaagcccatgtcttctgctgttcttcacttctgggaaattgaagtgtcttctgttcccaaggaagctccttcctgtttgttttgttttctaagatgttcatttttaaagcctggcttcttatccttaatattattttaattttttctctttgtttctgtttcttgctctctctccctgcctttaaatgaaacaagtctagtcttctggttttctagcccctctggattcccttttgactcttccgtgcatcccagataatggagaatgtatcagccagccttccccaccaagtctaaaaagacctggcctttcacttttagttggcatttgttatcctcttgtatacttgtattcccttaactctaaccctgtggaagcatggctgtctgcacagagggtcccattgtgcagaaaagctcagagtaggtgggtaggagcccttctctttgacttaggtttttaggagtctgagcatccatcaatacctgtactatgatgggcttctgttctctgctgagggccaataccctactgtggggagagatggcacaccagatgcttttgtgagaaagggatggtggagtgagagcctttgcctttaggggtgtgtattcacatagtcctcagggctcagtcttttgaggtaagtggaattagagggccttgcttctcttctttccattcttcttgctacaccccttttccagttgctgtggaccaatgcatctctttaaaggcaaatattatccagcaagcagtctaccctgtcctttgcaattgctcttctccacgtctttcctgctacaagtgttttagatgttactaccttattttccccgaattctatttttgtccttgcagacagaatataaaaactcctgggcttaaggcctaaggaagccagtcaccttctgggcaagggctcctatctttcctccctatccatggcactaaaccacttctctgctgcctctgtggaagagattcctattactgcagtacatacgtctgccaggggtaacctggccactgtccctgtccttctacagaacctgagggcaaagatggtggctgtgtctctccccggtaatgtcactgtttttattccttccatctagcagctggcctaatcactctgagtcacaggtgtgggatggagagtggggagaggcacttaatctgtaacccccaaggaggaaataactaagagattcttctaggggtagctggtggttgtgccttttgtaggctgttccctttgccttaaacctgaagatgtctcctcaagcctgtgggcagcatgcccagattcccagaccttaagacactgtgagagttgtctctgttggtccactgtgtttagttgcaaggatttttccatgtgtggtggtgttttttgttactgttttaaagggtgcccatttgtgatcagcattgtgacttggagataataaaatttagactataaacttg

SEQ ID NO: 385624 - DNA, 4334 bp, Homo sapiens
acacacacacacacacacacacacaccccaacacacacacacacacacacacacacacacacacacacacacacacacacacacacacacacacacacacagcgggatggccgagcgccgcacgcgtagcacgccgggactagctatccagcctcccagcagcctctgcgacgggcgcggtgcgtaagtacctcgccggtggtggccgttctccgtaagatggcggaccggcggcggcagcgcgcttcgcaagacaccgaggacgaggaatctggtgcttcgggctccgacagcggcggctccccgttgcggggaggcgggagctgcagcggtagcgccggaggcggcggcagcggctctctgccttcacagcgcggaggccgaaccggggcccttcatctgcggcgggtggagagcgggggcgccaagagtgctgaggagtcggagtgtgagagtgaagatggcattgaaggtgatgctgttctctcggattatgaaagtgcagaagactcggaaggtgaagaaggtgaatacagtgaagaggaaaactccaaagtggagctgaaatcagaagctaatgatgctgttaattcttcaacaaaagaagagaagggagaagaaaagcctgacaccaaaagcactgtgactggagagaggcaaagtggggacggacaggagagcacagagcctgtggagaacaaagtgggtaaaaagggccctaagcatttggatgatgatgaagatcggaagaatccagcatacatacctcggaaagggctcttctttgagcatgatcttcgagggcaaactcaggaggaggaagtcagacccaaggggcgtcagcgaaagctatggaaggatgagggtcgctgggagcatgacaagttccgggaagatgagcaggccccaaagtcccgacaggagctcattgctctttatggttatgacattcgctcagctcataatcctgatgacatcaaacctcgaagaatccggaaaccccgatatgggagtcctccacaaagagatccaaactggaacggtgagcggctaaacaagtctcatcgccaccagggtcttgggggcaccctaccaccaaggacatttattaacaggaatgctgcaggtaccggccgtatgtctgcacccaggaattattctcgatctgggggcttcaaggaaggtcgtgctggttttaggcctgtggaagctggtgggcagcatggtggccggtctggtgagactgttaagcatgagattagttaccggtcacggcgcctagagcagacttctgtgagggatccatctccagaagcagatgctccagtgcttggcagtcctgagaaggaagaggcagcctcagagccaccagctgctgctcctgatgctgcaccaccaccccctgataggcccattgagaagaaatcctattcccgggcaagaagaactcgaaccaaagttggagatgcagtcaagcttgcagaggaggtgccccctcctcctgaaggactgattccagcacctccagtcccagaaaccaccccaactccacctactaagactgggacctgggaagctccggtggattctagtacaagtggacttgagcaagatgtggcacaactaaatatagcagaacagaattggagtccggggcagccttctttcctgcaaccacgggaacttcgaggtatgcccaaccatatacacatgggagcaggacctccacctcagtttaaccggatggaagaaatgggtgtccagggtggtcgagccaaacgctattcatcccagcggcaaagacctgtgccagagccccccgcccctccagtgcatatcagtatcatggagggacattactatgatccacgtgagttttttcttactgttggggtacttttcttggcagggtgaagtgaagtaagataccaggctcctggctcctgaatttctcttctgacctcttatagtggttatcaaacattgtctggttgctgttttcttcgcatggaatattgagaacatcttttaaagggcttggggaacaaggagacttgtccatgtgaagagtaagggtttatgagagtcccaatgtgatatcttacagtgcagttccagggaccaatctatacccatggtgacagccctgccccgctgcctccacagggcatgcttgtgcagccaggaatgaaccttccccacccaggtttacatccccaccagacaccagctcctctgcccaatccaggcctctatcccccaccagtgtccatgtctccaggacagccaccacctcagcagttgcttgctcctacttacttttctgctccaggcgtcatgaactttggtaatcccagttacccttatgctccaggggcactgcctcccccaccaccgcctcatctgtatcctaatacacaggccccatcacaggtatatggaggagtgacctactataaccccgcccagcagcaggtgcagccaaagccctccccaccccggaggactccccagccagtcaccatcaagccccctccacctgaggttgtaagcaggggttccagttaatacaagtttctgaatattttaaatcttaacatcatataaaaagcagcagaggtgagaactcagaagagaaatacagctggctatctactaccagaagggcttcaaagatatagggtgtggctcctaccagcaaacagctgaaagaggaggacccctgccttcctctgaggacaggctctagagagagggagaaacaagtggacctcgtcccatcttcactcttcacttgagttggctgtgttcgggggagcagagagagccagacagccccaagcttctgagtctagatacagaagcccatgtcttctgctgttcttcacttctgggaaattgaagtgtcttctgttcccaaggaagctccttcctgtttgttttgttttctaagatgttcatttttaaagcctggcttcttatccttaatattattttaattttttctctttgtttctgtttcttgctctctctccctgcctttaaatgaaacaagtctagtcttctggttttctagcccctctggattcccttttgactcttccgtgcatcccagataatggagaatgtatcagccagccttccccaccaagtctaaaaagacctggcctttcacttttagttggcatttgttatcctcttgtatacttgtattcccttaactctaaccctgtggaagcatggctgtctgcacagagggtcccattgtgcagaaaagctcagagtaggtgggtaggagcccttctctttgacttaggtttttaggagtctgagcatccatcaatacctgtactatgatgggcttctgttctctgctgagggccaataccctactgtggggagagatggcacaccagatgcttttgtgagaaagggatggtggagtgagagcctttgcctttaggggtgtgtattcacatagtcctcagggctcagtcttttgaggtaagtggaattagagggccttgcttctcttctttccattcttcttgctacaccccttttccagttgctgtggaccaatgcatctctttaaaggcaaatattatccagcaagcagtctaccctgtcctttgcaattgctcttctccacgtctttcctgctacaagtgttttagatgttactaccttattttccccgaattctatttttgtccttgcagacagaatataaaaactcctgggcttaaggcctaaggaagccagtcaccttctgggcaagggctcctatctttcctccctatccatggcactaaaccacttctctgctgcctctgtggaagagattcctattactgcagtacatacgtctgccaggggtaacctggccactgtccctgtccttctacagaacctgagggcaaagatggtggctgtgtctctccccggtaatgtcactgtttttattccttccatctagcagctggcctaatcactctgagtcacaggtgtgggatggagagtggggagaggcacttaatctgtaacccccaaggaggaaataactaagagattcttctaggggtagctggtggttgtgccttttgtaggctgttccctttgccttaaacctgaagatgtctcctcaagcctgtgggcagcatgcccagattcccagaccttaagacactgtgagagttgtctctgttggtccactgtgtttagttgcaaggatttttccatgtgtggtggtgttttttgttactgttttaaagggtgcccatttgtgatcagcattgtgacttggagataataaaatttagactataaacttg

SEQ ID NO: 385625 - DNA, 2854 bp, Homo sapiens
cggtacctcgcgccgtgtatcccaccacgcccggccaagataaagtcagtttttccattgattatgcatgtttcttttaatttggatctcctaaatgtaaggtagaaggtttaggttcaaatcttgatatcttttcattatttttcagctcactttgcaaatatccattaaatacctgccatgtaccaagtgtttttcaacacctaaaggaaggtaggacttgatatgagagccctctagaattcttattgtttaggcctctttctttgtctcagggtgtccagggtggtcgagccaaacgctattcatcccagcggcaaagacctgtgccagagccccccgcccctccagtgcatatcagtatcatggagggacattactatgatccacgtgagttttttcttactgttggggtacttttcttggcagggtgaagtgaagtaagataccaggctcctggctcctgaatttctcttctgacctcttatagtggttatcaaacattgtctggttgctgttttcttcgcatggaatattgagaacatcttttaaagggcttggggaacaaggagacttgtccatgtgaagagtaagggtttatgagagtcccaatgtgatatcttacagtgcagttccagggaccaatctatacccatggtgacagccctgccccgctgcctccacagggcatgcttgtgcagccaggaatgaaccttccccacccaggtttacatccccaccagacaccagctcctctgcccaatccaggcctctatcccccaccagtgtccatgtctccaggacagccaccacctcagcagttgcttgctcctacttacttttctgctccaggcgtcatgaactttggtaatcccagttacccttatgctccaggggcactgcctcccccaccaccgcctcatctgtatcctaatacacaggccccatcacaggtatatggaggagtgacctactataaccccgcccagcagcaggtgcagccaaagccctccccaccccggaggactccccagccagtcaccatcaagccccctccacctgaggttgtaagcaggggttccagttaatacaagtttctgaatattttaaatcttaacatcatataaaaagcagcagaggtgagaactcagaagagaaatacagctggctatctactaccagaagggcttcaaagatatagggtgtggctcctaccagcaaacagctgaaagaggaggacccctgccttcctctgaggacaggctctagagagagggagaaacaagtggacctcgtcccatcttcactcttcacttgagttggctgtgttcgggggagcagagagagccagacagccccaagcttctgagtctagatacagaagcccatgtcttctgctgttcttcacttctgggaaattgaagtgtcttctgttcccaaggaagctccttcctgtttgttttgttttctaagatgttcatttttaaagcctggcttcttatccttaatattattttaattttttctctttgtttctgtttcttgctctctctccctgcctttaaatgaaacaagtctagtcttctggttttctagcccctctggattcccttttgactcttccgtgcatcccagataatggagaatgtatcagccagccttccccaccaagtctaaaaagacctggcctttcacttttagttggcatttgttatcctcttgtatacttgtattcccttaactctaaccctgtggaagcatggctgtctgcacagagggtcccattgtgcagaaaagctcagagtaggtgggtaggagcccttctctttgacttaggtttttaggagtctgagcatccatcaatacctgtactatgatgggcttctgttctctgctgagggccaataccctactgtggggagagatggcacaccagatgcttttgtgagaaagggatggtggagtgagagcctttgcctttaggggtgtgtattcacatagtcctcagggctcagtcttttgaggtaagtggaattagagggccttgcttctcttctttccattcttcttgctacaccccttttccagttgctgtggaccaatgcatctctttaaaggcaaatattatccagcaagcagtctaccctgtcctttgcaattgctcttctccacgtctttcctgctacaagtgttttagatgttactaccttattttccccgaattctatttttgtccttgcagacagaatataaaaactcctgggcttaaggcctaaggaagccagtcaccttctgggcaagggctcctatctttcctccctatccatggcactaaaccacttctctgctgcctctgtggaagagattcctattactgcagtacatacgtctgccaggggtaacctggccactgtccctgtccttctacagaacctgagggcaaagatggtggctgtgtctctccccggtaatgtcactgtttttattccttccatctagcagctggcctaatcactctgagtcacaggtgtgggatggagagtggggagaggcacttaatctgtaacccccaaggaggaaataactaagagattcttctaggggtagctggtggttgtgccttttgtaggctgttccctttgccttaaacctgaagatgtctcctcaagcctgtgggcagcatgcccagattcccagaccttaagacactgtgagagttgtctctgttggtccactgtgtttagttgcaaggatttttccatgtgtggtggtgttttttgttactgttttaaagggtgcccatttgtgatcagcattgtgacttggagataataaaatttagactataaacttg

SEQ ID NO: 385626 - DNA, 2491 bp, Homo sapiens
gagacagagtctcactgttgcccaggctggagtgcagtggtgtgatctcggctcactgcaagctctgctcctgacctcaaccgatccacctgcctcggcctccgaaagtgctgggattacaggcataagccaccgcacccagcgttcagtttctttaatggtgtttctttcctgtgttgtggtacatcataggtggcaatacctggtttttactctattgcataaagaagctgtattctactccttatcacccctacctctgtcctgcttaacttccaccacgttgacataatcaagtatctgtagtgtcgctactgaactcagccttttccatttgtcagctgatggtaggaattagagaaagctgggcagtactttgaagaaataaaaaccagagcataataatgaagaattaaggcaaaaatgaatagtcactttattttgaagggtgggcagattagatatttttaaaattataaattccccaattctcttatggctgaataatatttcctgttcatcataggttggatgaattcattcctaactttttcttctcctggcttgtggggtcccaggccccatcacaggtatatggaggagtgacctactataaccccgcccagcagcaggtgcagccaaagccctccccaccccggaggactccccagccagtcaccatcaagccccctccacctgaggttgtaagcaggggttccagttaatacaagtttctgaatattttaaatcttaacatcatataaaaagcagcagaggtgagaactcagaagagaaatacagctggctatctactaccagaagggcttcaaagatatagggtgtggctcctaccagcaaacagctgaaagaggaggacccctgccttcctctgaggacaggctctagagagagggagaaacaagtggacctcgtcccatcttcactcttcacttgagttggctgtgttcgggggagcagagagagccagacagccccaagcttctgagtctagatacagaagcccatgtcttctgctgttcttcacttctgggaaattgaagtgtcttctgttcccaaggaagctccttcctgtttgttttgttttctaagatgttcatttttaaagcctggcttcttatccttaatattattttaattttttctctttgtttctgtttcttgctctctctccctgcctttaaatgaaacaagtctagtcttctggttttctagcccctctggattcccttttgactcttccgtgcatcccagataatggagaatgtatcagccagccttccccaccaagtctaaaaagacctggcctttcacttttagttggcatttgttatcctcttgtatacttgtattcccttaactctaaccctgtggaagcatggctgtctgcacagagggtcccattgtgcagaaaagctcagagtaggtgggtaggagcccttctctttgacttaggtttttaggagtctgagcatccatcaatacctgtactatgatgggcttctgttctctgctgagggccaataccctactgtggggagagatggcacaccagatgcttttgtgagaaagggatggtggagtgagagcctttgcctttaggggtgtgtattcacatagtcctcagggctcagtcttttgaggtaagtggaattagagggccttgcttctcttctttccattcttcttgctacaccccttttccagttgctgtggaccaatgcatctctttaaaggcaaatattatccagcaagcagtctaccctgtcctttgcaattgctcttctccacgtctttcctgctacaagtgttttagatgttactaccttattttccccgaattctatttttgtccttgcagacagaatataaaaactcctgggcttaaggcctaaggaagccagtcaccttctgggcaagggctcctatctttcctccctatccatggcactaaaccacttctctgctgcctctgtggaagagattcctattactgcagtacatacgtctgccaggggtaacctggccactgtccctgtccttctacagaacctgagggcaaagatggtggctgtgtctctccccggtaatgtcactgtttttattccttccatctagcagctggcctaatcactctgagtcacaggtgtgggatggagagtggggagaggcacttaatctgtaacccccaaggaggaaataactaagagattcttctaggggtagctggtggttgtgccttttgtaggctgttccctttgccttaaacctgaagatgtctcctcaagcctgtgggcagcatgcccagattcccagaccttaagacactgtgagagttgtctctgttggtccactgtgtttagttgcaaggatttttccatgtgtggtggtgttttttgttactgttttaaagggtgcccatttgtgatcagcattgtgacttggagataataaaatttagactataaacttg

SEQ ID NO: 385627 - DNA, 2127 bp, Homo sapiens
cccacccagcctctgattaatgctttaagttataataatcatgggatatctcaggaggcttaaaggagtcctgaaatttgccagtttgtttgtttggcaagtgtattgggcagggttgaagtagaaacgattgttaacatgacagttttcaattgggaagctacaaggaaaaaatacaggaaggcagtcaaggaaaagggaaatctaaatttgagatgttatagcagaaaaaaccagttctaaagatcatagaggagaaggactgggggttttgttgcttttgtttaaggacattacttaaaacacattatttagaagtgtggctttttgaaaacagcttgtgaatgcccagaaggcccactaacactttggtggttcttccctttttccaacccctgtcagagcagcagaggtgagaactcagaagagaaatacagctggctatctactaccagaagggcttcaaagatatagggtgtggctcctaccagcaaacagctgaaagaggaggacccctgccttcctctgaggacaggctctagagagagggagaaacaagtggacctcgtcccatcttcactcttcacttgagttggctgtgttcgggggagcagagagagccagacagccccaagcttctgagtctagatacagaagcccatgtcttctgctgttcttcacttctgggaaattgaagtgtcttctgttcccaaggaagctccttcctgtttgttttgttttctaagatgttcatttttaaagcctggcttcttatccttaatattattttaattttttctctttgtttctgtttcttgctctctctccctgcctttaaatgaaacaagtctagtcttctggttttctagcccctctggattcccttttgactcttccgtgcatcccagataatggagaatgtatcagccagccttccccaccaagtctaaaaagacctggcctttcacttttagttggcatttgttatcctcttgtatacttgtattcccttaactctaaccctgtggaagcatggctgtctgcacagagggtcccattgtgcagaaaagctcagagtaggtgggtaggagcccttctctttgacttaggtttttaggagtctgagcatccatcaatacctgtactatgatgggcttctgttctctgctgagggccaataccctactgtggggagagatggcacaccagatgcttttgtgagaaagggatggtggagtgagagcctttgcctttaggggtgtgtattcacatagtcctcagggctcagtcttttgaggtaagtggaattagagggccttgcttctcttctttccattcttcttgctacaccccttttccagttgctgtggaccaatgcatctctttaaaggcaaatattatccagcaagcagtctaccctgtcctttgcaattgctcttctccacgtctttcctgctacaagtgttttagatgttactaccttattttccccgaattctatttttgtccttgcagacagaatataaaaactcctgggcttaaggcctaaggaagccagtcaccttctgggcaagggctcctatctttcctccctatccatggcactaaaccacttctctgctgcctctgtggaagagattcctattactgcagtacatacgtctgccaggggtaacctggccactgtccctgtccttctacagaacctgagggcaaagatggtggctgtgtctctccccggtaatgtcactgtttttattccttccatctagcagctggcctaatcactctgagtcacaggtgtgggatggagagtggggagaggcacttaatctgtaacccccaaggaggaaataactaagagattcttctaggggtagctggtggttgtgccttttgtaggctgttccctttgccttaaacctgaagatgtctcctcaagcctgtgggcagcatgcccagattcccagaccttaagacactgtgagagttgtctctgttggtccactgtgtttagttgcaaggatttttccatgtgtggtggtgttttttgttactgttttaaagggtgcccatttgtgatcagcattgtgacttggagataataaaatttagactataaacttg

SEQ ID NO: 385628 - DNA, 1914 bp, Homo sapiens
ggaatcgagctcggccctactttccacaggtgatcatagaggagaaggactgggggttttgttgcttttgtttaaggacattacttaaaacacattatttagaagtgtggctttttgaaaacagcttgtgaatgcccagaaggcccactaacactttggtggttcttccctttttccaacccctgtcagagcagcagaggtgagaactcagaagagaaatacagctggctatctactaccagaagggcttcaaagatatagggtgtggctcctaccagcaaacagctgaaagaggaggacccctgccttcctctgaggacaggctctagagagagggagaaacaagtggacctcgtcccatcttcactcttcacttgagttggctgtgttcgggggagcagagagagccagacagccccaagcttctgagtctagatacagaagcccatgtcttctgctgttcttcacttctgggaaattgaagtgtcttctgttcccaaggaagctccttcctgtttgttttgttttctaagatgttcatttttaaagcctggcttcttatccttaatattattttaattttttctctttgtttctgtttcttgctctctctccctgcctttaaatgaaacaagtctagtcttctggttttctagcccctctggattcccttttgactcttccgtgcatcccagataatggagaatgtatcagccagccttccccaccaagtctaaaaagacctggcctttcacttttagttggcatttgttatcctcttgtatacttgtattcccttaactctaaccctgtggaagcatggctgtctgcacagagggtcccattgtgcagaaaagctcagagtaggtgggtaggagcccttctctttgacttaggtttttaggagtctgagcatccatcaatacctgtactatgatgggcttctgttctctgctgagggccaataccctactgtggggagagatggcacaccagatgcttttgtgagaaagggatggtggagtgagagcctttgcctttaggggtgtgtattcacatagtcctcagggctcagtcttttgaggtaagtggaattagagggccttgcttctcttctttccattcttcttgctacaccccttttccagttgctgtggaccaatgcatctctttaaaggcaaatattatccagcaagcagtctaccctgtcctttgcaattgctcttctccacgtctttcctgctacaagtgttttagatgttactaccttattttccccgaattctatttttgtccttgcagacagaatataaaaactcctgggcttaaggcctaaggaagccagtcaccttctgggcaagggctcctatctttcctccctatccatggcactaaaccacttctctgctgcctctgtggaagagattcctattactgcagtacatacgtctgccaggggtaacctggccactgtccctgtccttctacagaacctgagggcaaagatggtggctgtgtctctccccggtaatgtcactgtttttattccttccatctagcagctggcctaatcactctgagtcacaggtgtgggatggagagtggggagaggcacttaatctgtaacccccaaggaggaaataactaagagattcttctaggggtagctggtggttgtgccttttgtaggctgttccctttgccttaaacctgaagatgtctcctcaagcctgtgggcagcatgcccagattcccagaccttaagacactgtgagagttgtctctgttggtccactgtgtttagttgcaaggatttttccatgtgtggtggtgttttttgttactgttttaaagggtgcccatttgtgatcagcattgtgacttggagataataaaatttagactataaacttg

SEQ ID NO: 385629 - DNA, 1632 bp, Homo sapiens
taagtactcatggttaatcatgtgttgacacttacccataacctcaccagtgtggttccaaggtcttactgatactccagaagataatactctcaaccccaaatgataaggaatttcttcgaacacatcactcctcagttcacaaattcctcctgggcttctagatgtagctccagtgttagcatctggcaagaagctgtccttgaatactctaccctcatctatgcacctctcctttgactcctacaccactcacctgtcctgctcaccccagccatctcttctctgaacaccacagtaacaatacttgtcctgatttatatgtggtggagcatgtgaagaaatgaaacaagtctagtcttctggttttctagcccctctggattcccttttgactcttccgtgcatcccagataatggagaatgtatcagccagccttccccaccaagtctaaaaagacctggcctttcacttttagttggcatttgttatcctcttgtatacttgtattcccttaactctaaccctgtggaagcatggctgtctgcacagagggtcccattgtgcagaaaagctcagagtaggtgggtaggagcccttctctttgacttaggtttttaggagtctgagcatccatcaatacctgtactatgatgggcttctgttctctgctgagggccaataccctactgtggggagagatggcacaccagatgcttttgtgagaaagggatggtggagtgagagcctttgcctttaggggtgtgtattcacatagtcctcagggctcagtcttttgaggtaagtggaattagagggccttgcttctcttctttccattcttcttgctacaccccttttccagttgctgtggaccaatgcatctctttaaaggcaaatattatccagcaagcagtctaccctgtcctttgcaattgctcttctccacgtctttcctgctacaagtgttttagatgttactaccttattttccccgaattctatttttgtccttgcagacagaatataaaaactcctgggcttaaggcctaaggaagccagtcaccttctgggcaagggctcctatctttcctccctatccatggcactaaaccacttctctgctgcctctgtggaagagattcctattactgcagtacatacgtctgccaggggtaacctggccactgtccctgtccttctacagaacctgagggcaaagatggtggctgtgtctctccccggtaatgtcactgtttttattccttccatctagcagctggcctaatcactctgagtcacaggtgtgggatggagagtggggagaggcacttaatctgtaacccccaaggaggaaataactaagagattcttctaggggtagctggtggttgtgccttttgtaggctgttccctttgccttaaacctgaagatgtctcctcaagcctgtgggcagcatgcccagattcccagaccttaagacactgtgagagttgtctctgttggtccactgtgtttagttgcaaggatttttccatgtgtggtggtgttttttgttactgttttaaagggtgcccatttgtgatcagcattgtgacttggagataataaaatttagactataaacttg

SEQ ID NO: 385630 - DNA, 1050 bp, Homo sapiens
cagaaacatgaactagatcggccgtggttaattcgttaacgagtctgagcatccatcaatacctgtactatgatgggcttctgttctctgctgagggccaataccctactgtggggagagatggcacaccagatgcttttgtgagaaagggatggtggagtgagagcctttgcctttaggggtgtgtattcacatagtcctcagggctcagtcttttgaggtaagtggaattagagggccttgcttctcttctttccattcttcttgctacaccccttttccagttgctgtggaccaatgcatctctttaaaggcaaatattatccagcaagcagtctaccctgtcctttgcaattgctcttctccacgtctttcctgctacaagtgttttagatgttactaccttattttccccgaattctatttttgtccttgcagacagaatataaaaactcctgggcttaaggcctaaggaagccagtcaccttctgggcaagggctcctatctttcctccctatccatggcactaaaccacttctctgctgcctctgtggaagagattcctattactgcagtacatacgtctgccaggggtaacctggccactgtccctgtccttctacagaacctgagggcaaagatggtggctgtgtctctccccggtaatgtcactgtttttattccttccatctagcagctggcctaatcactctgagtcacaggtgtgggatggagagtggggagaggcacttaatctgtaacccccaaggaggaaataactaagagattcttctaggggtagctggtggttgtgccttttgtaggctgttccctttgccttaaacctgaagatgtctcctcaagcctgtgggcagcatgcccagattcccagaccttaagacactgtgagagttgtctctgttggtccactgtgtttagttgcaaggatttttccatgtgtggtggtgttttttgttactgttttaaagggtgcccatttgtgatcagcattgtgacttggagataataaaatttagactataaacttg

SEQ ID NO: 385631 - DNA, 986 bp, Homo sapiens
cggacgcgtgggtcgacccacgcgtccggagggccaataccctactgtggggagagatggcacaccagatgcttttgtgagaaagggatggtggagtgagagcctttgcctttaggggtgtgtattcacatagtcctcagggctcagtcttttgaggtaagtggaattagagggccttgcttctcttctttccattcttcttgctacaccccttttccagttgctgtggaccaatgcatctctttaaaggcaaatattatccagcaagcagtctaccctgtcctttgcaattgctcttctccacgtctttcctgctacaagtgttttagatgttactaccttattttccccgaattctatttttgtccttgcagacagaatataaaaactcctgggcttaaggcctaaggaagccagtcaccttctgggcaagggctcctatctttcctccctatccatggcactaaaccacttctctgctgcctctgtggaagagattcctattactgcagtacatacgtctgccaggggtaacctggccactgtccctgtccttctacagaacctgagggcaaagatggtggctgtgtctctccccggtaatgtcactgtttttattccttccatctagcagctggcctaatcactctgagtcacaggtgtgggatggagagtggggagaggcacttaatctgtaacccccaaggaggaaataactaagagattcttctaggggtagctggtggttgtgccttttgtaggctgttccctttgccttaaacctgaagatgtctcctcaagcctgtgggcagcatgcccagattcccagaccttaagacactgtgagagttgtctctgttggtccactgtgtttagttgcaaggatttttccatgtgtggtggtgttttttgttactgttttaaagggtgcccatttgtgatcagcattgtgacttggagataataaaatttagactataaacttg

SEQ ID NO: 385632 - DNA, 615 bp, Homo sapiens
aaattgagcagtgcgggcgggtgggatcggcagaggggcgaggagcagcacttctgggcaagggctcctatctttcctccctatccatggcactaaaccacttctctgctgcctctgtggaagagattcctattactgcagtacatacgtctgccaggggtaacctggccactgtccctgtccttctacagaacctgagggcaaagatggtggctgtgtctctccccggtaatgtcactgtttttattccttccatctagcagctggcctaatcactctgagtcacaggtgtgggatggagagtggggagaggcacttaatctgtaacccccaaggaggaaataactaagagattcttctaggggtagctggtggttgtgccttttgtaggctgttccctttgccttaaacctgaagatgtctcctcaagcctgtgggcagcatgcccagattcccagaccttaagacactgtgagagttgtctctgttggtccactgtgtttagttgcaaggatttttccatgtgtggtggtgttttttgttactgttttaaagggtgcccatttgtgatcagcattgtgacttggagataataaaatttagactataaacttg

SEQ ID NO: 385633 - DNA, 3451 bp, Homo sapiens
acacacacacacacacacacacacaccccaacacacacacacacacacacacacacacacacacacacacacacacacacacacacacacacacacacacagcgggatggccgagcgccgcacgcgtagcacgccgggactagctatccagcctcccagcagcctctgcgacgggcgcggtgcgtaagtacctcgccggtggtggccgttctccgtaagatggcggaccggcggcggcagcgcgcttcgcaagacaccgaggacgaggaatctggtgcttcgggctccgacagcggcggctccccgttgcggggaggcgggagctgcagcggtagcgccggaggcggcggcagcggctctctgccttcacagcgcggaggccgaaccggggcccttcatctgcggcgggtggagagcgggggcgccaagagtgctgaggagtcggagtgtgagagtgaagatggcattgaaggtgatgctgttctctcggattatgaaagtgcagaagactcggaaggtgaagaaggtgaatacagtgaagaggaaaactccaaagtggagctgaaatcagaagctaatgatgctgttaattcttcaacaaaagaagagaagggagaagaaaagcctgacaccaaaagcactgtgactggagagaggcaaagtggggacggacaggagagcacagagcctgtggagaacaaagtgggtaaaaagggccctaagcatttggatgatgatgaagatcggaagaatccagcatacatacctcggaaagggctcttctttgagcatgatcttcgagggcaaactcaggaggaggaagtcagacccaaggggcgtcagcgaaagctatggaaggatgagggtcgctgggagcatgacaagttccgggaagatgagcaggccccaaagtcccgacaggagctcattgctctttatggttatgacattcgctcagctcataatcctgatgacatcaaacctcgaagaatccggaaaccccgatatgggagtcctccacaaagagatccaaactggaacggtgagcggctaaacaagtctcatcgccaccagggtcttgggggcaccctaccaccaaggacatttattaacaggaatgctgcaggtaccggccgtatgtctgcacccaggaattattctcgatctgggggcttcaaggaaggtcgtgctggttttaggcctgtggaagctggtgggcagcatggtggccggtctggtgagactgttaagcatgagattagttaccggtcacggcgcctagagcagacttctgtgagggatccatctccagaagcagatgctccagtgcttggcagtcctgagaaggaagaggcagcctcagagccaccagctgctgctcctgatgctgcaccaccaccccctgataggcccattgagaagaaatcctattcccgggcaagaagaactcgaaccaaagttggagatgcagtcaagcttgcagaggaggtgccccctcctcctgaaggactgattccagcacctccagtcccagaaaccaccccaactccacctactaagactgggacctgggaagctccggtggattctagtacaagtggacttgagcaagatgtggcacaactaaatatagcagaacagaattggagtccggggcagccttctttcctgcaaccacgggaacttcgaggtatgcccaaccatatacacatgggagcaggacctccacctcagtttaaccggatggaagaaatgggtgtccagggtggtcgagccaaacgctattcatcccagcggcaaagacctgtgccagagccccccgcccctccagtgcatatcagtatcatggagggacattactatgatccactgcagttccagggaccaatctatacccatggtgacagccctgccccgctgcctccacagggcatgcttgtgcagccaggaatgaaccttccccacccaggtttacatccccaccagacaccagctcctctgcccaatccaggcctctatcccccaccagtgtccatgtctccaggacagccaccacctcagcagttgcttgctcctacttacttttctgctccaggcgtcatgaactttggtaatcccagttacccttatgctccaggggcactgcctcccccaccaccgcctcatctgtatcctaatacacaggccccatcacaggtatatggaggagtgacctactataaccccgcccagcagcaggtgcagccaaagccctccccaccccggaggactccccagccagtcaccatcaagccccctccacctgaggttgtaagcaggggttccagttaatacaagtttctgaatattttaaatcttaacatcatataaaaagcagcagaggtgagaactcagaagagaaatacagctggctatctactaccagaagggcttcaaagatatagggtgtggctcctaccagcaaacagctgaaagaggaggacccctgccttcctctgaggacaggctctagagagagggagaaacaagtggacctcgtcccatcttcactcttcacttgagttggctgtgttcgggggagcagagagagccagacagccccaagcttctgagtctagatacagaagcccatgtcttctgctgttcttcacttctgggaaattgaagtgtcttctgttcccaaggaagctccttcctgtttgttttgttttctaagatgttcatttttaaagcctggcttcttatccttaatattattttaattttttctctttgtttctgtttcttgctctctctccctgcctttaaatgaaacaagtctagtcttctggttttctagcccctctggattcccttttgactcttccgtgcatcccagataatggagaatgtatcagccagccttccccaccaagtctaaaaagacctggcctttcacttttagttggcatttgttatcctcttgtatacttgtattcccttaactctaaccctgtggaagcatggctgtctgcacagagggtcccattgtgcagaaaagctcagagtaggtgggtaggagcccttctctttgacttaggtttttaggagtctgagcatccatcaatacctgtactatgatgggcttctgttctctgctgagggccaataccctactgtggggagagatggcacaccagatgcttttgtgagaaagggatggtggagtgagagcctttgcctttaggggtgtgtattcacatagtcctcagggctcagtcttttgaggtaagtggaattagagggccttgcttcagatatgtgtttgtgtttttttgtggtaaagtaaggagttacggctggcatgtgataataggtcagggaaaccagattgtcgggactatgacctttttctccagtatgctacctgatcttctttggcatgctcctctagtcggcagcaaacgtttat

SEQ ID NO: 385634 - DNA, 2774 bp, Homo sapiens
  misc_feature (2773)..(2774): n is a, c, g, or t
acacacacacacacacacacacacaccccaacacacacacacacacacacacacacacacacacacacacacacacacacacacacacacacacacacacagcgggatggccgagcgccgcacgcgtagcacgccgggactagctatccagcctcccagcagcctctgcgacgggcgcggtgcgtaagtacctcgccggtggtggccgttctccgtaagatggcggaccggcggcggcagcgcgcttcgcaagacaccgaggacgaggaatctggtgcttcgggctccgacagcggcggctccccgttgcggggaggcgggagctgcagcggtagcgccggaggcggcggcagcggctctctgccttcacagcgcggaggccgaaccggggcccttcatctgcggcgggtggagagcgggggcgccaagagtgctgaggagtcggagtgtgagagtgaagatggcattgaaggtgatgctgttctctcggattatgaaagtgcagaagactcggaaggtgaagaaggtgaatacagtgaagaggaaaactccaaagtggagctgaaatcagaagctaatgatgctgttaattcttcaacaaaagaagagaagggagaagaaaagcctgacaccaaaagcactgtgactggagagaggcaaagtggggacggacaggagagcacagagcctgtggagaacaaagtgggtaaaaagggccctaagcatttggatgatgatgaagatcggaagaatccagcatacatacctcggaaagggctcttctttgagcatgatcttcgagggcaaactcaggaggaggaagtcagacccaaggggcgtcagcgaaagctatggaaggatgagggtcgctgggagcatgacaagttccgggaagatgagcaggccccaaagtcccgacaggagctcattgctctttatggttatgacattcgctcagctcataatcctgatgacatcaaacctcgaagaatccggaaaccccgatatgggagtcctccacaaagagatccaaactggaacggtgagcggctaaacaagtctcatcgccaccagggtcttgggggcaccctaccaccaaggacatttattaacaggaatgctgcaggtaccggccgtatgtctgcacccaggaattattctcgatctgggggcttcaaggaaggtcgtgctggttttaggcctgtggaagctggtgggcagcatggtggccggtctggtgagactgttaagcatgagattagttaccggtcacggcgcctagagcagacttctgtgagggatccatctccagaagcagatgctccagtgcttggcagtcctgagaaggaagaggcagcctcagagccaccagctgctgctcctgatgctgcaccaccaccccctgataggcccattgagaagaaatcctattcccgggcaagaagaactcgaaccaaagttggagatgcagtcaagcttgcagaggaggtgccccctcctcctgaaggactgattccagcacctccagtcccagaaaccaccccaactccacctactaagactgggacctgggaagctccggtggattctagtacaagtggacttgagcaagatgtggcacaactaaatatagcagaacagaattggagtccggggcagccttctttcctgcaaccacgggaacttcgaggtatgcccaaccatatacacatgggagcaggacctccacctcagtttaaccggatggaagaaatgggtgtccagggtggtcgagccaaacgctattcatcccagcggcaaagacctgtgccagagccccccgcccctccagtgcatatcagtatcatggagggacattactatgatccactgcagttccagggaccaatctatacccatggtgacagccctgccccgctgcctccacagggcatgcttgtgcagccaggaatgaaccttccccacccaggtttacatccccaccagacaccagctcctctgcccaatccaggcctctatcccccaccagtgtccatgtctccaggacagccaccacctcagcagttgcttgctcctacttacttttctgctccaggcgtcatgaactttggtaatcccagttacccttatgctccaggggcactgcctcccccaccaccgcctcatctgtatcctaatacacaggccccatcacaggtatatggaggagtgacctactataaccccgcccagcagcaggtgcagccaaagccctccccaccccggaggactccccagccagtcaccatcaagccccctccacctgaggtagtaagcaggggttcagttaatacaagtcctgaatatatgaaaatcttaacatcatctaaacagaggtgacaaatcagaagagacatacaaggtggatatctactaacaagaagggctgcaaagatatacaggagaggcacctaacaaccaagcagcgacacacggggaccccggactcctacggaagacaagaccacaacgaaggaaaaaccaaaggacacggaccaagcacagacgacgtgaaagcgagacgacggaggaaaagaaaacgcacacaggccaggagacgagcgcacaaaccgagccccaacgaacgcagaagacaaatcgggacaaaggaggcttcagtcccaagagacgccccgagagacacgacccaacagacgcaagaaaagacgagactacacacgacgacaaagaagacacgcgaccgccggaggagatgcagacgaatcaatgagann

SEQ ID NO: 385635 - DNA, 281 bp, Homo sapiens
atcaagccccctccacctgaggtatgagagttccttcctatacttaatgcacatgctccgtcagtgggctttccttctccccagaggatttccctcattttctgggtgtgtttctctggaaaacagtctttttgttatgacctgataacaaattccaactttgttatttcaggttgtaagcaggggttccagttaatacaagtttctgaatattttaaatcttaacatcatataaaagtaagtgcacaacttactgtgaatattgttaaaactaatgctca

SEQ ID NO: 385636 - DNA, 482 bp, Homo sapiens
gtgcagtgacgggatcacggctcactgcaagctctgcctcctgggtcccagttcaagcaattctgcctcagcctcccgagtagctggcattacaggcacgtgccatcatgcccagctaatttttgtatttttagtaaagacagggtttcaccatgttggccaggctggtcctgactcctgacctcatgatccacccaccctggcctcccaaagtattgggattacaggcatgagccaccacgcccggccaagataaagtcagtttttccattgattatgcatgtttcttttaatttggatctcctaaatgtaaggtagaaggtttaggttcaaatcttgatatcttttcattatttttcagctcactttgcaaatatccattaaatacctgccatgtaccaagtgtttttcaacacctaaaggaaggtaggacttgatatgagagccctctagaattcttattgtttaggcctctttctttg

SEQ ID NO: 385637 - DNA, 4224 bp, Homo sapiens
acacacacacacacacacacacacaccccaacacacacacacacacacacacacacacacacacacacacacacacacacacacacacacacacacacacagcgggatggccgagcgccgcacgcgtagcacgccgggactagctatccagcctcccagcagcctctgcgacgggcgcggtgcgtaagtacctcgccggtggtggccgttctccgtaagatggcggaccggcggcggcagcgcgcttcgcaagacaccgaggacgaggaatctggtgcttcgggctccgacagcggcggctccccgttgcggggaggcgggagctgcagcggtagcgccggaggcggcggcagcggctctctgccttcacagcgcggaggccgaaccggggcccttcatctgcggcgggtggagagcgggggcgccaagagtgctgaggagtcggagtgtgagagtgaagatggcattgaaggtgatgctgttctctcggattatgaaagtgcagaagactcggaaggtgaagaaggtgaatacagtgaagaggaaaactccaaagtggagctgaaatcagaagctaatgatgctgttaattcttcaacaaaagaagagaagggagaagaaaagcctgacaccaaaagcactgtgactggagagaggcaaagtggggacggacaggagagcacagagcctgtggagaacaaagtgggtaaaaagggccctaagcatttggatgatgatgaagatcggaagaatccagcatacatacctcggaaagggctcttctttgagcatgatcttcgagggcaaactcaggaggaggaagtcagacccaaggggcgtcagcgaaagctatggaaggatgagggtcgctgggagcatgacaagttccgggaagatgagcaggccccaaagtcccgacaggagctcattgctctttatggttatgacattcgctcagctcataatcctgatgacatcaaacctcgaagaatccggaaaccccgatatgggagtcctccacaaagagatccaaactggaacggtgagcggctaaacaagtctcatcgccaccagggtcttgggggcaccctaccaccaaggacatttattaacaggaatgctgcaggtaccggccgtatgtctgcacccaggaattattctcgatctgggggcttcaaggaaggtcgtgctggttttaggcctgtggaagctggtgggcagcatggtggccggtctggtgagactgttaagcatgagattagttaccggtcacggcgcctagagcagacttctgtgagggatccatctccagaagcagatgctccagtgcttggcagtcctgagaaggaagaggcagcctcagagccaccagctgctgctcctgatgctgcaccaccaccccctgataggcccattgagaagaaatcctattcccgggcaagaagaactcgaaccaaagttggagatgcagtcaagcttgcagaggaggtgccccctcctcctgaaggactgattccagcacctccagtcccagaaaccaccccaactccacctactaagactgggacctgggaagctccggtggattctagtacaagtggacttgagcaagatgtggcacaactaaatatagcagaacagaattggagtccggggcagccttctttcctgcaaccacgggaacttcgaggtatgcccaaccatatacacatgggagcaggacctccacctcagtttaaccggatggaagaaatgctcactttgcaaatatccattaaatacctgccatgtaccaagtgtttttcaacacctaaaggaaggtaggacttgatatgagagccctctagaattcttattgtttaggcctctttctttgtctcagggtgtccagggtggtcgagccaaacgctattcatcccagcggcaaagacctgtgccagagccccccgcccctccagtgcatatcagtatcatggagggacattactatgatccactgcagttccagggaccaatctatacccatggtgacagccctgccccgctgcctccacagggcatgcttgtgcagccaggaatgaaccttccccacccaggtttacatccccaccagacaccagctcctctgcccaatccaggcctctatcccccaccagtgtccatgtctccaggacagccaccacctcagcagttgcttgctcctacttacttttctgctccaggcgtcatgaactttggtaatcccagttacccttatgctccaggggcactgcctcccccaccaccgcctcatctgtatcctaatacacaggccccatcacaggtatatggaggagtgacctactataaccccgcccagcagcaggtgcagccaaagccctccccaccccggaggactccccagccagtcaccatcaagccccctccacctgaggttgtaagcaggggttccagttaatacaagtttctgaatattttaaatcttaacatcatataaaaagcagcagaggtgagaactcagaagagaaatacagctggctatctactaccagaagggcttcaaagatatagggtgtggctcctaccagcaaacagctgaaagaggaggacccctgccttcctctgaggacaggctctagagagagggagaaacaagtggacctcgtcccatcttcactcttcacttgagttggctgtgttcgggggagcagagagagccagacagccccaagcttctgagtctagatacagaagcccatgtcttctgctgttcttcacttctgggaaattgaagtgtcttctgttcccaaggaagctccttcctgtttgttttgttttctaagatgttcatttttaaagcctggcttcttatccttaatattattttaattttttctctttgtttctgtttcttgctctctctccctgcctttaaatgaaacaagtctagtcttctggttttctagcccctctggattcccttttgactcttccgtgcatcccagataatggagaatgtatcagccagccttccccaccaagtctaaaaagacctggcctttcacttttagttggcatttgttatcctcttgtatacttgtattcccttaactctaaccctgtggaagcatggctgtctgcacagagggtcccattgtgcagaaaagctcagagtaggtgggtaggagcccttctctttgacttaggtttttaggagtctgagcatccatcaatacctgtactatgatgggcttctgttctctgctgagggccaataccctactgtggggagagatggcacaccagatgcttttgtgagaaagggatggtggagtgagagcctttgcctttaggggtgtgtattcacatagtcctcagggctcagtcttttgaggtaagtggaattagagggccttgcttctcttctttccattcttcttgctacaccccttttccagttgctgtggaccaatgcatctctttaaaggcaaatattatccagcaagcagtctaccctgtcctttgcaattgctcttctccacgtctttcctgctacaagtgttttagatgttactaccttattttccccgaattctatttttgtccttgcagacagaatataaaaactcctgggcttaaggcctaaggaagccagtcaccttctgggcaagggctcctatctttcctccctatccatggcactaaaccacttctctgctgcctctgtggaagagattcctattactgcagtacatacgtctgccaggggtaacctggccactgtccctgtccttctacagaacctgagggcaaagatggtggctgtgtctctccccggtaatgtcactgtttttattccttccatctagcagctggcctaatcactctgagtcacaggtgtgggatggagagtggggagaggcacttaatctgtaacccccaaggaggaaataactaagagattcttctaggggtagctggtggttgtgccttttgtaggctgttccctttgccttaaacctgaagatgtctcctcaagcctgtgggcagcatgcccagattcccagaccttaagacactgtgagagttgtctctgttggtccactgtgtttagttgcaaggatttttccatgtgtggtggtgttttttgttactgttttaaagggtgcccatttgtgatcagcattgtgacttggagataataaaatttagactataaacttg

SEQ ID NO: 385638 - DNA, 3861 bp, Homo sapiens
ctggagatggaaagcggatgttttattcagaagtcggggctggagggaaggagaccagacctgccttggctactacttgataaagatttacctatctctgtctccctctccaaccattttgtgctgaatcttcagcttttcacccacatttctttattgggctccccacctctggaaatcacagaactaacccatgtcttctgctttctttcaggagagtgaagatggcattgaaggtgatgctgttctctcggattatgaaagtgcagaagactcggaaggtgaagaaggtgaatacagtgaagaggaaaactccaaagtggagctgaaatcagaagctaatgatgctgttaattcttcaacaaaagaagagaagggagaagaaaagcctgacaccaaaagcactgtgactggagagaggcaaagtggggacggacaggagagcacagagcctgtggagaacaaagtgggtaaaaagggccctaagcatttggatgatgatgaagatcggaagaatccagcatacatacctcggaaagggctcttctttgagcatgatcttcgagggcaaactcaggaggaggaagtcagacccaaggggcgtcagcgaaagctatggaaggatgagggtcgctgggagcatgacaagttccgggaagatgagcaggccccaaagtcccgacaggagctcattgctctttatggttatgacattcgctcagctcataatcctgatgacatcaaacctcgaagaatccggaaaccccgatatgggagtcctccacaaagagatccaaactggaacggtgagcggctaaacaagtctcatcgccaccagggtcttgggggcaccctaccaccaaggacatttattaacaggaatgctgcaggtaccggccgtatgtctgcacccaggaattattctcgatctgggggcttcaaggaaggtcgtgctggttttaggcctgtggaagctggtgggcagcatggtggccggtctggtgagactgttaagcatgagattagttaccggtcacggcgcctagagcagacttctgtgagggatccatctccagaagcagatgctccagtgcttggcagtcctgagaaggaagaggcagcctcagagccaccagctgctgctcctgatgctgcaccaccaccccctgataggcccattgagaagaaatcctattcccgggcaagaagaactcgaaccaaagttggagatgcagtcaagcttgcagaggaggtgccccctcctcctgaaggactgattccagcacctccagtcccagaaaccaccccaactccacctactaagactgggacctgggaagctccggtggattctagtacaagtggacttgagcaagatgtggcacaactaaatatagcagaacagaattggagtccggggcagccttctttcctgcaaccacgggaacttcgaggtatgcccaaccatatacacatgggagcaggacctccacctcagtttaaccggatggaagaaatgggtgtccagggtggtcgagccaaacgctattcatcccagcggcaaagacctgtgccagagccccccgcccctccagtgcatatcagtatcatggagggacattactatgatccactgcagttccagggaccaatctatacccatggtgacagccctgccccgctgcctccacagggcatgcttgtgcagccaggaatgaaccttccccacccaggtttacatccccaccagacaccagctcctctgcccaatccaggcctctatcccccaccagtgtccatgtctccaggacagccaccacctcagcagttgcttgctcctacttacttttctgctccaggcgtcatgaactttggtaatcccagttacccttatgctccaggggcactgcctcccccaccaccgcctcatctgtatcctaatacacaggccccatcacaggtatatggaggagtgacctactataaccccgcccagcagcaggtgcagccaaagccctccccaccccggaggactccccagccagtcaccatcaagccccctccacctgaggttgtaagcaggggttccagttaatacaagtttctgaatattttaaatcttaacatcatataaaaagcagcagaggtgagaactcagaagagaaatacagctggctatctactaccagaagggcttcaaagatatagggtgtggctcctaccagcaaacagctgaaagaggaggacccctgccttcctctgaggacaggctctagagagagggagaaacaagtggacctcgtcccatcttcactcttcacttgagttggctgtgttcgggggagcagagagagccagacagccccaagcttctgagtctagatacagaagcccatgtcttctgctgttcttcacttctgggaaattgaagtgtcttctgttcccaaggaagctccttcctgtttgttttgttttctaagatgttcatttttaaagcctggcttcttatccttaatattattttaattttttctctttgtttctgtttcttgctctctctccctgcctttaaatgaaacaagtctagtcttctggttttctagcccctctggattcccttttgactcttccgtgcatcccagataatggagaatgtatcagccagccttccccaccaagtctaaaaagacctggcctttcacttttagttggcatttgttatcctcttgtatacttgtattcccttaactctaaccctgtggaagcatggctgtctgcacagagggtcccattgtgcagaaaagctcagagtaggtgggtaggagcccttctctttgacttaggtttttaggagtctgagcatccatcaatacctgtactatgatgggcttctgttctctgctgagggccaataccctactgtggggagagatggcacaccagatgcttttgtgagaaagggatggtggagtgagagcctttgcctttaggggtgtgtattcacatagtcctcagggctcagtcttttgaggtaagtggaattagagggccttgcttctcttctttccattcttcttgctacaccccttttccagttgctgtggaccaatgcatctctttaaaggcaaatattatccagcaagcagtctaccctgtcctttgcaattgctcttctccacgtctttcctgctacaagtgttttagatgttactaccttattttccccgaattctatttttgtccttgcagacagaatataaaaactcctgggcttaaggcctaaggaagccagtcaccttctgggcaagggctcctatctttcctccctatccatggcactaaaccacttctctgctgcctctgtggaagagattcctattactgcagtacatacgtctgccaggggtaacctggccactgtccctgtccttctacagaacctgagggcaaagatggtggctgtgtctctccccggtaatgtcactgtttttattccttccatctagcagctggcctaatcactctgagtcacaggtgtgggatggagagtggggagaggcacttaatctgtaacccccaaggaggaaataactaagagattcttctaggggtagctggtggttgtgccttttgtaggctgttccctttgccttaaacctgaagatgtctcctcaagcctgtgggcagcatgcccagattcccagaccttaagacactgtgagagttgtctctgttggtccactgtgtttagttgcaaggatttttccatgtgtggtggtgttttttgttactgttttaaagggtgcccatttgtgatcagcattgtgacttggagataataaaatttagactataaacttg

SEQ ID NO: 385639 - DNA, 2092 bp, Homo sapiens
  misc_feature (21)..(21): n is a, c, g, or t
caactaggctagtacgaggcnggttgtccatgtctccaggacagccaccacctcagcagttgcttgctcctacttacttttctgctccaggcgtcatgaactttggtaatcccagttacccttatgctccaggggcactgcctcccccaccaccgcctcatctgtatcctaatacacaggccccatcacaggtatatggaggagtgacctactataaccccgcccagcagcaggtgcagccaaagccctccccaccccggaggactccccagccagtcaccatcaagccccctccacctgaggttgtaagcaggggttccagttaatacaagtttctgaatattttaaatcttaacatcatataaaaagcagcagaggtgagaactcagaagagaaatacagctggctatctactaccagaagggcttcaaagatatagggtgtggctcctaccagcaaacagctgaaagaggaggacccctgccttcctctgaggacaggctctagagagagggagaaacaagtggacctcgtcccatcttcactcttcacttgagttggctgtgttcgggggagcagagagagccagacagccccaagcttctgagtctagatacagaagcccatgtcttctgctgttcttcacttctgggaaattgaagtgtcttctgttcccaaggaagctccttcctgtttgttttgttttctaagatgttcatttttaaagcctggcttcttatccttaatattattttaattttttctctttgtttctgtttcttgctctctctccctgcctttaaatgaaacaagtctagtcttctggttttctagcccctctggattcccttttgactcttccgtgcatcccagataatggagaatgtatcagccagccttccccaccaagtctaaaaagacctggcctttcacttttagttggcatttgttatcctcttgtatacttgtattcccttaactctaaccctgtggaagcatggctgtctgcacagagggtcccattgtgcagaaaagctcagagtaggtgggtaggagcccttctctttgacttaggtttttaggagtctgagcatccatcaatacctgtactatgatgggcttctgttctctgctgagggccaataccctactgtggggagagatggcacaccagatgcttttgtgagaaagggatggtggagtgagagcctttgcctttaggggtgtgtattcacatagtcctcagggctcagtcttttgaggtaagtggaattagagggccttgcttctcttctttccattcttcttgctacaccccttttccagttgctgtggaccaatgcatctctttaaaggcaaatattatccagcaagcagtctaccctgtcctttgcaattgctcttctccacgtctttcctgctacaagtgttttagatgttactaccttattttccccgaattctatttttgtccttgcagacagaatataaaaactcctgggcttaaggcctaaggaagccagtcaccttctgggcaagggctcctatctttcctccctatccatggcactaaaccacttctctgctgcctctgtggaagagattcctattactgcagtacatacgtctgccaggggtaacctggccactgtccctgtccttctacagaacctgagggcaaagatggtggctgtgtctctccccggtaatgtcactgtttttattccttccatctagcagctggcctaatcactctgagtcacaggtgtgggatggagagtggggagaggcacttaatctgtaacccccaaggaggaaataactaagagattcttctaggggtagctggtggttgtgccttttgtaggctgttccctttgccttaaacctgaagatgtctcctcaagcctgtgggcagcatgcccagattcccagaccttaagacactgtgagagttgtctctgttggtccactgtgtttagttgcaaggatttttccatgtgtggtggtgttttttgttactgttttaaagggtgcccatttgtgatcagcattgtgacttggagataataaaatttagactataaacttg

SEQ ID NO: 385640 - DNA, 4095 bp, Homo sapiens
acacacacacacacacacacacacaccccaacacacacacacacacacacacacacacacacacacacacacacacacacacacacacacacacacacacagcgggatggccgagcgccgcacgcgtagcacgccgggactagctatccagcctcccagcagcctctgcgacgggcgcggtgcgtaagtacctcgccggtggtggccgttctccgtaagatggcggaccggcggcggcagcgcgcttcgcaagacaccgaggacgaggaatctggtgcttcgggctccgacagcggcggctccccgttgcggggaggcgggagctgcagcggtagcgccggaggcggcggcagcggctctctgccttcacagcgcggaggccgaaccggggcccttcatctgcggcgggtggagagcgggggcgccaagagtgctgaggagtcggagtgtgagagtgaagatggcattgaaggtgatgctgttctctcggattatgaaagtgcagaagactcggaaggtgaagaaggtgaatacagtgaagaggaaaactccaaagtggagctgaaatcagaagctaatgatgctgttaattcttcaacaaaagaagagaagggagaagaaaagcctgacaccaaaagcactgtgactggagagaggcaaagtggggacggacaggagagcacagagcctgtggagaacaaagtgggtaaaaagggccctaagcatttggatgatgatgaagatcggaagaatccagcatacatacctcggaaagggctcttctttgagcatgatcttcgagggcaaactcaggaggaggaagtcagacccaaggggcgtcagcgaaagctatggaaggatgagggtcgctgggagcatgacaagttccgggaagatgagcaggccccaaagtcccgacaggagctcattgctctttatggttatgacattcgctcagctcataatcctgatgacatcaaacctcgaagaatccggaaaccccgatatgggagtcctccacaaagagatccaaactggaacggtgagcggctaaacaagtctcatcgccaccagggtcttgggggcaccctaccaccaaggacatttattaacaggaatgctgcaggtaccggccgtatgtctgcacccaggaattattctcgatctgggggcttcaaggaaggtcgtgctggttttaggcctgtggaagctggtgggcagcatggtggccggtctggtgagactgttaagcatgagattagttaccggtcacggcgcctagagcagacttctgtgagggatccatctccagaagcagatgctccagtgcttggcagtcctgagaaggaagaggcagcctcagagccaccagctgctgctcctgatgctgcaccaccaccccctgataggcccattgagaagaaatcctattcccgggcaagaagaactcgaaccaaagttggagatgcagtcaagcttgcagaggaggtgccccctcctcctgaaggactgattccagcacctccagtcccagaaaccaccccaactccacctactaagactgggacctgggaagctccggtggattctagtacaagtggacttgagcaagatgtggcacaactaaatatagcagaacagaattggagtccggggcagccttctttcctgcaaccacgggaacttcgaggtatgcccaaccatatacacatgggagcaggacctccacctcagtttaaccggatggaagaaatgggtgtccagggtggtcgagccaaacgctattcatcccagcggcaaagacctgtgccagagccccccgcccctccagtgcatatcagtatcatggagggacattactatgatccactgcagttccagggaccaatctatacccatggtgacagccctgccccgctgcctccacagggcatgcttgtgcagccaggaatgaaccttccccacccaggtttacatccccaccagacaccagctcctctgcccaatccaggcctctatcccccaccagtgtccatgtctccaggacagccaccacctcagcagttgcttgctcctacttacttttctgctccaggcgtcatgaactttggtaatcccagttacccttatgctccaggggcactgcctcccccaccaccgcctcatctgtatcctaatacacaggccccatcacaggtatatggaggagtgacctactataaccccgcccagcagcaggtgcagccaaagccctccccaccccggaggactccccagccagtcaccatcaagccccctccacctgaggttgtaagcaggggttccagttaatacaagtttctgaatattttaaatcttaacatcatataaaaagcagcagaggtgagaactcagaagagaaatacagctggctatctactaccagaagggcttcaaagatatagggtgtggctcctaccagcaaacagctgaaagaggaggacccctgccttcctctgaggacaggctctagagagagggagaaacaagtggacctcgtcccatcttcactcttcacttgagttggctgtgttcgggggagcagagagagccagacagccccaagcttctgagtctagatacagaagcccatgtcttctgctgttcttcacttctgggaaattgaagtgtcttctgttcccaaggaagctccttcctgtttgttttgttttctaagatgttcatttttaaagcctggcttcttatccttaatattattttaattttttctctttgtttctgtttcttgctctctctccctgcctttaaatgaaacaagtctagtcttctggttttctagcccctctggattcccttttgactcttccgtgcatcccagataatggagaatgtatcagccagccttccccaccaagtctaaaaagacctggcctttcacttttagttggcatttgttatcctcttgtatacttgtattcccttaactctaaccctgtggaagcatggctgtctgcacagagggtcccattgtgcagaaaagctcagagtaggtgggtaggagcccttctctttgacttaggtttttaggagtctgagcatccatcaatacctgtactatgatgggcttctgttctctgctgagggccaataccctactgtggggagagatggcacaccagatgcttttgtgagaaagggatggtggagtgagagcctttgcctttaggggtgtgtattcacatagtcctcagggctcagtcttttgaggtaagtggaattagagggccttgcttctcttctttccattcttcttgctacaccccttttccagttgctgtggaccaatgcatctctttaaaggcaaatattatccagcaagcagtctaccctgtcctttgcaattgctcttctccacgtctttcctgctacaagtgttttagatgttactaccttattttccccgaattctatttttgtccttgcagacagaatataaaaactcctgggcttaaggcctaaggaagccagtcaccttctgggcaagggctcctatctttcctccctatccatggcactaaaccacttctctgctgcctctgtggaagagattcctattactgcagtacatacgtctgccaggggtaacctggccactgtccctgtccttctacagaacctgagggcaaagatggtggctgtgtctctccccggtaatgtcactgtttttattccttccatctagcagctggcctaatcactctgagtcacaggtgtgggatggagagtggggagaggcacttaatctgtaacccccaaggaggaaataactaagagattcttctaggggtagctggtggttgtgccttttgtaggctgttccctttgccttaaacctgaagatgtctcctcaagcctgtgggcagcatgcccagattcccagaccttaagacactgtgagagttgtctctgttggtccactgtgtttagttgcaaggatttttccatgtgtggtggtgttttttgttactgttttaaagggtgcccatttgtgatcagcattgtgacttgaatagctgtgtagttgggatcctcaag

SEQ ID NO: 385641 - DNA, 622 bp, Homo sapiens
  misc_feature (94)..(94): n is a, c, g, or t
  misc_feature (96)..(96): n is a, c, g, or t
gaatctcttccacagaggcagcagagaagtggtttagtgccatggatagggaggaaagataggagcccttgcccagaaggtgactggcttcctnangccttaaaccacttctctgctgcctctgtggaagagattcctattactgcagtacatacgtctgccaggggtaacctggccactgtccctgtccttctacagaacctgagggcaaagatggtggctgtgtctctccccggtaatgtcactgtttttattccttccatctagcagctggcctaatcactctgagtcacaggtgtgggatggagagtggggagaggcacttaatctgtaacccccaaggaggaaataactaagagattcttctaggggtagctggtggttgtgccttttgtaggctgttccctttgccttaaacctgaagatgtctcctcaagcctgtgggcagcatgcccagattcccagaccttaagacactgtgagagttgtctctgttggtccactgtgtttagttgcaaggatttttccatgtgtggtggtgttttttgttactgttttaaagggtgcccatttgtgatcagcattgtgacttggagataataaaatttagactataaacttg

SEQ ID NO: 385642 - DNA, 782 bp, Homo sapiens
tggatcacttgaggccagaagttccagaccagcctggccaacacgatgaaaccccgtctctactacaaatacaaaaattagccggaggtggtggtgcatgcctataatcccagttactcaggaggctgaggcacaatagtcacttgaaccaggaaagcagacgttgcagtgagctgagattacaccactgcactccagcctgaccgacagagtgggactctgtctcaaaaaaaaaaaaaaagcttgtgtgaagagcatctactgagctgggccctggtgctgttttagagacagaaaagcagtaagagccattcagagtgtggtggagagacacatattacaaaaggcgattctatttctggacgtgatcaacagcaggagacagcaaggtctgacctataatagagattttcacatgtgttttatcagttactgcttctaatactcatccctgtttttccacatgaggaaacagagttctggggttccatggctggtgagaggaggcgctagagtctgagcccacatgctccccgctcccaagccaggcctctgactgtaacatcagcaagcgtgccaaacaaaccttagatttttttttttaattaatatacatttaatggacttctttgggccctagttttctcatctgtaaataggggtaacagcatggactccctcagggccatttgagtgtgcaaggaggctgaaccacgcctcgcctcaagggcagtgccaccacctcccccattagccttggtaaatgggagcaatttttaaca

SEQ ID NO: 385643 - DNA, 365 bp, Homo sapiens
tagctgattctagaggatccacccgcggcgagttcatgcaggtgtgtatgtgtgtgcatgtgtatgtatatgtgtatgtgtgcaaatgtgtgtatgactatatgcatgggtagctgtgtgtccttgtatttgtgtgtgtgttgggttttcttgtgaacaatatggcctgttgaggcttctactattctcctggtctgaaatgcttggtaaacctcgtgtggttaaaccagggtttacactgtacttgaactgactacaccatgtccatttgagggcacttggagaaaaaccagggcccattttgagagaaagcactttataaatgcaggaaagaattccttagcctcaggcaagttctgagatga

SEQ ID NO: 385644 - DNA, 491 bp, Homo sapiens
ttcctggggccagtcagagatctaagttaaaattagagtcatacacttggtctttgaagatgcagtcatagtcgttgggctaacagaaggcatttcctgacaccatttatccattacctcactctagaaaacggcaagttgaaatgagatgggagaaatattagatacctcaaaaaagataaaagagacaggagacaggtccagtgtttgtcacttctggaaacagcagctgaggggtccggacggccctataagagcaaatctcgttcagttccttaaagtaaaatcaagacagcctcacacacacacaaaaaagggcatttttcttatgaccattactgccagagattgctttaaaccaaaaaaaacccatttcaacatttcgtaaatctaacatctaagaataaggctattcagcctatggtttaccacgttttagttcattttataagttgaaaatcagtgtgatgtgatagaaaggagagtggaaa

SEQ ID NO: 385645 - DNA, 491 bp, Homo sapiens
tctgcctcactagggtagacattttaggtttatgactcttaagttttcacctggacagattggctaccaaaaagaacctcacaggtgggtgaccttgaattcaccaggtcatgccatcagttcagagcggccggagaactctgttctcttgtgcattgatgcccccggagttgtgaaacacagtggccctgctttagtttttttagatttagaaactgatcagtgtcagagcgatcagacacaggaatgttaattcatgttcaaaaataataaccaggctagcatttgtttagcacttgctatgtgacaggtactgttttaagtgctttacatgaattgtttaatcctcacaacaaccctgggaaataggtcctattattaggcgccctttctacagatgaggaaacagacaacagattggtaaatttcccaagatcacaaagtaagtcagtaggaactcaaagtaacctgactccagagcccacactctt

SEQ ID NO: 385646 - DNA, 456 bp, Homo sapiens
tttgctgctatatcccagtacctgaaacagtgcttggcataggttagcgctcaatgctgttgtgtgaatgaaaggacaaatgaatgaatggcagtgagagaatggagctgcttcttctctcttagagggccaaaagggaacccatggatgtggaaagcagcagccatgggcacggcaattgtagctcgctatcaggaagaacgctgcaatgactggaagactgctctggaacatagctggtgctctgccacaggtcctgagcccccaggacagtcccacagtgggcagaggctgggctgagacaaaccaaaagtccttccaatcctggagaatttgtgtggtggtgtgtgtggatatggaagtgtgtaagaaagagaaggaaggtggacacagaagaggagagtgggcagatacacgctccccaggctggctccttcaaaccagacaaaagaaagg

SEQ ID NO: 385647 - DNA, 1159 bp, Homo sapiens
  misc_feature (422)..(422): n is a, c, g, or t
  misc_feature (425)..(425): n is a, c, g, or t
  misc_feature (509)..(509): n is a, c, g, or t
tgcatctgccaaacaatattatcaggtatttagctacatcagactctcataggcaaataaacttgagaaaagctactgaatattttctccttttggagactcttaaagaacattagcatattgtaggcactgaacagagaaatttgtttgtcttcattcggcccattgtttttccatatgtgattcaacctgtagcatttttatttgtaaaactcctattatgcttaggaatgaatccaaggaatacagttatagaaatgctggaatcaagtataaacctttcttgttgtggaaggtggacttcaagtcttggcttgtagtggagaagaatgaagtgagaatcagaaaagagaaggtggtaatcaagggcttctctctgtcactcactcttcctaggtatggacaaactgcctttgtcatcnatnccattatggcccagagagcatctgggtagtcattacagaggatcttcttaagacataaaagtgtcttttgtaaactctgtggtntaaaattgaaaaaaaagtgaatttcaaaaaattattattaatggcacttttaccacagtgctttttatcataaaacctagatatctacattgaaggtggataaaaaagggagtgaatgtgaacaaatggaaaggacctttggatctgagatgtaagactgtttgaatccttgcttaggcatttctatatctgaatctcattcttttttttcactttctatgtgtgtagaactggtaaacaaatgaaaaaaatggatagaatatgtggtaaataagtgccatgtattattactacacattttagttctaaatatctaaacactactttctcttggataaaatatcatgcaactagagattcaagaaaatgctacaaaattacatataaaaataactccaaattagtaaagaactagaacaagaaatgattcacacacacaatttttaaataaagtgaattgtttaaaaaattccgaaacactaatgtggtataaatatcattggctatgaaatggtataactgcatggggcttgctaatagaatacaaaagttattatactggaaatattgcatggaaattatatgtttttatatgtaatcatcatgtaatcctttatgtgaaaagaagcttaagacacctaatccatttc

SEQ ID NO: 385648 - DNA, 221 bp, Homo sapiens
tcttcagctctatatgtgccagattcatataaagactgaggtgtgaggaggccacagagggggccatggtcatgtgctgtacagcctggactgagggaagccacagtgcacagcctgtgctcagcacatcccgatgtggctcatgtccatttgggttctgtgtcttttctgtgtcatccatgtcctgtctcttctgtgggctcagaggcatgattgtgtcc

SEQ ID NO: 385649 - DNA, 2250 bp, Homo sapiens
  misc_feature (1764)..(1764): n is a, c, g, or t
actgtaatacaataatagtagaagactttaataccccactttcagcaatggacaaatcatacagaaaaaaagtaaataaaacatcagacttaacaaatttagtgatattaaaatcatatcaagtatattttccaaccacaatggcataaaactggaaatcaataacaggaggaatttcagaaaattcacaaatacatggaaatgaaacaacatgctcctgaacaatcaatgggtcaaagaagatattaaaagggaaattaaaaattaccttaagataaataaaaatggggacacaacataccaaaacctatgtgatgcagcaaaatcaggtctaagagggaagtttatgggattaaacactaacattgaaaagaaaaatgacctaaataaataacctaagagtacacctcaaggaactagaacaaactaagaacaaactaagcctaaagaacaaactaagcctaaagttagaaaaagaaaataataaagatcagagtagaaatgaatgaaatagagactagaaaaacaataggtcaatgagactaagaagttggctttttgaaaagataaacaaaattcacaaacctttatcaagactaagaaaaaagagatgattcaaataaaataaagaggaaacatcagaactgatactacagaaatgcaaaagaccaccagaggctactgtaaacaagtatatgccaacaaattgaataacctagaagaaacagataaattcctagacacacataattctaccaatacggaatcatgaagaaaaataaaatctaatcagaccaataacacgtagatgcattaataagaaatgctttcccataaaagaaaagcctaggacctgatggtttcattgctgaattctaccaaaaatttaaagaacaattcctctcaaattcttcaaaaaactgaagaagagtaaatacttccaaattcattttatgaggccagcattaccctgatgctaaagccaaagacactacaggaaaaggaaactataggtcaatatgcctgatgaacacagatgcaaaaatctcaaacaaaaaatgctagcaaactgaattcaacagcacacgaaaaggatcagtcaccctgatcaaatgggatttattcctgggatgcaaggatagaccttgtcaacaaatgcaaatcaatgtgattcatcctattaacagaatggataaaaaacatgtaatcatcccaatagatacatctgataaaatttaacatcctttcatgataaaaactctcaacacattaggtatagaagaaatgtacctcagcataataaaggccatatatgacccacacacagctgacatcatactcaatggtaaaaagttgaaagcttttcctctaagattataaataagagaaggatgcaacacagtactggaagtcctacccagacttggtaggtcttccaagaccttgaaagccaggtggggtggctcatgcctataatcccagcactctgggaggccaaggtgggtggatcacctgaggtcagaagttggagaccagcctggccaacatggcaaaaccccatctctagtaaaaatacaaaaattagttgggcatgatggtgcatgcctgtagttccagctactcaggaagctgaggcaggagacttgcttgaacctgggaggaggttacagtgagccaagatggtgccactgcactcaatcctgggcgacaaagtgagactctgtctcaaaaaaaaaaaaaggaattgaagaagacacaaataantggcccaacaaataaatgaaaacaaatcccttgttaatgaactggaagaatttatgttgttaaaatgtccatattactcaaagcaatctgcagattcaatgcaatccctatcaaaattccaatgacttttttcaaagaaatagaaaagcaattcaaagattcatatgaaactacaaaaaaaccttgactagccaaaaaatcttaaccaaaacaacaaagctagaggtatcacattgcttgacttcacaatatatcataaagctatagtaaccaaaacggcatggtactgtcataaaaacagacacacagaccaatggaacagaatagagatcttggaaataaatccacacatttatggtcaattgattttccacagagggtaagaatacacaatgaggaaaagataatcccttcaataaatggtgttgggacaactgcatatttctgtgcagaagaataaaattagaaccttatctcataccatat

SEQ ID NO: 385650 - DNA, 354 bp, Homo sapiens
tggggtttttttttagtagagatgggatttctctatgttggccaggctggtctcaaactcccgacctcaggtgatccacccaccttggcctcccaaagtgctgggattacaggcgtgagccactacgccgggcctaatattttaatattttaagtgttaaaagtacacttcttctagtttcttcactcattcatttattcagtcatttcaaaggtattgaatgagcatctgccaggtgctggaatgttgtataacactgctttatttattttacttatttatttatttatttattttgagacagagtctttctctgtcacccaagctggagtgcagtggcatgatctctgctca

SEQ ID NO: 385651 - DNA, 423 bp, Homo sapiens
tcaacaatttcagatttatttgccataaaatttactttgaatgcaattacaattttgtccaaaaacttcaaaatataaatctgggtttttttttaaaggaaattcttcagaaagatactggtgacactctattcatgccagactcagctaagaagctaatttaggccgggcatggtggctcatgcctgtaatcccagcactttgggaggccaagacgggtagatcacaggagatcaggagttcaagagcagcctgaccaacatagtgaaaccccgtctctactcaaaatacaaaattagctgggcatggtggtgcatgtctgtagtctcagctgcttgaaaggctgaggaaggagaatcgcttgaatctgggaggtggaggttgcatgagccgagatggtgccactgcactccagcctgggtg

SEQ ID NO: 385652 - DNA, 1217 bp, Homo sapiens
ctctacaagggagtcccatttcaggtgtggggctgggtatggtcactcctgctggatgtctagaaggtgaaaaccaaggacctaggaaaataccagatacagcctttccaccgtcatccagagcaggacaaacacgccaggtggtgtcaggagcccaggtctccagctggagggaatgtcaaccctgcagtgggagcccatcatgcatcctaggcacagatgctaacgtaggcaccgcaggtaagctgggtttggtaccccttcctggcttcagaaagaagccaaacaaggagctttctgcagaatgaaacctcttttccatccagaagcactgctgactgtttggtggttgctgttagggcagtgagccttttgtccattctgagattaggctggtttctcctcttggccctggcctacagaccataaaggaaaacagcaagaggtccccagcaaacatctacagatggccctggacatcagccacattcagagaaacgtgtcatgttctgggagggctaaggcatcgagtaaggcctatggggctggaggatcacagggcaggtggggcaatccagagctgtgggggcttccatgggaattgggaggtcccaaggcagaggtaggggttccacaggaggagtcacagagccaccaagggctctcctggcccagggagcagtcaacaccatggactgaacacccactgggctaagccctgggccaggctggggcatgtggggccaggaggcagctcagagtgggagacagagagacaagtgtgctcagagggcacccatatctgcatataacgtggtcctgaatttctggctgggaagtgcttccagggtttcatatgtgttatggagatgcttcctctctccaacctcaccgtgcaggaatcccagtgaatatattgccaccatcttggagctcagtgccctcatagtgtaacagcaccagcagatctgcctgtgcacagacttcctgtactacctcactcctgaggggagatgcttctgcagggcctgcgacctggtgcacaactttagacaccatcatcctggagcggcactgcaccctcactagccagggtgttgatgacttcctcaatgccaaggccacgttcaagattttcgacttcagtgatgcgtttgtgctgagcaagccgttttgcacacctggtcagaatgaaacattccttgggaactcggcgt

SEQ ID NO: 385653 - DNA, 1595 bp, Homo sapiens
ctctacaagggagtcccatttcaggtgtggggctgggtatggtcactcctgctggatgtctagaaggtgaaaaccaaggacctaggaaaataccagatacagcctttccaccgtcatccagagcaggacaaacacgccaggtggtgtcaggagcccaggtctccagctggagggaatgtcaaccctgcagtgggagcccatcatgcatcctaggcacagatgctaacgtaggcaccgcaggtaagctgggtttggtaccccttcctggcttcagaaagaagccaaacaaggagctttctgcagaatgaaacctcttttccatccagaagcactgctgactgtttggtggttgctgttagggcagtgagccttttgtccattctgagattaggctggtttctcctcttggccctggcctacagaccataaaggaaaacagcaagaggtccccagcaaacatctacagatggccctggacatcagccacattcagagaaacgtgtcatgttctgggagggctaaggcatcgagtaaggcctatggggctggaggatcacagggcaggtggggcaatccagagctgtgggggcttccatgggaattgggaggtcccaaggcagaggtaggggttccacaggaggagtcacagagccaccaagggctctcctggcccagggagcagtcaacaccatggactgaacacccactgggctaagccctgggccaggctggggcatgtggggccaggaggcagctcagagtgggagacagagagacaagtgtgctcagagggcacccatatctgcatataacgtggtcctgaatttctggctgggaagtgcttccagggtttcatatgtgttatggagatgcttcctctctccaacctcaccgtgcaggaatcccagtgaatatattgccaccatcttggagctcagtgccctcatagtgtaacagcaccagcagatctgcctgtgcacagacttcctgtactacctcactcctgaggggagatgcttctgcagggcctgcgacctggtgcacaactttagacaccatcatcctggagcggcactgcaccctcactagccagggtgttgatgacttcctcaatgccaaggccacgttcaagattttcgacttcagtgatgcgtttgtgctgagcaaggtgggcttctccgggatcttaattcaggaggtagaatgcagcttgagatctagtgtctgatcaaagaacttgaacttgacctggagggctctggggagccatggaaggtgctggataaaggaagggacagtcatatatgttttagagatgactgtggaaggctgcctggaaggagtgaacaagagccaggagaccagggagggagtttgtggggcaggtctggagatggcaagggagggatcctgcttggatgaaaggtcttcagggactgtctcaggttacactcaggtgccctcagagctactgtgttcaggcttcttgtctccaggatgaaaataaggaggagttgtcagacaaggacatatacatggaggctggcatcttcatgagtgccaatcgtggtcctggtgtggactactgtgggagc

SEQ ID NO: 385654 - DNA, 839 bp, Homo sapiens
agacagggctgggctgatggccaaggccactgcaggtgaagggggaacccttatctcccaggcttttgacctccagattttagcaggggagcttcgttgtcggatttgggttcctgagaatctactctggccaagacggagagggggtgttgaccagatgggaaaggatggagacttgtattgccccagtaatgagcgggcagggtagattagaacaagatgtcaggacttgggggctgaatgccaggcttctggctgggattaccaccccctgacacatataatgcccaggaaattggaggcccctctccaagcccccaggaggccactggggactcattccaggatactcacctgcctgctttgtggttttggaggggaagaccttggagcagttgcgaagatccatctaccatgttctggtttttccttggaagcctaaaagtgtacctcgggatgaggaggaaatggttttgagggcaagtggtaggtctctggctaggcctggcggggttctcagaggacagggggtgtctagggccctagatagaagtgtcctgcccaagccctaaagcaggaaattagctggggagttggggtgagaccctggggtcgatggaggcactttccatgggagagtcccacagggtaagggagagggggctgatgtctgacagtctcatagacagttggcttgtggctggagaagtgggagcaaaggagaaatcacctttgattgggagaagtggctctggctcatgtgcaactgagacaaagccagtcctaagagcagcttgtaaattcttctgtgaccacctttaaggtccttcttcctgagg

SEQ ID NO: 385655 - DNA, 480 bp, Homo sapiens
aaattcatcatcccttcatgataaaaactctcaagaaactaggcatcaaaagaacgtaactcaaaataataaaaaccatatatgataaactcagggctaacatcataatgaatggggaaaagctgaaaccatttcatctaagaactggaacaagacaagggtcttgttttttcaccttcatcactactattcaacatagtactggaagacctagccagagcaatcagacaagagaaataacagatatccaagttggatatctttacatttgttcctctttgcaaatgatataattttatatctagaaaaacctaatgactccatcaaaaccctcccaaatttgataaatacaatatagttttaggatagaacatcaatatacaaaaatcagtagtgtttgtatgcaccaatgacgaaatagctgatgatgaaatagtggagaaagaaattaaaaaggcatgcctacttgaaatagctacc

SEQ ID NO: 385656 - DNA, 461 bp, Homo sapiens
taaacttcataaaacattactgcctgattgttgagtgggatgggaagggagcgtttaattcagcacctgcaagctgcaactgccagcagatttctgcattcagaggcattttggtgtttgtgtatgcataggacagaaggaagaaataagcaggcctttatcagtatgttcttttctaaagatcattactagatttgaccaaagttctcataactatatttaacagtctatcagtgctttcttgagtgtttccttaatgctagtaaattctaactctcacaaattcccatgggctacagcagtgccatctggaatttagttccttttactaatctgtgatttaaacatcagaaagatattgccataattcccaaataaacacttaacatgtgtgggaaggttcaggataatgggccttctgatgacctaataaaaaatgaaggtggtaaaatcataagcca

SEQ ID NO: 385657 - DNA, 394 bp, Homo sapiens
tttctctaacaacctagaggcaaacagtttggggttttctgtctagagctttaatggccaaataaaactgtgtgcctatttaatagctctaattacttttataaagttgacccaaagaccacaggtctgataggattcttactattcttttccacgtaagcctaaaagcaaatcagagttacattacagaataataattaatacttaatagtgaaaataataatgacaactaagtaactgtatttgtaaaatcttattctaaaaatggtgattcatgcatagtaatttgaatatatggtcacatattttatattaaaaaacataaataacacagcaaggcaatgtagtcttctttctctgttatgtgtatctttaaaaggccaggttgcctagg

SEQ ID NO: 385658 - DNA, 199 bp, Homo sapiens
tgcttatgtaaatatatttcctcctgaattatgtctggtactaactcctgctaagttagtggcagacatgatagcacttcacccctaaatacctaagcttgaatcttctcaaaattagagcatttggggtcatttttaatttaccttctttggccctcattctaacttgtcatcagttctttgagaggcctcttgcatc

SEQ ID NO: 385659 - DNA, 499 bp, Homo sapiens
  misc_feature (495)..(496): n is a, c, g, or t
  misc_feature (499)..(499): n is a, c, g, or t
gcctcccaaagtgctgggattacaggcgtgagccaccacaccctgcccaggaatacatgagactttgaagttctgattgctaacccaagcaatgttggctgtaattatcaggccccgctgtgttcagaaacttaaagtttaggtgggaaagtaaaactcagtaatcataggtaaacagagaccaagtaagcgctgctcttcgaggtctagatatagctgtggcaagaggcacgctggggaggaagaaaagttctgggtaacctggaggggtcagggaggagtttcagaatgtagtcgtggccttggcttgggtgtggaagtaatagcaaactcagcaagataccttttatgttttgataacggctttatggagatataatttgcataccattcaattcacccctgtaaagtgtataaatcggtttttagtacattcatggagttgtgcaatcattaccatcatcaattttagaacatttccagcacctcaaaaannaan

SEQ ID NO: 385660 - DNA, 409 bp, Homo sapiens
gatatttaaggctgagactttggaagctgaggcagacaaagtcagtgaggatggaagcttcatggagctgaaagaacttcatgtgttcaaagagttgaaagaagcttagcgtggctgctctggagaggtgagggggacccacgccaaataatagagggctgtggctaccacgtgaagggttttgtgtttttgtgcatttattgaatacttactgtgtgccaggtacgtgtcaggcattttcacatcaattttttatttattcctcctcccagtcttaatgaggtgatgtttttcatccttgattttgagttgaggtaactaaggctcagagagattaaaccttgcccaagtgagtgtagccactgagtggaagagctgagattctgaaccctggtgttctgacttccac

SEQ ID NO: 385661 - DNA, 377 bp, Homo sapiens
ttcctaaaagcagtctttcctacaacttgtatgcagtaagtcacttaagcacttaagtgtcatatgggtacttacatggaattagagcacttcctgaatggaattagaaaaaggcaaattgtgcatactactgatgcattcatttcctacagagatatgataccaagggccaataagtgaatagaaaaagggaggaggatttattaatggaatgagttctaaccctgtctcttaccagccatatgactttgggttaaataatcaaacgcccaatgagctcaactgtctattattagggaaattaaatgagagaatgcacattaatatgcattgcagagtacatggaaaatagtaaaagcttaatatttaatacgttc

SEQ ID NO: 385662 - DNA, 492 bp, Homo sapiens
ataaacatcagttctataggacaattgggaggcttttttatatctcaaagaactacaaacattatgataagcaatttatacttgattctgccatgtgtctacctttcttattataatataggatcagggttccaatgttgaaatggacaaaagccatcattccaaacaccccactggttctccaagccatgcccaagcacatcactctcatcaatatggggtatctctaaagaggggtaaatcatttctctctctctagcactcagcacccaacatgtatactcaagtttgcaggtgggtacaggaaaggacagttcttcatcacaaaacactagttacccttggcttcactatgacacatttaagtggagaacattagggaatagtcaaaggtgtgttgaaattaattctcaagttttcaagctcagactgctaggtaccctactgactgagtctatacccaatgataccagtgaaaatgctgggggaaaa

SEQ ID NO: 385663 - DNA, 591 bp, Homo sapiens
ctgaagagcgggaaggacccatccactgggagctgctggagaggttgcctggcttcagtgggcatggaggggcctcaggtgttctataaagtggtgctcacatctcagctttgcagggttgttcaggagctaagtcaggggccaaggcagtgagctggtgggctgctgagtcctcagtgggtaaaggagtccactcacttccagggacctgagcagaccccacattccccaaggcccccagctccaccctccagaggctgaggagagccaggaaaggcccatggatggggaagaaggaggcttcttcctgggggtcctgaggggcccatacaagtgggtgaggcccgagtgggcacagcttgggggagagatttccaggtggctgtggtgatagtgagctcagtctgtcccagacgtctgtcaacaggtaggtctaaggagcgagtactcatgggaactgggtctcctccaagtccccctgtgttcctagcacctggccccaccgagagctgagctgctgtgagcaggaggaatacttcaaggagaggcaggcagggagcatggagtcccgacagaaggtgtgcgtgtggg

SEQ ID NO: 385664 - DNA, 434 bp, Homo sapiens
cagtcataaaaagaaagaaaacatgtcatttgtggcaacatggatggaattggagagaattatcttaagtgaaataatccaaacacaaagaaataaatattgcgtgttctcacttgtatgtgggaactaaaatatttgatcacatggaggtcaagaggggaaaaataaataacagagactgggaagggtgagtgtgggagaaaagagaggaagaggaggactgggttaaagggtacaaacatatggtaagacagaaggaattaattccatatttgatggtggagtagggggactgtacttaacaaaaatcgattttacttgggtgatggctgtcctcaatacgttgacttgaccgctatgcgttatatacatgtaccaaaatttcttatgtaccccataagtttatagaaataaaaaacagcaaaaaattgtat

SEQ ID NO: 385665 - DNA, 434 bp, Homo sapiens
aaggtaggctgctgctgtgcacatgagtttatacacaggaaattggaataacttggaatttctatgctggagactttggctacttctggatttcaagcattgtatgaagtgtgagaaaactgaggtgactagcacattaaaccatccagattctagcctccaggcacactaaatttaagtcttgataaaaccaggaggccatattatgatcataagtaagatgaagtttagccttccttttagtccattttgtattgccgtaaaggaatatctgaggctgggtaatttataaaaggtttgccgggtgcggtggctcacgcctgtaatcccagcactttgggaggctgaggcaggtggatcacgaggtcaggagattgagaccatcctggctaacacggtgaaaccccgtctctattaaaaatacaaaaaattag

SEQ ID NO: 385666 - DNA, 382 bp, Homo sapiens
ttcttcttggtgaagcctccctgacatcgcctctggcactgataccaccctctgagccccagcacagtcccagcaaaagccgcgcactgtgcaacagaggcctgcgctcgacctcgcggtgcactcagcaggggctgccctcggtcccaccgtctcccttaacgcccctgcctcccagtcccacggcccccaggaggagccagtaccctagcccagggagccgggttgggcgcggcctggggaccgggcgtgggaagctggcccacagggtcgcccctagcaaggaaccaccagagcgcgcatgcgggagccgaggccgcagcactgggtgggcagctagctcaccgaagacccacgcagcgggccaggcgccagcggccgc

SEQ ID NO: 385667 - DNA, 230 bp, Homo sapiens
ggggttctctgtggtcattgcttcttcagaatcactgatggccaggttcactcctcaagactggaaggagcgcccacaaggatgggattttcaaggccagaactccaggtatttttaattttttttttaaattttaaaattgtacaggggccaagcacagtggctcacacctgtaattccagtactttgggagaacatggcaaaaccctgtctctactaaaaatacaaaa

SEQ ID NO: 385668 - DNA, 621 bp, Homo sapiens
gggtgccttcctccaggccgtgtgtggaaatgcattgagccttctcagtgtgtcctgatgttgtaagtttccactttaatgcagctgcagagactgcgtcccacccgaccgcctcccaagatacagcgctcgaggcccgtgagtagctggtggttctgccctccccacctaacactgcctgagccattctccctcagcctgactaaacctccagagtttggaccctcctgcctggcaaaagaaaactgggaattgggtttttcagcttccctctctgtgtggcatgaacttgagcttgcattctctgggcttctcttgctttttcgtgaataagtttggtgacttgcagatcagagccataggtagcaagggggccactgtgtgctgcgtgtgctgcgtgtgcattatttgagcaagtctcctagggtgagcaatgggttggaagccttcctccagacgcctgttcctcacaaacgaagcagaagtccgggggcaagggtctcgttcccgccagatcttggtctggagatgcatttgtaccttcccaggggtggaggctatgtccagggagtatggagccagctcatatggatacaggtaccgctgccctgccaggccttc

SEQ ID NO: 385669 - DNA, 359 bp, Homo sapiens
cccgtgttatggtatctgctcgatgaacggccacttgtagggccactaggcctatgcattgttgagtgggagggcccgtgtcccatctcccccatggctccaggcctctctgaggagagctgaaggaggtggactgactagtccccgcacctccccgccactggctttccgggagacaggaggcagggtcctcagtgccatactactgaggctcagcggccaagctctggctggagccacggtgaggaaaggattagaaacccagatcccttgagccctgccaagtcctcactccctgggaggtgctgacaggaggcttgaggccaggcaggagcagcccatctggcccatcttctgcc

SEQ ID NO: 385670 - DNA, 480 bp, Homo sapiens
ctcctgcaggtacatggtgcgggtccgagctgtggtgatggcccgagatgactccagtgggggctggctgcctgtggggggcgggggcctcagccagacaaccttggagtgtacactgaagccaggcttggtttacaacaaggtgaatcccatctttcaccactggagcctgggtgactgcaagtttggactgacgtttcagagccctgcagaggctgatgagttccagaagagcctgctggctgcgctggccgcactgggtcgaggctcactcaccccctcctcctcctcctcctcctcctctccttcccaggatactgcagagaccccctgccctctgacggtgagtgtccaggatgcctctctgctgggggagggtaggggttttgtttttattctatgaacattcttgagcacctactgtgtagcaggcaccatgccacacaccgggtacacaaaattgggccggaactatgagtg

SEQ ID NO: 385671 - DNA, 685 bp, Homo sapiens
ctcctgcaggtacatggtgcgggtccgagctgtggtgatggcccgagatgactccagtgggggctggctgcctgtggggggcgggggcctcagccagacaaccttggagtgtacactgaagccaggcttggtttacaacaaggtgaatcccatctttcaccactggagcctgggtgactgcaagtttggactgacgtttcagagccctgcagaggctgatgagttccagaagagcctgctggctgcgctggccgcactgggtcgaggctcactcaccccctcctcctcctcctcctcctcctctccttcccaggatactgcagagaccccctgccctctgacgctctcccagtacttcaggcatatgctgtgcccttgacagtggccctaaccgcatccttatgaataggtactcttaggatccccgttttacagaggaggaaactgaggctcaaagagtcccacgtggacagcgactcctcctccagtcacagccgccaggagactcctcccagcgccgctgcggcccccatcatcacgatggagtcagcttcaggcttcgggccgaccacgcccccccagcgccgccgctcctccgctcagagctaccctccgcttctaccgttcacggggattccggaaccctcagagcccctggcaggggcagggggcctggggtggggcg

SEQ ID NO: 385672 - DNA, 414 bp, Homo sapiens
gtctggatctattcattttgtagttgcgagaaaaggaatgaaccgtgactatggcaattcaccgtgacgtgtgataatttagtttgctatgagttttcactcttaggtaaaacctagttatcctaattaataattagttatggatgatatagtaattttttttttttgactgcgtctcactgtcattcgggctggagtacaatggctgatcacagttcggtgcagcctcaacctccctgggctcagtgattctcctacctcagcttcccaagtagctgggattataggcatgcaccatcatgtctggctaatttttgtatttttttataaagacagggttttgccatgttcaagacccaggctggtcttgaactcttgggctcaagcaatcctcccacctcggcctcccaaagt

SEQ ID NO: 385673 - DNA, 544 bp, Homo sapiens
atgggactcaaggtaccattcatccgtaggcaaattcctctacagctgtgagactgaaatcaaacaagtgatgtgcttccaagatacaatggtgggagaagtataggataggtactgccattccaaaagagagaaataggcaagaagaaaagggtaacaagtttcaagtaaatccaaaacccaacaggaaaacaacattaaaccttagagcttgagctgggtgcagtggtgtgtgcctgcagtctcagctacttggagaggttaaggtgggaggaatgcttgaatctaggaatccaaggccaccctgggcaacacagtgagaccctgtctctaaaaaaaaaaaaaaaatcacttaaagttttgagaataatcttctttgactccatgtcctgccttctagacacttaggtgggagttggtcctttaacgtttccagggatcccttccctaatggctttgctgggtggtccacacagcagctctcatgggttggagtttggtgactgcccctctcccaggctgggatcatactccaatggctcca

SEQ ID NO: 385674 - DNA, 646 bp, Homo sapiens
tctcgctctgtcgcccaggctggagtgcagtggcgggatctcggctcactgcaagctccgcctcccgggttcacgccattctcctgcctcagcctcccaagtagctgggactacaggcgcccgccatcacgcccggctaatttttttgtgttttttaggagacggggtttcactgtgttagccaggatggtctcgatctcctgacctcgtgatccgcccgcctcggcctcccaaagtgctgggattacaggcgtgagccaccgcgcccggccgtaaaatcatctttgaacacagcattgtatccatagcaaagtcatttgtggatgccctctcagagaagccaaagggctgccaaatatgaataggagcttccaagtctcctactattgttttctttcattaaattgtattatcctaacagataacttcccaataaaggtaaaaaatttaaatactaaaaaaactgctcttaaaaacattgctaacacttgcagaattcaattttgattaaaagtccaagatgagtatttcatatgggtttgtgcagtggcatgcaaaccacctttcacattcatcactctgtggattgagtccagggtgatatatttatagatctactacgtgtccatccatcttagagccatag

SEQ ID NO: 385675 - DNA, 128 bp, Homo sapiens
cacacctttcattcctgatctctggatcctaaacactgacactcattgtaaacattggttttttaatatatctggggcacagctcagtaaattgagcagaggaagaaagtggtatgttgtttaagttt

SEQ ID NO: 385676 - DNA, 505 bp, Homo sapiens
aaatgattagtagaagaaattactcacatattgtctgctaaaataaatattaaaatttgactacatgaaaaaatatagtttcttgagctgatcaaataaattgatcataattcttcctcgttttgttttctgtgtctgtggaagtcatagcgaatccagaaaatgtatagcttgaattctgttgggtttttttttttctttattacttagtttacatacatttttgtcttcctttgaacttactttctccagacttgggtatgtcatgggcataaatcaaaccactcagatccacttctggaggttgatgttggttttaaagcaggtccttgtgggcatccgttccctttccattgctagtcagtacagagcttaccttttatcaaccagataaaaggttctgatgcaaataatttgacaacccattagctagaaaactatttcctgataacttaaaatcgaccgaagccttcccccatatgtaacactgttctgccattccctt

SEQ ID NO: 385677 - DNA, 514 bp, Homo sapiens
ctacattcaaatctttctaaaaagacatcagtctcatttggttttacaagtgaattctataaactttaacagactttttataggtaagaaagtgaatactacacaactaatttatcatgctagtataacactgatatataaaacagcaaaggaattctaagaaataaaaattataggacatgtttcctatgaacatggacacagaaattataaataagtattaataaactgaatactgcaatgtacaataagagccaaaggccagtatcaggttaatacttttgaatatatattactatataatatccacattaacaaattaatggaggcacatctcaatagatgcagaaaaacttctgataaaattcaacaaccatgagtgatttttttttttaattccacagcaaaggtcctgttcaatgattgaggttgtttaaaaaatccttaagagcaagagacatagggattaggaagaaagaaacaatactgtttgtttgtagatttataatcagtt

SEQ ID NO: 385678 - DNA, 497 bp, Homo sapiens
  misc_feature (497)..(497): n is a, c, g, or t
aatcagtgatgatactttggtgtatgttcaggactgaaaccttcttattgtgctaacttgatggtttctttaaaaataatagtcttgccataaattatgaataagacttgtttttttagccatatactcagaagaacactagagttctccaactggctacgcttagttcttgctttgccaggtagtcccacgcttactataatgttcaatttagagttctaagtataaaatatttttacttatttatttatttttgtgacagagtcttgcactgttgtccaggctggagtgcagtggtgtgatctcggctcactgcagcctccacttcctgggttcaagtgatcctcacgcctcaacctcctgagtagctgggattacaggtgtgagccatggtgcctggctaatttttttttctttttttccttttctgagacggagtctcccactgtcactccagtttgggcaacagagtgagaccctgtttaaaaaaaaaaaan

SEQ ID NO: 385679 - DNA, 210 bp, Homo sapiens
aggagtgaacaagctccctcaggccttttagaagggccccaatccacaagggctctcccatcatgacctcatcacctcccaaggccccaccttcttgtactgtggcactgcaaattaggtgtcagtgtaggagtttcaggagggatagaaacattcagaccatcccagcggtcaagtgttcatcctcttgagttcctccttattctgctt

SEQ ID NO: 385680 - DNA, 361 bp, Homo sapiens
atactaattaagagtatatttgagcaaagaacaatcaaacatttattgatcagtttatgtatatcttttttaaccctatgtaaccactgcctacatgttataactaaagaatagaagaaaagtgtttttataaaataatgatagctaccatttgttgcatgtttattatgtgctatacctcgggctaaatgcttgatgcacattatcttatttatcttcctaggaactctgtaagtgagagcatcagtaattctctccattttacgtatggggaaatggaggtcctgagatctaagcaacttgaccagagtcacacaatttataacagtagaactgagattctaaacaatttttaaattcc

SEQ ID NO: 385681 - DNA, 488 bp, Homo sapiens
tctgaccctgagagaactctagaacagcttcccaggcaggaaggtaacacttcagtaagccagccggtgctgttgctatccacgctagccacattctctcctgcagtaagtcatatatctggggatctggcttcttggtaatatagccatcaggcatcttttctccacaactgcagacttcactgaagataataaagaacagctacatttatagcatgggcaaaacgaattcagatttccttcaaagtagcaaattccctgcataattattaatactacccatggccttctacgagaaaaatacatgatgactctggattaccaagagattaaatagataactctccatctggaaggagattcatatcaggaacaatggaagaataatggatgaagtatttaagtatattcagaaattggatcattttctgtgccaactcattattagtgtaggtaaagtttttaaagcactgttctcaaaggggaac

SEQ ID NO: 385682 - DNA, 152 bp, Homo sapiens
ttgagattcagagcaagttcagagttggatggactaagaatggaaaagccctccattccaatagaagagccaggtagcaatttctggttatggaaccagaagctctcaggcttcaaataaaacagcatcacttctactcttataaaactgta

SEQ ID NO: 385683 - DNA, 1924 bp, Homo sapiens
gggggagccttgacgctgctgcccgggacgcggcccggggctggtgggaacaggggcgtcctcctgcgcgcccccctccccagcgtcccacctcccggcggcggcggggaaagtctctccgaaagcgtgaagggggattggaggaggtttttatttccctttgtgcgggtggctggggccggatcgaggcggcgggggccgcgggactgggggctccccgctgagccgagaggagcgcgacaaaggatgcgtcccgccggggtcacagtctccgcggcccaactttgcgcgcggcgcccgcgcccctggggagcccgcccgctgcgctgagaacccaggcgtccgggctgggagaggggccgggagcgtccgcaggtggcgctggcccggatctcccgaccccaggaagggatcccggagcttcctggaggcggcgggcggccgtgtcgctccagggaaccgcgctgcccgcggaaactccgcgcgcctccgcggatgcccctcgccctagcccccagcgcgcggggttcggggccctgcgaggtccccccttcccccgcggtgcttcccaagctgggctaaggcgggcttctcttcctccctcctctgtcgcctccttttcctccccctcgttcaccttttccttccctctatccatccagagccccgccaaagggcgcacctgatctttctcatccttccctgctcttcccttcctctccacctcctcctcctccttggggaaaggggcccggagaagggcatgtgggggcccctctgacagtggcccgattggggtgacaggcgcccaaatggccaagtggctacgggactacctgagctttgggggtcggaggccccctccgcagccgccaccccggactacaccgagagcgacatcctgagggcctaccgcgcgcagaagaacctggacttcgaggacccctatgaggacgcggagagccgcttggagccggaccccgcgggccctggggactccaagaaccccggagatgccaagtatggttctcccaagcaccggctcatcaaggtggaggctgcggatatggccagagccaaggcccttctgggcggccccggggaggagctggaagccgacactgagtatttagacccctttgatgctcagcctcatcctgcacccccggatgatgggtacatggagccctacgatgcccaatgggtcatgagtgaacttcccggcagaggggtgcagctctatgacaccccttatgaggaacaggacccagagacagcagatggacccccttctgggcagaagcctcggcagagccggatgccccaggaagatgaacggccagcagatgagtatgatcagccctgggagtggaagaaagaccacatctccagggcgtttgcagtgcagtttgacagtccagagtgggagaggactccaggctcagccaaggagctccggagacctccgcccagaagcccccagcctgcggagcgtgtggacccagccctgcccctggagaaacagccgtggtttcatggccccctgaacagggcggatgcagagagcctcctgtccctctgcaaggaaggcagctacctagtgcggctcagtgagaccaacccccaggactgctccttgtctctcaggagcagccagggcttcctgcatctgaagttcgcgcggacccgtgagaaccaggtggtgctgggccaacacagcgggcccttccccagcgtgcccgagctcgtcctccactacagttcacgcccactgccggtgcagggtgccgagcatctggctctgctgtaccccgtggtcacgcagaccccctgacagtgaccctcggcccccttttgagtcctcgggcccagaatcgtatcccaaagccctcccatggcctagaaaataaataagttattgttt

SEQ ID NO: 385684 - DNA, 1871 bp, Homo sapiens
gggggagccttgacgctgctgcccgggacgcggcccggggctggtgggaacaggggcgtcctcctgcgcgcccccctccccagcgtcccacctcccggcggcggcggggaaagtctctccgaaagcgtgaagggggattggaggaggtttttatttccctttgtgcgggtggctggggccggatcgaggcggcgggggccgcgggactgggggctccccgctgagccgagaggagcgcgacaaaggatgcgtcccgccggggtcacagtctccgcggcccaactttgcgcgcggcgcccgcgcccctggggagcccgcccgctgcgctgagaacccaggcgtccgggctgggagaggggccgggagcgtccgcaggtggcgctggcccggatctcccgaccccaggaagggatcccggagcttcctggaggcggcgggcggccgtgtcgctccagggaaccgcgctgcccgcggaaactccgcgcgcctccgcggatgcccctcgccctagcccccagcgcgcggggttcggggccctgcgaggtccccccttcccccgcggtgcttcccaagctgggctaaggcgggcttctcttcctccctcctctgtcgcctccttttcctccccctcgttcaccttttccttccctctatccatccagagccccgccaaagggcgcacctgatctttctcatccttccctgctcttcccttcctctccacctcctcctcctccttggggaaaggggcccggagaagggcatgtgggggcccctctgacagtggcccgattggggtgacaggcgcccaaatggccaagtggctacgggactacctgagctttgggggtcggaggccccctccgcagccgccaccccggactacaccgagagcgacatcctgagggcctaccgcgcgcagaagaacctggacttcgaggacccctatgaggacgcggagagccgcttggagccggaccccgcgggccctggggactccaagaaccccggagatgccaagtatggttctcccaagcaccggctcatcaaggtggaggctgcggatatggccagagccaaggcccttctgggcggccccggggaggagctggaagccgacactgagtatttagacccctttgatgctcagcctcatcctgcacccccggatgatgggtacatggagccctacgatgcccaatgggtcatgagtgaacttcccggcagaggggtgcagctctatgacaccccttatgaggaacaggacccagagacagcagatggacccccttctgggcagaagcctcggcagagccggatgccccaggaagatgaacggccagcagatgatgcagtttgacagtccagagtgggagaggactccaggctcagccaaggagctccggagacctccgcccagaagcccccagcctgcggagcgtgtggacccagccctgcccctggagaaacagccgtggtttcatggccccctgaacagggcggatgcagagagcctcctgtccctctgcaaggaaggcagctacctagtgcggctcagtgagaccaacccccaggactgctccttgtctctcaggagcagccagggcttcctgcatctgaagttcgcgcggacccgtgagaaccaggtggtgctgggccaacacagcgggcccttccccagcgtgcccgagctcgtcctccactacagttcacgcccactgccggtgcagggtgccgagcatctggctctgctgtaccccgtggtcacgcagaccccctgacagtgaccctcggcccccttttgagtcctcgggcccagaatcgtatcccaaagccctcccatggcctagaaaataaataagttattgttt

SEQ ID NO: 385685 - DNA, 1914 bp, Homo sapiens
  misc_feature (1546)..(1546): n is a, c, g, or t
  misc_feature (1586)..(1586): n is a, c, g, or t
  misc_feature (1619)..(1619): n is a, c, g, or t
  misc_feature (1627)..(1627): n is a, c, g, or t
  misc_feature (1658)..(1658): n is a, c, g, or t
  misc_feature (1723)..(1723): n is a, c, g, or t
  misc_feature (1729)..(1729): n is a, c, g, or t
  misc_feature (1764)..(1764): n is a, c, g, or t
  misc_feature (1767)..(1767): n is a, c, g, or t
  misc_feature (1803)..(1803): n is a, c, g, or t
  misc_feature (1807)..(1807): n is a, c, g, or t
  misc_feature (1815)..(1815): n is a, c, g, or t
  misc_feature (1820)..(1820): n is a, c, g, or t
  misc_feature (1833)..(1833): n is a, c, g, or t
  misc_feature (1835)..(1835): n is a, c, g, or t
  misc_feature (1842)..(1842): n is a, c, g, or t
  misc_feature (1888)..(1888): n is a, c, g, or t
gggggagccttgacgctgctgcccgggacgcggcccggggctggtgggaacaggggcgtcctcctgcgcgcccccctccccagcgtcccacctcccggcggcggcggggaaagtctctccgaaagcgtgaagggggattggaggaggtttttatttccctttgtgcgggtggctggggccggatcgaggcggcgggggccgcgggactgggggctccccgctgagccgagaggagcgcgacaaaggatgcgtcccgccggggtcacagtctccgcggcccaactttgcgcgcggcgcccgcgcccctggggagcccgcccgctgcgctgagaacccaggcgtccgggctgggagaggggccgggagcgtccgcaggtggcgctggcccggatctcccgaccccaggaagggatcccggagcttcctggaggcggcgggcggccgtgtcgctccagggaaccgcgctgcccgcggaaactccgcgcgcctccgcggatgcccctcgccctagcccccagcgcgcggggttcggggccctgcgaggtccccccttcccccgcggtgcttcccaagctgggctaaggcgggcttctcttcctccctcctctgtcgcctccttttcctccccctcgttcaccttttccttccctctatccatccagagccccgccaaagggcgcacctgatctttctcatccttccctgctcttcccttcctctccacctcctcctcctccttggggaaaggggcccggagaagggcatgtgggggcccctctgacagtggcccgattggggtgacaggcgcccaaatggccaagtggctacgggactacctgagctttgggggtcggaggccccctccgcagccgccaccccggactacaccgagagcgacatcctgagggcctaccgcgcgcagaagaacctggacttcgaggacccctatgaggacgcggagagccgcttggagccggaccccgcgggccctggggactccaagaaccccggagatgccaagtatggttctcccaagcaccggctcatcaaggtggaggctgcggatatggccagagccaaggcccttctgggcggccccggggaggagctggaagccgacactgagtatttagacccctttgatgctcagcctcatcctgcacccccggatgatgggtacatggagccctacgatgcccaatgggtcatgagtgaacttcccggcagaggggtgcagctctatgacaccccttatgaggaacaggacccagagacagcagatggacccccttctgggcagaagcctcggcagagccggatgccccaggaagatgaacggccagcagatgagtatgatcagccctgggagtggaagaaagaccacatctccagggcgtttgcagtgcagtttgacagtccagagtgggagaggactccaggctcagccaaggagctccggagacctccgcccagaagcccccagcctgcggagcgtgtggacccagccctgcccctggagaaacagccgtggtttcattggcccccntgtatcatgaggcaggaatgcatgaagatgccctccttgntcccttcttgcaaagggaaggcatgcctatccntatgtgcnggcttcatgtgaagtccatgcccccagggancctgcttcctttttcttcttcatggtgcatgccaagggctttccctgcattcttgaatgttcgcngcgganccccgtgatgaatccatggtggtgcgtgggccaancancatgcggggccctttcacacacatgcggtgccctgnggcntcagtccntcaancaatcatgtttancngcgcaancatgcccggtgcaagggtgcccgtgcattcttggcttcttgcttgnaccccgtggtaacgcaagcccagcca

SEQ ID NO: 385686 - DNA, 2250 bp, Homo sapiens
gggggagccttgacgctgctgcccgggacgcggcccggggctggtgggaacaggggcgtcctcctgcgcgcccccctccccagcgtcccacctcccggcggcggcggggaaagtctctccgaaagcgtgaagggggattggaggaggtttttatttccctttgtgcgggtggctggggccggatcgaggcggcgggggccgcgggactgggggctccccgctgagccgagaggagcgcgacaaaggatgcgtcccgccggggtcacagtctccgcggcccaactttgcgcgcggcgcccgcgcccctggggagcccgcccgctgcgctgagaacccaggcgtccgggctgggagaggggccgggagcgtccgcaggtggcgctggcccggatctcccgaccccaggaagggatcccggagcttcctggaggcggcgggcggccgtgtcgctccagggaaccgcgctgcccgcggaaactccgcgcgcctccgcggatgcccctcgccctagcccccagcgcgcggggttcggggccctgcgaggtccccccttcccccgcggtgcttcccaagctgggctaaggcgggcttctcttcctccctcctctgtcgcctccttttcctccccctcgttcaccttttccttccctctatccatccagagccccgccaaagggcgcacctgatctttctcatccttccctgctcttcccttcctctccacctcctcctcctccttggggaaaggggcccggagaagggcatgtgggggcccctctgacagtggcccgattggggtgacaggcgcccaaatggccaagtggctacgggactacctgagctttgggggtcggaggccccctccgcagccgccaccccggactacaccgagagcgacatcctgagggcctaccgcgcgcagaagaacctggacttcgaggacccctatgaggacgcggagagccgcttggagccggaccccgcgggccctggggactccaagaaccccggagatgccaagtatggttctcccaagcaccggctcatcaaggtggaggctgcggatatggccagagccaaggcccttctgggcggccccggggaggagctggaagccgacactgagtatttagacccctttgatgctcagcctcatcctgcacccccggatgatgggtacatggagccctacgatgcccaatgggtcatgagtgaacttcccggcagaggggtgcagctctatgacaccccttatgaggaacaggacccagagacagcagatggacccccttctgggcagaagcctcggcagagccggatgccccaggaagatgaacggccagcagatgagtatgatcagccctgggagtggaagaaagaccacatctccagggcgtttgcagtgcagtttgacagtccagagtgggagaggactccaggctcagccaaggagctccggagacctccgcccagaagcccccagcctgcggagcgtgtggacccagccctgcccctggagaaacagccgtggtttcatggccccctgaacagggcggatgcagagagcctcctgtccctctgcaaggaaggcagctacctagtgcggctcagtgagaccaacccccaggactgctccttgtctctcaggagcagccagggcttcctgcatctgaagttcgcgcggacccgtgagaaccaggtggtgctgggccaacacagcgggcccttccccagcgtgcccgagctcgtcctccactacagttcacgcccactgccggtgcagggtgccgagcatctggctctgctgtaccccgtggtcacgcagaccccctgacagtgaccctcggcccccttttgagtcctcgggcccagaatcgtatcccaaagccctcccatggcctagaaaataaataagttattgtttaaaaaaacaaacaaaacccggagggccactagtacagcgtcacgaaaaccagggtcaggacaggggcccccggccattcgagggtcacatggccccaattcgtgttacaaagtgctcacactgagagaccccataaagagccgaaatacaatgacaaagcggttaccggatacacacgcggcagagggacatgcacaacacctacaccgccacgtgactacaacgaacacaaaaggagcgacagcacaacagcaagagcataaagcaacacaagataatcgatacaacacgtcaccgacgccacacgatgagacacaaggcacaga

SEQ ID NO: 385687 - DNA, 1905 bp, Homo sapiens
gggggagccttgacgctgctgcccgggacgcggcccggggctggtgggaacaggggcgtcctcctgcgcgcccccctccccagcgtcccacctcccggcggcggcggggaaagtctctccgaaagcgtgaagggggattggaggaggtttttatttccctttgtgcgggtggctggggccggatcgaggcggcgggggccgcgggactgggggctccccgctgagccgagaggagcgcgacaaaggatgcgtcccgccggggtcacagtctccgcggcccaactttgcgcgcggcgcccgcgcccctggggagcccgcccgctgcgctgagaacccaggcgtccgggctgggagaggggccgggagcgtccgcaggtggcgctggcccggatctcccgaccccaggaagggatcccggagcttcctggaggcggcgggcggccgtgtcgctccagggaaccgcgctgcccgcggaaactccgcgcgcctccgcggatgcccctcgccctagcccccagcgcgcggggttcggggccctgcgaggtccccccttcccccgcggtgcttcccaagctgggctaaggcgggcttctcttcctccctcctctgtcgcctccttttcctccccctcgttcaccttttccttccctctatccatccagagccccgccaaagggcgcacctgatctttctcatccttccctgctcttcccttcctctccacctcctcctcctccttggggaaaggggcccggagaagggcatgtgggggcccctctgacagtggcccgattggggtgacaggcgcccaaatggccaagtggctacgggactacctgagctttgggggtcggaggccccctccgcagccgccaccccggactacaccgagagcgacatcctgagggcctaccgcgcgcagaagaacctggacttcgaggacccctatgaggacgcggagagccgcttggagccggaccccgcgggccctggggactccaagaaccccggagatgccaagtatggttctcccaagcaccggctcatcaaggtggaggctgcggatatggccagagccaaggcccttctgggcggccccggggaggagctggaagccgacactgagtatttagacccctttgatgctcagcctcatcctgcacccccggatgatgggtacatggagccctacgatgcccaatgggtcatgagtgaacttcccggcagaggggtgcagctctatgacaccccttatgaggaacaggacccagagacagcagatggacccccttctgggcagaagcctcggcagagccggatgccccaggaaggtatgatcagccctgggagtggaagaaagaccacatctccagggcgtttgcagtgcagtttgacagtccagagtgggagaggactccaggctcagccaaggagctccggagacctccgcccagaagcccccagcctgcggagcgtgtggacccagccctgcccctggagaaacagccgtggtttcatggccccctgaacagggcggatgcagagagcctcctgtccctctgcaaggaaggcagctacctagtgcggctcagtgagaccaacccccaggactgctccttgtctctcaggagcagccagggcttcctgcatctgaagttcgcgcggacccgtgagaaccaggtggtgctgggccaacacagcgggcccttccccagcgtgcccgagctcgtcctccactacagttcacgcccactgccggtgcagggtgccgagcatctggctctgctgtaccccgtggtcacgcagaccccctgacagtgaccctcggcccccttttgagtcctcgggcccagaatcgtatcccaaagccctcccatggcctagaaaataaataagttattgttt

SEQ ID NO: 385688 - DNA, 1349 bp, Homo sapiens
cttagttccgcatggccctgaaacacacacatttccccctccttttcctccccctcgttcaccttttccttccctctatccatccagagccccgccaaagggcgcacctgatctttctcatccttccctgctcttcccttcctctccacctcctcctcctccttggggaaaggggcccggagaagggcatgtgggggcccctctgacagtggcccgattggggtgacaggcgcccaaatggccaagtggctacgggactacctgagctttgggggtcggaggccccctccgcagccgccaccccggactacaccgagagcgacatcctgagggcctaccgcgcgcagaagaacctggacttcgaggacccctatgaggacgcggagagccgcttggagccggaccccgcgggccctggggactccaagaaccccggagatgccaagtatggttctcccaagcaccggctcatcaaggtggaggctgcggatatggccagagccaaggcccttctgggcggccccggggaggagctggaagccgacactgagtatttagacccctttgatgctcagcctcatcctgcacccccggatgatgggtacatggagccctacgatgcccaatgggtcatgagtgaacttcccggcagaggggtgcagctctatgacaccccttatgaggaacaggacccagagacagcagatggacccccttctgggcagaagcctcggcagagccggatgccccaggaagatgaacggccagcagatgagtatgatcagccctgggagtggaagaaagaccacatctccagggcgtttgcagtgcagtttgacagtccagagtgggagaggactccaggctcagccaaggagctccggagacctccgcccagaagcccccagcctgcggagcgtgtggacccagccctgcccctggagaaacagccgtggtttcatggccccctgaacagggcggatgcagagagcctcctgtccctctgcaaggaaggcagctacctagtgcggctcagtgagaccaacccccaggactgctccttgtctctcaggagcagccagggcttcctgcatctgaagttcgcgcggacccgtgagaaccaggtggtgctgggccaacacagcgggcccttccccagcgtgcccgagctcgtcctccactacagttcacgcccactgccggtgcagggtgccgagcatctggctctgctgtaccccgtggtcacgcagaccccctgacagtgaccctcggcccccttttgagtcctcgggcccagaatcgtatcccaaagccctcccatggcctagaaaataaataagttattgttt

SEQ ID NO: 385689 - DNA, 795 bp, Homo sapiens
agcggtccggcggtggcggttgccatggggacggagcttgggtggcaaccagaactagggagctggtggagaaggtggcggccgctggaaggaggcccgggaggtggctgaggggtccaggcggcgggacgactctggccttttgaagaccggggtgggtgctctctaggaaactctacagagaagaatgtcagatgcagcagaagctccccgagaagcaacaggagaaaatggagaaacagaaatgaaagaagaggaggaacctaatccaaattataaagaagtagaagatccacaacaggaatcaaaagatgacacaatagcatggagagagtctcaggaggaggagaggaaaacgggcgaggaggaagggggaggaggaggagaaagaggaggaggggaaggaggacaaaaagattgtcatggaagaaactgaggaaaaggctggagaagtccaagagaaggaggcttcaggaatacaggaagaaaccacagtagagccccaagaagtcacagcgtccatgatccgtttggagacacagattactgattcccagtcaatcacatcaggaattttcccaaaaacccaaagaggtagcaagtcaaagctttccttacaattggaggatgcagaaacagatgagcttttaagagacctgagcacacaaattgaatttcttgatttggatcaaatcagtcctgaggaacaacagattagttcccctgaaaggcagccctcaggagagcttgaggagaaaaccgaccggatgccccaagatgaactgggacaagaaa

SEQ ID NO: 385690 - DNA, 621 bp, Homo sapiens
aaagatctatttgatgagaaagactgaagaaaaataaggataagggtatttcctccatgttttcatggcacaaaatctttgctaactgtgataaggagaataatgccccccccaccccccacaagactgtccctgtcctattctccatgtcaggaaggatatgctatgtaatataagaatatatgatgttacaatgcaagaaagtattaaggttgcacatgacattaagcttactaaacagcggaacttaaaataagagatcatacttgattatctggggggggccaatttaatcacaaggatcctttaaatgtggaagagtgtggtagaaaatatttaaagatactacattgctaattgtactggaggaaagaaccaagagacaaggaatggggaaagcggacaagagacaagaaatgaagacagcccctagaagctggaaaaggcaagaacatgtattctcctttagagtccccagaaggaaagcggtgctgctgacaccttgattttagcctaatgaaaaccatttaagatttctgacctttataattttaaagtggtagatttatgtttctaaactaccaaataaaaatgttttgtctttagtttttaaaagtttaa

SEQ ID NO: 385691 - DNA, 427 bp, Homo sapiens
cctgtttaacctcaccttgtgctcgcctgcttctctctcgtttcccatcactccctgaggacctgctgcccttggctttgcccaggcgtgcacttcctgcacatgaggaatacctgcctgcttctcatggccattactgggcatccctgtattgccggcgacagtggttaccatgtcaggcggcccctgcctctgcgcattggcacacactgttccgcctgtgtggggtccctgttctcactgctatttttagcactcttgttgagtgggggcccattatctctgccagagctttcctggtcccctctctgagtaaagtgtcctttaggtctcctgtcaaagcggctctaaaatgtttcttatgccaaatatgagggctggtcacttaggtgtctacgtttttccttcaatgctgtttttttctgac

SEQ ID NO: 385692 - DNA, 250 bp, Homo sapiens
atttttcattgttgatgttgacctccattacctggctgtgtttacagatttctccattgtaaagttactcattttttccttttgccatgctgtactctttgggaggaagtcactaagcacagtgcatacttaaggagtagggagttacactgccttcattgggggtggaatatctacataattaatttggaatttttctacacaggcaattcgtctcttctccatttatttgtttgtccaatcttttatt

SEQ ID NO: 385693 - DNA, 340 bp, Homo sapiens
gttgggcttcatgtcaaaatataagacttcgccatcagtgctctggggccaggactcagttcaggatgttcgtggcatatttcaccaggctttctcagtcacatgagcaaagactctttttttcattagcaagaatggaaaatgcccaaatgcatcaccaactgaggaaatcattttgtttcaacagatttcaatctctctggcaccaaaacgtgtttcatgatggagctgagggaattctgtcagcaaaatgcagtgttctaagaccaagagaactccattataacacagctcgttagcacaaggatctgaacattcctcgggtcagagactgctctct

SEQ ID NO: 385694 - DNA, 386 bp, Homo sapiens
ttttctcaattactaatttttcaggaaagtagaatattggaggcacaaaatgcaatctcaaagccatgaattctacccttctgctcttagctttgcccaagattgtctgaatgatcttgggcaaatcactgagggcagatacttgctttagtgcctgcaactatgagatggtcaacaactctcatgctctctccccaccctgggcctgatgaatactcagcaaatattacatgagccatcaaatgattaaattgactttggtgcttctattggtctgactagcatgtatagccttttttccccacaaatgacagttacttcctggctttgatctgaaattgcattaatctaccccaaaaagtgagttaagagtattttattatttt

SEQ ID NO: 385695 - DNA, 460 bp, Homo sapiens
ctataaaaaaggtaaaatatatgttttggaaattatgttgagagaaggtaacccttacacatggttggtaggaatgtaagttagtacagccattatcaaaaaccagtatggaggttcctcaacaaactagaaagagaactaacatatgatatagcagtcgtttaaccaagtatatatccaaactatatgatttcagtgtgtcaaagagatatctgtactcccatgttcattgtggcattattcgcaattcccgagatatggaatcaacctaagggttcatcaacagatgaataaagaaaaaatctggccaggcatggtggttaatgctggtaatcccaacactttgggaggccggggtgggaggatcacttgagcccaggaatttgagagcattgaggtgtgattgtgcccctgtcctgcagcctgggtgtcagagcgagaccctctctctctctcaaaa

SEQ ID NO: 385696 - DNA, 752 bp, Homo sapiens
aggggcgtgtgcggctgtcccgggagggctttagcgcagagccgcgacgggcagcgggggtgtgttgcctgacgcgtgcgcagctgtggggcgacacacgggggcggcttctgcagccgagggaccccgctttgcagcctgcaccccggctcccgcgtgcccgccgctgtctgtcgcccgccggtgcgatgagcccagccctgcttggacgctgttcacgcctctgcgctccataccttgctcctgtcctctgtttgcagttccactctagcagagcagggtgggctcctcccctctgtacggtagaggagcctggtcactggcccatctcagtagtgaaactggaggtttgatgcacaggggattctcagtagcaggcgccagtgcctgatttatcgtgagaagcagtttaatatttcggctataaaaggctagaactagttcctaattagaaggtgtgccaggttgtaaattgtcaggttgcaagtagggatgagcacgccaagtttttgcgtataggtctaaagaagttttgggggtgggggaggatgcggtaccccagacctgtttccttgtctgcccagaccttgccatggtgtagctttccatctcttgtgacagtgtctcaaggagcagtagacattctttggctgcagcagatttcgcattgtcttcctgattggaagagttcagttatgaggcttctggttgccagttactcctttcttttgaagagaaagaactggaatcat

SEQ ID NO: 385697 - DNA, 1531 bp, Homo sapiens
ggtggtgccagcactagcccccatgtcggtctcagagaaccttctccccacctctgagttattctctcagtgtatcgaagatatcagtcaactatcttctggattgcattgatgctattgagaaggcagcctgcagtctaaaagtcatggttttaaaggcggaacacaccaggagccccagcgcaaccctcccctccaatgtgccttcatgccggtccctgtcatccagcgaagacggccccagtggcccttccagcctcgcagatggaggcctagcccacaacttacaggatagtgtcaggcaccgcatcctctacctctcagagcagctgagagtggagaaggccagtcgggatggcaacactgtgagctacctcaagctggtatccaaagcagaccggcaccaggtgccgcacatccagcaggcctttgagaaggtgaaccagcgcgcctctgccaccatcgcccagatcgagcacaggctccaccagtgtcaccagcagctccaggagctggaggaaggctgcaggcccgagggcttactgctgatggcagaaagcgacccagccaactgcgagccacccagtgagaaggccctgctttcagagccccccgagccaggtggggaagacgggccggtcaacctgcctcatgccagcaggcccttcatcttggagagtcgcttccagagcttacagcaggggacgtgcttagagacagaggatgtggcccagcaacaaaacctgctgttgcagaaggtaaaggcagagctggaagaagccaagaggttccacatcagcctccaggagtcctatcacagcctaaaggagaggtctctgactgacctgcagctgttgctggagtcccttcaggaggagaagtgtaggcaagcattgatggaagaacaggtgaatggtcgcctgcagggacagctgaatgagatttacaacctcaaacacaatctggcctgcagcgaagagagaatggcctatctatcctatgagagagccaaggaaatatgggagatcacggagaccttcaagagccgaatatccaagctggagatgctacagcaagtcacccaactggaggcagcggagcacctccaaagccgtcccccgcagatgttgttcaagttcctgagtccgcgcctctcactggcaaccgtcctcttggtctttgtctccaccttgtgtgcctgcccctcgtcactgatcagctcacgcctgtgcacctgcaccatgctgatgctgatcgggcttggggtcctggcctggcagaggtggcgcgccatccctgccacagactggcaggaatgggtcccctccaggtgtagactgtactccaaggactctgggcctccagcagatggaccttaaggggccaggagggccacctgccttagcttgctagctccctccctcctcctgggtgctgagggcatccagcaagcccctccacagctcttgcttgccgattatgtaaccaccagcctggtgaaatggatatagacgcccacctgcctcacact

SEQ ID NO: 385698 - DNA, 1553 bp, Homo sapiens
atgaggcaagccccgtgtgattgttgaggaggagttagcccattgccagcctgtgacgtgactgactcgaatgaaccctgttattctctcagtgtatcgaagatatcagtcaactatcttctggattgcattgatgctattgagaaggcagcctgcagtctaaaagtcatggttttaaaggcggaacacaccaggagccccagcgcaaccctcccctccaatgtgccttcatgccggtccctgtcatccagcgaagacggccccagtggcccttccagcctcgcagatggaggcctagcccacaacttacaggatagtgtcaggcaccgcatcctctacctctcagagcagctgagagtggagaaggccagtcgggatggcaacactgtgagctacctcaagctggtatccaaagcagaccggcaccaggtgccgcacatccagcaggcctttgagaaggtgaaccagcgcgcctctgccaccatcgcccagatcgagcacaggctccaccagtgtcaccagcagctccaggagctggaggaaggctgcaggcccgagggcttactgctgatggcagaaagcgacccagccaactgcgagccacccagtgagaaggccctgctttcagagccccccgagccaggtggggaagacgggccggtcaacctgcctcatgccagcaggcccttcatcttggagagtcgcttccagagcttacagcaggggacgtgcttagagacagaggatgtggcccagcaacaaaacctgctgttgcagaaggtaaaggcagagctggaagaagccaagaggttccacatcagcctccaggagtcctatcacagcctaaaggagaggtctctgactgacctgcagctgttgctggagtcccttcaggaggagaagtgtaggcaagcattgatggaagaacaggtgaatggtcgcctgcagggacagctgaatgagatttacaacctcaaacacaatctggcctgcagcgaagagagaatggcctatctatcctatgagagagccaaggaaatatgggagatcacggagaccttcaagagccgaatatccaagctggagatgctacagcaagtcacccaactggaggcagcggagcacctccaaagccgtcccccgcagatgttgttcaagttcctgagtccgcgcctctcactggcaaccgtcctcttggtctttgtctccaccttgtgtgcctgcccctcgtcactgatcagctcacgcctgtgcacctgcaccatgctgatgctgatcgggcttggggtcctggcctggcagaggtggcgcgccatccctgccacagactggcaggaatgggtcccctccaggtgtagactgtactccaaggactctgggcctccagcagatggaccttaaggggccaggagggccacctgccttagcttgctagctccctccctcctcctgggtgctgagggcatccagcaagcccctccacagctcttgcttgccgattatgtaaccaccagcctggtgaaatggatatagacgcccacctgcctcacact

SEQ ID NO: 385699 - DNA, 357 bp, Homo sapiens
tactgaatgtattcaaaaaaatcaaggtgtgattcctccctaacttatataaaaccattgtcagccaggcctggtggcccgcttgtaatttccagcactttgggaggctgaggcgggcagatcacctgaggtcgggagtttgagaccagcctgaccaacatgaagaaaccccatctctactgaaaatacaaaattagccgggcgtgggggcacatgcttgtaatcccagctactcgggaggctgaggcaggagaatcgcttgaacctgggaggcagaggttgcagtgagctgaattcgcaccattgcactccagcctgggcaacaagagtgaaactctgtctcaaaaacaaacaaac

SEQ ID NO: 385700 - DNA, 433 bp, Homo sapiens
gatatgtagaatgacacaacaattgatgagtaatttaggagatccaataactaaaaaaaaaaagactggggacaagttcatggaaagagtaatcaactaagccttataacataaaattgacaaatagagaaggcatgcaatccagtagaatagagtgcaaaagaggtagaagactaatcgtttcaagacatgttgagccacaacagcaataacattgtgacaaaaaacgtcggtgtagactgcagaagatcttcaatgacggatcaagctgtatagacttttttttaccctcatatactgaatagtcatttaaggtatacagtgccaacgtaagagagaaaggtggtctatcattttggagtttctttccacctctggagaattgctcaggaaatctggctaacataccaaataaatcaaatggatttaatga

SEQ ID NO: 385701 - DNA, 486 bp, Homo sapiens
aaaaatttctctagtaaaatgaatacactgaattttaattaaaagattttgacactaatttaagctattgaaagctgtagtttccccatccataaaataggaattgtaacagaatctattacctaggttgttgcaagcattcagtgaaaacagcatagcatgggcttgccacaaacgtcatgcttaataaacataagctattttttgaatgatagttttaccctatttttttgaatagatcattttactcttctgagatttatttttcatatgtacagtatacaacataatattgtgttgtaaaggcttcaaaactcttagctaaggaaagagaaaagaaattctcacacgaagccaaatacctgaaagatactatataaaattaatttatttaaaagaggacattcaccttctgaggtctttttgttttgtttccatttagtagttttgtatcattcatatgtttgtatcattagtagttttgta

SEQ ID NO: 385702 - DNA, 139 bp, Homo sapiens
catgcctctgtgtggtctccatccatctcttgggcacctgcaaggggtttgacccaaggctaggcacttcccacatggtccagcattctttacttttctttttttcttttttgagacagagtctcgctttgtcacccag

SEQ ID NO: 385703 - DNA, 452 bp, Homo sapiens
aggcacatctcacatggcagcagacaagacgagagcttgagcagaaaaactcccccttataataatcctcagatcttgtgcgacttactgtaacgagaacagcacgggaaggacctgcccccatgatgcaattacctcccacctggtctgtctcacaacacatgggaattccagatgagatttgggtggggacacagccagaccatatcagaagggctctatctcagtcctgcccgtttgccctgaccttgtggccatggtggctgctcctggggaaaggcgggtctgcattcctccatagcctgagaggggcttatcttccccctgcttcccagtgttgcagaggggaagacaggaggtggaagaaaggggaggctgagagcccgaggagggcttgcaccctggcctgacccacgagagttcccttccctgccacacaagttgcagggctg

SEQ ID NO: 385704 - DNA, 580 bp, Homo sapiens
tgttaccttgatctttagtgatttgcagttttcaaggtgactctgtctttttatagtttagggtaatagcaagttcagtgagtaattttttaaaattagtaacattattttccgagcagtcttagattcacagcaaaactgagaaggtacagagactttccatattccccatgacccctgacatatgaatagcctccctcattatcagtaccccccatcagagttcatcagttacagttgaggaatctaccttgacagacacatcactcccaaggtccacagtttacattagggttcactcttggtgtagtatactccatgatattggacaaatgtgtaatggcatgtatatacccttgtagtatcatagacaaaatagtttcactgccctaaatatcctctgtcctctgccattttgtttcttcttctccactggcttctggcaaccattgttctttttggcgtctccatagttttgctttttccagactagtcatatagttggaataaaacagtggatatctttttgaatatttaaacaacaaatttccatagtaattggattctgtcattttagatg

SEQ ID NO: 385705 - DNA, 414 bp, Homo sapiens
ccaggaatcttggaagcaaatgcagcagatgagggaaaagcctgtagggatcctgccccctgccccctcccccacatagtttagatctgtgtcttctttgcatcctgaacagtggctgtactcttcatctggagcaaaggacctgctgtgaggcagtttcatttcctctgaggtgattggtaggttggtttattgtttggaccatcccttgagacactgaaagatttcttcctcattatgagagacttttaatttaaaaaaaatggatttggttgaggttctctgaagtggacagattaggagattaaaagactccttttatatgatttgactctgatagcttagtttgtgtttgtcaatgaaaactcttctccttaggccactgactgctctcaactgattctcaacacactt

SEQ ID NO: 385706 - DNA, 420 bp, Homo sapiens
gcggaggttgcagtgagctgagatcgcgccattgcactccagcctgggtgacaagagcgaaactccgtctcaaaaaaaaaaaaaaagaacctccttgggtctcttatgtggtaacttatgtcagtacattaatgtaggaagttagcaaaaactgctgaaacttcataaaaataatatttatgcacattaatttcatacagagaaaggcacagcacagcaacactatagtaaatcagtaagagctgaactaatgttgcattttattccctcaagtcactgtagtgcctagctctgacttccttctggattgaccattcttgtcatgggctatgctttgtgtttgtatttcagtcttagccatgtaagggtttgggtccaaaatatgatcttgttaatgtaataaaacgtaacaaaaaaaca

SEQ ID NO: 385707 - DNA, 319 bp, Homo sapiens
ccctaggccccaagggcacattgactggtgttagcaaggaagggaccctttgtttagaacgggtcagatgggccgtgggaaaaagagaggtgtgggaccgtgaaaggggactatggtgagaggccttcaaaggtggccaagccctcagacctaggcaaattgtgtctcagagaatgagggaagtcatgtgacctgaaagctgctgaaggtagtctttgaggaattgcagaccctcttaggggtcagaagactggattgtgagtaggccagttttcagtacagggaaaaaagcacagatcactcttttgaccccaatctt

SEQ ID NO: 385708 - DNA, 334 bp, Homo sapiens
gaaaagtcataaatgagcatgcatcactttttcatcagaaaaataaatgagttacatatttttttaaagggaagatattgtaaaggaatatttgttgacagaatgcattaaaaaacctaggtaatttccttatttccctgggattctgagaatttttttactcttgggaatatctttccttgctcttagttattttcatatgttagtcttgttcctggggataaaaaatggtaagtttgctatttgagctctgctcgaacatatggagtagttctctcttacatatacagaattggtttgacattcaaggtctttcagagtcaaatcccaattg

SEQ ID NO: 385709 - DNA, 772 bp, Homo sapiens
caatggggcacctgccttttctgtccccagaactgggaatgctggctcctatgcccctaggagagggcttggtataaaagctactttccacgagccaagatatgaggcccctgtctggtgttgctgagttgggcaagaggcttctcttctttgaccccaagtctaaaatagctaagctagagattctccaggggccagggctcagagaactgttcctgttgctgataatgatgtgccatccaagaacaggggtaccccaagtccctgccgaagtagcctgtaagtgctatgagtcataaatagagtgaccaatcactcctggttttcctcggacacagaacttttggttttaagactgtgatgggccaggagtgctggctcacacctgtaatacccagaactttgggagggccagggcagaaggattgcttgagaccaggagtttgagacaagcttgggcaacatagcaagaccttgtctctattaaaaaaaaaaaattaggaacaaataaataggccaggtgcggtgactcacacctgtaatccccacactttgggaggccgaggcaagtggatcacttgaggtcaggagttcaaaaccagcctggccaacatgatgaaaccccgtctctactaaaaatacaaaaaaaggccgggcgtagtggctcacgcctgtaatcccaacactttgggaggccaaggtgggtggatcacctgaaggtcagaagttcaagaccagcctggccaacatggtgaaactccatctctactaa

SEQ ID NO: 385710 - DNA, 918 bp, Homo sapiens
ggctggttttggccaagtcccatttgttgcttctgggaaggggtttctaacactagtctgtgtgctgtggttcctggggtgccctccactgccctctgttcagtaacagggccttgctaatcgggttgtcactcaacaaaagtgctttggatttaagttactatcctggctttgcccaacctcagcaacctgtaagactgataatgaaataaatcatgttaatcctaaaaaaaaaacactcagctgtgcagatattatttgcactgatcccttactaatatttagtgagagaatgagatcgtgttaaagagtgtatatgtacgtgcccccaaaaggggtcagtgttacacaatagttgacaaataatatcctggtgcctaaggaaaaaaacctaaacttataaataaacttggctatctgaagacagcagagattgatgctgactaacacataacgaataataaaaaaggaaagtgaaaagggggctatagggactccagacctgtaacatctgacaaaggggattggcggtcctgaagttgaggaactactaatttaagaaaaatgtacttattttgttatccatgccttgcagctaagcaagatatgagttactgggtgtttcacaaaggaggatgtaaagaatgtacctttaacttgtctttaaaagggagggaggaagctgtcccaggcttttactgaagccagtaatcttgcagaacttgatttttacaggataatggaaattagtatcttcatatattactgtttgttccttgaacaagtagtaactggagaatttgtctccccatggccaaccctgaaatacaaaatccagataaatgctagaccctggggtagtcaggtgccaatactgtagaaactcttgcttagtttcagcattgtgttttagtgagt

SEQ ID NO: 385711 - DNA, 1915 bp, Homo sapiens
ttccaaaagaagagaacatggcagttatattgcccccctcgtctcccatgctagcaagtaggaagttcggacagtttcataacatggcccattcacaattccccattgaaatttagaggcaggtcaccttctatgaatacacaaagacactattgtggtcagaagtgagctggcttagtgaacacaattctttttatactaaaaaaatttttttcttaagaaagctaacaagtaggtgatggaaacaatgaataaaaaataactttttctagaacatataaataattttaagtgaccattgaaatgtaagtttagaattccaaggcaatttctgcagaggcgatagttacacaatcattctgttgaaagctaagatttagatggcattaggaggctgacacacagtaattactagtagtacttgttggcttgcagacaggtgggggttgggcctgcagaatcccctgcagcattttcctgtaatctggatgagcgatcttcaaacgtgtgctttcaaactacttaaataccatattcttcctatcttgcctttcatttttatattaccacagatactttcctcatagtcttgccagtgcttgtagaatgcttagaaaaagcttgataaaccactgggctaagtacacagagggagaggctagcagtatttttaaattggtttctaaattttttatagcttgatggtagataacacatttgcttcattgaagtaatctgaaaaaccaatcctcaaaagacctctcaattagaattcttaaatgacaatgttttctttatcatatatttgagagattgatttaaagaaaaataatgcttgactatctgaaataatattttaaccctatcataaaatctctgcctggtagaacagctgactgtggaagggtaaaatgcagagaaccagtcattggatctcccttctctactttgttactgaaatcttgaacctgtagaacattacttatcactgtgttcctttctaatgggaaaataataataaacacttgcagagtattttttaaaagtttttagctttaaaaaaaaaaaccctgtgccttacacaatgtgtatattgagttgatactgattatgataattagatggtattatacaatcattcattcagcaaacattcacttactgagcacctactaatgttccaggtactgattgttaaaaggtgattgagacacagcctctgtcctgagcttagtctagtaggaggtgacagatttgtaaataatagatttgaagttgctgagcaaaaaaaaaaacaaaaaaaaaaacctgtgtacctctcccccacagcaaatgtgtcacatttgcacagtgcccagcctttgcacagtgcccagcactcagctgtgcagatattatttgcactgatcccttactaatatttagtgagagaatgagatcgtgttaaagagtgtatatgtacgtgcccccaaaaggggtcagtgttacacaatagttgacaaataatatcctggtgcctaaggaaaaaaacctaaacttataaataaacttggctatctgaagacagcagagattgatgctgactaacacattgccctttttgagtctacagtttgaagttattttccaaaagaagagaacatggcagttatattgcccccctcgtctcccatgctagcaagtaggaagttcggacagtttcataacatggcccattcacaattccccattgaaaattagaggcaggtcaccttctatgaatacacaaagacactattggtgtcagaagtgagcttggcttagtgaacacaattctttttaatccaaaaaaaattttttttttaagaaagctaaccaagtaggggatggaaaccatgaataaaaaataactttttctaaacatataaataattta

SEQ ID NO: 385712 - DNA, 1861 bp, Homo sapiens
ttccaaaagaagagaacatggcagttatattgcccccctcgtctcccatgctagcaagtaggaagttcggacagtttcataacatggcccattcacaattccccattgaaatttagaggcaggtcaccttctatgaatacacaaagacactattgtggtcagaagtgagctggcttagtgaacacaattctttttatactaaaaaaatttttttcttaagaaagctaacaagtaggtgatggaaacaatgaataaatttagaattccaaggcaatttctgcagaggcgatagttacacaatcattctgttgaaagctaagatttagatggcattaggaggctgacacacagtaattactagtagtacttgttggcttgcagacaggtgggggttgggcctgcagaatcccctgcagcattttcctgtaatctggatgagcgatcttcaaacgtgtgctttcaaactacttaaataccatattcttcctatcttgcctttcatttttatattaccacagatactttcctcatagtcttgccagtgcttgtagaatgcttagaaaaagcttgataaaccactgggctaagtacacagagggagaggctagcagtatttttaaattggtttctaaattttttatagcttgatggtagataacacatttgcttcattgaagtaatctgaaaaaccaatcctcaaaagacctctcaattagaattcttaaatgacaatgttttctttatcatatatttgagagattgatttaaagaaaaataatgcttgactatctgaaataatattttaaccctatcataaaatctctgcctggtagaacagctgactgtggaagggtaaaatgcagagaaccagtcattggatctcccttctctactttgttactgaaatcttgaacctgtagaacattacttatcactgtgttcctttctaatgggaaaataataataaacacttgcagagtattttttaaaagtttttagctttaaaaaaaaaaaccctgtgccttacacaatgtgtatattgagttgatactgattatgataattagatggtattatacaatcattcattcagcaaacattcacttactgagcacctactaatgttccaggtactgattgttaaaaggtgattgagacacagcctctgtcctgagcttagtctagtaggaggtgacagatttgtaaataatagatttgaagttgctgagcaaaaaaaaaaacaaaaaaaaaaacctgtgtacctctcccccacagcaaatgtgtcacatttgcacagtgcccagcctttgcacagtgcccagcactcagctgtgcagatattatttgcactgatcccttactaatatttagtgagagaatgagatcgtgttaaagagtgtatatgtacgtgcccccaaaaggggtcagtgttacacaatagttgacaaataatatcctggtgcctaaggaaaaaaacctaaacttataaataaacttggctatctgaagacagcagagattgatgctgactaacacattgccctttttgagtctacagtttgaagttattttccaaaagaagagaacatggcagttatattgcccccctcgtctcccatgctagcaagtaggaagttcggacagtttcataacatggcccattcacaattccccattgaaaattagaggcaggtcaccttctatgaatacacaaagacactattggtgtcagaagtgagcttggcttagtgaacacaattctttttaatccaaaaaaaattttttttttaagaaagctaaccaagtaggggatggaaaccatgaataaaaaataactttttctaaacatataaataattta

SEQ ID NO: 385713 - DNA, 2058 bp, Homo sapiens
ttccaaaagaagagaacatggcagttatattgcccccctcgtctcccatgctagcaagtaggaagttcggacagtttcataacatggcccattcacaattccccattgaaatttagaggcaggtcaccttctatgaatacacaaagacactattgtggtcagaagtgagctggcttagtgaacacaattctttttatactaaaaaaatttttttcttaagaaagctaacaagtaggtgatggaaacaatgaataaaaaataactttttctagaacatataaataattttaagtgaccattgaaatgtaagtttagaattccaaggcaatttctgcagaggcgatagttacacaatcattctgttgaaagctaagatttagatggcattaggaggctgacacacagtaattactagtagtacttgttggcttgcagacaggtgggggttgggcctgcagaatcccctgcagcattttcctgtaatctggatgagcgatcttcaaacgtgtgctttcaaactacttaaataccatattcttcctatcttgcctttcatttttatattaccacagatactttcctcatagtcttgccagtgcttgtagaatgcttagaaaaagcttgataaaccactgggctaagtacacagagggagaggctagcagtatttttaaattggtttctaaattttttatagcttgatggtagataacacatttgcttcattgaagtaatctgaaaaaccaatcctcaaaagacctctcaattagaattcttaaatgacaatgttttctttatcatatatttgagagattgatttaaagaaaaataatgcttgactatctgaaataatattttaaccctatcataaaatctctgcctggtagaacagctgactgtggaagggtaaaatgcagagaaccagtcattggatctcccttctctactttgttactgaaatcttgaacctgtagaacattacttatcactgtgttcctttctaatgggaaaataataataaacacttgcagagtattttttaaaagtttttagctttaaaaaaaaaaaccctgtgccttacacaatgtgtatattgagttgatactgattatgataattagatggtattatacaatcattcattcagcaaacattcacttactgagcacctactaatgttccaggtactgattgttaaaaggtgattgagacacagcctctgtcctgagcttagtctagtaggaggtgacagatttgtaaataatagatttgaagttgctgagcaaaaaaaaaaacaaaaaaaaaaacctgtgtacctctcccccacagcaaatgtgtcacatttgcacagtgcccagcctttgcacagtgcccagcactcagctgtgcagatattatttgcactgatcccttactaatatttagtgagagaatgagatcgtgttaaagagtgtatatgtacgtgcccccaaaaggggtcagtgttacacaatagttgacaaataatatcctggtgcctaaggaaaaaaacctaaacttataaataaacttggctatctgaagacagcagagattgatgctgactaacacataacgaataataaaaaaggaaagtgaaaagggggctatagggactccagacctgtaacatctgacaaaggggattggcggtcctgaagttgaggaactactaatttaagaaaaatgtacttattttgttatccatgccttgcagctaagcaagatatgagttactgggtgtttcacaaaggaggatgtaaagaatgtacctttaacttgtctttaaaagggagggaggaagctgtcccaggcttttactgaagccagtaatcttgcagaacttgatttttacaggataatggaaattagtatcttcatatattactgtttgttccttgaacaagtagtaactggagaatttgtctccccatggccaaccctgaaatacaaaatccagataaatgctagaccctggggtagtcaggtgccaatactgtagaaactcttgcttagtttcagcattgtgttttagtgagt

SEQ ID NO: 385714 - DNA, 399 bp, Homo sapiens
tgcaatatacagtgctcaccaaatttattagacctgggaaccctttttttatggagcattttgagggaactgacttccatggattaggttagattatttacaaaatcccattcacatttaaagtatactaagtatatagttctcctggtcataaaaatccattttaataccattcatcatctagtcctttctatctggtcagtgcaaccagactttctgtatagttaaaaacacatccttgcctctagtcttcttttcagatgagcaacatatacagactagtgttctcttccttcaaagactcatgtcacttattgggaggctgaggcaggcagatcacaagatcaggagatcgagaccatcctggctaacatggtgaaaccccgtctctactaaaaa

SEQ ID NO: 385715 - DNA, 298 bp, Homo sapiens
ctgtacataaaataacttcagtggaatctctgcttccactgaggttttaattcttggcattttttattttaaagattagcaacttgtttcaagttagaggagatggcagggtcaaaattttagaaactggatcccaccaccactgtgttacttcctaaacctgcatcaaatgttctgccaacatgtaatgtgccaatagaattatacggtgtgaactgcatatctcagtatctccacagggaaaaaactgtggttggggcatggaggggggaaagggaaactcttctttaagttattt

SEQ ID NO: 385716 - DNA, 814 bp, Homo sapiens
agcggaatcaaaataatggcatttgcagcaacctggatggaattggagacgattattctaagtgaagtaactcaggaatggaaaaccaaacattgtatgctctcacacataagtgggagctaagctttgaagatgcaaaggcgtaagaatgacttaatggactttggggactcgagggaaagggtgggaggaggtgagggataaaagactacacactgagtacagtctacactactctggtgatgggtgcacctaaatctcagaaatcaccgctaaagaatttattcatgtaaccaaacaccacctgttccccaaaaacctactggaataaaaaataaaaataaaataaaatgtgagaaatgcaacacacaaaaaaaactaaaaataaaatatatttttatttaaaaaaagaagaagaagtcatagcaaagtcactcctggagcttctgtagggaagaaatttaaacaagaaaatgtatccttcagaagacaggtataaaattaaattatcaaaagtagtacaaccacctcctctcaccctagccactatcatcatctcagatgatcaattgtatctatgataaatcataaaattcaaaagtgctaactataaggcattaactcaagccttggctaaaaagcacaagtagagataatatgaatgtcctgattactcattctttcaaatatacacagcaagcatattctttaggaaggaacatactttagagatgtgtttttaaaagtcctatagttggcttactttagttactttaggaaaaaaaatcaaaaagttaacagagcaaagatatca

SEQ ID NO: 385717 - DNA, 565 bp, Homo sapiens
ctacactggttctcgtgtgttggttctgggtctgccatgtgggaggaagccttagcgcactctctgggggagccagaggtgtgatttttggtgcaacctgtgcgagctgtgtctttaggatgggcggaaaccattctgggtgctcgacttcaccactcccctcattgtaaaaggggctatctcattgtcctagacaaaattcttattgtaatatgctgtcagatgtgtgtgtctttccaagccagtaaacttttccagggatttcttcaagtagacagcattcagtgcaatcttcagcattgcagattccgagaaatgtggctctagatcctgttatccttgagaaacctaactgggttgcattaattccatatctccctgggtctgtggagtagtacatgagctcccgaagctctatctctcaggtctttttcagtccgaggcaggttgtgcagttcttagctttgaagggagtgattttttcgtgtgcttttgcctctttctgatggaacttgtacctgcggggggtctggagaaaaagagtagtagacttttgctttattgc

SEQ ID NO: 385718 - DNA, 617 bp, Homo sapiens
aagagtacgtctgtgtgtgcacgtggaaggggtgtggggagcacctcagagacaaaggtgaaggaagaggggatgaaagcagcacattcagtgggagtggtgagcactctgcacctgagccagaggttatctccccatgcctccagcaggaagataaatgacttgtctcactctggtacatctgaggcatttcaggaacacattctccaaacaatcaaataattctggctacaaatgtcatcgtgatgagaaggatcaatactggttagtttcaccaaccatctatataacactctattattttcaaatgacatttgattctttagagttgtaagtttttacatttacaaagacacacaaggactagccataaaaatatagacccattgtttgtaaaatgttttcacttgtttaaaaaggtactgtgaaaaaatgaagaaccagccagccgcggtggctcacacctgtaatccccgcacttagggaggtcaaggcaggtgggtcacctgaggtcaggagttcaaggccagcctgaccaaaatggagaaaccttgtctctactaaaaatacaaaattagccaggtgtggtggcacatgcatgtaatcccagctactcg

SEQ ID NO: 385719 - DNA, 273 bp, Homo sapiens
gtaggaaggcaggaaggaaggaaagaagaaaggaaggaaggaagggcggggagagaaaaagaaagaaaggagaagagaagagaagaaaagaaaagagaaaaaagacaatctagacagaggcaggaggccgacaagttaagaactgaaacaatattctcaatggtagaggttgccaacctatggtctgggggccagatttgtctgcaaagtgtgtttcatttggcccattcaatatttccgaattttgggaattcgtttcaaacatttaaaagt

SEQ ID NO: 385720 - DNA, 918 bp, Homo sapiens
caagattatgaccaagacttttccatgtcactttgtggtcccaaaagggtcaccagcaattccccaggcaactgtggtgagtttccctaaaacaagactaacctctgagccccaggtgatattcctgccctggtggacatctgttgctcctcttctgagagacgaacaaggcctacctgacaaggatgacagcgggatcctactgggggtcaaggttagaaatgagaagagctgtagcttgcttctcatcttctctgtctcggtcatttctgcagttgccaccgtctcatcctctctacttccccgagcaccctggagatacgtgtacagagaagcactaagcctgctcagctgtggcagtctgaagcctcacttcccacagcaccatgcatgcacctgcctctccagactgtgagctcccagcaggcagggaccccatgggccaggcagcctggcctgtgtcacagctacaaacaccaggccagagagacaaaactgcaagccagtgagcagaccccatgtcagtgggcataagccactcgagcctcccctgcctcggtagccagagcatagcctgaaaaagcacagggctggcaaatggggattcaaaggccagaccatgctcaaaaaacagcccaggcaaagcttgatggctcacatctataatcccagcactctgggaggccgaggcaagagcatggcttgagccaggagtttgagaccggccctggcaacatagcaagaccccatttccacaaaaaacttttaaaaattatctgaatgtggtagtgcctgcctataatctcaactactgggaaggctcaggtgggaggatcacttgagcctgggagttcaaggctgcagtgagccatggtagcaccattgcactctagcttgggcaacagagtaagacaccga

SEQ ID NO: 385721 - DNA, 457 bp, Homo sapiens
aatgttctgaagtttgctcttcattattaaatcattcaaaaaagagttcttcccattttgggggatggtggagtgatgaggaagtgttctaagggaggggtccatttgagcataaccatgtgtgagaaaataacaggcacttccttctttatggatcactgcactggaataggctggaaagtgctgggctggctgggtagatttgcatgatgcccaggtgtctaatgcagaactttccaaagtgtgttttgtggagccccagttcatgagctacttattttgtggacacgtaactttaggagaggctatgaatggcactccccttcgagaatatcccctgggcatgctctggtattagagaaagcctagagaagagactgtattaattctctagaccttagaccttatcagtctccctggagacaacaggtggagcccccttcctgtgggaggacaa

SEQ ID NO: 385722 - DNA, 240 bp, Homo sapiens
caccgcgcccggcccagagggtcttaattagtcatattttctaggaggagggcaacgaaccactgaattgagctaagaaacagtttctcagaaaaatgtggaatggctttcaaaatgttaggccaggttattacatcttttccttgagtagaacaccaaaggttggaaagactaaaataaggcattctgtgtttttttcttttggagtgccatgttaagaaattaactttttacagttat

SEQ ID NO: 385723 - DNA, 542 bp, Homo sapiens
gaatagttgtgtgacctggggcaaatgacatgtttctgtgaggcttagttttcctacctgtaaagagggcgttcacttgtgcctcacaggttgtgaggatgcgggtggtgatgggagaactcgcctggcaccatgtccctctccccaagtacatatttaggaagtgactcattgtgggtcatttttatgtcagggaactccctgaatattaatttgggggaagactggtggagttcaggcctgaggtgctgagaaacagtgtctgtggggacagtgtttgcagggtaagtgtcaacagcaggctgggcagatggatattagatagttttactgacttctcactcgcattcaggtgtacttttttgctaaaatgaaggcagtatgaaaagaagtgccaataactaacagtgggtttttgtggaccagattgctgagagaaggaatttgaaggagctgttgcttatatcttcagaaacacagtgtagctcttgtgccccttgttgaatttgaaaggccgtgttttgtaatcccttggaaaaaac

SEQ ID NO: 385724 - DNA, 417 bp, Homo sapiens
ttctcaagtatagagagatactcctgttcataggaaaattctaaatcttatttcaggtcttgactcagatgaagaactggggctgctctgtcaccacacgtcctatctaggtgattgtctggggctgctcgttggctcctgatatcctgtaaccttttctgtatatttcatgtgtctgcacgtctgcatggttattcacgccctgagggttgggggtgcacagcgggacatgtgtcctggctgttctgtctccagaaccttctccgggtttggggagaacttgagagagaggtccctctcctttgttctgtcagtcgagtcattatccaactattatttcatgcatagccagcagctttggcatttcttgggatgtggaaagaagaaagcaaattggctgtagcaaatccagtgtct

SEQ ID NO: 385725 - DNA, 126 bp, Homo sapiens
tgcttctccctcaccagcaccaaagcccactcagaaacctccgaaggatcattccaccagagagtggattgaggttaacatggcctctctgggttccgcctgatttcccattataggacttgaggg

SEQ ID NO: 385726 - DNA, 298 bp, Homo sapiens
ggaaggttccagcagaggcagggcctgaggatgaacaagagaaacagtgaggctatggggcagtggctcaagcttgtaatcccagcactttgggaggctaaggtgggaagactgcttgagcccaggagtttgagaccagcctgggcaacatagggagacattgtctgtactaaaaattttaaaaaattagctgggcatgatggtgcacgcctatagtcccagctacttaggaggctgaggtgggtggtattgcttgagcccaggagttcaagactgcagtaagctatgattgcaccac

SEQ ID NO: 385727 - DNA, 455 bp, Homo sapiens
agagaaaaggctattagaggggaaatttgtgaaattaaaaagaagatatgtcatttagttaacagaattctaaccatgttaattccttggttttgatcattgtactatcctcatctaagttgataatataaaggactctgggtgaagggtatgcctcagttttttgtactattgcagcttctctttaaacctaaaattatttcaaaatagaaagtaggccgggcacagtgggtcatgacagtaataacagcactttgggaggctgaggcaagaggattgtttgagcccagaagttcgagaccaggctgggcaacagagtgagaactcttctctacaaaaataaaattaaaaataacctggcatggtggcacacacctgtagtccccaacactccagaggctgaggtgggagactgctgagctgtgattgcaccacttgcatttcagagaaaagaa

SEQ ID NO: 385728 - DNA, 227 bp, Homo sapiens
aaaaaactgatagtttcaggcttttaaaaataagtctgaattcatttttataactttccttctttttaacatttttaaaatgaatttttattttattttattttattgttctatttttggagacaaggaatccctctgtcatccaggttgaagtgcagtggtgcgatcttggcttactgcaacctccacctcccagactcaaggattctcccacctcagcctctcga

SEQ ID NO: 385729 - DNA, 367 bp, Homo sapiens
tccaacaatttctaacaatccactttacttattgagaaaatgagtattttcaaagtgagtatctttagggttagagctttgactatcagaaacttcgtagaataagagcccaaatgttcacacgcatgcctataagagattcatgttttcacatcaataaagatcacacacacacaaaaacactaccattctctgaagaagtttcctagaaatgtagcaaacactaaactgtggatgaatttgtcataccaatctcaatttgttttcatgattatttttgtttatatatattcttatctcctgaaatcagacttgagtagatataaattctaaatttactatagaaaaagcaccacaccaaacttct

SEQ ID NO: 385730 - DNA, 1197 bp, Homo sapiens
atgggggtcattgttgcagggtcctttactcttgaggccctggtctcaagaattgagttaaataaagtcagtagtttctatgtgggcatttttagctgtaggccagaactaatgagttgtaacagatttttaaaaagatgtatagaacatttctgacttttgattgactctacatttattttttgcattttgctattttgaagactatgaaagtgatgacgactcttatgaagtgttggatttaactgagtatgcaagaagacaccagtggtggaatcgagtgtttggccacagttcgggacctatggtagaaaaatactcagtagctacccagattgtaatgggtggcgttactggctggtgtgcaggatttctgttccagaaagttggaaaacttgcagcaactgcagtaggtggtggctttcttcttcttcagattgctagtcatagtggctatgtgcagattgactggaagagagttgaaaaagatgtaaataaagcaaaaagacagattaagaaacgagcgaacaaagcagcacctgaaatcaacaatttaattgaagaagcaacagaatttatcaagcagaacattgtgatatccagtggatttgtgggaggctttttgctcggacttgcatcttaaggacatgaatattctcccataacggattcaactatgagaagagaagtggcagcaataaggcagtctctcaaaagtcatactgccagagtctctagggcaaggagaaacaactagctggacaatactcaattcacaacttagcattttgccatctgaagcttggcaaactagtatctgctgtaaaacaacctatatggtatgtgaaccgtagtattcctgagcaaaacgtggctttcatcgctttgtaaaaatttgcatctgtttagaaactagcctataaaatatcaccattggatgtagatatggagagaaaagaaatatgttgggtttattgcttagcgaaatattctctttttatttaaataaaatgttcttcattgtgttttatggtatgtgtccataatttaaaattcatgttatagtttcagtattaaggctgactttttttttttaagatatgtttgcaataagttaaaaaactgtaatacccttttgtggaaagctttagaaatgatataattattaaagatattaaacagactctgctgatgtaa

SEQ ID NO: 385731 - DNA, 1165 bp, Homo sapiens
agcgggacaggactacgcgcctggagtaggagaaggaggaaaaaagagaccatagacttccatcctggcctagagcggcccttaaagtgccagggagaggagggcgggtggggaccactccagaattggccgctggcggtatcatggcgacccggaacccccctccccaagactatgaaagtgatgacgactcttatgaagtgttggatttaactgagtatgcaagaagacaccagtggtggaatcgagtgtttggccacagttcgggacctatggtagaaaaatactcagtagctacccagattgtaatgggtggcgttactggctggtgtgcaggatttctgttccagaaagttggaaaacttgcagcaactgcagtaggtggtggctttcttcttcttcagattgctagtcatagtggctatgtgcagattgactggaagagagttgaaaaagatgtaaataaagcaaaaagacagattaagaaacgagcgaacaaagcagcacctgaaatcaacaatttaattgaagaagcaacagaatttatcaagcagaacattgtgatatccagtggatttgtgggaggctttttgctcggacttgcatcttaaggacatgaatattctcccataacggattcaactatgagaagagaagtggcagcaataaggcagtctctcaaaagtcatactgccagagtctctagggcaaggagaaacaactagctggacaatactcaattcacaacttagcattttgccatctgaagcttggcaaactagtatctgctgtaaaacaacctatatggtatgtgaaccgtagtattcctgagcaaaacgtggctttcatcgctttgtaaaaatttgcatctgtttagaaactagcctataaaatatcaccattggatgtagatatggagagaaaagaaatatgttgggtttattgcttagcgaaatattctctttttatttaaataaaatgttcttcattgtgttttatggtatgtgtccataatttaaaattcatgttatagtttcagtattaaggctgactttttttttttaagatatgtttgcaataagttaaaaaactgtaatacccttttgtggaaagctttagaaatgatataattattaaagatattaaacagactctgctgatgtaa

SEQ ID NO: 385732 - DNA, 380 bp, Homo sapiens
  misc_feature (109)..(109): n is a, c, g, or t
  misc_feature (233)..(233): n is a, c, g, or t
ggactccgttcccaagaataagttttgcttgggcggaaagtatgtggttcatccgaaaaaaaagaaatcaatgatttgtggcagttcttcatgtgcttttgggcatttncatatcttccttggagaaatatcaattaagatccattgccgtatatacatatattaaaattatgggtcatgtattatggctcatacctgtaatcccaatgcttttggatgttgaggcgggaggntcacctgaggttaggagttcgagaccagcctgaccaacgtggtgaaccctgtctctactaaaaatacaaaagttagccaggcatggtggcatgcacctgtagtcccagctacccaggaggctgagacaggaggaattgcttgaaccc

SEQ ID NO: 385733 - DNA, 420 bp, Homo sapiens
atcgtgccactgcactccagcctgggcgacagagtgagaacctgtcaacataaataataaatcaatatctggcagcccttctctgttttactattcattttctgatttttcttctgtagtttaacctattgttctaccaaatgtaatttaaaatcattctgtgaaatccagcaaaaatagctttttattttaattttgattagatttgcattagagctcagtattaaaacatgcacaccttttggtgccagatttcatactcaacatactttgttccttttgtgcgaaggaaattatgtttattatggaaaacagtgaaagatgagaagtaaatggctcatcctccataaatggccatcgctgactgtttcatgtagaactttctggcctgtgcccatatcttctctcttcaggctttgg

SEQ ID NO: 385734 - DNA, 1294 bp, Homo sapiens
attttgatggacagagccattgaaaaccttgtttcttgaagttaagtttgatttgagaaaaggagtatacagatacttatatagccatatgttgccaactccttgccatttattcagtccacagcttgttcttgttctaagcatttattttattttctgaggtcattggtttttctcctaggatcaggtgagttaggaagatcattttttttttccattgaagaatgtagtgttttctaggacacagttcaaacttttgtgaatgtcttaagtcagtttctgatgtttctttcatatgagaacccttcatctatttgatgacagctctcatgtcccgtgatgtcacctctgctttaaataaacattcatgtttctcttacaacatgactttcagggtttgtttgtttgtttgtttgtttgttttcccctaccatcctgctctccctttgaattaggagactcaagggtataattgaatatggtttagtgttacctagcaaaacactggcagtgatcttacaaataatttagttatcagtccctacaccttgttttattatttctcgagcctaagacagtggttattgcatgaagatctgtggcccgttaggttacatggaaaggagtgattcatgaacagactaaaaattcagattatacaaaatatgtcaggttttgtttttgttttactttgtctttaatgtttgttttctactttgtttattatagaaatggatgctcattctagaatgaaaataatggagtttcaaaaatgtagctttttaacccagtagtagctttacaagataggttttgtatgctgatcagcaggagattctggttatctgagtcttcagaacattcgttcaggcattctgtactctgagagactttaagatcatggaaattaagagttttgaaagttctcaagttctcaaaagcatccttgaaaaataactaggaggtgagtcatttaatatttctgaacatctgatttctgatcgtaaaaatcaattaggaaaattaccactttgcatccataatagtaaatattgatttgggaaagaataatcattggatactaaattggaattaatagaaatttgacagagagcaggatatttgcatggtcttaaagcacttccctacagacattttgttaattgcaaggccaaaaaaaaaaaaaaaaaaaatagtaaccatatagtggaaaaactgaatgtcaaaattaatatcactgaggggaggcagacagatatcatgtgctttcaggtatgatactataagaacacaa

SEQ ID NO: 385735 - DNA, 368 bp, Homo sapiens
attgtcaccctctgcattgagctcaaatacccttctagaataaattacacaagtgcttctaaatagcagaggtcagtcactaagcagttttataagaagcttatgtaacccatgtgtgatgggaaaaaaccaaaccaaatcaaacaacaataaacatttaaacttcagagtactagctcagagcgggagtcaaccttaagaaaggacactggggccgggcacggtggctcacgcctgtaatcccaggactttgggaggcagaggcaggcagatcacaaggtcaagagttcgagaccagcctggtcaatacggtgaaaccctgtctctactaaaaatacaaaaagtagtcgggcatggtggcagtcgcc

SEQ ID NO: 385736 - DNA, 621 bp, Homo sapiens
taagtatattgtgtatacttaaaaaaaaaaaatcacattgtaactgagtaattagatagcaagagcagtaccagtagcatggtacgagagtttatttccttgttcttgtaattctccagctggtctttgtagcattgtgatagttgaatcaatagctgaacactaaaggtttaaaactaattttaaaactaattttgaaaacctgtgaagaacattgacttctggtgaaattcttgtttttcttaagtagcattttgacggtaaagtcattctcacagtaagagcatcattttcatgtagtttttaccactagttttccattttattaaaaagtgcctgtaaaagtctacttattgaccaggagtggtggctcatgcctgtaatcccagcactttgggaggctgaggcacgaggattgctcgagaccagcctaggcaatatagcaagacccccatctctacaacaaaacaaaaaaatagctggttgtagtgatgtgcttctgtagttccagttactctggaatctgaaatgggaggatcgcttgagcccaaacagtcaaggttgcagtgagttttgatggttccactgcactccagcctggacaacagatgggattctttc

SEQ ID NO: 385737 - DNA, 1228 bp, Homo sapiens
tggcattagattttcataaaccctattgtgaactatgcatgtgagggatctaggttgtgtgctccttaggagactccaactaatgcctgatgacctgaggcagaacattttcatcccaaaaccatctctctccttgccagtttgtagaaaaattgtcttccatgaaaccaatccctggtgccaaaaaggttaggaccactgagttgaagtactaacatatctttaaaacagaataaagtaggagtctttagtattatttgatgtgatagaatacatagtgaaaaagttgagtatttgatgtgatgagaataacatcttcacctgtatcagggaaatgtgaagataattcctatcaacattcactaaataattagcctcactttaaaaaaacgtagaaaacagaactgcaagattagtatattggaacaaaaagaatgcttcttgagtacttgtaactgtattttgaccaggaagaatatagtggattttaaaatgctgtagactatgggtgaacttaatttcttttaataaaatgagttggtttttcatgttttaacactgatgtacaatgaatgaaatgttgtactgacaccagtgttaaactattccatcttatctaagattgtggttaacagatggaaataatatactatgggttaacagtgaaatgtcttccctaatattcttttgctggaggacttaaactttcaataatttggagaatagttttctcatagtgactatcttaataatgattagataaggcaggtaagattgaaaggccacaacttagcagcaaatgttttacattcatttgagagccagtttgtaagtagttcaccaaaagatgttgggttaaagcagtggtttgaattaattgcatagcattcatataacagaatacaactcagcctaaagctcacaccctatatgaatctcatagacctcgtaagtgaaaaaaggtagacataaaattgtgttttgtatatttatgtattgtattatttcaggcaaaataaacctatggtgaaataaacacattgatagcctctggctgaggaagaaaagataggtgcctgggacaaaacacgagtgaattttcatcccaaaaccatctctctccttgccagtttgtaggaaaaattgtcttccctggaaaccaatccctggtgcccaaaaaggttagggaccacttgagttggaagtacttaacctattcttttaaaaa

SEQ ID NO: 385738 - DNA, 375 bp, Homo sapiens
gacggctcccctctcccctatggcccaggcgaatgcacgtgaacctttgccagacctttccctgtgggtagtgctcagctgcctcaaggcaacattcccagaacagaactgaactcttccccgggtccccgctccaccaacccagtcagttccacagtgtctgtgagtgataacgcaacatcacaccatcctccccaagcaccctgtcagaggcccggaagtcattccatgtgcctcgtccattaaggctgagctgtttaggctgctgtagcagaagggcatagactaggtggcttataaacaacagaaattaacttcccccagttccagaggctgtgaagcccaagatcaaggtgccagcagattcagtgtctg

SEQ ID NO: 385739 - DNA, 288 bp, Homo sapiens
caaattttctcagagataccctactcccttacctcctgcagaatcaccctaaacctttaaagttgattaaacctttaaagtccccaggttaggcccagaggcgctgactgtatcaactcaagacaagcctccagggtaaaaactattgttatgttcattctgtgtaagagaaaactgaagcagagaggctaaggaatttacactaggctacacaggaagtgagtggtagagctgggattcaaacacagcgagagcctccagagcccatcttcttttttttttttctta

SEQ ID NO: 385740 - DNA, 250 bp, Homo sapiens
ttccctggtctgagagtctggctgtgcagcagatgcattttggaggagctgaagctgaaagtgccagtgtggtgctggtgtgcatcactgccctctctgggatatctctgcagcagagcaaggttacagagctacatctgccgcagctttctgtgagttgtgtaaaaagactgtgccaaccagtggggagcttacattttcttatatgggattcctactattttaattaaatattgcttttagcagctct

SEQ ID NO: 385741 - DNA, 353 bp, Homo sapiens
aggttatgtgtgcacctcgagatgaagtgtctttctattattgtagagattctgtagtgaagaggtctgacaccatgtgtggaggaggaggaacgatcagtcaagagatgtcctggtcttaatgcctgtggcttgtgctgggagtgggtctgacttagtgataaaaggactctattcactaagtagcctgtgtttttaaatccagggctgcaggcagcaacgcaagtcaggctgaacattcagtctccagagacagctgtgtggagcaaatcagagttcatgcccaagtccccaggttggaatggctgtgccaaaatccattcaaagggttttctttttcattactaggtcag

SEQ ID NO: 385742 - DNA, 300 bp, Homo sapiens
taccattataccactgttttttcctttcagtatttaccagattaatcttacttagtttgtaggtcaaggaatcgtggatccatgtgtctgcaaataaacctaaagtcaatcaccaataaataaataatgaccatttcaagcaatggactgctttgtaggcactaaccacaattatcttgttacacgagaaaatccagtttcaaaactgcataagcaatatgatctcaattttttttttttttttgagagaaagtctcactctatcactcaggctggagtgcagtggtgtgatctcagctc

SEQ ID NO: 385743 - DNA, 476 bp, Homo sapiens
gagcccacttccacctctcgcaggctagacagcgttccccaagtccccccttgagctgggtgggctgcccagctgtgaacacaaggacacctccgatttcgtcctgtgaatgttgatattagtggtcccttccttcaggggctgtggggatctcaaaagataaggcaggtctggagtcctgcgcggtgacctgccgcatggcaggctctttacggacagcgcagggacgcactttgatgctgaaaatgagtctctgggacagatggatcccagtctgggtcctcgcaagcgctgtgcaccccgtcgccgcgagatggcggtgttgcgcccctccagcctcctctgctctgcgcttgggcgctgaatgttaaaattcctaacaggtgaatcgcttgaatccgggaggcggaggttgcagttggccgagatggcgccactcactccagcctggcgacagagcgagactacgtctcaaa

SEQ ID NO: 385744 - DNA, 872 bp, Homo sapiens
gcagatatttgaattggtacacacttgaagcacagagagattatgaactaaagcaaaatacagtcctatatggattttagctgatgtcgcttgagagttccactgagccacattcaacagtagttacagatttaaagatttatcattttctcattttaagatgaataccattatcacttaaaagtcccttttatttcattcattaaactctattaaaatcatagattgttcagaagcaatttttctttgaaattcttgattttgaaagcattttttatcattgagaagacacaattccctccccagatttgtgtcagtttccctctaactgggactcctagtaactttaaaaattattccatgagcagcacacaaacagtccccacccaggtgcattatttatttttttcctaaagatctacagtaaacataagacaaatgaaaaaaaaatcactatcaaattaagttcaggtgacctagccatttttagcatagagttatattccagaacctcaggttagcaaaactcacataggcagtcgaatctttgcttttcaaatttagacacaaaagaatctccaaagcaatggatgacattttatcatgtgattcccaataattaatttgttatgggcccacataaataaaataaatgctgagtgatacattgacttctgttatcgaaagcatctcccttctcactcctgcctctctggctcctgacattatttcttggttattggttgacagttcagtgccttgagtgttgctctcgctgtagggttagcaggataattgacaaaccacagggattgaatccctggattaggatgaccggactgtcaaaacaaccatgacaaactctcacatca

SEQ ID NO: 385745 - DNA, 376 bp, Homo sapiens
ctccagcccactcagttgggagaacttcaagaggtgaacaaagttttattcctttttggattcccagtgtctcatagaccttctgggacatatggcacattcagtctagctgaatgaggtgatgaatcaatccacttactctctccagtgcctgaaacttctcaaggagcttgtgctctcctttgctcctctcttttcaaccaatctgaaaatgcttttaaaagataatgtctgttttccagtgcagtcttctcacttggcatgtaatttctccatttttatttcctttgtgaatatcaaggtacaatttccatagctaccagtctaacctggaatcttttcatctcagttttggagttccacaacagtgtcctgg

SEQ ID NO: 385746 - DNA, 1300 bp, Homo sapiens
agagtggttgaaagtaatttttaaaagaaaaaggttgctcagctatttttttcctattatatactcagaagatagctaaagaaaatgaatttaaattattagactgacataaagaacatctggtaaattctaaaatggtccactaaagaagattacatcctttcttttttggtgtcagcttagtttagatactttaaaattatcttggagatggtaaattagtcaggaatggtattatagaatgtttgaaatagaaggaaccactgtcccaattcttgaggtttgttcagagtgatgtttggatttagagcccaagtctccagattcccagtcagtaatgataatgttacctgttctggttccaaaattgtatcatcattctagtcatttttcattttaatgagttgttggacctactgatctgtttatggttacaaggggtagatgggagcatggaatactctctcagaagaaatgtgtaagtgcgaagtgagcggtgtagatcatgagtgcctggcaccctagaaatccttaagtgaattaaagaatacatacatatatatatatctttcattttttagggattttttttttcagacaaggtttcactctctcacccagcaggaacacagtggcacagtcactactctctgcagcctcgaactgctaggctcaagagatcattctgcctcacctctgcgccagtagctaggactacaggtgtgtccctccaagcccgctaatgggtttttttgagacagaatctcagtcattcaggctggaatgcaatagcacaatctcggctcattgcagcctctgcctcccaggctcaagtgatcctcctgcctcagtcccccaagtagctgggactacaggcgtgtgccaccatgcccggctaatttttgtattttttgtaaagacgagatttcaccatgttgcccagaatggccttgaactcctgggctccagcagttcgcccacctcagcctcacaaagtactgggattacaagcatgagccaccatgcctggccccacaaagtgttttgtagagacagggtcttgttttgtctcctaggttggtcttgaactcttcaccttaagcgatcctcccacctcagcctcacaaagtgctgggattacaggtataagccactggcacgggacatagaatttaagggggaaagtcagttattttgttttccctgttctttcattcccagaggtagctcttaactgttcttttgtgttggttcttttgaaaagaaaaaaaaaaaaaattcgagatagggtcttgtctcc

SEQ ID NO: 385747 - DNA, 430 bp, Homo sapiens
gatgaccccgatttgcatttcttgtcaccgtccatccgaccttgttaagacgagatttcaccatgttgcccagaatggccttgaactcctgggctccagcagttcgcccacctcagcctcacaaagtactgggattacaagcatgagccaccatgcctggccccacaaagtgttttgtagagacagggtcttgttttgtctcctaggttggtcttgaactcttcaccttaagcgatcctcccacctcagcctcacaaagtgctgggattacaggtataagccactggcacgggacatagaatttaagggggaaagtcagttattttgttttccctgttctttcattcccagaggtagctcttaactgttcttttgtgttggttcttttgaaaagaaaaaaaaaaaaaattcgagatagggtcttgtctcc

SEQ ID NO: 385748 - DNA, 929 bp, Homo sapiens
ccattccgagtggaccagtggtcctcctttctggaagctcttgctacaaagaaaagatgaggatattctatttcttgatccctctcagctactgggagctgctttgtgccttggaagcctcaagctgaaatggatgtcagcctcaagtttaactccaagagggttcaccttgtttctttgaacaaaatgtgctgcctgttgcttccctttgccaggagtggtgttcccttttccacaggtctggaccacagtgtctctagctcccgctcctggatacttggttactgtgtgtttcggtaaaaaagcatccacaacatgaatatccactaagctataacagggcctgctgcaactatagtatttcctgaaaaagtatcaactgccacaagggccacaaataaagtctgtgaacttgaaataaccatggagaatgaaatgttctgattcagatcatcggtgggatttcactgggaaatctcccactgggcaagagtagatgatggaggaggagaaacagtcactagaaaaaggtgatactttgtatcaagaaacaattaaaaattagatcacatcctgaaacattaagcatatgctcctttgtgaggcttgcctggctgaacttgaactggattgagtgaataatttcttaaaaacaatcaaaatcacagatttattctattttaaatacttatatttacttatatttcattcagaaattagttaacaaataatttttgagtatcctgggaactgttctaatcattaaacatgcaagtttgaagaaagtaaggatgaatctgcctgcgtggggctctcaatctagcgagaagcagataagaagacaaatgtcagggaagatcacacaaccttcaggtaatatttaagctgagacctcactagttgctaagactggatttcagaggtcaggt

SEQ ID NO: 385749 - DNA, 577 bp, Homo sapiens
ccattccgagtggaccagtggtcctcctttctggaagctcttgctacaaagaaaagatgaggatattctatttcttgatccctctcagctactgggagctgctttgtgccttggaagcctcaagctgaaatggatgtcagcctcaagtttaactccaagagggttcaccttgtttctttgaacaaaatgtgctgcctgttgcttccctttgccaggagtggtgttcccttttccacaggtctggaccacagtgtctctagctcccgctcctggatacttggttactgtgtgtttcggtaaaaaagcatccacaacatgaatatccactaagctataacagggcctgctgcaactatagtatttcctgaaaaagtatcaactgccacaagggccacaaataaagtctgtgaacttgaaataaccatggagaatgaaatgttctgattcagatcatcggtgggatttcactgggaaatctcccactgggcaagagtagatgatggaggaggagaaacagtcactagaaaaaggtgatactttgtatcaagaaacaattaaaaattagatcacatcctga

SEQ ID NO: 385750 - DNA, 464 bp, Homo sapiens
atacttagccacatttcaggtgcttagcagtgtcatgtagtggtcagctgctgtattaggaagttatagactatttccaccatcacagtttggggagttagtttgtagtttgcctctaaaatggtttatgacactggttcccatagggagtgattttgctccccatggagacattagagcaatgtcaggagacagttttggtcatcacagcttgaggagggggtggtgcaggctctggggagtggaaagtaggggatgctgggtaaatatgctgtgatgtacaggacagcccccaccacaaagattgattggggtccaaaatgtccgtgccacagctaaaacctgttttaaggacaaaggaagatctctacgtctgcatactcaccaggtgtaacctgttagggactcttcgttgcattagatcatgtgcacaggtaagtgaggtgttctgctggtcgaatact

SEQ ID NO: 385751 - DNA, 470 bp, Homo sapiens
ccagttttcacagatcgtctctcttcacagtgaaacaggaagcgaggtcagggctgagagctcaggatttgaggaatgcacaggatgcctggagctgcactcaaggaccaggcaagtggcacttggagaaaggaactaagccagcctccgcctcctcttctccagcccagttctccccagagcctctcccttgtcctcaaaccaactcttctcctcctcctcattgcctttctggcttgtaaagtgtttgaggctgggcacagtggctcacgcttgtaatcccagcactttgggaggccgaggcgggaggactgcttcagcctaggagtttcagaccagcctggggagtagtgagaccctatgtctacaaaacatcagaaaattagggtgtggtggctcatgcctatagtcatagctacataggaggctgaggcaggaggatcgcttgagggcaggaggatcactcgagc

SEQ ID NO: 385752 - DNA, 402 bp, Homo sapiens
atgagctaacaagcaaccaaaattaaaaatgacactatcacttttcactgataaacttccttccagaagtattgggaacgtcacaatacctggtgtttgtctggaattccgattaggtgccgcctgcatgttcctttagccccctgagccttcccacagatcacagcttcccttagagtcagtccgtgcagaaagagctgtgtcttagtgttcatggttgtattggtaatgccacatctagcagcatagtggtttcttagtaaatatttgttggatgaatatagtgctttatagtttcaataatgctttcatattcagtttgaatggttgacagctccatgaagttggctaatagtatcatcctagttttatagatgatggaacagaggttaaagaggctgt

SEQ ID NO: 385753 - DNA, 614 bp, Homo sapiens
gggaagatggggccggtagaggcagatagagggggatgtaatacacaggcactgagacagcaccccactgactttcccctgtccctcctccagctggcctcctcctttccaggggctgtacccaatccagaatcagttactcactggtgcccatcgaccatcatttccccatgtggccaccaaagaaatgaacaccacctttctggttggcatgatcatcaatttctcagccaaaacggcatgcatccttggctctgggaaacagtacatctcccaggaaagtgagcttacagcacggtaccccacttcctggttaccagactattgttcccgttttccccaagaacagtcatcattcacaggttgtttggcagggcccaggaacagagtcactctggttgctacagccaacagaccaaacacggcttccaggcaggaaggtcagagctgctctgcaggatgcacatgcaggttggaagcagacagggctggccgagcacagatatgctggctgtgtcctacacacaggtgcctacacacacatccttcagatccgggctgcactctatcagccaacccacggactctgttttttctaatttgcacagattctt

SEQ ID NO: 385754 - DNA, 624 bp, Homo sapiens
tctgtggttccaggctactatgggcccaggttttttgttgttgttgttgttgttgttgttgttgtttgtagtagaactacaaatattaaagtggaatttttttaaacaaggataattggtaaagttcagtattgataataatacatgactcccatgggcaccaaggttgtctgtaatcttcatagagaataagagctgaggctgggtgcagtggctcatgcctgtaatcccagcactttgagaggccaaggtgtgtggatcacttgagatcaggagttcgagaccagcctggctaacatggtgaaaccccatctctactgaaaatataaaaaaattatctgggtttggtggtgcgtgcctgtaattccagctactcgggaggctgagacagaagaatagcttgaatccaggaggtggaggttgcagcgagccaagattgcaccactgcattccagcctgggtgacacagcaagactcagtctcccttccccccacccccggcaaaaaaaaagaaaagaaaagctgattcagctttcaatttttagctactctaatatagaagaatattagtatagttaatctaaaaatagacttgtttttaaagatattttaagttttattaaa

SEQ ID NO: 385755 - DNA, 514 bp, Homo sapiens
ggcgctcaagtccatcaggagggaaccagcccatccacgtggaggtgttgaagagtcaggagcccgcgcacaggaggctgcctgggtttgaatcctggcaagttttaaactcactaagcctcagttattccatctgcaacagaacctgcctccctgggattgctgggaagattcagggagaaaacttgggtcaagccattggctcccaaataagcaaatcctccacaggggaagtccccaggctcgggctggagcccagggaggtgcggaccccaggggaggtcagaggcaaccctcacacaggactgttccacgttctgtttctgtaactcgggggccttcgcgcccgtctgcctgtgcacctgcgaactaattctgagcaactgtgcgctccctggcactttctgaagtcaaaatctgaacatttccaagtttaaatagttgcaaagagtatgatttccaaaatcatgtcaatattgccatcctaaaataaaagtgtgacatcattccttct

SEQ ID NO: 385756 - DNA, 957 bp, Homo sapiens
tatatatataatttcttttttttttaatggaagaaaaatacagcctgggcacagtggcttactcctgtaatcccaacactttgggaggccaaggcgggaagatcacttgaagcccagaagtttgagaccaccctggacaagatgatgagacccccatcactgcaaaaaaattttaaaaattagccaggcatggtagcatgcacctgtcatcccaggtactcaggaggctgaggtaggaaggtcacttaagccaaggaggttgaggctacagtgagccatggttgcacgactgtactccagcctgggtgacagagtgagaccctatctctttaaaaaaaaacaaaaacaaaaaaaaagtgtacatgtgcagtccagacattttttttcccaatatttttgatccacagttggttcaatccatggatgtggaacccacggatatgtagggccaactgtatatctgtgttcttttataaatatgttgggaaagatcttgtacagcattgtctggtgtcagccacatttaaattttttagtagccacattttaaaaaagaaagaaaaaaccagtggcattaacttcagtaatatttttatttaacccattatatctaaaatatttcacgtatttttatattcaaaatacaaacattactcaagaaaaaatgtcttaaatattggactctcttctaccttctaagctttataagcctcacagttattagcacgatgctttgctctgctcacataggcatcctcagtcacttcagtcaaagaaaccctaaaaaacaatggtttgttccttttactctggtaggcctgataagtcatgctaggtagcatagcattcattgtctagcttggaaagcattgcttcctatgacatggcattgtgactacacatctgttcatagaaatataaataatcactaagagcttgcatctagggtctgatacc

SEQ ID NO: 385757 - DNA, 900 bp, Homo sapiens
  misc_feature (28)..(28): n is a, c, g, or t
ctcggattcaactaacaaaactttctgncggtgttttctgaaccaccacttcaggataccattgttttttgtccttgtactactgtatgcttgtcatagtcagaaatatgtaatatttactgattaactaaattttaaaacttatctactctaaaggatgacatcaaggtgatacattttcattttaaggtttcatttatgttttgaataaaggcctattctctttgctaaaaccatttccagcctgggtgacagagtgagaccctatctctttaaaaaaaaacaaaaacaaaaaaaaagtgtacatgtgcagtccagacattttttttcccaatatttttgatccacagttggttcaatccatggatgtggaacccacggatatgtagggccaactgtatatctgtgttcttttataaatatgttgggaaagatcttgtacagcattgtctggtgtcagccacatttaaattttttagtagccacattttaaaaaagaaagaaaaaaccagtggcattaacttcagtaatatttttatttaacccattatatctaaaatatttcacgtatttttatattcaaaatacaaacattactcaagaaaaaatgtcttaaatattggactctcttctaccttctaagctttataagcctcacagttattagcacgatgctttgctctgctcacataggcatcctcagtcacttcagtcaaagaaaccctaaaaaacaatggtttgttccttttactctggtaggcctgataagtcatgctaggtagcatagcattcattgtctagcttggaaagcattgcttcctatgacatggcattgtgactacacatctgttcatagaaatataaataatcactaagagcttgcatctagggtctgatacc

SEQ ID NO: 385758 - DNA, 208 bp, Homo sapiens
tcaccagcatgagggtcttcagaataaagtaatctgctacttccagctcaggtagacaaacatcctacagaaatctgttctttgaccttggacaagtcacttaaatgtctctgagcctcacatcttttgtctgtaacatagagggaaacaatctgtcccttgtgtggttattgtgagaagagaatgagctacaaatataaaggtctga

SEQ ID NO: 385759 - DNA, 550 bp, Homo sapiens
gccaaaacgtgatgatgggcagctagcttggaaagaatgcttacaacgtgaaaattatatatttacaaaaggccattacttctgttaaagaacaatagaccccagtgaaaagaaaggaaattgaaaaatagagaaaatgtggagaaaactagaatctctatagacagcatcaatgcagcatcaattatgtgaaccacttttgagcacaaagaaatattgttttgaccttggaggcaatttggtcttcattaggtttagctgtaggatagttgatgttcattattccctataatgcttgtgatggcaaaaccttcacaaatttatatgatctaggtatgttttcaatccttacaacccaagtaaccgatcataactctcactatgtcatttgaaaaaaaaaaatgatcatcagaagtgtaattcaattagcaagtatcagtagtggagtataaattattggttaatactaagcatgatggaaaaatcatagtagatggaaatatgggaatctttattttggatgaataaactttatgcctaaaacatatgt

SEQ ID NO: 385760 - DNA, 1020 bp, Homo sapiens
gcttttccgtgctacctgcagaggggtccatacggcgttgttctggattcccgtcgtaacttaaagggaaactttcacaatgtccggagcccttgatgtcctgcaaatgaaggaggaggatgtccttaagttccttgcagcaggaacccacttaggtggcaccaatcttgacttccagatggaacagtacatctataaaaggaaaagtgatggcatctatatcataaatctcaagaggacctgggagaagcttctgctggcagctcgtgcaattgttgccattgaaaaccctgctgatgtcagtgttatatcctccaggaatactggccagagggctgtgctgaagtttgctgctgccactggagccactccaattgctggccgcttcactcctggaaccttcactaaccagatccaggcagccttccgggagccacggcttcttgtggttactgaccccagggctgaccaccagcctctcacggaggcatcttatgttaacctacctaccattgcgctgtgtaacacagattctcctctgcgctatgtggacattgccatcccatgcaacaacaagggagctcactcagtgggtttgatgtggtggatgctggctcgggaagttctgcgcatgcgtggcaccatttcccgtgaacacccatgggaggtcatgcctgatctgtacttctacagagatcctgaagagattgaacaaagaagagcaggctgctgctgagaaggcagtgaccaaggaggaatttcagggtgaattggactgctcccgctcctgagttcactgctactcagcctgaggttgcagactggtctggaaggtgtacaggtgccctctggtgccttattcagcaattccctactgaagactggagcgctcaagctgccacggaagactgggtctgcagttccacttggttcaggccactgaatggggtaggagcaaccactgaatggtcttaagctggactggatgggctcttaagcaacatggaaaaatggttgatg

SEQ ID NO: 385761 - DNA, 1172 bp, Homo sapiens
atatatatatatagatgtataggcttgtgagaaacttgagaggaagaagcatgctcttctaggaatgtgaggaaatatgaccttgccaagactaaaagacctctagactgtgagctcagttatggagaacaaaaacagcttcatagtgagtagaacaccgaggataaacactggggccatgggtcctttctgaggcagcgccacagaagatctttgtggtccttccgtagttctgtaagtctgtctcctaagtatgggtagagaatatgtagcctgttgtgtgtctcccactacttgtaaacagagcatcacattaggggcagggaggaggtggaatgatattggaggtgcttaaccctactcgaggaattaattatgaataaagagcttataattagctaacatgactagaaaacacatgacttaggtggagagttagctttcttttctagtttgtgtatgacttgccatttgtgacgtatacaccaaaagatctggtgttttagacttctgccattcacttggcatttaaatctctctttgcttatgctgttaacgagtatgccataggataggacaaattcagtaaacaggaaaacttgtccatatttgcatagacatttgtagggttttttttttctttttctttttagaacttcaccattggcttaagaatgtagttcccaaaacaattttttcttgcaaagtactttccttacacctcttggctacagggtgggccaaattaaacatatatgtattttcatttaatgtatgtgcagtttggtttatcatcttaagatggtggtgctgccccggtgctacttcatctgtgtacacaaagaccaatgcatggtctgtattgctaccaaaacatttactgtatatatgtttataacatgtattatgtatatatgtaatgggtgccaggccaggtatatattttttatttagaagtgtttcacttttccaagttttctttatagtgttatgcttattttcaattttttttttcctgattctgtctggtacttagaattgtagtgtcttcatcatcaattaaagaaaactgtctaaatgaattcatggatgtaaatattagtggtccttaatgtctttgattgctggacatgaaacaaactgccaattaaattttgcggagacatttgatt

SEQ ID NO: 385762 - DNA, 376 bp, Homo sapiens
taaatttaccagtttatttgagcaaagaatgactcaggaatcatgcatcactgagaaccaaaagttcagagtgctgcacagtgtgagcaatggacttttataggcccaacacagaagcagaggagaggaatcacctgattggttgggcatggtggctgatgcctgtaatcccagcaactcgatagacttactagggaggattgcttgagcccaggagtttgaggctgcagtgagctgtgatcacaccactgcactccagcctgggcaacaaagcaaccctcctgcccccaccctgaccccatctgctgtacttgtcagtaagcttgctttgggtttatgagatccaataaatatggattcatatcaaactgtttgt

SEQ ID NO: 385763 - DNA, 293 bp, Homo sapiens
tgaagtcatataaaagtttattcacttcttataaatatgttattatctttgattagtgatattttattaaaggtacttctcatttttattcatatttaaacataaatgtgttgatgaagatagtgatggtaatgttaaatcattggcttcttgagaattgtcgtagtcctggtatgtgagagaaaaaaagacaataaatgataagtgactcattaggataaaggatagaaaagagagcaagaaatatttgaaaaatatgtatttcatttactgttaaatatccagttcaatta

SEQ ID NO: 385764 - DNA, 591 bp, Homo sapiens
  misc_feature (584)..(584): n is a, c, g, or t
ccatggaaagagagagagatccagacagccccatcttcccaactgagccctgcctccaggtgacccgccaaaccgaatgctgtcccatgaatgagtccaggcaaaatcgacagaacaatgcagccaacccacagaatcacaagaacaattatttttgtcttaaaccaccatgattggggtagtttgttatgctgtgatagacacctgacacactaaggaagaataaatatgtccactgtagtcattcccaggcccaagagtgaacctgaggtcttgtacaccacctcacacagtaatggagaatgtgttggtgaacgaagctatccctgacatgcaaacctgagatcaagctctagattcattcaaactcatggtagttagctcattcagatccttaatgatccttacttaatgcaacataatccttatgtcaaggccattggaaatggctggcttcttcgaggagttcatcatgctgatggcgaggcgaacctgggcctcccacgagaagacgcacgagggtgacgagggccctgaccaccaccataagccaggcctcgccgagggcacccactaagaccacngtggcca

SEQ ID NO: 385765 - DNA, 154 bp, Homo sapiens
gcctccatgacactgaggctgaatgctacttgtcctgttttccttgattttcttggtctgcaacccattgttggtccaccacccaagctgatcctgctgtcaaaacatgttctactctttggcaggcactgaattggcttttctttaatgtccc

SEQ ID NO: 385766 - DNA, 298 bp, Homo sapiens
aaagagatttaacaccaggctatctttagcagaaaagtgaccaaagttcacaggattttggcataaggaattctggttgctataaatatttaagaaaaacaaaaacaaactcaagccagaatagcacccaaatactactttgagctgtactttagtgcactgaaacaatgatcaaaatgaattatttcactggttttcttggtaaagaaaaattggctaaaaatctatgtgtgatatagttttagttagaaaccagatttctaaaaatgagcacagaaacttataaaacagacctatg

SEQ ID NO: 385767 - DNA, 377 bp, Homo sapiens
aaacatgttacagattcagaatatccaaactgtatggtctcgtggggatggatgggacctaccagttgaaaataagaagtgggtgaaatagatgttagctacctggggagcacagctggttcgtctctcacagcaggaaattactgagctctttgttaatatgaaattagttccctgttaggtattttggaacctaccttagggtcaaatgaccaaaattaggcttgtaaaatacaaaataggtgtttaatgcatctttgaataaatgaactcccccatatattttaaaaaatttctcaacatcccccacctcctgatctgattctactttttcttttccttacattatctaggctgagccttgtttttgttggcat

SEQ ID NO: 385768 - DNA, 314 bp, Homo sapiens
aagtgtccatcaacagatgaatgggtaaagaaactgtggtatatatacacaatggagtactactcagccataaaaaagaatgagatctagtcatttgcaacagcatggatggaactggagataattatgttaagtgaaataagccaggcacagaaagacagacatcacatattctcgtttatttgtgggatctaaaaatcaaaacagttgaactcatcttctacatctactcatctttctacagagagtagaaagatggttaccagaggcctggaatggtagtcgggagattgaggggaggattaatgggtacc

SEQ ID NO: 385769 - DNA, 487 bp, Homo sapiens
tactcatcaattagagagttaattttctcccaaacactagtattattatatacctcctttctagcagataggcacgtgttaaactagcaatcattagtttagaaaccattaaacatcagaagtgcacattacttaaattgggaatgtttgaaattaccttttaaatctataagcaatttggttgttgcatatttctaagccttgttattgatatcaatagccaactaaaggagggaggacatacattagtgagtgttgataggactagaataaatttttgtgagcctgctttaaaaattttgttttaaggttaatatgaccctcagacatattaaacaggtaaaatttatataaacttaatagtagccataaaatagactcctgcaaacttctgggtttttgcagatctttataataggttctgaaaaagctgtttttgggggaagttttcatgcattctagacaagaccagtaatgtcagaaagca

SEQ ID NO: 385770 - DNA, 314 bp, Homo sapiens
agactgttgcctcattttggggacattatggagtcaccgctcgttctccataagagcataaatgattaccaggtagttgttactgtcttctctccttgatactcatacataactcatagcacatatggaagcaaccttctaaatacccatgttttatctttaaaatgttctttgtgtgtagctgcccatttgttttgtgctaactgactgaccctattaccttcagttgtaacaacccatttaaggtagaaacgaaggacactcatctccatgtgttttcagaatttaaatgaaaaaataaaaagaggctgatg

SEQ ID NO: 385771 - DNA, 292 bp, Homo sapiens
gactattacctatttttaaaagtcgatatatttagcactgattcatattgtacattttgttcatttgatttgattttttggtttgtttttaagattttaataaatgatttgacccaaaaaaaaaaaacaaattaaaccctcaactgattaatatatgtttaagagatgattaacaaactcagagagaaacttgaatttgggatataactggctccatataatatatattagcatatattagcatctttgacatttagtctaatgaataattctctaggagaattattcattc

SEQ ID NO: 385772 - DNA, 420 bp, Homo sapiens
tcatctccagcgtaggatctggcatctgccttcctaggtttgcatcctggctctgccatcttgtagagtaggaagctgtggagccttgagcaagcatcttaacccctaagaggccctgtcagttgggggtagcaatgctgcctccctcatcatgttcatgtgaagatcgcaagagatactatgggtgaatcccagcacagtgccctagaaagctctcaccaagcatgagttgctaatattattcttattactgctcagaagggaaagggatgttttgaccaacagtgaataaattgagatgatgtagaagcaactacagccaagatggggaagtggctgcttcatctagagggtgataaggataaaagaaaatgtgggccaggcccggtggctcacccctgtgatcccagcacttccgga

SEQ ID NO: 385773 - DNA, 313 bp, Homo sapiens
tagttcaagagcacaacatactttattaaattctgtaagactaggatcagtgctgtaaattacattgaaatactgaggaagttacaatttttagaaataataaattctgacccctaagtaatctttgaaacaagctgttgcaaatttccaagcattcttcagtactttaaagtaataaaaacacaggaggatagatgcattagcactctaaagaatcatcagacattatgtagctgaaatttcctatgttacagaaatggacatattctcatttattttatgttctcttaaaatttatgtttctaaaactagt

SEQ ID NO: 385774 - DNA, 154 bp, Homo sapiens
agttgcagtctttttataacctaatattataagtgacatctcatcacttctgccatattctactagtttgaggtgagtcatttagtgcagcccacactcaaggggggagaatgacaaaagagtatggtgtccttcattgatagccacgccagag

SEQ ID NO: 385775 - DNA, 361 bp, Homo sapiens
gcaaaactgtctcaaaaaaaaagaaaaaaagaaaattcaaaattatttttaaataagtacattggtatttaatgtattttttgtttctatttatcattatagggaaatggtaggtgaattgtattgttactcttattagaaaaaatttcaaagaaagaatctgaaatgaaatgaattgtaaattgcactgaatatttgaaataacctttactatgtgtttctatgtgttttctagaaataggtcattttctttttgccctcaagtaaaaaatggaagttctcctttaatttcttacttttcttcaagaggtaaacaaactcttcaagaatttggtgtgcaactttgatttttttttttttt

SEQ ID NO: 385776 - DNA, 174 bp, Homo sapiens
atggagccccaggacatggagggtgcaggaagagcaggtcttggtgaccgatctgttttggagcaggtgggagaggttgaagataaggaccaagttcctggtttgaagaactgggcagaagccacacaccctggctcatagccataatcccatcaactccagagattgaggtgg

SEQ ID NO: 385777 - DNA, 377 bp, Homo sapiens
ctgccttctgggtacccataaccaagctgctccccaccacagcctctgccttcctatttcgtcaagagcacaagctttgcagtccagttcaaagcccagctccaacgtttcctaatcatgagaacttggacaagtcatgtgactatcctgaagctcagtttcccatctgtgaatggggaaaagatcacctactttacacgatccatgagaggattaaaacaggcaccaccactatttagaggctgaaaaaatgggtagctaccaagagctacaaaaagtctatcctgcagagctggggcaattgtcgagcacggtgtgtttgggaagacagcacctacacacatcaaatgatttccacctaaaacagcttcctgcag

SEQ ID NO: 385778 - DNA, 329 bp, Homo sapiens
tttgcgaagaaaaattttagtttataaacagtatactgtatctggtcacatggaatgagaacatattcttcctttaaaggttcttttttctagattagagaaaagagcttttgaattcctttggagaaatgatggtatggtcagttatgtttaatattttgtgcctggagaaatacaattgatttggttactttatttaagtgtctttctgaggaaaatgcactgattccttaataaaatttgtgttagattttagtgtaaaaacaaaactcgtgaaataattttatatatgaacaaagtgctagtgattatggtgtcatagatttgcc

SEQ ID NO: 385779 - DNA, 124 bp, Homo sapiens
agcgttatagtcgtgagttctgatctatccagtgcgtaactgtgaacttgagaagtgtttctgccaaatcgaaagtttattttattttattgttattttaatttatttatttgcagtggggagc

SEQ ID NO: 385780 - DNA, 348 bp, Homo sapiens
aatagtttaatctcaattttacttaattagtaaagattttccataggataacagacatgtatgcagttaaaagccagaacctatataaactgttagtgcacctgatgcaattatgagttaaattatactgtggatcctgtagaaaaaatatggtttcatttctatgaaatgaaattgttttacttagcatttcttaaggcttacaaagagaaagctttttcagctttcggttcaatagttgctatcacactaatgaagttttggtatctatcttatgttgaattcattgtgatttagatacagatttagacagtgttttgtcatttatttggacttcagagatagagt

SEQ ID NO: 385781 - DNA, 292 bp, Homo sapiens
tcctgctggatgctgttagcagataacagtctcagtgcacctgctaataatgtttacctctcctgggagctgatctgacacaattttaggaagctagcagtctcacaaaacaggagtctagaaattgagacagttcagtgagattttcttatcaggaaactactcctggaacaaggcaagatataagaaaagaagagattgtttaaagaacaggaagttaacaaaaaatccaggaagcagttggaccatcgtaagagtgctcagaacttcaagggggtggaaaggcccctat

SEQ ID NO: 385782 - DNA, 923 bp, Homo sapiens
acacaggagccagatcctaaaggctttgtatgccacattaggaaagaatttggaatacagcttctgtttggaaaacattttctgtaaccagcccgacacagagacggggttttgcatgttggccaggcttgtctcgaactcccgacctcaagtgatcagcccgccttggcctcccaaagtgctgggattacaggtgtgaggcaccgctcctggccaagaccaatatttcttgacgctgacttcaggagctagcacagaactggttggagcccagctaaactaaaaagcacagccaagggcagcaaagccttctatgtttacagagccaaaaggatgccgaaggccctggaagttgaaaatcaagactggctgctgtaaagcagaccatctcagacgtattctcattcctgacaaatacccacccaccagcaggactgggagacacatggcaaccagagcaagttgtcaaaacttatcattataaaacgtccatcttacaaaagtacaacctttgctcagtgcagtgttttccttagaagacagctcttctgagagctataaaaaggtggttagaatgggtgaggttagctctcgtagtctaagctaacaatcatgttaaaaatgtaaaggtgaataatgatggcagaatgttttacaaacaaacaacaacaacaacaaagaaattcattaattatgttcctctacttcaaagaaattcataatttttagcactgctcttttgagaaaagaaaattgcctgtaagatctctggcccttctcctttaatttcctttcttactccataccctcaggtggctagcctagtgctacatggcctaggctacacataaagttcacagctctttgcctgatctcctgatcctctatcaaaacagcactttcaaaagtgtttcctgtctagc

SEQ ID NO: 385783 - DNA, 691 bp, Homo sapiens
ctgaaactgaagatcggcacctccctaaacaggatgctctccttttctccaacagcacagccaagggcagcaaagccttctatgtttacagagccaaaaggatgccgaaggccctggaagttgaaaatcaagactggctgctgtaaagcagaccatctcagacgtattctcattcctgacaaatacccacccaccagcaggactgggagacacatggcaaccagagcaagttgtcaaaacttatcattataaaacgtccatcttacaaaagtacaacctttgctcagtgcagtgttttccttagaagacagctcttctgagagctataaaaaggtggttagaatgggtgaggttagctctcgtagtctaagctaacaatcatgttaaaaatgtaaaggtgaataatgatggcagaatgttttacaaacaaacaacaacaacaacaaagaaattcattaattatgttcctctacttcaaagaaattcataatttttagcactgctcttttgagaaaagaaaattgcctgtaagatctctggcccttctcctttaatttcctttcttactccataccctcaggtggctagcctagtgctacatggcctaggctacacataaagttcacagctctttgcctgatctcctgatcctctatcaaaacagcactttcaaaagtgtttcctgtctagc

SEQ ID NO: 385784 - DNA, 112 bp, Homo sapiens
aggttggatgcatttacatttttggttattgtgtgttaagtgaagatttggcaactgctggtatttatgccagtgggttggcaaactaggatattttacccaacgctgtgga

SEQ ID NO: 385785 - DNA, 236 bp, Homo sapiens
tgggcaaatgagtgataccctgtctcaaaaagacccccccaaaacacaaaaaaacaaaaaccacatatctggttattgttaccaagtgaatcacagctaaaagggtggtgatgtgaagactcgagaacatgatgctataatactacaattcaggccacgtctccatttattaaagtatatttcactggaataattttgaacagtgagctttcaagcataacgattctacaactgtt

SEQ ID NO: 385786 - DNA, 739 bp, Homo sapiens
aggcgctgagagtatgtgcaaaggtccgtggacggaccgcattgcttgttgttgcgcttcggaggcggagatccccgaaggcgagctgaaatacggctggagagttcccaggatacaatttgcagcagacgagtatggaagactaccagccggagtggtggcccaccctcagggagcgcttgtgctccgacggcttctcatttccccaataccacattaaatcatctcatctgaggaggatccacagagctgtcttctgtggtaatctggagaaactgaactaccttctgttcacgttatcatgacgctgcctgagtagttgtcgaccttgttttcacattaactggctgttttgttgtggctgcacttctgtttcattaccttcatcagaatcatagcttggaggcttcatagctccctgattcaattctgtcccatatttcaacttgtggtatttggctcttttctgtttaagagcatactccaacattctgatcatcctcacgagatccttcttcaaattttcttggcccttcctttctccctgtaggaaggcaatctgggccgtaattgttgatgaggtcttggagcctcccttctgctcccagaagcttttgttgctcatgtctccagccacaatatccttgcaggacagagtcttggctgcagactgagcctgtacctcacccgtctcccaccgactcttggtactggccacggccatgctgggcagctctat

SEQ ID NO: 385787 - DNA, 377 bp, Homo sapiens
agcctgggcgacagagtgagactccatctcaaataaataaataaataaataaaataccacaactttccaagtttctgagagacaagagacaaagggagggaggaagagaggaaagggggaaaaagagagagagagatcagttgataggagcagcagcaaccaggccatgctggcaactggacagttgttatagcctcttgagatgtgtgaccatcaaccacgaatgcagatatttccaaagttccatttttttttttccaggtggaaattgctggcatggaacagatgcctttatttggagaaaacagtctttgtaaatgattctggttctgtctcctcttattccctagagagagtctttcccagatgaaattaga

SEQ ID NO: 385788 - DNA, 133 bp, Homo sapiens
agaaagaaaaccaaggctggagaaaaactatagaatgtaattggttgaaacatcattgattcaacacattgctaattcttcactcaaattacagcaataaactttcaaatgcttccactgcaaacaagaaagc

SEQ ID NO: 385789 - DNA, 379 bp, Homo sapiens
aactgacatccatatactctttccttagaaacaagttgttaatattttgccacattgactttttttcttccacatatatacctatcccgcttgaatcatttgaaagtaaattgctgacatgacactttaaccctaatgcttcagcatgaatctaagaatgaggatattctcctatgtaaccaaactaccattatcctacctaagccaattagcagtgattccatggtatcatctaatgtacaatttgcattcaaaatttcattattttcttaaaggctagcttttttttaaagtcaggatccattcagacttcacactttacatttgatctatcactttagtactaattgagaactgtcttctcttgtttgtttctata

SEQ ID NO: 385790 - DNA, 6149 bp, Homo sapiens
  misc_feature (2527)..(2528): n is a, c, g, or t
  misc_feature (2794)..(2794): n is a, c, g, or t
ggttggctcgcgggtaggcggccccgccccccacatccgggggccggggccgggctgtgggcttgccgcgcgcgggtgagtcaggccgggttttccctccgcctttggggcaggcgatcgagcgccgcggagcgcgtccctccctcgccaatccggctccggcgccggcgcccgcccgcgttttcccggcgcctgccgctccgccgctccgacccggcacgcagtcccggcccgagccgacgccttgcaggagggttcaaatccgcgcgggggagctgcgacgcgcaagggctgcggagccgcgggccggcgagcgcgtcgccaccatgaagcagctgcctgtaccctgttgaaacttcatggccacagccccaggccctgctggcattgccatgggcagcgtgggcagcctgttggaacggcaggacttctcccctgaagagctgcgggcggcacttgccgggtctcggggctcccgccagcctgatgggctcctccggaagggcttgggccagcgtgagttcctcagctacctgcacctccccaagaaggacagcaagagcaccaagaacaccaagcgggcccctcggaacgagcctgccgactatgccaccctctactaccgggaacattctcgcgcgggtgacttcagcaagacctcgctgccagaacggggtcgctttgacaagtgccgcattcgcccctcagtgttcaagcctacggcgggcaacgggaaaggcttcctatccatgcaaagcctggcgtcccacaaaggccagaagctgtggcgcagcaatggcagcctgcacacgctggcctgccacccgcccctgagccccgggccccgggccagccaggcccgggcacagctgctgcacgccctcagcctagatgagggcggccctgagcccgagcccagcctgtccgactcctccagtgggggtagttttggtcgcagtcctggtactggccctagccccttcagctcctcccttggccaccttaaccacctcgggggctccctggaccgggcctctcaaggacccaaggaggctgggccaccagctgtgctgagctgcctgcccgagccaccacccccctacgagttctcctgctcctctgccgaggaaatgggagccgtgctgcccgagacctgtgaggagctcaagaggggccttggcgatgaggacggctccaaccccttcacgcaggtgctggaggagcgccagcggctgtggctggctgagctgaagcgcctgtatgtggagcggctgcacgaggtgacccagaaggctgagcgcagcgagcgcaacctccagctgcagctgtttatggctcagcaggagcagcggcgcctgcgcaaggagctgcgggctcagcagggcctggctccggagcctcgggcccccggcaccctcccagaggctgaccccagtgcacgaccagaggaggaagcccgatgggaggtgtgccagaagacagcagagattagcctcttgaagcagcagctgcgtgaagcccaggcggaactggcccagaagctggcggagatcttcagtctgaagacacaacttcggggcagccgggcacaagcccaggctcaggacgcagagctggtccggctgcgcgaggctgtgcgcagcctgcaggagcaggcccctcgggaggaagccccaggcagctgtgagactgatgactgcaagagcaggggcctgctaggggaggcaggaggcagcgaggccagagacagtgctgagcagctgcgggctgagctgctgcaggagcgacttcggggccaggagcaggcgctgcgctttgagcaggagcggcggacttggcaggaggagaaggagcgcgtgctgcgctaccagcgggagatccagggagggtacatggacatgtaccgccgcaaccaggcactggagcaggaactgcgggcactgcgggagccccccacaccctggagtccccggctcgagtcctccaagatctgaggccagcagagcgagctgacagcagcaacactgtcagaaggtgccctgagacggccggctcagccttcccttgcactggttggggtggaacctgcagaggccagcccggggctggggaggcgcaaggagaggagggatccagtggggccgtgggctgggtagggtgccttggcaggagccaggacaaggccctcctggcagaggagcacctaggcagggcccagccctgcttcctggagtggatgtggcccagagaaggaggctgggggatcaccagccccaaggtcccgaagggcaggtcagagggagagaggctggagacctgggctggagccttcctccagggaaggaggctggggtgggaacactggcctcccccagaataaaaccatgttttctaccagaggctcagaatacgctgagcctgtgaccagaggatgatggatggtcgggattgaggctgttgacctgggcagtagctcctcccatggccagtggtcagtgggagggtgtgccctgcgcctgtctgcatnnccactgggcatgtgtgttgggagcagaggagtcctactccttgcctcagccccacacggttccttagctgccgtgtgggctgaaattcctttctttagcaccagtggagttttcagaaggaacaacaccagggaatgccaaaaaaacaaagggcaagtcaaccaaggcattttgagaacatgaaatgtcttcttggtgggaaggctgggccccaggagtatccacaggctcaggccatgcccctccccgcacccacctcctgtctncctccctccctccataggagtggggggcccctagaagtgctctgcctcattccctgttcgtaggaaggtgcaggagaggaggtgggcaagcttatgggtttcttggtaaagagcctttaccacagcaaggaatgggaacatttccccatcagcaacggggctctagggcattattaagtaggggtgaaatatgattgatttgcattctggaaagctctcccaggaggaagcattccccaccccaccttgcctctgtcctgcgctgggctccaggacggtcagtcctcccagatccctgctctcagctaaggctggtccctaaaacccacacctgcctttggtctctcagaggcctggcttgccctctgggcctttgctcccccgctgggtgcccggcctggaacacaggttctgtctggctgtgtgagtggcgtctctcccttcctttgagggaagctcagctttcttacgcgctcatcgttggacgggctgccatgcattgcgtgcttactgggcgccaggtgctgtgctgggcccttgtgagtgtgggggcacaggctgaattagatgagctcctgccgcagggggccctgcacactgatgtcagctcaccagtctcttccctgacagggcagctcagggaacttctgagaagttatctgcagagagccccccctcactccctttggctaccctggccgtgcctggcagcccctcaggccccacaggtgggtcctggttgtgaagtggagttagtgcacatggatgtcaggggacgggtgtgaggcatgagctgggggggccccctttttcagggcagagaatgaggcgtgtgcactgtctgctgtggggatggtgtgtttatggccatgtaagtggcaggtgtgtgtaaagatgtgcttgtgggtggtgggtgtgtctgagggggtgtgtttgggagcctggcctccaaaagccagtgtctgggttggagacagtgcaggccccttcttggccccaccctctaccccattccttcctgtcagccccagtctgtcttggcactggccaggcttgggtggagcctgtgtcccagacagatcccctaggcctatctgagacccatgcaggcccacacctgagctcctgtctgcctgaggagggaaagggggagtggccaggtcaggcaggccagtcgtctacacacccccttggtacccattcccatttcacaaactcctccaaaccccaaaccccaaacggaaatctctgggacaatggctcctccagagggcccctcagagccaggtgctggccagatgccttgatcacagcctccatggccaggggcctgtcaagccaggggcccacatacctggtgccagggcccacctcggtataccagctcggcagaacagttccccacccagcgattagggagctgggctggccagtacagccagtggggagtgggtgggaggcaccaaaacttggcagctgtgccagaaaccaaagccaggcccagatgtagggggagggcacgagagctgaacctgagcctggggcgtctcggagctggatccccgtcagctcatccaggctggacaaaccagttcctgggtcccccagccggctgggtggctctggggccaaccgaccacaggtgtcactgatcacaggtgtcaccgtagtggctaccacctcagggcagcccctccctccagctggcggggcctcagcttcccagctgccctggcttagccttccctgcagcccctccccaacaggcttggtccgggcagcctgctctgcggaaggtggcagcctcctggtgctgggctccctgcctctggggcctccagtccttcactcagtgtcatcccttccagcagctccctgggcctcttggtccatcccttcaggcttctgacacactagtggcctcgagtcactgatagtggtgcctcctccttaccttggcaagcccttgtagccctctgagccctcatcctgcaggcagagcccctcagtgctctgagaaacctgccctgaactcaccgcctcccctgcctgggcactccctcctccctgcgcccacagcccccatgccaatctccgtcagctctttctgtgctgctgtaattgttggtttgcctgtctcctttgagctgtgggcattgccggggtagggtggtgtcttcaccacagctccagaaggcactggtgggatgtggagtcaggagcaaccagagaccccccaatactagaatgggtttgagcttggggtggggtggatggggaagacttactctgaatgttcgttcaccatccgtgggcaccaggtctgtgccaagcacagggactccaggggcagctgccattcgttccagtgatgtatttggggccttctcaggtgaggaagccaaggtggccaaggccctcggtcccctgccctgatagggcttacctgtgggtgggggagggagaccacacatgtcagaggtagtgaaggccgctccaaatagtgactggggccaggcaggcggaaaagagaacagaagagaatccagaagtgttcagacagaactagggacaacagaggggcctccatggtggcatgggtcagcagagcatggagcaggcagaggaagcctatctgtggggctgggtacatttctctgagactcacggaatgtaagtgttgaggtttctgcaaagagggcgcaggccctgcagtgacggttcagatattgataacccatcccccttggcaggtgggggcttaggcatccatattggattcagaaaagaaaaagaatgatgcttcttgcaacaaaaacaaaagtgattatgtcacgagaggagaggctggagggccatgggagttcccagctggctcactcatccgtccaggaggtgggtctcatggtttcattttgctttgggcttacttagagttttggcaaatgcagagttatgtaacgaacccaacaatgaagatacagttctgtcacccccccagcattctcctgtggccctctagtccaccccccgccccaccccagcccctggcaaccactgatctgctttcacaataaccgtatggggttttttctctttccttttttgtgagcggtatttaattcctttgctctaatatgtaatattagaacatattacaaagtagcaagaaaaatacgacattggtgtaaaaataatctacacctcatggaaagaatgaagagccagaaatagattctattctgtagaaaatcttacacaataaaggacttcaaaataagggtaaggaaggatgctttaacaagtggtgctgggataactggataaaaatttgggaaaaaagtcatactatgtg

SEQ ID NO: 385791 - DNA, 1433 bp, Homo sapiens
actagagatcctgcaccgatagcccgacaggccccgaccagcccttgtagccctctgagccctcatcctgcaggcagagcccctcagtgctctgagaaacctgccctgaactcaccgcctcccctgcctgggcactccctcctccctgcgcccacagcccccatgccaatctccgtcagctctttctgtgctgctgtaattgttggtttgcctgtctcctttgagctgtgggcattgccggggtagggtggtgtcttcaccacagctccagaaggcactggtgggatgtggagtcaggagcaaccagagaccccccaatactagaatgggtttgagcttggggtggggtggatggggaagacttactctgaatgttcgttcaccatccgtgggcaccaggtctgtgccaagcacagggactccaggggcagctgccattcgttccagtgatgtatttggggccttctcaggtgaggaagccaaggtggccaaggccctcggtcccctgccctgatagggcttacctgtgggtgggggagggagaccacacatgtcagaggtagtgaaggccgctccaaatagtgactggggccaggcaggcggaaaagagaacagaagagaatccagaagtgttcagacagaactagggacaacagaggggcctccatggtggcatgggtcagcagagcatggagcaggcagaggaagcctatctgtggggctgggtacatttctctgagactcacggaatgtaagtgttgaggtttctgcaaagagggcgcaggccctgcagtgacggttcagatattgataacccatcccccttggcaggtgggggcttaggcatccatattggattcagaaaagaaaaagaatgatgcttcttgcaacaaaaacaaaagtgattatgtcacgagaggagaggctggagggccatgggagttcccagctggctcactcatccgtccaggaggtgggtctcatggtttcattttgctttgggcttacttagagttttggcaaatgcagagttatgtaacgaacccaacaatgaagatacagttctgtcacccccccagcattctcctgtggccctctagtccaccccccgccccaccccagcccctggcaaccactgatctgctttcacaataaccgtatggggttttttctctttccttttttgtgagcggtatttaattcctttgctctaatatgtaatattagaacatattacaaagtagcaagaaaaatacgacattggtgtaaaaataatctacacctcatggaaagaatgaagagccagaaatagattctattctgtagaaaatcttacacaataaaggacttcaaaataagggtaaggaaggatgctttaacaagtggtgctgggataactggataaaaatttgggaaaaaagtcatactatgtg

SEQ ID NO: 385792 - DNA, 348 bp, Homo sapiens
aaccaaaccaatcagaagattttgaggacaatgtagcacaaaaagcagatatgatttgatttgcaaatatcactgaaggggcttatccacacagaagaaagttccattattgcgctgtcaccaacaatagaattgagagttactatgaagaaacacacccattttcagacaaggaggcaatctgcaactggcaaatgggccatggcccaaagcgggtaacacaacatggaagtgcagatttgtttctgcatctcaggctctcgttaagtcaaaggaaaaaaaataccaaacattatttatgataaattcacactaggaaagctctcctttgatatttctgaaattcag

SEQ ID NO: 385793 - DNA, 248 bp, Homo sapiens
caagcaatcctcctgcctccgcctcacaggtgtgcaccaccatatttgtagttttacttctcctgtgagactttaacttctcaagggtcttttctatgccttgtctttctctgagtccctaaaagtgctcacagagcacatacaaatatttgagacgtaattaaatgaagtgacaggtctttagatacagaaatgcaggacacaggcagaagtctgggtaacctgtgcaggcctggggctggggagta

SEQ ID NO: 385794 - DNA, 1750 bp, Homo sapiens
gagcccaccgtgcctggcctttcctgtttatctttgaaaattaaatagggcataagagagaagaagatgtacttacaatgcagtgggtggttttaactctatagcctttgggctctgtggttggtgctccccttcctaaataaatgaggtgtatgcagggccctcttctgccttagcgccctgccagctgggactccagcaaggcccggggcacctgaggacagagtgagatggagggccgctgctccagcagccgggcctgcatcccacaagtcaactgtgtcggacagaggatccttacaaagaagaggcagcagggttgggggctggccagctgctcgtccgccctaggtagcttgctcatctgtaaagtgggtggggcaggagttcccacctcatggggtcctggcaagcctgcagtatccccgagtggcaccagcctgcttctggggcagagcagtttgtgccccctgaggtaccactgatcctctttccctgctattaggtattgctctcttcctccggtgtttgccttttcagattatagaagtaatatgtgttcccatatttggcgtctctcaggagctcaggaagtacttggctgagtgaacatgtccattgtggaaaaatggcaacaatatggattccatgggtatattttatagaagaatatgaagaaaagcagctacccctaaacccattgcacaagctgttcatgttaattctgtacccgacgctttccccacggggcctcccctcactctgaaatggcatccaggtccatcttgccctccacctctgcatggctctccatgccccatcgcctctcccagatcctagcactgggtccacactctcgccctgtccatttaggttgatgaaagcaggcagtcacccgggtgggccagtcttgcctgtgggaggaacatgcagtctcctgtctcatggtttgaagtgtgccaggaagcctggcccagcccacctccccctggagtccttcccaggaggaataaccccttaggtcattgactataagatgagttcgctcactggatccttcctctctgatgagacaggaagaaggtacacagtgaccaggtaggaggaggagagggagtagaaaggagggatgcgggtggctggtccctgcatttgcctgcttccctgcacgggtgtcccactggccgcctctgctcaccagtgtcatgggattctctcagaagatgaaaacagcccctgctttttttgctagaatggctgagctttcatggaaaggaagctggacccaagcaacagccgactaccgaaggttgcctggagcagtgcagatgtgggaggaagaagggccttggtgcacactggcttttcttcctgactgcaatgtggcattgtgccagctacctcctctttctcggcctcaggaaaatggagagaaagcagccctgaaggtggctgtgacgagggaaggggcagagggcctgacagtcaaccacgcgctatattttcctgttcttccttagggcaagaactgcatggccagactcaggcaaggcctaggtgtgggctgggcattgcctacacgtgaagagatcactccgcgtccctactgcacctgtcacaaagtgccttctgatatgcctggccaagcagtcggctgatgaataagctgattttgatggggttttgggatttgagattgacgcggtgaagcctgtccagttttctaaccacacacggtctatgccagcat

SEQ ID NO: 385795 - DNA, 2218 bp, Homo sapiens
gagcccaccgtgcctggcctttcctgtttatctttgaaaattaaatagggcataagagagaagaagatgtacttacaatgcagtgggtggttttaactctatagcctttgggctctgtggttggtgctccccttcctaaataaatgaggtgtatgcagggccctcttctgccttagcgccctgccagctgggactccagcaaggcccggggcacctgaggacagagtgagatggagggccgctgctccagcagccgggcctgcatcccacaagtcaactgtgtcggacagaggatccttacaaagaagaggcagcagggttgggggctggccagctgctcgtccgccctaggtagcttgctcatctgtaaagtgggtggggcaggagttcccacctcatggggtcctggcaagcctgcagtatccccgagtggcaccagcctgcttctggggcagagcagtttgtgccccctgaggtaccactgatcctctttccctgctattaggtattgctctcttcctccggtgtttgccttttcagattatagaagtaatatgtgttcccatatttggcgtctctcaggagctcaggaagtacttggctgagtgaacatgtccattgtggaaaaatggcaacaatatggattccatgggtatattttatagaagaatatgaagaaaagcagctacccctaaacccattgcacaagctgttcatgttaattctgtacccgacgctttccccacggggcctcccctcactctgaaatggcatccaggtccatcttgccctccacctctgcatggctctccatgccccatcgcctctcccagatcctagcactgggtccacactctcgccctgtccatttaggttgatgaaagcaggcagtcacccgggtgggccagtcttgcctgtgggaggaacatgcagtctcctgtctcatggtttgaagtgtgccaggaagcctggcccagcccacctccccctggagtccttcccaggaggaataaccccttaggtcattgactataagatgagttcgctcactggatccttcctctctgatgagacaggaagaaggtacacagtgaccaggtaggaggaggagagggagtagaaaggagggatgcgggtggctggtccctgcatttgcctgcttccctgcacgggtgtcccactggccgcctctgctcaccagtgtcatgggattctctcagaagatgaaaacagcccctgctttttttgctagaatggctgagctttcatggaaaggaagctggacccaagcaacagccgactaccgaaggttgcctggagcagtgcagatgtgggaggaagaagggccttggtgcacactggcttttcttcctgactgcaatgtggcattgtgccagctacctcctctttctcggcctcaggaaaatggagagaaagcagccctgaaggtggctgtgacgagggaaggggcagagggcctgacagtcaaccacgcgctatattttcctgttcttccttagggcaagaactgcatggccagactcaggcaaggcctaggtgtgggctgggcattgcctacacgtgaagagatcactccgcgtccctactgcacctgtcacaaagtgccttctgatatgcctggcaaaccaaaatcggtgagcgccagcttgcttccctagaagacatttctaaatattcataacatgcttgctcaaatcaatcaccttattttacatccgctccagggagaaatgaagacatggtcctacgttgttctgtaattattttctatgtaaattttgttccttgtcacaattatatatgtcttaggggaaaggaccatttcacatgtgtcacctcatgtgattctcaccacagccctgtgattgctcctgttttataaataatgacatagttccagttgatggccaaagccacagctaacgagaggcagagagagctcaggctcccaggagcttccactctcagaccttgcctcccgggctgccctgagtgaaacccctgcttagcatttggcacagccagaagcagcaagctagggtcacaacacagagaggggctgtgtaatactggctgcctctgtgctaagaaaaaaaaaaaatcactgtgtgtttgtttattttggtgcaggcccagtgttcttgcttagacttaatactacccttcatgttaaaataaaaccaaacaaaaacccatg

SEQ ID NO: 385796 - DNA, 369 bp, Homo sapiens
atatgtaataaatatgtatggagtaacatgtaacatgtaaggaagtgtaaaacttgtaagcctttgtatgtccacactttataccttagcttgagatgttgaatcatctcctttcatgaggtggactttatgagatcagctaagggtctcatgactttgccggactagtctcagtcttcaataccttacttagggaatcttgcaaaacatgttagaagaaatgaggtggagatattgaccaaattttattgattacatttggttattaggccagaaatataaaaatccagaaaagagctgggtgaagtggctgatgcccgtaatctctgcactttgggaggctgaggcaagcagatcacttgagatctg

SEQ ID NO: 385797 - DNA, 1187 bp, Homo sapiens
aaatttcatcttccagttgtgtattgctagtctctagagatgcagttggtctttgtgttgtgaccttgtatcctgtgaccttgtaaaaactcatttgttagtctggcagctttttaaatatattttttcagattttccacatatacaatcatatcatctctgaatacagtttttcttcctttcatatttatctgcctctctttttcttgtctcactgcactgactagcatcttcagaatgatgctgaatggttagagtggacatcattgcctggttctggacattagctgtaggtttttcgtagagtaggttgaggaaataaattctcctctgttcctgtttgctgagagtttttgtcatgaatgggtgttgaattttgtcaaatgcttttcctgtgtctgttgagataatcatttggtacttctccttaattttgttaatatagtgaaataaattcacttttcaatgtaaaccaaccttgcattcctaggataaactccagttggggtttctattttttattaaagattttaattcttattaaatatttatatgttcataaggaatatttgtctggagttttatttaatgtttttgtctggttttgtcattagggaatgctggcctcataaaatgaagtgagaagtgttccctcttgttttcttgaggactttgtatatgattgttctttgattaagtctttagttccctagtgaagtcacacagacctgaaattttctttgcaggaaattaattgtgaattctttttcttttctagatatggagctatgcaaattttctaatttttcgtgtgtctgtggttataatttgtgtctttcaagtaatatatccatttcatcttaagtatgttgatataaggttgtttgtattcttttaatatttataagatatgtagagatgtttcattttcattcctgatgtacgtcatttctttttcccacttttccataaccaacttagctagaagtttatcagttgtgttgatcttttcaaaagccagctttagcctgggcaacatggcaaaaattagctggctgtggtgtcacatgcctatattcccagctacataggaggcttaggtgagaggatcacttgaacccgggaggcaggggctgcagtgaaccgagatcatgccactgcactccagcctgggtgacagagtgaaa

SEQ ID NO: 385798 - DNA, 339 bp, Homo sapiens
atctgtattaactttgaaaactgaagtaaatgcaaaattatcttctgtatataaaaacaagccccaaggacaccaaaaaactccctacctccatttgctaactggaatagcaaatattctgccactcttctgtcccaagtccacaggagacactactaatgaattgcaacacacttacttctggctcagaaagttgcctgagcatagcatcccaagcagcagttcaatcacctggagatggcataagatggaaccacctgccctctctttttcacatgtctgtatgcattcatgcacgcatgcattcatcagctggaagctacagcagtgtccagcagt

SEQ ID NO: 385799 - DNA, 498 bp, Homo sapiens
  misc_feature (223)..(223): n is a, c, g, or t
  misc_feature (225)..(225): n is a, c, g, or t
  misc_feature (228)..(228): n is a, c, g, or t
  misc_feature (230)..(230): n is a, c, g, or t
  misc_feature (233)..(233): n is a, c, g, or t
  misc_feature (237)..(237): n is a, c, g, or t
  misc_feature (245)..(245): n is a, c, g, or t
  misc_feature (256)..(256): n is a, c, g, or t
  misc_feature (263)..(263): n is a, c, g, or t
  misc_feature (282)..(282): n is a, c, g, or t
  misc_feature (291)..(291): n is a, c, g, or t
  misc_feature (295)..(295): n is a, c, g, or t
  misc_feature (308)..(308): n is a, c, g, or t
  misc_feature (310)..(310): n is a, c, g, or t
  misc_feature (321)..(321): n is a, c, g, or t
  misc_feature (328)..(328): n is a, c, g, or t
  misc_feature (337)..(337): n is a, c, g, or t
  misc_feature (352)..(352): n is a, c, g, or t
  misc_feature (355)..(355): n is a, c, g, or t
gggagccattgtggctccggccggttgcgcgggccctcggaccctcagggtaggcgagggttcgagggcacgagttcgaggccaacctggtccacatgggtaaaaaaaaaaaaaaaaaaaaaaaaaaaaactgtggtgggcgcgcgcgcgccgcgcggcccctcgagaaaaaagcttttataaaacacacacttgcgcgtgtgggggcgcgcgcggggccccnangangnganaagnggaaacangtgggccaaanacgcggntctcccaagaggagaaacnccgggccanaganaaaaggggcgggngnatttctcaccncaaatanaaaaaacgnccggggggggaaacncgngagagcggtttgtggaaacaaatttcagagagaggggaggttctgggggggccaattatgggggggatcttctacaaagaggggcgttccaaagggagaccgtcatcattcaaaaattacacccggcgtagcgtgggatgaag

SEQ ID NO: 385800 - DNA, 317 bp, Homo sapiens
  misc_feature (243)..(243): n is a, c, g, or t
gggagccattgtggctccggccggttgcgcgggccctcggaccctcagggtaggcgagggttcgagggcacgagttcgaggccaacctggtccacatgggtaaaaaaaaaaaaaaaaaaacggcacgagaacaaccacaagaaagggagaagaggtgcctgtgggagattttgcagacctattgtgggtataggtatttttttcctggggaagaattcagttcccgtctcagctgtacttttntgggcctgtcatcttgatgaccagaatgaaagcttgctctgcctcctgccagccagaatttgtggcgggacttt

SEQ ID NO: 385801 - DNA, 394 bp, Homo sapiens
ccaacagtatgacacacaactttaggggcacatgcagcatatgcttttattgcatgtaagtccttggacttttatatttatttcatgtattttaaatatttcttgaaatcaagagcgttaatattattagtaacaaacatctgtggtcattttcttccatttgtcacatagctaatacagagtatatagtattacttttgagtggccttatgtaacatctcctttctaaattcctgaaagtaagttacgaccagaattacatactaaaaagagtcaaagaatacattacctacttctataaatggataattttatagtaatctaaataaaaatgagaccagaataaatatttttctagccttctctggaatgctaagcagtgttggggagggag

SEQ ID NO: 385802 - DNA, 363 bp, Homo sapiens
gaaatttatgccaaagtcttcccaagacacctcttagtaagaaagctaaaaggtggtttgttgactttctcttaggcaaaaaggacagatttttgggcccaagattttaattagaattgtcttccccagaagaaatttagtaaagtgaacagtaagtgtttccttactctcaccactgtttggtgacactgtttgacttgacagttctagtgctgagtaatagtgtcttctcctatcactgtctgtaaaactgttactgcactattggttgatgatatctctctcttttttttttcttaagagacagagtctctctctgtcacccaggctggagttcagtggcgtaatctcggctcactgtaa

SEQ ID NO: 385803 - DNA, 389 bp, Homo sapiens
gctcctgcatgaaagtcctgggtgacattgaagacacctaaatgatagccggcatccctggcgccactcactaaatgcccttcgactactgacaacagaaatgcctcggtatgtttccaaaatgctcccgggagatgccaccacctctgttgagaagactgacatccgagggtggagaatcactactgcgagaaggaaaacaaaaggtgtgtccttgaatgtgctgccggagcgtccagtgtctcatagggccccacgtgtgggacccaccaaagagaaagtgataggatatctatgagtcgatctcgtcaatgtccccaccttgaaaagtacaatccaatgttggaaccacttcccacccaccttcctcttctttctcctcagctagg

SEQ ID NO: 385804 - DNA, 900 bp, Homo sapiens
atctgatggcagatgcccctttgcttccttaattctgccattcaagcatctggagcctgggtgaggtgggttgaatcaggccagcctttggcataattgaaaggttttctcttctgttttttaaaatcccctctgtgggctaatctttattggatagcatgcactaaattgatgagaaaagaaactcaatcttcctttcaatgaactgacatcctaatatggtccccaagatgcactgtaagaaggaatttgtcttagtcacaaccgttcagactgctgtaacaaaataccttagactaagtaattgataacagaaattgattgctcacagttttggaggctgggaagtccaatatcaaggtgccagcagattcagtgtctggtgagggcttgccatctgcttcaaagatgatgcctttttgctgcatcctcacatggcagaagggaagggcaaaagggcttccttgagccttttctttaaggcactaatcccattcatgaaggtggagtcctcatgatctcacctcttaaggccctatctcttaattctgtagtgtcgggattaggattcaacctgtatattgggggagacagcaacattcacaccatagcagaagtcctccatgctttgggggtttgagattctaggtagattagaaaatacgagcaaggaaataaagtgtttgctagtagaaggcaaaggaggcatccagacccagcagtcttggtctccaggacactgaaccatggctggaaaagaagctctcctcctcccttcccctgcaaacatgagtgcaggggctgcctgtgttaaccgggtcccaggacctcttcccactctgctctgcacactgtgtagttttttacagctttgcaaataaaccctttggtatagccttt

SEQ ID NO: 385805 - DNA, 1847 bp, Homo sapiens
accagcccttctgacagagctggaaacaggcaccaagccctccaggaagctatttttagggttcatctgttcttttttatttcttctctggattccatattctctcacccccaaatttaaaggacctaaagatcctggaaatcattcattatacccccagctcgcaagctgtggcttctccccaaccttctctgtaccactccctctttctttcttcctctccgccctcacccctctggttctccagctccacaggcagcagagaaagcaggctctttgtctgacatcatctttcactccctggcctgctaagagttactcactcaggcaatccctgctccaccagaggagactgtccaattgccaagcaacccactgctggccaatcacagagcttggaggtgatgtcatggcaagagcgagcagtggtgctgatgttgagagaagcccagggtaccactaattgagggagtgaggaagagagcagctcgcttctaactggactgcacgttggtgacagcgtcccaagctggtgacagacccactctgtaactttcagctagattcagccaccagatcccagaaacatgacccttgctgcctacaaagagaagatgaaggagctcccgctggtgtccttgttctgctcctgcttcctggccgatcccctgaataagtcgtcctacaaatatgaagcagacacggtggacctgaattggtgcgtcatttccgacatggaagtcatcgagctgaacaaatgcacctcgggccaatcctttgaagtcatcctgaagccaccctcctttgatggggttcccgagttcaacgcctccctgccaaggcggcgagacccatccctggaagagatccagaagaaactagaagcggctgaggagcgaaggaagtaccaggaagcggagctcctgaaacacctagcagagaaacgggaacatgagagagaggtgatccaaaaggccattgaggaaaacaacaacttcatcaagatggctaaggaaaaactggcccagaagatggaatccaacaaggagaacagggaggcccacctcgccgccatgttggaacggctgcaagagaaggacaagcacgccgaggaggtgcggaaaaacaaggagctgaaggaagaggcctccaggtaaagcctagaggccaaagaactttccaggtcagccggacagctccagcagctccacgttccaggcagcctcgcccgccggctgcgctcccagcactggggtttggggggaggggggtggccaaggggcgtttcctctgcttttggtgtttgtacatgttaagaattgaccagtgaagccatcctatttgtttccggggaacaatgacggggtgggagaggggagaggagagagtttgggaaagggagatggagaagaactcaaggacattgcaaccctgcccggcgcagatctgattttcacatctctacctggacattgagcctccaggcaccatgttgaggagagatgaaaaccagggcggtagaacttcagggtgaaggacagagtcctgggtggggcagcggctgcagggcgcaccagagaacccagccagagggggtgtgagtaccagtggtgttgcttccaccctgcagcaggtgggatgaggtctgtgtgtgtgtgtgaaccatcattttttgatcatcatgaccaatgaaacattgaaaaaaaaaatccagttctttatttcccctgcaaacatgagtgcaggggctgcctgtgttaaccgggtcccaggacctcttcccactctgctctgcacactgtgtagttttttacagctttgcaaataaaccctttggtatagccttt

SEQ ID NO: 385806 - DNA, 1928 bp, Homo sapiens
accagcccttctgacagagctggaaacaggcaccaagccctccaggaagctatttttagggttcatctgttcttttttatttcttctctggattccatattctctcacccccaaatttaaaggacctaaagatcctggaaatcattcattatacccccagctcgcaagctgtggcttctccccaaccttctctgtaccactccctctttctttcttcctctccgccctcacccctctggttctccagctccacaggcagcagagaaagcaggctctttgtctgacatcatctttcactccctggcctgctaagagttactcactcaggcaatccctgctccaccagaggagactgtccaattgccaagcaacccactgctggccaatcacagagcttggaggtgatgtcatggcaagagcgagcagtggtgctgatgttgagagaagcccagggtaccactaattgagggagtgaggaagagagcagctcgcttctaactggactgcacgttggtgacagcgtcccaagctggtgacagacccactctgtaactttcagctagattcagccaccagatcccagaaacatgacccttgctgcctacaaagagaagatgaaggagctcccgctggtgtccttgttctgctcctgcttcctggccgatcccctgaataagtcgtcctacaaatatgaaggctggtgtgggagacagtgtaggaggaaggatgaaagccagcggaaagacagtgctgactggagagaaagaagagctcaggcagacacggtggacctgaattggtgcgtcatttccgacatggaagtcatcgagctgaacaaatgcacctcgggccaatcctttgaagtcatcctgaagccaccctcctttgatggggttcccgagttcaacgcctccctgccaaggcggcgagacccatccctggaagagatccagaagaaactagaagcggctgaggagcgaaggaagtaccaggaagcggagctcctgaaacacctagcagagaaacgggaacatgagagagaggtgatccaaaaggccattgaggaaaacaacaacttcatcaagatggctaaggaaaaactggcccagaagatggaatccaacaaggagaacagggaggcccacctcgccgccatgttggaacggctgcaagagaaggacaagcacgccgaggaggtgcggaaaaacaaggagctgaaggaagaggcctccaggtaaagcctagaggccaaagaactttccaggtcagccggacagctccagcagctccacgttccaggcagcctcgcccgccggctgcgctcccagcactggggtttggggggaggggggtggccaaggggcgtttcctctgcttttggtgtttgtacatgttaagaattgaccagtgaagccatcctatttgtttccggggaacaatgacggggtgggagaggggagaggagagagtttgggaaagggagatggagaagaactcaaggacattgcaaccctgcccggcgcagatctgattttcacatctctacctggacattgagcctccaggcaccatgttgaggagagatgaaaaccagggcggtagaacttcagggtgaaggacagagtcctgggtggggcagcggctgcagggcgcaccagagaacccagccagagggggtgtgagtaccagtggtgttgcttccaccctgcagcaggtgggatgaggtctgtgtgtgtgtgtgaaccatcattttttgatcatcatgaccaatgaaacattgaaaaaaaaaatccagttctttatttcccctgcaaacatgagtgcaggggctgcctgtgttaaccgggtcccaggacctcttcccactctgctctgcacactgtgtagttttttacagctttgcaaataaaccctttggtatagccttt

SEQ ID NO: 385807 - DNA, 1386 bp, Homo sapiens
accagcccttctgacagagctggaaacaggcaccaagccctccaggaagctatttttagggttcatctgttcttttttatttcttctctggattccatattctctcacccccaaatttaaaggacctaaagatcctggaaatcattcattatacccccagctcgcaagctgtggcttctccccaaccttctctgtaccactccctctttctttcttcctctccgccctcacccctctggttctccagctccacaggcagcagagaaagcaggctctttgtctgacatcatctttcactccctggcctgctaagagttactcactcaggcaatccctgctccaccagaggagactgtccaattgccaagcaacccactgctggccaatcacagagcttggaggtgatgtcatggcaagagcgagcagtggtgctgatgttgagagaagcccagggtaccactaattgagggagtgaggaagagagcagctcgcttctaactggactgcacgttggtgacagcgtcccaagctggtgacagacccactctgtaactttcagctagattcagccaccagatcccagaaacatgacccttgctgcctacaaagagaagatgaaggagctcccgctggtgtccttgttctgctcctgcttcctggccgatcccctgaataagtcgtcctacaaatatgaagcagacacggtggacctgaattggtgcgtcatttccgacatggaagtcatcgagctgaacaaatgcacctcgggccaatcctttgaagtcatcctgaagccaccctcctttgatggggttcccgagttcaacgcctccctgccaaggcggcgagacccatccctggaagagatccagaagaaactagaagcggctgaggagcgaaggaagtaccaggaagcggagctcctgaaacacctagcagagaaacgggaacatgagagagaggtgatccaaaaggccattgaggaaaacaacaacttcatcaagatggctaaggaaaaactggcccagaagatggaatccaacaaggagaacagggaggcccacctcgccgccatgttggaacggctgcaagagaagcggctgcagggcgcaccagagaacccagccagagggggtgtgagtaccagtggtgttgcttccaccctgcagcaggtgggatgaggtctgtgtgtgtgtgtgaaccatcattttttgatcatcatgaccaatgaaacattgaaaaaaaaaatccagttctttatttcccctgcaaacatgagtgcaggggctgcctgtgttaaccgggtcccaggacctcttcccactctgctctgcacactgtgtagttttttacagctttgcaaataaaccctttggtatagccttt

SEQ ID NO: 385808 - DNA, 282 bp, Homo sapiens
tatacggctgttagaagacgacagaagggggtgtgagtaccagtggtgttgcttccaccctgcagcaggtgggatgaggtctgtgtgtgtgtgtgaaccatcattttttgatcatcatgaccaatgaaacattgaaaaaaaaaatccagttctttatttcccctgcaaacatgagtgcaggggctgcctgtgttaaccgggtcccaggacctcttcccactctgctctgcacactgtgtagttttttacagctttgcaaataaaccctttggtatagccttt

SEQ ID NO: 385809 - DNA, 1901 bp, Homo sapiens
accagcccttctgacagagctggaaacaggcaccaagccctccaggaagctatttttagggttcatctgttcttttttatttcttctctggattccatattctctcacccccaaatttaaaggacctaaagatcctggaaatcattcattatacccccagctcgcaagctgtggcttctccccaaccttctctgtaccactccctctttctttcttcctctccgccctcacccctctggttctccagctccacaggcagcagagaaagcaggctctttgtctgacatcatctttcactccctggcctgctaagagttactcactcaggcaatccctgctccaccagaggagactgtccaattgccaagcaacccactgctggccaatcacagagcttggaggtgatgtcatggcaagagcgagcagtggtgctgatgttgagagaagcccagggtaccactaattgagggagtgaggaagagagcagctcgcttctaactggactgcacgttggtgacagcgtcccaagctggtgacagacccactctgtaactttcagctagattcagccaccagatcccagaaacatgacccttgctgcctacaaagagaagatgaaggagctcccgctggtgtccttgttctgctcctgcttcctggccgatcccctgaataagtcgtcctacaaatatgaagcagacacggtggacctgaattggtgcgtcatttccgacatggaagtcatcgagctgaacaaatgcacctcgggccaatcctttgaagtcatcctgaagccaccctcctttgatggggttcccgagttcaacgcctccctgccaaggcggcgagacccatccctggaagagatccagaagaaactagaagcggctgaggagcgaaggaagtaccaggaagcggagctcctgaaacacctagcagagaaacgggaacatgagagagaggtgatccaaaaggccattgaggaaaacaacaacttcatcaagatggctaaggaaaaactggcccagaagatggaatccaacaaggagaacagggaggcccacctcgccgccatgttggaacggctgcaagagaaggaaccgcctgctgcgcggtgactcccgggacctgatcggtggcctcgtcccatggacaagcacgccgaggaggtgcggaaaaacaaggagctgaaggaagaggcctccaggtaaagcctagaggccaaagaactttccaggtcagccggacagctccagcagctccacgttccaggcagcctcgcccgccggctgcgctcccagcactggggtttggggggaggggggtggccaaggggcgtttcctctgcttttggtgtttgtacatgttaagaattgaccagtgaagccatcctatttgtttccggggaacaatgacggggtgggagaggggagaggagagagtttgggaaagggagatggagaagaactcaaggacattgcaaccctgcccggcgcagatctgattttcacatctctacctggacattgagcctccaggcaccatgttgaggagagatgaaaaccagggcggtagaacttcagggtgaaggacagagtcctgggtggggcagcggctgcagggcgcaccagagaacccagccagagggggtgtgagtaccagtggtgttgcttccaccctgcagcaggtgggatgaggtctgtgtgtgtgtgtgaaccatcattttttgatcatcatgaccaatgaaacattgaaaaaaaaaatccagttctttatttcccctgcaaacatgagtgcaggggctgcctgtgttaaccgggtcccaggacctcttcccactctgctctgcacactgtgtagttttttacagctttgcaaataaaccctttggtatagccttt

SEQ ID NO: 385810 - DNA, 472 bp, Homo sapiens
  misc_feature (2)..(2): n is a, c, g, or t
  misc_feature (52)..(52): n is a, c, g, or t
  misc_feature (115)..(115): n is a, c, g, or t
cntctgccaccctttccactacactatgatcctgactagaatgctgtgtgtnaagatggtggtcatgtgccatgctctctcccaccttcatgccatgctgcatacctttctcatnggccaactaatcttctgtgcagataacagaatcccccacttcttctgtgacctctacgctctgatgaagatctcctgcaccagcacctacctcaacacccttatgattcacacagaaggtgctgttgtaatcagtggagctctggccttcattactgcctcctatgcctgcatcatcctggtggtcctccggatcccctcagccaagggcaggtggaaaaccttttctacctgcggctcccacctcactgtggtggccatattctatggcaccctcagttgggtctacttccggcccctttccagctattcagtgaccaagggtcgcattataacagtcgtgtacacagtggtgact

SEQ ID NO: 385811 - DNA, 678 bp, Homo sapiens
atatccccctgtctcaccaaccaccgtgcccagttaattacaaaaaaaatttgcagagacggatggggtttcaccatgttggccaggctgggtcttgaactcctgacctcaagtggtccgcttgcctcggcttcccaaagtgctgagattacaggtgtgagccaccacacccagccaggacatgtgcacttttaatgatcacctaaacaggtcaggattctgaatacaatactgccaaatatgaaaactctccccttacactttcacatccatataataaaagccctgccctttcataaaaaagacagtgtggtgctggaggagggacagacacacattttagcgtcagacaaacctggtttctgccactttcataaactctgtgatcttgggcaacattctgaatttccaccaagcttcagcttctgaagcagtaaaaaagggataataaaactcacttttggtcttcctgtaagaattaacttatgtacatatatagccattagcacatgatgctcatacaactggtatttattttcctgctgttcctttttgcatatgtaaatttaggcaaaaattttaaactttcacttgtatatacacacgcatactttggacactgaaatcttcagtgtatttggtgcttacatttaaataaaatgtcacattttataaatt

SEQ ID NO: 385812 - DNA, 1089 bp, Homo sapiens
cagcctcgccgcccccgcgtcgctcgctctcgcgaccctgtgaacactttgaaaaacaagagtcgggggaagcaacgggctaagcgctgctatttggggcactaaaaggaagccggccagaggtggcgggttcatgcgtcccccgagacccaggccgcgtcgggggccaagagcccttacagccttctcccgcgccgtcgggaggtcctcccggaactgggccggagcgcagagaacgcagtgtgagaagggcccatgggttttaggtcacctccttcgcgctggacgcgggcagagcggtgtccctttctgtctctgccaagagacgtggagggagggagaagggaggatggcttgtgctgaaagaaacaagaatgaagtcgggcagccgggatctgagaaatgggaaatccatggcccttgttcgggaccacaggctttgccgacgtggtctctcctagttccgaaattgcccaggcccgcctccccactctctgcaagcagcgggaacgacttccacatcgcttaatttctttattaaacttttcacctattctcttctaaaggacagactacagcgtcagatggtaaaaatgttttccgcgccttgtcttgccgtacggaaaccgccggcctgggaggacaagccgagttcttgttttgccgagagcaaaactctaggctcccacttccttctcccagtccgtgcgtttccttgcagagccccagagcgtctgattcactgaaatagcatcacttgctgaaccaaaccttttttcccgctcgcggaaagagtggagcttttttcttttgtctaagggtgtttgcttttttttttttctttcactcggcaccacagtttttctaaatcactgggaatgtgagtcaccgctaacagcaggagacctttggcggcacccggctgtggggcgcgctcgcagcggggagcccaccctgattgtctaggggatccggcactgaagttgggagaggttgcagtcaggccaggctgggtttcagggaaagggcacagggatccagcgcaccaggcgaccgtctggatctctttcctagcagccagccgcgcac

SEQ ID NO: 385813 - DNA, 151 bp, Homo sapiens
agagcttaaaaatagtgaagtctttataagtaatttttaaaaatttaaactaggaccataaatttctaaactatgagataaatgaacaagaaaacaaacaggtgtttaggaaaaggtatgtatatggtcaatgaaataaatacaactgtat

SEQ ID NO: 385814 - DNA, 687 bp, Homo sapiens
tggctggaaattcagcccatattgaggcccttctcattcctgcaggtgttaccagcaactcagaggtttatggagtaacgaaattggggagggcctcacatccggctgctgtttttccccctaacgtgtatggtgcttattctgagccagacacttttaagaactgcacattattaaccattttaaatcgtccccaccacctgatgaaataggtactgttatccccactttatgggtggggaaaccgaggcccagggaggtcaagtaactgcgcaaagcacaaaactgttgagtagtagtgttaccagggcagtcctggagaaatcgctcagagggcaaaactgagagctcattattttcttaaacagtagacagctgaaaatgctcattgttttttaaaccgttttgtttgtttgattttttttcctagtctctttatctataggtaacccagcttaaaacaactgcggttggcccgggatcctcactgccctttgccaagtaccagagaaagataaggcctactaggaaccagagaaaaccagaaccagccaccccttgttacttttagatcattaatacatcattatatgctcaactcccgacccgtagaagagaatcgccgccattttctgatagtgcattgtatgaagaggcatgtttatgaaatgcacctgtgcgtctaga

SEQ ID NO: 385815 - DNA, 181 bp, Homo sapiens
ggcaggcaggtaccagaggactgaggaggccatcatagagggcagaagggcagagggagccttggggcagctgtgacaggcaaggcaccttctgtcccccaccacggggcctgggcagaaaggcaagaagaggagcgcagatggacagatagacagacggtgttgagagaagatgggaggg

SEQ ID NO: 385816 - DNA, 461 bp, Homo sapiens
cgcttcccgggttcaaacgattctcctgcctcagcctcccgagtaattgggattacaggcacacaccaccatgcctggctaatttttgcatttttaatagagatggggtttcaccatattggccaggctgttctcaaactcctgacctcaggtgattcacctgtctctgcctcccaaagtgctgggattacaggcatgagtcactgcacctggccaaattcgtcttttttaaagcatacacttctgtggtttttagcgtattcacattgctgtacaaccatcacgactataaaatttttctagaacatttttgtcaccctgtaaagaaactccgtattcattaccatttattcttcatgtctcctcccctaacctctggctgctaccaatgtgcttatccatctctatgaatttgcctattctggacatctcatatgaatggaatcatataatatgtagcc

SEQ ID NO: 385817 - DNA, 203 bp, Homo sapiens
gagatccatcatttttcttctagtaaaataagaagaaaattatgtaagccagagaaaaatagagctcaaagttgaaatatgactgtgactaatgttaatgtgctgctctttctttctaaaattatagaaacatggacaatacttagaaacaactggtaatattctttgccctttgaaaatttccatctgaagaggtggaaatt

SEQ ID NO: 385818 - DNA, 1966 bp, Homo sapiens
ttgatgatcttgaagtcacaagaaaaaagctggttgatgattgccatcattttagactggaagagcctaatttctccctggcaagtagtaactctaaagatatcgagagctgtgcccaaatttgggccttttatgaagagtttcaacaaggatttcaggaaatggccaatgaagactggatcacttttcggactaagacatacctgtttgaggaatttttgatgaactggcatgtcagattaaggaaggttgaagaacattcagtgatgacagtgaaattacaatcagaggttgacaaatataaaatcgtaattcctatcttgaaatatgtgagaggggagcatctttctccagatcactggcttgacctttttcgtctccttggacttcctagggggactagtctagagaaactactgtttggtgatttgctcagagtagctgatacaattgtagccaaagctgccgaccttaaagatttaaatagtcgggcacaaggtgaagttacaatcagagaagctttacgtgaacttgatctttggggagttggagcagtgtttacattaattgattatgaagacagccaaagtcgaactatgaagctgattaaagactggaaagatatagtaaatcaggttggagataatagatgccttctccaatccttaaaggattctccttattataaaggatttgaagataaagtatcaatttgggaaagaaaacttgcagagttagatgaatacctgcagaatttaaatcatattcagagaaagtgggtgtatttggaacccattttcggccgtggagcattgccaaaagaacagacacgcttcaacagagttgatgaagattttagatcaataatgactgatatcaagaaagacaatagagtcacaacattaactactcatgctggaataagaaattctctactaacaatacttgatcagcttcaaagatgtcagagatcattaaatgaatttttggaggaaaaacgctcagcattcccaagattttattttattggtgatgatgacttattagaaatattgggccagtctaccaacccatcagtgattcagtctcacctgaagaagctttttgctggtattaacagtgtttgctttgatgagaaatcaaaacatataactgcaatgaaatctttagagggagaagttgtaccttttaaaaataaagttcctctatcaaataatgtagagacatggttgaatgatttggccttagaaatgaagaaaactttggaacagttgttgaaggaatgtgttactactgggcgaagttctcaaggtgcagttgacccatctctgttcccttcacagattttatgcttggcggagcagattaaattcactgaagatgtagaaaatgctattaaagatcatagtcttcatcagattgaaacacaactggtgaataagttagagcaatatactaacattgatacaagttctgaggatccagggaatactgaatcgggcatcctggagcttaaacttaaagccctaattcttgacattatccataatattgatgtggtaaagcagttaaaccaaattcaggttcatacaactgaagactgggcttggaaaaaacaacttagattctatatgaaaagtgatcatacatgttgtgttcaaatggtggattctgaatttcagtatacttatgaatatcagggtaatgcttccaaactggtttatactccactgacagacaagtgctacttaactctcactcaagccatgaagatgggacttggaggaaatccttatggaccagctggaactgggaaaacggaatcagtaaaggctttaggtggacttcttggaagacaagttttagtctttaattgtgatgagggcatcgatgtgaagtcaatgggacgaatatttgttggtttggtgaagtgtggggcctggggttgcttcgacgaattcaaccg

SEQ ID NO: 385819 - DNA, 384 bp, Homo sapiens
atattccccattacttcagcattgcaaatttgagtattacatttcagcttttaggctgcatgtgagaccatgtccagatgttcatccagacccacagcatggcagaggccttgttgttcactggcagtctccatcagaccttccgtcccaggatgttctttggaggatcttcaaaggcaaccttcctgtggctgcttctccgtgtttgcagtttgaaaatggactagaaccactagcacaagacagcggttatcttgaatgtccatagcaaagatattagtatcttaaatgtttaaattattatcctttacaatgttgccttttctaagtttgtattatttatacttctaacaccattacagtttaaacctgcagtaagacctt

SEQ ID NO: 385820 - DNA, 2864 bp, Homo sapiens
caaaagggaactttatatggaaaagcttcaagaacatttaatcaaagcaaaagcctttaccataaagaagacgctggagatctatgtgcccatcaaacagttcttttacaacctcatccacccggagtatagcgccgtgactgacgtgtatgtactcatgttcctggctgacactgtggacttcatcatcattgtcttcggcttttgggcctttgggaaacactcagcagctgcagacatcacctcttcactgtcagaggaccaggtcccggggccgtttttggtgatggtcctcattcagtttggaaccatggtggtggaccgagccctctacctcaggaagactgtactgggaaaggtcatcttccaggtcattcttgtgttcggaattcacttctggatgttcttcatcttacctggtgtgactgagaggaaattcagccagaacctggttgcccagctttggtactttgtgaaatgtgtttacttcgggttgtctgcttaccagatccgttgtggctacccaacgcgagtcctggggaacttcctcaccaagagctacaattacgtcaacctcttcttattccaagggtttcgcctcgtgccctttttgactgagctgagggcagtgatggactgggtgtggacggacacaactttgagcctgtccagctggatctgtgtggaggacatctatgctcacatattcatcctgaagtgttggcgggagtcggagaagcctattttcacaatgagtgcccaacaaagccagttgaaagttatggaccagcagagctttaacaaatttatacaagctttttctagggacaccggtgctatgcaatttctggaaaattatgaaaaagaagacataacagtagcagaactggaaggaaactcaaattctttgtggaccatcagcccacccaaaacttaagtctgggtgcaaaatcggaaatagcaacagataagctttcttttcctcttaaaaatattactcgaaagaatatcgctaaaatgatagcaggcaacagcacagaaagttcaaaaacaccagtgaccatagaaaagatttatccatattatgtgaaagcacctagtgattctaactcaaaacctataaagcaacttttatctgaaaataatttcatggatattaccatcattttgtccagagacaatacaactaaatataacagtgagtggtgggttctcaacctgactggaaacagaatatacaatccgaactctcaggccctggaactggtggtcttcaatgacaaagtcagtcccccaagtctggggttcctggctggctatggtattatgggattatatgcttcagttgtccttgtgattgggaaatttgtccgtgaattcttcagtgggatttctcactccatcatgtttgaagagcttccaaatgtggatcgaattttgaagttgtgcacagatatttttttagttcgagagacaggagaactggagctagaagaagatctctatgccaaattaatattcctatatcgctcaccagagacaatgatcaaatggactagagaaaaaacaaattgaaaccttagaacacagactgcaaataatgttaacatttgaattttttttaaaagcacaatattctcataagagctaagcatttctagttcgacggaaatggtttgtttctcttctgataggtagacaaaaggagctgatatccttctgcagtaaaagctaccttgcaagttaaggcactgttgaaaatgttatttgtaactccatttctctgaaatcagggctacttgctttatgttttagtcaacagtgtctcgcattctgattgatcatgtgaaggaatcatttatgggccccgtccctaagagaaacagaagaggagtcagaaagaaagatgcctgtgttttcctctgtggggcccgtgcacttcctggagagatgctacaatgcaatatacagcgctccatccccactggggaagctgctgtgatgagactagatgagccttcaacacactcagaaaatgcaacagcaatagggggcagacagctcctacctgtgtttctaggagcaaaagagagggaactaattgcccgtgaagacgccagtggaaggatcagcctcattctaagcaaaaacatagtattagtgatactcttactgccttatcttaaccaaggactaataggatacctttccattaaacaccagtgacttctcaggaaaaaaaaaaaaaaggagcaaaacaaatgatgtgtacacctgctttgttatggtccaccagtgaccagcttcaatgaggggaaccattctggagggctgcggtctcctgtgcaaacagacatgaggcagaagagtaaaaagaccaacccagtgggacctagaatactttgtaactctttaataactgaggtcaggaccgctcttctgccttccccttcccttaacgtgctttttcccatttccatgatttaaggcaatggttttcccagtatgtgacattttccttcctgtttttcaggtatatcaaagagtttacatattccaattcacatttttacatctgagacgggttttttaagttcataattatgaaagaaatatgtatattgagcttggggaaataaaaatggccttttcttaaattattattattggtaatacaacctcttcattaaataacaatgtagcatgaaaaatttatgattgaaatgtagttttcattccatattaagatacagtttctgagaagaatcattgaatggactagaatatgtcaaaaattgatcctgtgtagtttgggttcagggctgacttaaaataaagcacatcctgcaaagtcattttaagaa

SEQ ID NO: 385821 - DNA, 1514 bp, Homo sapiens
caaaagggaactttatatggaaaagcttcaagaacatttaatcaaagcaaaagcctttaccataaagaagacgctggagatctatgtgcccatcaaacagttcttttacaacctcatccacccggagtatagcgccgtgactgacgtgtatgtactcatgttcctggctgacactgtggacttcatcatcattgtcttcggcttttgggcctttgggaaacactcagcagctgcagacatcacctcttcactgtcagaggaccaggtcccggggccgtttttggtgatggtcctcattcagtttggaaccatggtggtggaccgagccctctacctcaggaagactgtactgggaaaggtcatcttccaggtcattcttgtgttcggaattcacttctggatgttcttcatcttacctggtgtgactgagaggaaattcagccagaacctggttgcccagctttggtactttgtgaaatgtgtttacttcgggttgtctgcttaccagatccgttgtggctacccaacgcgagtcctggggaacttcctcaccaagagctacaattacgtcaacctcttcttattccaagggtttcgcctcgtgccctttttgactgagctgagggcagtgatggactgggtgtggacggacacaactttgagcctgtccagctggatctgtgtggaggacatctatgctcacatattcatcctgaagtgttggcgggagtcggagaagcctattttcacaatgagtgcccaacaaagccagttgaaagttatggaccagcagagctttaacaaatttatacaagctttttctagggacaccggtgctatgcaatttctggaaaattatgaaaaagaagacataacagtagcagaactggaaggaaactcaaattctttgtggaccatcagcccacccagtaagcagaaaatgatacacgaactcctggaccccaatagtagcttctctgttgttttttcatggagtattcagagaaacttaagtctgggtgcaaaatcggaaatagcaacagataagctttcttttcctcttaaaaatattactcgaaagaatatcgctaaaatgatagcaggcaacagcacagaaagttcaaaaacaccagtgtaagtgtattttttcctactaatagagctttgttaggtatatgcagctggtacaaaatgtccatctacagattcatgtgtatgaggaatgcaacttcattctttggtaacacaaagttaatttctatttggaggccccattttgcaagattaaagaaacttaatctcagctatggagttttctgtccactgtccccagggttatgtctatgttccaaatgagggtttgggccaggcatggtggctcatgcctgtaatcccagcatgttgggaggctgagacaggtggatcccctgaggtcgggagttcaagaccagcctgaccaacatggtgaaaccctgtctctactgaaaatacaaagattagctaagcgtggtggt

SEQ ID NO: 385822 - DNA, 2311 bp, Homo sapiens
caaaagggaactttatatggaaaagcttcaagaacatttaatcaaagcaaaagcctttaccataaagaagacgctggagatctatgtgcccatcaaacagttcttttacaacctcatccacccggagtatagcgccgtgactgacgtgtatgtactcatgttcctggctgacactgtggacttcatcatcattgtcttcggcttttgggcctttgggaaacactcagcagctgcagacatcacctcttcactgtcagaggaccaggtcccggggccgtttttggtgatggtcctcattcagtttggaaccatggtggtggaccgagccctctacctcaggaagactgtactgggaaaggtcatcttccaggtcattcttgtgttcggaattcacttctggatgttcttcatcttacctggtgtgactgagaggaaattcagccagaacctggttgcccagctttggtactttgtgaaatgtgtttacttcgggttgtctgcttaccagatccgttgtggctacccaacgcgagtcctggggaacttcctcaccaagagctacaattacgtcaacctcttcttattccaagggtttcgcctcgtgccctttttgactgagctgagggcagtgatggactgggtgtggacggacacaactttgagcctgtccagctggatctgtgtggaggacatctatgctcacatattcatcctgaagtgttggcgggagtcggagaagcctattttcacaatgagtgcccaacaaagccagttgaaagttatggaccagcagagctttaacaaatttatacaagctttttctagggacaccggtgctatgcaatttctggaaaattatgaaaaagaagacataacagtagcagaactggaaggaaactcaaattctttgtggaccatcagcccacccagtaagcagaaaatgatacacgaactcctggaccccaatagtagcttctctgttgttttttcatggagtattcagagaaacttaagtctgggtgcaaaatcggaaatagcaacagataagctttcttttcctcttaaaaatattactcgaaagaatatcgctaaaatgatagcaggcaacagcacagaaagttcaaaaacaccagtgaccatagaaaagatttatccatattatgtgaaagcacctagtgattctaactcaaaacctataaagcaacttttatctgaaaataatttcatggatattaccatcattttgtccagagacaatacaactaaatataacagtgagtggtgggttctcaacctgactggaaacagaatatacaatccgaactctcaggccctggaactggtggtcttcaatgacaaagtcagtcccccaagtctggggttcctggctggctatggtattatgggattatatgcttcagttgtccttgtgattgggaaatttgtccgtgaattcttcagtgggatttctcactccatcatgtttgaagagcttccaaatgtggatcgaattttgaagttgtgcacagatatttttttagttcgagagacaggagaactggagctagaagaagatctctatgccaaattaatattcctatatcgctcaccagagacaatgatcaaatggactagagaaaaaacaaattgaaaccttagaacacagactgcaaataatgttaacatttgaattttttttaaaagcacaatattctcataagagctaagcatttctagttcgacggaaatggtttgtttctcttctgataggtagacaaaaggagctgatatccttctgcagtaaaagctaccttgcaagttaaggcactgttgaaaatgttatttgtaactccatttctctgaaatcagggctacttgctttatgttttagtcaacagtgtctcgcattctgattgatcatgtgaaggaatcatttatgggccccgtccctaagagaaacagaagaggagtcagaaagaaagatgcctgtgttttcctctgtggggcccgtgcacttcctggagagatgctacaatgcaatatacagcgctccatccccactggggaagctgctgtgatgagactagatgagccttcaacacactcagaaaatgcaacagcaatagggggcagacagctcctacctgtgtttctaggagcaaaagagagggaactaattgcccgtgaagacgccagtggaaggatcagcctcattctaagcaaaaacatagtattagtgatactcttactgccttatcttaaccaaggactaataggatacctttccattaaacaccagtgacttctcagg

SEQ ID NO: 385823 - DNA, 1735 bp, Homo sapiens
caaaagggaactttatatggaaaagcttcaagaacatttaatcaaagcaaaagcctttaccataaagaagacgctggagatctatgtgcccatcaaacagttcttttacaacctcatccacccggagtatagcgccgtgactgacgtgtatgtactcatgttcctggctgacactgtggacttcatcatcattgtcttcggcttttgggcctttgggaaacactcagcagctgcagacatcacctcttcactgtcagaggaccaggtcccggggccgtttttggtgatggtcctcattcagtttggaaccatggtggtggaccgagccctctacctcaggaagactgtactgggaaaggtcatcttccaggtcattcttgtgttcggaattcacttctggatgttcttcatcttacctggtgtgactgagaggaaattcagccagaacctggttgcccagctttggtactttgtgaaatgtgtttacttcgggttgtctgcttaccagatccgttgtggctacccaacgcgagtcctggggaacttcctcaccaagagctacaattacgtcaacctcttcttattccaagggtttcgcctcgtgccctttttgactgagctgagggcagtgatggactgggtgtggacggacacaactttgagcctgtccagctggatctgtgtggaggacatctatgctcacatattcatcctgaagtgttggcgggagtcggagaagcctattttcacaatgagtgcccaacaaagccagttgaaagttatggaccagcagagctttaacaaatttatacaagctttttctagggacaccggtgctatgcaatttctggaaaattatgaaaaagaagacataacagtagcagaactggaaggaaactcaaattctttgtggaccatcagcccacccagtaagcagaaaatgatacacgaactcctggaccccaatagtagcttctctgttgttttttcatggagtattcagagaaacttaagtctgggtgcaaaatcggaaatagcaacagataagctttcttttcctcttaaaaatattactcgaaagaatatcgctaaaatgatagcaggcaacagcacagaaagttcaaaaacaccagtgaccatagaaaagatttatccatattatgtgaaagcacctagtgattctaactcaaaacctataaagcaacttttatctgaaaataatttcatggatattaccatcattttgtccagagacaatacaactaaatataacagtgagtggtgggttctcaacctgactggaaacagaatatacaatccgaactctcaggccctggaactggtggtcttcaatgacaaagtcagtcccccaagtctggggttcctggctggctatggcttttaggctgcatgtgagaccatgtccagatgttcatccagacccacagcatggcagaggccttgttgttcactggcagtctccatcagaccttccgtcccaggatgttctttggaggatcttcaaaggcaaccttcctgtggctgcttctccgtgtttgcagtttgaaaatggactagaaccactagcacaagacagcggttatcttgaatgtccatagcaaagatattagtatcttaaatgtttaaattattatcctttacaatgttgccttttctaagtttgtattatttatacttctaacaccattacagtttaaacctgcagtaagacctt

SEQ ID NO: 385824 - DNA, 236 bp, Homo sapiens
gtatgacgtactcttcatgtctctatctctttctgtttttctctgatcttagttatttcttgtattctgatagcatttgaatttgggtgctccatcccccacctccagccggacctccagccaggcttccctggcccctcacccccttgggtcgccagggaccacctcgttcttcatggtggctaaaccaggcccatgggcgcccaccctgccccagggggaagctctggcgggcg

SEQ ID NO: 385825 - DNA, 350 bp, Homo sapiens
aatggctgagatagagaggtccagaatgctgaaaggtgggaagttagccaaaaaggttgctgatgaaataaggatttaatagacatctgaaggaaatcgggaagggaggaagaaggcaggaggaagagcgttaagacctcagagcaggaagcttgacaaggatgagtaaagtggtatctcagaaaaatacttggtctttgtccctccttgatcactgagacagagctcttaagccccttggaatttcctgggtgacaggggcaacaccttttgttctaagggggccacttttttttttttttttttgagacaagagtttcacttttgtcacccaggctggagcacaatgg

SEQ ID NO: 385826 - DNA, 871 bp, Homo sapiens
caacaacggaacccaggggacaggactgcatcaactacaaccagacggcgtagacggggcacacggccctcggcaaatcagaggtgctcagtgaccacagccaccatgacagcagggcggggcggggggcaaggaagcagcgctgggagacttggagacaccccaaaaaacgccttcctcagaaacactgctgtgcaagaacctgcaaatccctaaggcgtctgtgtccgatggccccggccccatgctctgaggtcgcgcaggtgtccaaggccaggaggggcaccgaggagacgaagaagaaacagcacagcagctggggaggtaggaacagcagagtctgagtcaccaaagcccggggctgccactctccagggcgccccactcccagctccagcggctgagtccaccaagccaggacaggcccaaggaccagagggcgaggtgattcacagtggagctcggaaagacccatccatgcccagcgccttgtcaaaaaccacaggggtcttggtgacaagcaattgagggaggccaacatggcagagccagggctgcaaaatcggctggaataagcatcagacctgctagaagggttttctgtgcctgttttcggtgagcacagaacaactgaaggaagcgcgggacagacacaagggcgggcctcggtgccacggctggccttgggcagagggaaatgctttgtgtactttctctgggaagcagcatgccccagcgcggcctcggcgtcctctgccgccaactgctccgtgaccgctgggcgtgtgtgcggggacatgggagcaacttcacagtggtgggaagtttctctcctaaaacgaaagcttctctatactacagattggcccca

SEQ ID NO: 385827 - DNA, 577 bp, Homo sapiens
ctatgcatataatccacaaacatttacccctatcaatatgtaagctatttcgtattgataggaccagctcggaaaaaaggataccaggagcctttacagatgttattctcaacttactttctttttttttctttttgtttttcttttctttttttttttttttttttgagacaaagtctcactcttgtcccccaggctggagtgccatggtgcgatcaagggtcactgcaacctttgcctcccaggttgaagcatttctcctgcctcagcctccctagtagctgggattacaggcacccgccaccactcccagctaatttttgtatttttagtagagacggggtttcaccatgttggccatgctggttttgaacccttgacctcaggtgatctgcccacctcggcctcccaaagtgctgggattacaggcatgagccaccatgcccagccgttaactcaactttctatgcacagatccaaaagaccaaaagacttgaaaaagaataaaaggcacttttaagtactaaatgctttctacttgcaagactaactgctttacaagcatgattcatttaat

SEQ ID NO: 385828 - DNA, 336 bp, Homo sapiens
tcggctcactacaacctccacctcctgggttcaagtgattctcctgcctcagcttcccgagtagctgggattacaggcgtgtgccaccacgcctgcctaattttatattttattagagatgaggtttctccatgttagtcaagctggtctcaaactcctgatctcagctgatccactctccttggcctcccaatgtgctgggaatacacgcgtgagccaccgtgctcagcccaaaatcttttattaccagactagccaggacagccaatatttctggcttttgaattctaccacaggtaacctcccatgtgaaattaatacattttaactaaggtc

SEQ ID NO: 385829 - DNA, 514 bp, Homo sapiens
aactgctgcggtcacctctagacggatcccggagtgacgagacgcgcttgctactcgtgctcatagaccggtctaaccttggcctcccaaagtgctgggattacaggcgtgagccaccgtgcctggcctgtccctgggtacttgagattagggagtggtggtgactcttaacgagcatgctgccttcaagcatctgtttaacaaagcacatcttgcacagcccttaatccatttaaccctgagttgacacagcacatgtttcagagagcacggggttgggggtaaggttacagattaacagcatctcaaggcagaagaatttttcttagtacaaaacaaaatggagtctcctatgtctacttctttctacacagacacagcaacaatctgatctctctttcttttccccacactggactaacacactgctaatctcccaacaattcactaaacttgatgcaaatcaatcccaaataactaagtttctgccagcttttttttttaaattttttta

SEQ ID NO: 385830 - DNA, 4327 bp, Homo sapiens
ctccgggtagtccccacagctgcgccggtgactgaggggccgggcagtggagaagtggtggcggcgggcggcgggcggcaaaggagcagccatgagggccgggcccagtcaccgacctgtgagccactgccccatgttgtgttgatgccaatctgccatgctagcctgtctaccagggccaggtgacctgtcctttcagcttctttctcacacgcagatgaacactggacttcagaaatgggacactacacagaaaatgagaactgctcactatcctaccccagccgaattggatgcgtatgctaagaaggtcgcaaacaacccactgactataaaaatcttccccaacagtgtgaaggttccccagcggaaacacgttcgtcgtactgtgaacggcctcgacacatcagcccagcgctacagcccctacccgacacaggctgccaccaaggcaggcctgcttgccattgtcaaagtgccagccaaaagcatactcaaggactttgacggcacccgagcccggttgctccctgaggccatcatgaaccccccagtggcaccctatgctactgtggcacccagcactttagcccacccccaggcccaggctctggcccgccagcaggccctgcagcatgcacagaccctggcccatgcccctccccagacgctgcagcaccctcagggtatcccgccaccccaggcactgtcccaccctcagagcctccagcagcctcagggcctgggccaccctcagcccatggcccaaacccagggcttggtccaccctcaggccctggctcaccagggtctccagcacccccacaatcccttgctgcatggaggccggaagatgccagactcagatgcccccccgaatgtgaccgtgtctacctcaactatccccctttcaatggcggccactctgcagcacagccagcctccggacctgagtagcatcgtgcaccagatcaaccagttttgccagacgagggcaggcatcagcactacctcagtgtgtgagggccagatcgccaaccccagccccattagtcgcagtctgctcatcaatgcaagcacccgggtgtcgacccacagcgtccccacaccaatgccttcatgtgtggtcaatcccatggagcacacccacgcggccaccgccgcgttgcctgctgcaggtcctgtcaacctgcccacaggcatctctcgcgtccccactggctaccctagcgacctcaagccagtcacctggaaccagcaccagctggcccacctacagcagatgtgcagcgaggctagtgggacgccagcccctggcctgacaggcaagcatgcggcaggacgcgagttggcagggcctggctttgtgggcaaggcccctgcctacccgcaggaactctgcctggcgcagtccttccatctgaagccacccctggaaaagccgaccccatccccaccagtcaacggcatggcagccccattggcctaccccaatggtcactacttccaacccctgtggaacaacattctgcccactcccaatagcgacagctcggggtctcaggaccttgccatgccgttccacggtgggcagcccacaggtgcacccctcgactgtgcggcagctcccggggcccactaccgagcagggaccgggggcggtccagtggcaagccagaacagcttgatgcaaacagtggattacctaagtggggatttccaacaggcctgcttccgagaacagagcctggccatgctgagcaaggcccaccgagcccctggcaaccgagcccccgatcccacagagagtcgaagtcttcatattcagcacccagggtatagataggtagccctgctgccctccacgtgcaacacatcatacatcaccctcctaggtttagtcttttaagtaactggatagtttcaaagtttcactgctccagtgtgatcattcttagatgtctaagaaagggaatttggtgggatctaagtggggacagaaggggtcctctcgtcctcccctccagcaacttttggttttatgttagaacctaaccctaagcccaggcttttctctccactgactgcctgtcagctagtctctccaccttggccatttccagccagctcccacccatcttttcttgaatctcttcctgtttcccttaggacgactgaggtgtgggctgacggaatgccctagttgaggtagtataggtgctcaggcccctaatccagacctctacctgttgctaccccccttcccctccctccaggactaagaagcaagatttcccaggtgctctgaaagctaattacttactcatcgaaggatctcaaatcaaagctgacccagtcttcatatccttcaagttcctttccattcctcaaggctttgttttgtgtctatattgatcccacagccactgcacttgcccttgccacacttgatctcaagggcatcttggaagtatttgaccatttcttgagatatggggggaaaaagtctttgtattggcatcttggttccagactcccctttccaaacctagaaaaatacagtgacctttgagcatacccaagatccctttctcactgttgcctgtcccctaactcacctccccacagcccctatcctttccccctcaacaaaaacaaaatctaccttacttgaggaattaggtaggtaaggaatgatcacattggagtttgggattaaaaacaccaaaaaaaaaaaaatgcatttggttctctctacactggctaagaatattgctctacactgtaagttttaaacgttacgtttctgtatgaatgtagtgtgggtttgagtagcattgtgtgtgagtggccccacaggtacattcaccctctagtgcagcccctcagtttaatgaaggaaaaaaaaacaaacacaaagccttaagctctttgagtacttcctttaccaaatgagcatggttctaacacctggagctgggcctacattggaaacaagcccctcctgccctctgtccattcttagagcataccttcatccactccatgctcagcacgtctcatcccaagcgacaattagttggctagaaacacttttctgtaattttaaacttagactgttttgttacaaatttttgcaccattctgttaaagatgcagaattgggcttttttattttttacagatgaaataagcccttacctttcctcttgtctctggggaatgtcagctgatggttcttatttaaggttttgcattttgttcactatccactactgttcgttagccagaaattctctagtgatctgaagcaatgtgactgaagaccagttttaagttatgtgttggcaagttgccttatatttaaaaggaaaaagaaaaaaaaaaaagcctgattgtgttatgccaaatgatagcaacatgaagtcctaatttattgttcccaattgttttcctgccgtctgtgaacactggtacctccctgtcctgatcccccaggagcacctgtagcttctgactcaatgccttctccgaaggtgttggccgccatctcacccagggccctcttccagttcctgcttttctgagtcagatttaaagagcaccactgtcttccccctaccccttgcttgatctccaaagcagatattcttgctgtatttttttttcctccccaatacctctccctgaaaggtgagctgctattttaggaaactggaccagacaccaacttgggggctttaagtcaaacaacctcaaacccatctcttcctgtgtaggggtgcaagcctctgaagctctcactcccacccttagtctgcatggaaaatgtactgtgatccccctgcccccaactgccctcgcctttggtgtgagatgttccttctttcggagttcagcctgagtccctctcccctctgccagccaacccccagccagcaataagggtccaagccagggcctcctctccacactccctgtctccatcctacactaccctagggaatacctggattccccattctatccacatactgtagcattcattctccatctctctcacctcacctgtggtggtttatgggtgtgatggggtttttaagattattataaaccagtaaaaataagaaaacctcaaaaaaaaaaaaaaaatctaaaaaaaacctggcggccggccttggccagtcactttagactcgagcaggcttatgatgccggccgaattgagctaattggcccaatcgccctaagggaggcggttaaaataactgcccgcgtttaaaaacgcgggactggaaaccccggggtcccaactaatagcttgtag

SEQ ID NO: 385831 - DNA, 4528 bp, Homo sapiens
caagtgtgagccaccgtgcccagcgaccctgaatttctgtgtagggggagaactctcggttacctctctgagaattggccaaattctggttctgcaagatatgagactttgaaagatgctttgctgttctgatctctacttacctcatttataaaatgtaaatgatgatagtgcctgcttctacagcaatagtgaggattcattgagatggcctgtcatctggcagaaggcctggcccactataagcacttactgaacattagcagtgcttgttaatgtgaagactgaagctgggtctcgaatgaaggctacagatgacaatctagtcatttccccaccccaccccaggccctcaaaaggggaatctggaagggctgtttgccttggcactgatgagctccctctccctctttgctctccttcccattctctctctctaggggacactacacagaaaatgagaactgctcactatcctaccccagccgaattggatgcgtatgctaagaaggtcgcaaacaacccactgactataaaaatcttccccaacagtgtgaaggttccccagcggaaacacgttcgtcgtactgtgaacggcctcgacacatcagcccagcgctacagcccctacccgacacaggctgccaccaaggcaggcctgcttgccattgtcaaagtgccagccaaaagcatactcaaggactttgacggcacccgagcccggttgctccctgaggccatcatgaaccccccagtggcaccctatgctactgtggcacccagcactttagcccacccccaggcccaggctctggcccgccagcaggccctgcagcatgcacagaccctggcccatgcccctccccagacgctgcagcaccctcagggtatcccgccaccccaggcactgtcccaccctcagagcctccagcagcctcagggcctgggccaccctcagcccatggcccaaacccagggcttggtccaccctcaggccctggctcaccagggtctccagcacccccacaatcccttgctgcatggaggccggaagatgccagactcagatgcccccccgaatgtgaccgtgtctacctcaactatccccctttcaatggcggccactctgcagcacagccagcctccggacctgagtagcatcgtgcaccagatcaaccagttttgccagacgagggcaggcatcagcactacctcagtgtgtgagggccagatcgccaaccccagccccattagtcgcagtctgctcatcaatgcaagcacccgggtgtcgacccacagcgtccccacaccaatgccttcatgtgtggtcaatcccatggagcacacccacgcggccaccgccgcgttgcctgctgcaggtcctgtcaacctgcccacaggcatctctcgcgtccccactggctaccctagcgacctcaagccagtcacctggaaccagcaccagctggcccacctacagcagatgtgcagcgaggctagtgggacgccagcccctggcctgacaggcaagcatgcggcaggacgcgagttggcagggcctggctttgtgggcaaggcccctgcctacccgcaggaactctgcctggcgcagtccttccatctgaagccacccctggaaaagccgaccccatccccaccagtcaacggcatggcagccccattggcctaccccaatggtcactacttccaacccctgtggaacaacattctgcccactcccaatagcgacagctcggggtctcaggaccttgccatgccgttccacggtgggcagcccacaggtgcacccctcgactgtgcggcagctcccggggcccactaccgagcagggaccgggggcggtccagtggcaagccagaacagcttgatgcaaacagtggattacctaagtggggatttccaacaggcctgcttccgagaacagagcctggccatgctgagcaaggcccaccgagcccctggcaaccgagcccccgatcccacagagagtcgaagtcttcatattcagcacccagggtatagataggtagccctgctgccctccacgtgcaacacatcatacatcaccctcctaggtttagtcttttaagtaactggatagtttcaaagtttcactgctccagtgtgatcattcttagatgtctaagaaagggaatttggtgggatctaagtggggacagaaggggtcctctcgtcctcccctccagcaacttttggttttatgttagaacctaaccctaagcccaggcttttctctccactgactgcctgtcagctagtctctccaccttggccatttccagccagctcccacccatcttttcttgaatctcttcctgtttcccttaggacgactgaggtgtgggctgacggaatgccctagttgaggtagtataggtgctcaggcccctaatccagacctctacctgttgctaccccccttcccctccctccaggactaagaagcaagatttcccaggtgctctgaaagctaattacttactcatcgaaggatctcaaatcaaagctgacccagtcttcatatccttcaagttcctttccattcctcaaggctttgttttgtgtctatattgatcccacagccactgcacttgcccttgccacacttgatctcaagggcatcttggaagtatttgaccatttcttgagatatggggggaaaaagtctttgtattggcatcttggttccagactcccctttccaaacctagaaaaatacagtgacctttgagcatacccaagatccctttctcactgttgcctgtcccctaactcacctccccacagcccctatcctttccccctcaacaaaaacaaaatctaccttacttgaggaattaggtaggtaaggaatgatcacattggagtttgggattaaaaacaccaaaaaaaaaaaaatgcatttggttctctctacactggctaagaatattgctctacactgtaagttttaaacgttacgtttctgtatgaatgtagtgtgggtttgagtagcattgtgtgtgagtggccccacaggtacattcaccctctagtgcagcccctcagtttaatgaaggaaaaaaaaacaaacacaaagccttaagctctttgagtacttcctttaccaaatgagcatggttctaacacctggagctgggcctacattggaaacaagcccctcctgccctctgtccattcttagagcataccttcatccactccatgctcagcacgtctcatcccaagcgacaattagttggctagaaacacttttctgtaattttaaacttagactgttttgttacaaatttttgcaccattctgttaaagatgcagaattgggcttttttattttttacagatgaaataagcccttacctttcctcttgtctctggggaatgtcagctgatggttcttatttaaggttttgcattttgttcactatccactactgttcgttagccagaaattctctagtgatctgaagcaatgtgactgaagaccagttttaagttatgtgttggcaagttgccttatatttaaaaggaaaaagaaaaaaaaaaaagcctgattgtgttatgccaaatgatagcaacatgaagtcctaatttattgttcccaattgttttcctgccgtctgtgaacactggtacctccctgtcctgatcccccaggagcacctgtagcttctgactcaatgccttctccgaaggtgttggccgccatctcacccagggccctcttccagttcctgcttttctgagtcagatttaaagagcaccactgtcttccccctaccccttgcttgatctccaaagcagatattcttgctgtatttttttttcctccccaatacctctccctgaaaggtgagctgctattttaggaaactggaccagacaccaacttgggggctttaagtcaaacaacctcaaacccatctcttcctgtgtaggggtgcaagcctctgaagctctcactcccacccttagtctgcatggaaaatgtactgtgatccccctgcccccaactgccctcgcctttggtgtgagatgttccttctttcggagttcagcctgagtccctctcccctctgccagccaacccccagccagcaataagggtccaagccagggcctcctctccacactccctgtctccatcctacactaccctagggaatacctggattccccattctatccacatactgtagcattcattctccatctctctcacctcacctgtggtggtttatgggtgtgatggggtttttaagattattataaaccagtaaaaataagaaaacctcaaaaaaaaaaaaaaaatctaaaaaaaacctggcggccggccttggccagtcactttagactcgagcaggcttatgatgccggccgaattgagctaattggcccaatcgccctaagggaggcggttaaaataactgcccgcgtttaaaaacgcgggactggaaaccccggggtcccaactaatagcttgtag

SEQ ID NO: 385832 - DNA, 4215 bp, Homo sapiens
ctccgggtagtccccacagctgcgccggtgactgaggggccgggcagtggagaagtggtggcggcgggcggcgggcggcaaaggagcagccatgagggccgggcccagtcaccgacctgtgagccactgccccatgttgtgttgatgccaatctgccatgctagcctgtctaccagggccaggtgacctgtcctttcagcttctttctcacacgcagatgaacactggacttcagaaattgtgaaggttccccagcggaaacacgttcgtcgtactgtgaacggcctcgacacatcagcccagcgctacagcccctacccgacacaggctgccaccaaggcaggcctgcttgccattgtcaaagtgccagccaaaagcatactcaaggactttgacggcacccgagcccggttgctccctgaggccatcatgaaccccccagtggcaccctatgctactgtggcacccagcactttagcccacccccaggcccaggctctggcccgccagcaggccctgcagcatgcacagaccctggcccatgcccctccccagacgctgcagcaccctcagggtatcccgccaccccaggcactgtcccaccctcagagcctccagcagcctcagggcctgggccaccctcagcccatggcccaaacccagggcttggtccaccctcaggccctggctcaccagggtctccagcacccccacaatcccttgctgcatggaggccggaagatgccagactcagatgcccccccgaatgtgaccgtgtctacctcaactatccccctttcaatggcggccactctgcagcacagccagcctccggacctgagtagcatcgtgcaccagatcaaccagttttgccagacgagggcaggcatcagcactacctcagtgtgtgagggccagatcgccaaccccagccccattagtcgcagtctgctcatcaatgcaagcacccgggtgtcgacccacagcgtccccacaccaatgccttcatgtgtggtcaatcccatggagcacacccacgcggccaccgccgcgttgcctgctgcaggtcctgtcaacctgcccacaggcatctctcgcgtccccactggctaccctagcgacctcaagccagtcacctggaaccagcaccagctggcccacctacagcagatgtgcagcgaggctagtgggacgccagcccctggcctgacaggcaagcatgcggcaggacgcgagttggcagggcctggctttgtgggcaaggcccctgcctacccgcaggaactctgcctggcgcagtccttccatctgaagccacccctggaaaagccgaccccatccccaccagtcaacggcatggcagccccattggcctaccccaatggtcactacttccaacccctgtggaacaacattctgcccactcccaatagcgacagctcggggtctcaggaccttgccatgccgttccacggtgggcagcccacaggtgcacccctcgactgtgcggcagctcccggggcccactaccgagcagggaccgggggcggtccagtggcaagccagaacagcttgatgcaaacagtggattacctaagtggggatttccaacaggcctgcttccgagaacagagcctggccatgctgagcaaggcccaccgagcccctggcaaccgagcccccgatcccacagagagtcgaagtcttcatattcagcacccagggtatagataggtagccctgctgccctccacgtgcaacacatcatacatcaccctcctaggtttagtcttttaagtaactggatagtttcaaagtttcactgctccagtgtgatcattcttagatgtctaagaaagggaatttggtgggatctaagtggggacagaaggggtcctctcgtcctcccctccagcaacttttggttttatgttagaacctaaccctaagcccaggcttttctctccactgactgcctgtcagctagtctctccaccttggccatttccagccagctcccacccatcttttcttgaatctcttcctgtttcccttaggacgactgaggtgtgggctgacggaatgccctagttgaggtagtataggtgctcaggcccctaatccagacctctacctgttgctaccccccttcccctccctccaggactaagaagcaagatttcccaggtgctctgaaagctaattacttactcatcgaaggatctcaaatcaaagctgacccagtcttcatatccttcaagttcctttccattcctcaaggctttgttttgtgtctatattgatcccacagccactgcacttgcccttgccacacttgatctcaagggcatcttggaagtatttgaccatttcttgagatatggggggaaaaagtctttgtattggcatcttggttccagactcccctttccaaacctagaaaaatacagtgacctttgagcatacccaagatccctttctcactgttgcctgtcccctaactcacctccccacagcccctatcctttccccctcaacaaaaacaaaatctaccttacttgaggaattaggtaggtaaggaatgatcacattggagtttgggattaaaaacaccaaaaaaaaaaaaatgcatttggttctctctacactggctaagaatattgctctacactgtaagttttaaacgttacgtttctgtatgaatgtagtgtgggtttgagtagcattgtgtgtgagtggccccacaggtacattcaccctctagtgcagcccctcagtttaatgaaggaaaaaaaaacaaacacaaagccttaagctctttgagtacttcctttaccaaatgagcatggttctaacacctggagctgggcctacattggaaacaagcccctcctgccctctgtccattcttagagcataccttcatccactccatgctcagcacgtctcatcccaagcgacaattagttggctagaaacacttttctgtaattttaaacttagactgttttgttacaaatttttgcaccattctgttaaagatgcagaattgggcttttttattttttacagatgaaataagcccttacctttcctcttgtctctggggaatgtcagctgatggttcttatttaaggttttgcattttgttcactatccactactgttcgttagccagaaattctctagtgatctgaagcaatgtgactgaagaccagttttaagttatgtgttggcaagttgccttatatttaaaaggaaaaagaaaaaaaaaaaagcctgattgtgttatgccaaatgatagcaacatgaagtcctaatttattgttcccaattgttttcctgccgtctgtgaacactggtacctccctgtcctgatcccccaggagcacctgtagcttctgactcaatgccttctccgaaggtgttggccgccatctcacccagggccctcttccagttcctgcttttctgagtcagatttaaagagcaccactgtcttccccctaccccttgcttgatctccaaagcagatattcttgctgtatttttttttcctccccaatacctctccctgaaaggtgagctgctattttaggaaactggaccagacaccaacttgggggctttaagtcaaacaacctcaaacccatctcttcctgtgtaggggtgcaagcctctgaagctctcactcccacccttagtctgcatggaaaatgtactgtgatccccctgcccccaactgccctcgcctttggtgtgagatgttccttctttcggagttcagcctgagtccctctcccctctgccagccaacccccagccagcaataagggtccaagccagggcctcctctccacactccctgtctccatcctacactaccctagggaatacctggattccccattctatccacatactgtagcattcattctccatctctctcacctcacctgtggtggtttatgggtgtgatggggtttttaagattattataaaccagtaaaaataagaaaacctcaaaaaaaaaaaaaaaatctaaaaaaaacctggcggccggccttggccagtcactttagactcgagcaggcttatgatgccggccgaattgagctaattggcccaatcgccctaagggaggcggttaaaataactgcccgcgtttaaaaacgcgggactggaaaccccggggtcccaactaatagcttgtag

SEQ ID NO: 385833 - DNA, 3599 bp, Homo sapiens
ctccgggtagtccccacagctgcgccggtgactgaggggccgggcagtggagaagtggtggcggcgggcggcgggcggcaaaggagcagccatgagggccgggcccagtcaccgacctgtgagccactgccccatgttgtgttgatgccaatctgccatgctagcctgtctaccagggccaggtgacctgtcctttcagcttctttctcacacgcagatgaacactggacttcagaaatgggacactacacagaaaatgagaactgctcactatcctaccccagccgaattggatgcgtatgctaagaaggtcgcaaacaacccactgactataaaaatcttccccaacagtgtgaaggttccccagcggaaacacgttcgtcgtactgtgaacggcctcgacacatcagcccagcgctacagcccctacccgacacaggctgccaccaaggcaggcctgcttgccattgtcaaagtgccagccaaaagcatactcaaggactttgacggcacccgagcccggttgctccctgaggccatcatgaaccccccagtggcaccctatgctactgtggcacccagcactttagcccacccccaggcccaggctctggcccgccagcaggccctgcagcatgcacagaccctggcccatgcccctccccagacgctgcagcaccctcagggtatcccgccaccccaggcactgtcccaccctcagagcctccagcagcctcagggcctgggccaccctcagcccatggcccaaacccagggcttggtccaccctcaggccctggctcaccagggtctccagcacccccacaatcccttgctgcatggaggccggaagatgccagactcagatgcccccccgaatgtgaccgtgtctacctcaactatccccctttcaatggcggccactctgcagcacagccagcctccggacctgagtagcatcgtgcaccagatcaaccagttttgccagacgagggcaggcatcagcactacctcagtgtgtgagggccagatcgccaaccccagccccattagtcgcagtctgctcatcaatgcaagcacccgggtgtcgacccacagcgtccccacaccaatgccttcatgtgtggtcaatcccatggagcacacccacgcggccaccgccgcgttgcctgctgcaggtcctgtcaacctgcccacaggcatctctcgcgtccccactggctaccctagcgacctcaagccagtcacctggaaccagcaccagctggcccacctacagcagatgtgcagcgaggctagtgggacgccagcccctggcctgacaggcaagcatgcggcaggacgcgagttggcagggcctggctttgtgggcaaggcccctgcctacccgcaggaactctgcctggcgcagtccttccatctgaagccacccctggaaaagccgaccccatccccaccagtcaacggcatggcagccccattggcctaccccaatggtcactacttccaacccctgtggaacaacattctgcccactcccaatagcgacagctcggggtctcaggaccttgccatgccgttccacggtgggcagcccacaggtgcacccctcgactgtgcggcagctcccggggcccactaccgagcagggaccgggggcggtccagtggcaagccagaacagcttgatgcaaacagtggattacctaagtggggatttccaacaggcctgcttccgagaacagagcctggccatgctgagcaaggcccaccgagcccctggcaaccgagcccccgatcccacagagagtcgaagtcttcatattcagcacccagggtatagataggtagccctgctgccctccacgtgcaacacatcatacatcaccctcctaggtttagtcttttaagtaactggatagtttcaaagtttcactgctccagtgtgatcattcttagataaggaatgatcacattggagtttgggattaaaaacaccaaaaaaaaaaaaatgcatttggttctctctacactggctaagaatattgctctacactgtaagttttaaacgttacgtttctgtatgaatgtagtgtgggtttgagtagcattgtgtgtgagtggccccacaggtacattcaccctctagtgcagcccctcagtttaatgaaggaaaaaaaaacaaacacaaagccttaagctctttgagtacttcctttaccaaatgagcatggttctaacacctggagctgggcctacattggaaacaagcccctcctgccctctgtccattcttagagcataccttcatccactccatgctcagcacgtctcatcccaagcgacaattagttggctagaaacacttttctgtaattttaaacttagactgttttgttacaaatttttgcaccattctgttaaagatgcagaattgggcttttttattttttacagatgaaataagcccttacctttcctcttgtctctggggaatgtcagctgatggttcttatttaaggttttgcattttgttcactatccactactgttcgttagccagaaattctctagtgatctgaagcaatgtgactgaagaccagttttaagttatgtgttggcaagttgccttatatttaaaaggaaaaagaaaaaaaaaaaagcctgattgtgttatgccaaatgatagcaacatgaagtcctaatttattgttcccaattgttttcctgccgtctgtgaacactggtacctccctgtcctgatcccccaggagcacctgtagcttctgactcaatgccttctccgaaggtgttggccgccatctcacccagggccctcttccagttcctgcttttctgagtcagatttaaagagcaccactgtcttccccctaccccttgcttgatctccaaagcagatattcttgctgtatttttttttcctccccaatacctctccctgaaaggtgagctgctattttaggaaactggaccagacaccaacttgggggctttaagtcaaacaacctcaaacccatctcttcctgtgtaggggtgcaagcctctgaagctctcactcccacccttagtctgcatggaaaatgtactgtgatccccctgcccccaactgccctcgcctttggtgtgagatgttccttctttcggagttcagcctgagtccctctcccctctgccagccaacccccagccagcaataagggtccaagccagggcctcctctccacactccctgtctccatcctacactaccctagggaatacctggattccccattctatccacatactgtagcattcattctccatctctctcacctcacctgtggtggtttatgggtgtgatggggtttttaagattattataaaccagtaaaaataagaaaacctcaaaaaaaaaaaaaaaatctaaaaaaaacctggcggccggccttggccagtcactttagactcgagcaggcttatgatgccggccgaattgagctaattggcccaatcgccctaagggaggcggttaaaataactgcccgcgtttaaaaacgcgggactggaaaccccggggtcccaactaatagcttgtag

SEQ ID NO: 385834 - DNA, 1367 bp, Homo sapiens
tttccttttaaatataaggcaacttgccaacacataacttaaaactggtctctgtccattcttagagcataccttcatccactccatgctcagcacgtctcatcccaagcgacaattagttggctagaaacacttttctgtaattttaaacttagactgttttgttacaaatttttgcaccattctgttaaagatgcagaattgggcttttttattttttacagatgaaataagcccttacctttcctcttgtctctggggaatgtcagctgatggttcttatttaaggttttgcattttgttcactatccactactgttcgttagccagaaattctctagtgatctgaagcaatgtgactgaagaccagttttaagttatgtgttggcaagttgccttatatttaaaaggaaaaagaaaaaaaaaaaagcctgattgtgttatgccaaatgatagcaacatgaagtcctaatttattgttcccaattgttttcctgccgtctgtgaacactggtacctccctgtcctgatcccccaggagcacctgtagcttctgactcaatgccttctccgaaggtgttggccgccatctcacccagggccctcttccagttcctgcttttctgagtcagatttaaagagcaccactgtcttccccctaccccttgcttgatctccaaagcagatattcttgctgtatttttttttcctccccaatacctctccctgaaaggtgagctgctattttaggaaactggaccagacaccaacttgggggctttaagtcaaacaacctcaaacccatctcttcctgtgtaggggtgcaagcctctgaagctctcactcccacccttagtctgcatggaaaatgtactgtgatccccctgcccccaactgccctcgcctttggtgtgagatgttccttctttcggagttcagcctgagtccctctcccctctgccagccaacccccagccagcaataagggtccaagccagggcctcctctccacactccctgtctccatcctacactaccctagggaatacctggattccccattctatccacatactgtagcattcattctccatctctctcacctcacctgtggtggtttatgggtgtgatggggtttttaagattattataaaccagtaaaaataagaaaacctcaaaaaaaaaaaaaaaatctaaaaaaaacctggcggccggccttggccagtcactttagactcgagcaggcttatgatgccggccgaattgagctaattggcccaatcgccctaagggaggcggttaaaataactgcccgcgtttaaaaacgcgggactggaaaccccggggtcccaactaatagcttgtag

SEQ ID NO: 385835 - DNA, 1257 bp, Homo sapiens
tgcggccgccccaacatcagaatggtgcaaaaatttgtaacaaaacagtctaagtttaaaatttttgcaccattctgttaaagatgcagaattgggcttttttattttttacagatgaaataagcccttacctttcctcttgtctctggggaatgtcagctgatggttcttatttaaggttttgcattttgttcactatccactactgttcgttagccagaaattctctagtgatctgaagcaatgtgactgaagaccagttttaagttatgtgttggcaagttgccttatatttaaaaggaaaaagaaaaaaaaaaaagcctgattgtgttatgccaaatgatagcaacatgaagtcctaatttattgttcccaattgttttcctgccgtctgtgaacactggtacctccctgtcctgatcccccaggagcacctgtagcttctgactcaatgccttctccgaaggtgttggccgccatctcacccagggccctcttccagttcctgcttttctgagtcagatttaaagagcaccactgtcttccccctaccccttgcttgatctccaaagcagatattcttgctgtatttttttttcctccccaatacctctccctgaaaggtgagctgctattttaggaaactggaccagacaccaacttgggggctttaagtcaaacaacctcaaacccatctcttcctgtgtaggggtgcaagcctctgaagctctcactcccacccttagtctgcatggaaaatgtactgtgatccccctgcccccaactgccctcgcctttggtgtgagatgttccttctttcggagttcagcctgagtccctctcccctctgccagccaacccccagccagcaataagggtccaagccagggcctcctctccacactccctgtctccatcctacactaccctagggaatacctggattccccattctatccacatactgtagcattcattctccatctctctcacctcacctgtggtggtttatgggtgtgatggggtttttaagattattataaaccagtaaaaataagaaaacctcaaaaaaaaaaaaaaaatctaaaaaaaacctggcggccggccttggccagtcactttagactcgagcaggcttatgatgccggccgaattgagctaattggcccaatcgccctaagggaggcggttaaaataactgcccgcgtttaaaaacgcgggactggaaaccccggggtcccaactaatagcttgtag

SEQ ID NO: 385836 - DNA, 4361 bp, Homo sapiens
ctccgggtagtccccacagctgcgccggtgactgaggggccgggcagtggagaagtggtggcggcgggcggcgggcggcaaaggagcagccatgagggccgggcccagtcaccgaccgtgctgaggagtcatggaagagtttttaaaccagtgtgagccactgccccatgttgtgttgatgccaatctgccatgctagcctgtctaccagggccaggtgacctgtcctttcagcttctttctcacacgcagatgaacactggacttcagaaatgggacactacacagaaaatgagaactgctcactatcctaccccagccgaattggatgcgtatgctaagaaggtcgcaaacaacccactgactataaaaatcttccccaacagtgtgaaggttccccagcggaaacacgttcgtcgtactgtgaacggcctcgacacatcagcccagcgctacagcccctacccgacacaggctgccaccaaggcaggcctgcttgccattgtcaaagtgccagccaaaagcatactcaaggactttgacggcacccgagcccggttgctccctgaggccatcatgaaccccccagtggcaccctatgctactgtggcacccagcactttagcccacccccaggcccaggctctggcccgccagcaggccctgcagcatgcacagaccctggcccatgcccctccccagacgctgcagcaccctcagggtatcccgccaccccaggcactgtcccaccctcagagcctccagcagcctcagggcctgggccaccctcagcccatggcccaaacccagggcttggtccaccctcaggccctggctcaccagggtctccagcacccccacaatcccttgctgcatggaggccggaagatgccagactcagatgcccccccgaatgtgaccgtgtctacctcaactatccccctttcaatggcggccactctgcagcacagccagcctccggacctgagtagcatcgtgcaccagatcaaccagttttgccagacgagggcaggcatcagcactacctcagtgtgtgagggccagatcgccaaccccagccccattagtcgcagtctgctcatcaatgcaagcacccgggtgtcgacccacagcgtccccacaccaatgccttcatgtgtggtcaatcccatggagcacacccacgcggccaccgccgcgttgcctgctgcaggtcctgtcaacctgcccacaggcatctctcgcgtccccactggctaccctagcgacctcaagccagtcacctggaaccagcaccagctggcccacctacagcagatgtgcagcgaggctagtgggacgccagcccctggcctgacaggcaagcatgcggcaggacgcgagttggcagggcctggctttgtgggcaaggcccctgcctacccgcaggaactctgcctggcgcagtccttccatctgaagccacccctggaaaagccgaccccatccccaccagtcaacggcatggcagccccattggcctaccccaatggtcactacttccaacccctgtggaacaacattctgcccactcccaatagcgacagctcggggtctcaggaccttgccatgccgttccacggtgggcagcccacaggtgcacccctcgactgtgcggcagctcccggggcccactaccgagcagggaccgggggcggtccagtggcaagccagaacagcttgatgcaaacagtggattacctaagtggggatttccaacaggcctgcttccgagaacagagcctggccatgctgagcaaggcccaccgagcccctggcaaccgagcccccgatcccacagagagtcgaagtcttcatattcagcacccagggtatagataggtagccctgctgccctccacgtgcaacacatcatacatcaccctcctaggtttagtcttttaagtaactggatagtttcaaagtttcactgctccagtgtgatcattcttagatgtctaagaaagggaatttggtgggatctaagtggggacagaaggggtcctctcgtcctcccctccagcaacttttggttttatgttagaacctaaccctaagcccaggcttttctctccactgactgcctgtcagctagtctctccaccttggccatttccagccagctcccacccatcttttcttgaatctcttcctgtttcccttaggacgactgaggtgtgggctgacggaatgccctagttgaggtagtataggtgctcaggcccctaatccagacctctacctgttgctaccccccttcccctccctccaggactaagaagcaagatttcccaggtgctctgaaagctaattacttactcatcgaaggatctcaaatcaaagctgacccagtcttcatatccttcaagttcctttccattcctcaaggctttgttttgtgtctatattgatcccacagccactgcacttgcccttgccacacttgatctcaagggcatcttggaagtatttgaccatttcttgagatatggggggaaaaagtctttgtattggcatcttggttccagactcccctttccaaacctagaaaaatacagtgacctttgagcatacccaagatccctttctcactgttgcctgtcccctaactcacctccccacagcccctatcctttccccctcaacaaaaacaaaatctaccttacttgaggaattaggtaggtaaggaatgatcacattggagtttgggattaaaaacaccaaaaaaaaaaaaatgcatttggttctctctacactggctaagaatattgctctacactgtaagttttaaacgttacgtttctgtatgaatgtagtgtgggtttgagtagcattgtgtgtgagtggccccacaggtacattcaccctctagtgcagcccctcagtttaatgaaggaaaaaaaaacaaacacaaagccttaagctctttgagtacttcctttaccaaatgagcatggttctaacacctggagctgggcctacattggaaacaagcccctcctgccctctgtccattcttagagcataccttcatccactccatgctcagcacgtctcatcccaagcgacaattagttggctagaaacacttttctgtaattttaaacttagactgttttgttacaaatttttgcaccattctgttaaagatgcagaattgggcttttttattttttacagatgaaataagcccttacctttcctcttgtctctggggaatgtcagctgatggttcttatttaaggttttgcattttgttcactatccactactgttcgttagccagaaattctctagtgatctgaagcaatgtgactgaagaccagttttaagttatgtgttggcaagttgccttatatttaaaaggaaaaagaaaaaaaaaaaagcctgattgtgttatgccaaatgatagcaacatgaagtcctaatttattgttcccaattgttttcctgccgtctgtgaacactggtacctccctgtcctgatcccccaggagcacctgtagcttctgactcaatgccttctccgaaggtgttggccgccatctcacccagggccctcttccagttcctgcttttctgagtcagatttaaagagcaccactgtcttccccctaccccttgcttgatctccaaagcagatattcttgctgtatttttttttcctccccaatacctctccctgaaaggtgagctgctattttaggaaactggaccagacaccaacttgggggctttaagtcaaacaacctcaaacccatctcttcctgtgtaggggtgcaagcctctgaagctctcactcccacccttagtctgcatggaaaatgtactgtgatccccctgcccccaactgccctcgcctttggtgtgagatgttccttctttcggagttcagcctgagtccctctcccctctgccagccaacccccagccagcaataagggtccaagccagggcctcctctccacactccctgtctccatcctacactaccctagggaatacctggattccccattctatccacatactgtagcattcattctccatctctctcacctcacctgtggtggtttatgggtgtgatggggtttttaagattattataaaccagtaaaaataagaaaacctcaaaaaaaaaaaaaaaatctaaaaaaaacctggcggccggccttggccagtcactttagactcgagcaggcttatgatgccggccgaattgagctaattggcccaatcgccctaagggaggcggttaaaataactgcccgcgtttaaaaacgcgggactggaaaccccggggtcccaactaatagcttgtag

SEQ ID NO: 385837 - DNA, 4409 bp, Homo sapiens
ctccgggtagtccccacagctgcgccggtgactgaggggccgggcagtggagaagtggtggcggcgggcggcgggcggcaaaggagcagccatgagggccgggcccagtcaccgaccgtgctgaggagtcatggaagagtttttaaaccaggaatatcacaggagtgatgctgtgttcttcactgcatgatttcaaaagtgtgagccactgccccatgttgtgttgatgccaatctgccatgctagcctgtctaccagggccaggtgacctgtcctttcagcttctttctcacacgcagatgaacactggacttcagaaatgggacactacacagaaaatgagaactgctcactatcctaccccagccgaattggatgcgtatgctaagaaggtcgcaaacaacccactgactataaaaatcttccccaacagtgtgaaggttccccagcggaaacacgttcgtcgtactgtgaacggcctcgacacatcagcccagcgctacagcccctacccgacacaggctgccaccaaggcaggcctgcttgccattgtcaaagtgccagccaaaagcatactcaaggactttgacggcacccgagcccggttgctccctgaggccatcatgaaccccccagtggcaccctatgctactgtggcacccagcactttagcccacccccaggcccaggctctggcccgccagcaggccctgcagcatgcacagaccctggcccatgcccctccccagacgctgcagcaccctcagggtatcccgccaccccaggcactgtcccaccctcagagcctccagcagcctcagggcctgggccaccctcagcccatggcccaaacccagggcttggtccaccctcaggccctggctcaccagggtctccagcacccccacaatcccttgctgcatggaggccggaagatgccagactcagatgcccccccgaatgtgaccgtgtctacctcaactatccccctttcaatggcggccactctgcagcacagccagcctccggacctgagtagcatcgtgcaccagatcaaccagttttgccagacgagggcaggcatcagcactacctcagtgtgtgagggccagatcgccaaccccagccccattagtcgcagtctgctcatcaatgcaagcacccgggtgtcgacccacagcgtccccacaccaatgccttcatgtgtggtcaatcccatggagcacacccacgcggccaccgccgcgttgcctgctgcaggtcctgtcaacctgcccacaggcatctctcgcgtccccactggctaccctagcgacctcaagccagtcacctggaaccagcaccagctggcccacctacagcagatgtgcagcgaggctagtgggacgccagcccctggcctgacaggcaagcatgcggcaggacgcgagttggcagggcctggctttgtgggcaaggcccctgcctacccgcaggaactctgcctggcgcagtccttccatctgaagccacccctggaaaagccgaccccatccccaccagtcaacggcatggcagccccattggcctaccccaatggtcactacttccaacccctgtggaacaacattctgcccactcccaatagcgacagctcggggtctcaggaccttgccatgccgttccacggtgggcagcccacaggtgcacccctcgactgtgcggcagctcccggggcccactaccgagcagggaccgggggcggtccagtggcaagccagaacagcttgatgcaaacagtggattacctaagtggggatttccaacaggcctgcttccgagaacagagcctggccatgctgagcaaggcccaccgagcccctggcaaccgagcccccgatcccacagagagtcgaagtcttcatattcagcacccagggtatagataggtagccctgctgccctccacgtgcaacacatcatacatcaccctcctaggtttagtcttttaagtaactggatagtttcaaagtttcactgctccagtgtgatcattcttagatgtctaagaaagggaatttggtgggatctaagtggggacagaaggggtcctctcgtcctcccctccagcaacttttggttttatgttagaacctaaccctaagcccaggcttttctctccactgactgcctgtcagctagtctctccaccttggccatttccagccagctcccacccatcttttcttgaatctcttcctgtttcccttaggacgactgaggtgtgggctgacggaatgccctagttgaggtagtataggtgctcaggcccctaatccagacctctacctgttgctaccccccttcccctccctccaggactaagaagcaagatttcccaggtgctctgaaagctaattacttactcatcgaaggatctcaaatcaaagctgacccagtcttcatatccttcaagttcctttccattcctcaaggctttgttttgtgtctatattgatcccacagccactgcacttgcccttgccacacttgatctcaagggcatcttggaagtatttgaccatttcttgagatatggggggaaaaagtctttgtattggcatcttggttccagactcccctttccaaacctagaaaaatacagtgacctttgagcatacccaagatccctttctcactgttgcctgtcccctaactcacctccccacagcccctatcctttccccctcaacaaaaacaaaatctaccttacttgaggaattaggtaggtaaggaatgatcacattggagtttgggattaaaaacaccaaaaaaaaaaaaatgcatttggttctctctacactggctaagaatattgctctacactgtaagttttaaacgttacgtttctgtatgaatgtagtgtgggtttgagtagcattgtgtgtgagtggccccacaggtacattcaccctctagtgcagcccctcagtttaatgaaggaaaaaaaaacaaacacaaagccttaagctctttgagtacttcctttaccaaatgagcatggttctaacacctggagctgggcctacattggaaacaagcccctcctgccctctgtccattcttagagcataccttcatccactccatgctcagcacgtctcatcccaagcgacaattagttggctagaaacacttttctgtaattttaaacttagactgttttgttacaaatttttgcaccattctgttaaagatgcagaattgggcttttttattttttacagatgaaataagcccttacctttcctcttgtctctggggaatgtcagctgatggttcttatttaaggttttgcattttgttcactatccactactgttcgttagccagaaattctctagtgatctgaagcaatgtgactgaagaccagttttaagttatgtgttggcaagttgccttatatttaaaaggaaaaagaaaaaaaaaaaagcctgattgtgttatgccaaatgatagcaacatgaagtcctaatttattgttcccaattgttttcctgccgtctgtgaacactggtacctccctgtcctgatcccccaggagcacctgtagcttctgactcaatgccttctccgaaggtgttggccgccatctcacccagggccctcttccagttcctgcttttctgagtcagatttaaagagcaccactgtcttccccctaccccttgcttgatctccaaagcagatattcttgctgtatttttttttcctccccaatacctctccctgaaaggtgagctgctattttaggaaactggaccagacaccaacttgggggctttaagtcaaacaacctcaaacccatctcttcctgtgtaggggtgcaagcctctgaagctctcactcccacccttagtctgcatggaaaatgtactgtgatccccctgcccccaactgccctcgcctttggtgtgagatgttccttctttcggagttcagcctgagtccctctcccctctgccagccaacccccagccagcaataagggtccaagccagggcctcctctccacactccctgtctccatcctacactaccctagggaatacctggattccccattctatccacatactgtagcattcattctccatctctctcacctcacctgtggtggtttatgggtgtgatggggtttttaagattattataaaccagtaaaaataagaaaacctcaaaaaaaaaaaaaaaatctaaaaaaaacctggcggccggccttggccagtcactttagactcgagcaggcttatgatgccggccgaattgagctaattggcccaatcgccctaagggaggcggttaaaataactgcccgcgtttaaaaacgcgggactggaaaccccggggtcccaactaatagcttgtag

SEQ ID NO: 385838 - DNA, 4218 bp, Homo sapiens
ccctctcttccatcctcccggggcgggggtgagctgggctcagctgcccaaggcgggcggggcggagccaggagccccacggagcgctgcggagcgaacctcacctttccagggcgcaagtgtgagccactgccccatgttgtgttgatgccaatctgccatgctagcctgtctaccagggccaggtgacctgtcctttcagcttctttctcacacgcagatgaacactggacttcagaaattgtgaaggttccccagcggaaacacgttcgtcgtactgtgaacggcctcgacacatcagcccagcgctacagcccctacccgacacaggctgccaccaaggcaggcctgcttgccattgtcaaagtgccagccaaaagcatactcaaggactttgacggcacccgagcccggttgctccctgaggccatcatgaaccccccagtggcaccctatgctactgtggcacccagcactttagcccacccccaggcccaggctctggcccgccagcaggccctgcagcatgcacagaccctggcccatgcccctccccagacgctgcagcaccctcagggtatcccgccaccccaggcactgtcccaccctcagagcctccagcagcctcagggcctgggccaccctcagcccatggcccaaacccagggcttggtccaccctcaggccctggctcaccagggtctccagcacccccacaatcccttgctgcatggaggccggaagatgccagactcagatgcccccccgaatgtgaccgtgtctacctcaactatccccctttcaatggcggccactctgcagcacagccagcctccggacctgagtagcatcgtgcaccagatcaaccagttttgccagacgagggcaggcatcagcactacctcagtgtgtgagggccagatcgccaaccccagccccattagtcgcagtctgctcatcaatgcaagcacccgggtgtcgacccacagcgtccccacaccaatgccttcatgtgtggtcaatcccatggagcacacccacgcggccaccgccgcgttgcctgctgcaggtcctgtcaacctgcccacaggcatctctcgcgtccccactggctaccctagcgacctcaagccagtcacctggaaccagcaccagctggcccacctacagcagatgtgcagcgaggctagtgggacgccagcccctggcctgacaggcaagcatgcggcaggacgcgagttggcagggcctggctttgtgggcaaggcccctgcctacccgcaggaactctgcctggcgcagtccttccatctgaagccacccctggaaaagccgaccccatccccaccagtcaacggcatggcagccccattggcctaccccaatggtcactacttccaacccctgtggaacaacattctgcccactcccaatagcgacagctcggggtctcaggaccttgccatgccgttccacggtgggcagcccacaggtgcacccctcgactgtgcggcagctcccggggcccactaccgagcagggaccgggggcggtccagtggcaagccagaacagcttgatgcaaacagtggattacctaagtggggatttccaacaggcctgcttccgagaacagagcctggccatgctgagcaaggcccaccgagcccctggcaaccgagcccccgatcccacagagagtcgaagtcttcatattcagcacccagggtatagataggtagccctgctgccctccacgtgcaacacatcatacatcaccctcctaggtttagtcttttaagtaactggatagtttcaaagtttcactgctccagtgtgatcattcttagatgtctaagaaagggaatttggtgggatctaagtggggacagaaggggtcctctcgtcctcccctccagcaacttttggttttatgttagaacctaaccctaagcccaggcttttctctccactgactgcctgtcagctagtctctccaccttggccatttccagccagctcccacccatcttttcttgaatctcttcctgtttcccttaggacgactgaggtgtgggctgacggaatgccctagttgaggtagtataggtgctcaggcccctaatccagacctctacctgttgctaccccccttcccctccctccaggactaagaagcaagatttcccaggtgctctgaaagctaattacttactcatcgaaggatctcaaatcaaagctgacccagtcttcatatccttcaagttcctttccattcctcaaggctttgttttgtgtctatattgatcccacagccactgcacttgcccttgccacacttgatctcaagggcatcttggaagtatttgaccatttcttgagatatggggggaaaaagtctttgtattggcatcttggttccagactcccctttccaaacctagaaaaatacagtgacctttgagcatacccaagatccctttctcactgttgcctgtcccctaactcacctccccacagcccctatcctttccccctcaacaaaaacaaaatctaccttacttgaggaattaggtaggtaaggaatgatcacattggagtttgggattaaaaacaccaaaaaaaaaaaaatgcatttggttctctctacactggctaagaatattgctctacactgtaagttttaaacgttacgtttctgtatgaatgtagtgtgggtttgagtagcattgtgtgtgagtggccccacaggtacattcaccctctagtgcagcccctcagtttaatgaaggaaaaaaaaacaaacacaaagccttaagctctttgagtacttcctttaccaaatgagcatggttctaacacctggagctgggcctacattggaaacaagcccctcctgccctctgtccattcttagagcataccttcatccactccatgctcagcacgtctcatcccaagcgacaattagttggctagaaacacttttctgtaattttaaacttagactgttttgttacaaatttttgcaccattctgttaaagatgcagaattgggcttttttattttttacagatgaaataagcccttacctttcctcttgtctctggggaatgtcagctgatggttcttatttaaggttttgcattttgttcactatccactactgttcgttagccagaaattctctagtgatctgaagcaatgtgactgaagaccagttttaagttatgtgttggcaagttgccttatatttaaaaggaaaaagaaaaaaaaaaaagcctgattgtgttatgccaaatgatagcaacatgaagtcctaatttattgttcccaattgttttcctgccgtctgtgaacactggtacctccctgtcctgatcccccaggagcacctgtagcttctgactcaatgccttctccgaaggtgttggccgccatctcacccagggccctcttccagttcctgcttttctgagtcagatttaaagagcaccactgtcttccccctaccccttgcttgatctccaaagcagatattcttgctgtatttttttttcctccccaatacctctccctgaaaggtgagctgctattttaggaaactggaccagacaccaacttgggggctttaagtcaaacaacctcaaacccatctcttcctgtgtaggggtgcaagcctctgaagctctcactcccacccttagtctgcatggaaaatgtactgtgatccccctgcccccaactgccctcgcctttggtgtgagatgttccttctttcggagttcagcctgagtccctctcccctctgccagccaacccccagccagcaataagggtccaagccagggcctcctctccacactccctgtctccatcctacactaccctagggaatacctggattccccattctatccacatactgtagcattcattctccatctctctcacctcacctgtggtggtttatgggtgtgatggggtttttaagattattataaaccagtaaaaataagaaaacctcaaaaaaaaaaaaaaaatctaaaaaaaacctggcggccggccttggccagtcactttagactcgagcaggcttatgatgccggccgaattgagctaattggcccaatcgccctaagggaggcggttaaaataactgcccgcgtttaaaaacgcgggactggaaaccccggggtcccaactaatagcttgtag

SEQ ID NO: 385839 - DNA, 3205 bp, Homo sapiens
ctccgggtagtccccacagctgcgccggtgactgaggggccgggcagtggagaagtggtggcggcgggcggcgggcggcaaaggagcagccatgagggccgggcccagtcaccgacctgtgagccactgccccatgttgtgttgatgccaatctgccatgctagcctgtctaccagggccaggtgacctgtcctttcagcttctttctcacacgcagatgaacactggacttcagaaatgggacactacacagaaaatgagaactgctcactatcctaccccagccgaattggatgcgtatgctaagaaggtcgcaaacaacccactgactataaaaatcttccccaacagtgtgaaggttccccagcggaaacacgttcgtcgtactgtgaacggcctcgacacatcagcccagcgctacagcccctacccgacacaggctgccaccaaggcaggcctgcttgccattgtcaaagtgccagccaaaagcatactcaaggactttgacggcacccgagcccggttgctccctgaggccatcatgaaccccccagtggcaccctatgctactgtggcacccagcactttagcccacccccaggcccaggctctggcccgccagcaggccctgcagcatgcacagaccctggcccatgcccctccccagacgctgcagcaccctcagggtatcccgccaccccaggcactgtcccaccctcagagcctccagcagcctcagggcctgggccaccctcagcccatggcccaaacccagggcttggtccaccctcaggccctggctcaccagggtctccagcacccccacaatcccttgctgcatggaggccggaagatgccagactcagatgcccccccgaatgtgaccgtgtctacctcaactatccccctttcaatggcggccactctgcagcacagccagcctccggacctgagtagcatcgtgcaccagatcaaccagttttgccagacgagggcaggcatcagcactacctcagtgtgtgagggccagatcgccaaccccagccccattagtcgcagtctgctcatcaatgcaagcacccgggtgtcgacccacagcgtccccacaccaatgccttcatgtgtggtcaatcccatggagcacacccacgcggccaccgccgcgttgcctgctgcaggtcctgtcaacctgcccacaggcatctctcgcgtccccactggctaccctagcgacctcaagccagtcacctggaaccagcaccagctggcccacctacagcagatgtgcagcgaggctagtgggacgccagcccctggcctgacaggcaagcatgcggcaggacgcgagttggcagggcctggctttgtgggcaaggcccctgcctacccgcaggaactctgcctggcgcagtccttccatctgaagccacccctggaaaagccgaccccatccccaccagtcaacggcatggcagccccattggcctaccccaatggtcactacttccaacccctgtggaacaacattctgcccactcccaatagcgacagctcggggtctcaggaccttgccatgccgttccacggtgggcagcccacaggtgcacccctcgactgtgcggcagctcccggggcccactaccgagcagggaccgggggcggtccagtggcaagccagaacagcttgatgcaaacagtggattacctaagtggggatttccaacaggcctgcttccgagaacagagcctggccatgctgagcaaggcccaccgagcccctggcaaccgagcccccgatcccacagagagtcgaagtcttcatattcagcacccagggtatagataggtagccctgctgccctccacgtgcaacacatcatacatcaccctcctaggtttagtcttttaagtaactggatagtttcaaagtttcactgctccagtgtgatcattcttagatgtctaagaaagggaatttggtgggatctaagtggggacagaaggggtcctctcgtcctcccctccagcaacttttggttttatgttagaacctaaccctaagcccaggcttttctctccactgactgcctgtcagctagtctctccaccttggccatttccagccagctcccacccatcttttcttgaatctcttcctgtttcccttaggacgactgaggtgtgggctgacggaatgccctagttgaggtagtataggtgctcaggcccctaatccagacctctacctgttgctaccccccttcccctccctccaggactaagaagcaagatttcccaggtgctctgaaagctaattacttactcatcgaaggatctcaaatcaaagctgacccagtcttcatatccttcaagttcctttccattcctcaaggctttgttttgtgtctatattgatcccacagccactgcacttgcccttgccacacttgatctcaagggcatcttggaagtatttgaccatttcttgagatatggggggaaaaagtctttgtattggcatcttggttccagactcccctttccaaacctagaaaaatacagtgacctttgagcatacccaagatccctttctcactgttgcctgtcccctaactcacctccccacagcccctatcctttccccctcaacaaaaacaaaatctaccttacttgaggaattaggtaggtaaggaatgatcacattggagtttgggattaaaaacaccaaaaaaaaaaaaatgcatttggttctctctacactggctaagaatattgctctacactgtaagttttaaacgttacgtttctgtatgaatgtagtgtgggtttgagtagcattgtgtgtgagtggccccacaggtacattcaccctctagtgcagcccctcagtttaatgaaggaaaaaaaaacaaacacaaagccttaagctctttgagtacttcctttaccaaatgagcatggttctaacacctggagctgggcctacattggaaacaagcccctcctgccctccgcgggtagtgaaaatgttggtgtatgggtagtcatggatgtatgtgtcacatctgaatgtgataagcagtccagcatcacttaggaaatgttacatgcggaatgtgcacggttccaggggcgagtaccgtcaatctaaaggttcgcaatggtttccttcctgccaaacatatacatgtggccctgcccaata

SEQ ID NO: 385840 - DNA, 2291 bp, Homo sapiens
ctccgggtagtccccacagctgcgccggtgactgaggggccgggcagtggagaagtggtggcggcgggcggcgggcggcaaaggagcagccatgagggccgggcccagtcaccgacctgtgagccactgccccatgttgtgttgatgccaatctgccatgctagcctgtctaccagggccaggtgacctgtcctttcagcttctttctcacacgcagatgaacactggacttcagaaatgggacactacacagaaaatgagaactgctcactatcctaccccagccgaattggatgcgtatgctaagaaggtcgcaaacaacccactgactataaaaatcttccccaacagtgtgaaggttccccagcggaaacacgttcgtcgtactgtgaacggcctcgacacatcagcccagcgctacagcccctacccgacacaggctgccaccaaggcaggcctgcttgccattgtcaaagtgccagccaaaagcatactcaaggactttgacggcacccgagcccggttgctccctgaggccatcatgaaccccccagtggcaccctatgctactgtggcacccagcactttagcccacccccaggcccaggctctggcccgccagcaggccctgcagcatgcacagaccctggcccatgcccctccccagacgctgcagcaccctcagggtatcccgccaccccaggcactgtcccaccctcagagcctccagcagcctcagggcctgggccaccctcagcccatggcccaaacccagggcttggtccaccctcaggccctggctcaccagggtctccagcacccccacaatcccttgctgcatggaggccggaagatgccagactcagatgcccccccgaatgtgaccgtgtctacctcaactatccccctttcaatggcggccactctgcagcacagccagcctccggacctgagtagcatcgtgcaccagatcaaccagttttgccagacgagggcaggcatcagcactacctcagtgtgtgagggccagatcgccaaccccagccccattagtcgcagtctgctcatcaatgcaagcacccgggtgtcgacccacagcgtccccacaccaatgccttcatgtgtggtcaatcccatggagcacacccacgcggccaccgccgcgttgcctgctgcaggtcctgtcaacctgcccacaggcatctctcgcgtccccactggctaccctagcgacctcaagccagtcacctggaaccagcaccagctggcccacctacagcagatgtgcagcgaggctagtgggacgccagcccctggcctgacaggcaagcatgcggcaggacgcgagttggcagggcctggctttgtgggcaaggcccctgcctacccgcaggaactctgcctggcgcagtccttccatctgaagccacccctggaaaagccgaccccatccccaccagtcaacggcatggcagccccattggcctaccccaatggtcactacttccaacccctgtggaacaacattctgcccactcccaatagcgacagctcggggtctcaggaccttgccatgccgttccacggtgggcagcccacaggtgcacccctcgactgtgcggcagctcccggggcccactaccgagcagggaccgggggcggtccagtggcaagccagaacagcttgatgcaaacagtggattacctaagtggggatttccaacaggcctgcttccgagaacagagcctggccatgctgagcaaggcccaccgagcccctggcaaccgagcccccgatcccacagagagtcgaagtcttcatattcagcacccagggtatagataggtagccctgctgccctccacgtgcaacacatcatacatcaccctcctaggtttagtcttttaagtaactggatagtttcaaagtttcactgctccagtgtgatcattcttagatgtctaagaaagggaatttggtgggatctaagtggggacagaaggggtcctctcgtcctcccctccagcaacttttggttttatgttagaacctaaccctaagcccaggcttttctctccactgactgcctgtcagctagtctctccaccttggccatttccagccagctcccacccatcttttcttgaatctcttcctgtttcccttaggacgactgaggtgtgggctgacggaatgccctagttgaggtagtataggtgctcaggcccctaatccagacctctacctgttgccgtgtgcctccggggatcctcgagaacgccaaccgacg

SEQ ID NO: 385841 - DNA, 836 bp, Homo sapiens
tagtgggagaagaggaggagagtgagcttttattttcttcaccttaactggaagcctggttgagatgagaagcttcttaccttaacaatacccagttgacaggagaaaagaaggcagctcaacctggctaagcaacgcgctcaaagtccctgtggtgatgatgggctgggattccatgccacctctatccagtgtgaaaacccagtcctttaaaatgcattgtgcttttttactgcttaatgtttacggaagtgtgttttgcctacatctagaatcaaattaaaatcaaattagaagggatgcttacaattttgggaggattaatgttttgaagataacatatctgtcttacctctaagttttatggggaaaggcaacattcatctcataagtttgcagggtttttattcagaaaaacatctttgtatatcttgattgaaaaagacatgaacttttgggcacagtctaggttgagtaagtcactgtgatgagctgaactgcactcccctccaccaatttatgtattgaagccctaattccccagtactttagagtgtgaatatatttggagacaaggtctttaaagagataattaaggtaaaatgaggttgttagggtggaccctcatccaatacgactggtatccttgttaagaggagatgaggacacagacatgtacagaggaaagaccatgtgaaaacgcagggagaagacaccatctgcaagccaggatgaggggtctcagaagaaatcaaccctgccaacacctgagctcacacttccagcctccagaactgtgagacaataaatttctgttgttttactcagtctgtggt

SEQ ID NO: 385842 - DNA, 314 bp, Homo sapiens
ctgaggcaaacatagggaactgcctggagaccacgtgatggctttgctccagatagggagcacatgccaagtcccacacaaggcaccattttgaaagcccagctcccacaagactgcatcctgccatgacacccagcagcccctgcatctccacatctctggagccccattgacttcccccagactcagctgaggttgctgtggtctgctgccaccagggctgaagtgtgagccattggcagcaaagcaaccccactgccagtagtagcaggatcactgcacaattaaaagttcccctaggaaaagctaccctg

SEQ ID NO: 385843 - DNA, 138 bp, Homo sapiens
ctccagaggcaacaaatctacaatcaaggctctgattgattcagtttccagtgaggcctctcttcctgacttgtggacagccaccttctcgctgtgtcctttcatgatctttcctcagtgtatgtgctcagagagaga

SEQ ID NO: 385844 - DNA, 320 bp, Homo sapiens
cagttcccagtgagtatcagtccagggcttttggttcccgtcctgactttctacttaactaaagggtgacccaccgaacctcagtttctgccattatgaaatggatctactaatatgtccaataaaatgcaagatactccagcatttcaaaagacaaggcagcaacactgatttaaatattttaaaaagcgacttaaatcctttaattcagcaatcctactcccgagtttagaaaactccattaactaaagttcacaaactcaattcaataaggttaacaatctataagaactgtgtacaaggataattgttgcggtatt

SEQ ID NO: 385845 - DNA, 107 bp, Homo sapiens
tgtttgtgtgaaggggacggtgggaggcctcagagcctaacctgctcagagggtgtcaggggggaaaaatgtggttagaggtcaacccaggggaagggggagaagat

SEQ ID NO: 385846 - DNA, 1878 bp, Homo sapiens
ctgaaaaaacacagatggctaaaagggaacctgaggttatgatgctttaaataaacaaaaaaacttaagacaattgcattccagagttgccttttgcctccaaattctcacaagtttgtaagggagcagtcttttgcaccagacagtttctgggaaactcatcgaatacatgggtgggaggatgagtcgaagtggtctgcccagtgccccctgaagagccctcccctctgctgctatggagctgttcttcaccaggtccttaatcacttgcataaaaagttgaagaacatgtcaaagaagtctgaagcatccaagaaaaagactgcacagacagttctggtggtggttgtggtgtttggaatctcctggctgccgcaccacatcatccatctctgggctgagtttggagttttcccgctgacgccggcttccttcctcttcagaatcaccgcccactgcctggcgtacagcaattcctccgtgaatcctatcatttatgcatttctctctgaaaatttcaggaaggcctataaacaagtgttcaagtgtcacattcgcaaagattcacacctgagtgatactaaagaaaataaaagtcgaatagacaccccaccatcaaccaattgtactcatgtgtgataaaagatagagtatccttatggttgagtttccatataagtggaccagacacagaaacaaacagaatgagctagtaagcgatgctgcaacttgttatcttaacaagaattcaagtcgttttaattaaatcccacgtgtgttaaaaagtactttgatccatttaggaaattcctaggtctagtgagaattatttttcaattttattttagttctaaattatgtttcagaaacaaaagacaatgctgtacagttttattcctcttcagacatgaaagggaacatatatattccatatatatgttcaactcttcatagattgtgaactggcccatcaatatggtcaggaatatttgcagtctacattttaaagccaatttatttagaaaaaaaatttgagctttaattctttaattttaagagaagtaatattgtgaactatgtattttaaaatatgatcatggacacacaatgatgaattttttggccatttacatagacatatctattaagtggaaagaaggctttctgaagtctgtttgcacaggtggcatttgcttccaattgtagctagcgcacagagctttggaagcctgtcattatgagatacagtcggtttacctcaggagtcaattcagtgttgtactggtgacctgggatgcagtagtaggcactgttgattcaaatttatcctgtgaaactggctttatagagttaacaaaacagagtcagagaccactgtcttaacagtggaagatgcaaataagtttttgagaataaaactggattttgaaattttacattagtacttgacaaaagttttcattttgccttgaatggaacctactaaaaagagagatgaaaaaaaatcagcgaggttgatgtagataataatttctatgggaccaaagactagacagaattcagtaagtcacatgaagtaatggtcatgcctgtacataaagcatatttcatgtttgatttagatgacattcaaaaaaaatcatgggactgaatatacctggggtatcctatcttgtacaaatgcatgctttttcattaaatttgtaatgatgtttaatgaacatttccaccaaacattatttcctctaaaaatgttaatttggggttaaaaccatcaccatttgaatttcaaatgtagttttcatgacaattttatattgatgtgtgtttacaatgagaaaatggcatgaaaatattaaattgtcttgtatcggaaaa

SEQ ID NO: 385847 - DNA, 3061 bp, Homo sapiens
  misc_feature (817)..(817): n is a, c, g, or t
atcccgctagaatccgtccagtctctgctcgcgcaccgtgacttctaaggggcgcggatttcagccgagctgttttcgcctctcagttgcagcagagaagcccctggcacccgactctatccaccaccaggaagcctcccaaaagagctctcgccctgtggacgactcggaatccctggaaaagccgggagggagtcggaggcgccagcccactggggaggtggcgctgggcgcgcgggatgcgcggggagccttctctgcaggagccgcacagtgcactgctgcgcgctgggcagtgcggggaagcgccgcgggaaggagcggctccgagcaacaggtgcagcacgcagccgctccgggagccagggaaaaccgccggcgaagatctggagcggtaaggcggagagaagggtctttccacctgcgcggctgcagccggcggatccctcttcccaggctccgtggtcgcgcagcgggcggaggcgcccgggcaggggaccccagtgctctcgagatcaccgtcccttcccgagaaggtccagctccgggctcccgaacccaccctctctcagaaggtcgcggcgcaaagacggtgccaccaggcacggccaccggatccccgctcccgctggctcgcgcctcgggggaagctcagactcctaaactcgcactctccgtgctttgcgccgggacccctggccacccccggcgcctgctatcccgccctccctccccgcgcgccccgccgctcgccgggacagccccgcgggccatggagctggcggtcgggaacctcagcgagggcaacgcgagctgnccggagccccccgccccggagcccgggccgctgttcggcatcggcgtggagaacttcgtcacgctggtggtgttcggcctgatcttcgcgctgggcgtgctgggcaacagcctagtgatcaccgtgctggcgcgcagcaagccgggcaagccgcggagcaccaccaacctgttcatcctcaacctgagcatcgccgacctggcctacctgctcttctgcatccccttccaggccaccgtgtacgcgctgcccacctgggtgctgggcgccttcatctgcaagttcatccactacttcttcaccgtgtccatgctggtgagcatcttcaccctggccgcgatgtccgtggaccgctacgtggccatcgtgcactcgcggcgctcctcctccctcagggtgtcccgcaacgcgctgctgggcgtgggctgcatctgggcgctgtccattgccatggcctcgcccgtggcctaccaccagggcctcttccacccgcgcgccagcaaccagaccttctgctgggagcagtggcccgaccctcgccacaagaaggcctacgtggtgtgcaccttcgtcttcggctacctgctgccgctcctgctcatctgcttctgctatgccaaggtccttaatcacttgcataaaaagttgaagaacatgtcaaagaagtctgaagcatccaagaaaaagactgcacagacagttctggtggtggttgtggtgtttggaatctcctggctgccgcaccacatcatccatctctgggctgagtttggagttttcccgctgacgccggcttccttcctcttcagaatcaccgcccactgcctggcgtacagcaattcctccgtgaatcctatcatttatgcatttctctctgaaaatttcaggaaggcctataaacaagtgttcaagtgtcacattcgcaaagattcacacctgagtgatactaaagaaaataaaagtcgaatagacaccccaccatcaaccaattgtactcatgtgtgataaaagatagagtatccttatggttgagtttccatataagtggaccagacacagaaacaaacagaatgagctagtaagcgatgctgcaacttgttatcttaacaagaattcaagtcgttttaattaaatcccacgtgtgttaaaaagtactttgatccatttaggaaattcctaggtctagtgagaattatttttcaattttattttagttctaaattatgtttcagaaacaaaagacaatgctgtacagttttattcctcttcagacatgaaagggaacatatatattccatatatatgttcaactcttcatagattgtgaactggcccatcaatatggtcaggaatatttgcagtctacattttaaagccaatttatttagaaaaaaaatttgagctttaattctttaattttaagagaagtaatattgtgaactatgtattttaaaatatgatcatggacacacaatgatgaattttttggccatttacatagacatatctattaagtggaaagaaggctttctgaagtctgtttgcacaggtggcatttgcttccaattgtagctagcgcacagagctttggaagcctgtcattatgagatacagtcggtttacctcaggagtcaattcagtgttgtactggtgacctgggatgcagtagtaggcactgttgattcaaatttatcctgtgaaactggctttatagagttaacaaaacagagtcagagaccactgtcttaacagtggaagatgcaaataagtttttgagaataaaactggattttgaaattttacattagtacttgacaaaagttttcattttgccttgaatggaacctactaaaaagagagatgaaaaaaaatcagcgaggttgatgtagataataatttctatgggaccaaagactagacagaattcagtaagtcacatgaagtaatggtcatgcctgtacataaagcatatttcatgtttgatttagatgacattcaaaaaaaatcatgggactgaatatacctggggtatcctatcttgtacaaatgcatgctttttcattaaatttgtaatgatgtttaatgaacatttccaccaaacattatttcctctaaaaatgttaatttggggttaaaaccatcaccatttgaatttcaaatgtagttttcatgacaattttatattgatgtgtgtttacaatgagaaaatggcatgaaaatattaaattgtcttgtatcggaaaa

SEQ ID NO: 385848 - DNA, 368 bp, Homo sapiens
tattggcaattccatttcaatatgacttttgaaggggacattcaaaccattgcacacatcatcatttctctgaagtcaaaaattcccactcagatatctctgaaaaaaaaaatttatttcagaaaacataccaagtaaaatatttattattaccacacttatgtcccagaaacatgccaggttaactccttttgctgatatcctcctaaatctgcctgacagtataaacctgagcatcttttcttaaaagtgtatttcctaataaaactcattagaagaaaacaagttctctgcctactttaaaattaagtcatgctggaagcggtggctcacgcctgtaatcccagcactttgggaggccgaggcgg

SEQ ID NO: 385849 - DNA, 367 bp, Homo sapiens
ggcctcctcaatggctgtcctgggacagggaggctggttagcacaattaacacaacctggtcatgcaaggcattgatggtccgtaacatgaactttgaccagtaggagacagagaatggaaaaaagccagcagataaatcatctggccttcctcccctatgacagactgttctgagccacagtgtttcacatgtcttcctggagatgtcccacatgacttgagcaaccagctggagctctggagaaactgtggccatcctggtaacatatgaccttgtatttgctttctctccttcctgctttatttccctatgtcccttactttggttgttgggattgcacctcccaataaagcattagcatgtcc

SEQ ID NO: 385850 - DNA, 495 bp, Homo sapiens
ttgtaggggaggccaaagttctctggaaaaccagtaaggtccttaggactggcctctgaaaacctctgcagcctgtcaaggactctgttacttggctttctactctgtgtggctccatcatggtagcctcattggttccccaagtcagccatacttcttcctcctacagagcatcttgcacaagtcattccctccactggggctgctggtgaggtttcctctctgcctagttaaggtatcttcctatcacctctcaactgaatcaccttttccctcagggctgcgttcactccccataaagcataacttcatagcactatgctcctttcttttgaagcacttgccccagttttaaaaacatagctccatgattctttaatggaaacactcaccttgacagtgttttaagctatacattccagaagggcaaagatcacaccttttaaaaagtcaatcattttatctctagcgcctgccctgacactaaggatttaa

SEQ ID NO: 385851 - DNA, 665 bp, Homo sapiens
caagtgcaaagtttatttaggcgaattaatagaaaatatcactttgtgtaataaaaggtgacattcatgaaggtgaaataattttaaattggtatgcacttaatacaattgccataaggatatgaaagaaaaatgagagagcaacaaaagaaagtacaactcaaaatcgtacatctctcagtaattaatgaagcaagcagacaaataccaggaaatatgtagaaattttgaagtactgaaaatacatatatgtttgtgtgtattgtgtgtatactatatccccaaattgtcaaattaatatttttccaatcacatatggaaaaatatgaaaacctgtacttgcaaattaagcaagtctcaatgtatttcaaaggattgctacaaaacacacagtattctctgaccacaatggatttcagatagaaatcagtataaaaggcatctttaggaaagctccatgtatttgagaattaataaacatttctaattagtcatgggaaaaagtcatggaaattaaaactgtcaaatcctattaaaatatgtggaatgcagctagagcagtatttagagagcatataggcagacctgcttagaaatgtgcatattagaaaagagagactaaaaatgagtcattcaatacacaaagttaaacaataacaaaatgg

SEQ ID NO: 385852 - DNA, 515 bp, Homo sapiens
gaaagaaaggtgaagcaagcaggattaaagtgtgagaaattaaactgcagtgttgtggccacaaaacttcagcatattttgtaggtgcactggagttgagagggcccttcaaagtcagatgaggctcatttgtgttgtcaaaaatggaaatggatagccacatgcagaagaatgaaatttgacctttatctcacaccatctacgaaaatcaactcgaaatgaattaaagactaaaacttaaggctgaaatcataaaattgctagtagaaaacaaaaaaaaatgcttcttgacatgagtctgggtagggattttttggatatgatatcaaagcacaggcaactaaagcaagaatagatgaatgaaattacatcaaacttaaaagtttccgcatagcaaaaaaaaaaaaaaaatcaacagagtgaaaaggcagcctatgaaatggaagagtgtatttgcaaaccatgtatcaggtaaggggttaatgtataagactgtcctacaactcaataacaaa

SEQ ID NO: 385853 - DNA, 124 bp, Homo sapiens
gggcaaaggtctcaggagagcagagagagccagaagtgggaatggagttaggggatcagggcctcatccctacctgaaagcggagtcccattgagtcacctagcaaaggttgggggtagtggga

SEQ ID NO: 385854 - DNA, 905 bp, Homo sapiens
gattcaatataattttattatattacaaaaaagtaaccaaaacaaacatggcagattatttgtaagatgccttaaacagtgctgggagcatagatttttccctatattaccttttatatttctgtatattgaaataagtcctaaagttttttattcttaaaggtagcacatgcaaagtgccaagcataaggcctagcatatagaaaggcctagcatatagcagctgcttaatatctagtagctgttactcaagtcaagacagcaaggttacataaaagtaccagttaaaggaaaaacagctatttaagcaaaaagctttacctaaacacacacacaaaatttaagagacaaaaaaatgactaaaaaggacattaggggaaaatgggactatttaatttaccatatttgctagcattttttatagcaaaagtttatttcaaggatgccaggatgtatatctgttatgtatgtacatatatacacaatatatctaattacatatgggtgttaattttaatttttttcatgagagcttaatttctgtctgctttccatgttgtaagtcatatggtcttgtttataaaatttagaactgcagatctgattcctcatttgagtcattcagacttttccacaacaaccaactgggacaacaaaaatataatgttcagaataaacataagtaggggatgaatgagaaagttattttatgctacaagctccaccaagaaaagatggaatgtgaaaaacaaacactcatttgaagagtccggagagtccgttcttgatgcttttcaagctgtgcaacaaaggttcaaaaatgcttttcaaagaacctgggactaattttgttgagtttaggtgacatgtttcttttagaaatttctgtcaggtgatgagctaaa

SEQ ID NO: 385855 - DNA, 426 bp, Homo sapiens
aagtaagagttgatatgatcaagattgagatttaggaaaatcatcctgtctcagtgtagtgaacagattgaaaaggacagtggtggatgtgagaagttgttagagtgttgcaagaatgcaggagtggttaagagaatggcatactggagagtggccaagtaacctgtgtccaaaaaaattaatttaaatttaaaatatatggtgatcattggcatattttctcagatttatttcactaaggaatctagtgggctaattagaaaataagggaatgaaattatgaataaaattctttgattaattctgttgtgaagggaagagagaaagtatggcaactactgtggaaagtatgttaactagaggaaagaaaaataagacctgaaaggcttgaacatgtttaaatgttgtcagtaaaaagggaggggt

SEQ ID NO: 385856 - DNA, 172 bp, Homo sapiens
ggtaggacagacctttcctgcaggggttggggaacctagctgttcttcccctgcaggaatgcctgagccatgctgtggggcaggccggctgatgtgtgctgcgtaccagcggtggggcatcagcccagtgtagtttctatcaaatttgaactgaggaagaaaataaaagaga

SEQ ID NO: 385857 - DNA, 352 bp, Homo sapiens
atccacccgcctcagcctcccaaagtgctgggattacaggcgtgagccaccgctcccggccggcctctcttaaacaataattcctaagcaaccaggaccttctgtgtgggtgtgcctcaacccatcttcacagtagcttcgcagacatatggggactgtagattctccttcatttctaccaggatttattgagagccggtgccgtagcatgccgcatgctaagccttggaaatgctgaatgaatggtttctgctcttagggaactacagtctgaagagaaagacagacatacaaacaaagtacattgtagggtgaccagtatgatagtagaagtatgtcctgaggtctccac

SEQ ID NO: 385858 - DNA, 658 bp, Homo sapiens
ttcactcagcccacggtccacttctttacatcaacacatgttactataacattctagtccacaagagagtgggcgttcttttagagttcatgtatttgaggcagcagatgagtaaccaactaaagcaaaggctgtacttgatagccaagaacaaaactggcattttccccctgttaatcaatgtcaaccctacaatctttcagcactgagaactaacataccttcatttgtgtaagcagcacatacagaaataaccaaagcagaactgaagcatgggtattgccaagaattggggaaaaagttagaaagcaaagatgggacgtgagtctttgttttgcctaccaaaagaaaggagtcctacttcttgggtggcagttgctgtagcaaccaaaccactgctaaaggagattcagagcattaagacggaggttgtggagaagggcagaagcctgggggactgagctctgtagcgggacactaggagcagtggtggtcccccaacccccacctgatgatgttgaacatctgctcaaattagagcttgcgtcttgactaacgtctggcaagaaccataaactcccaagccaagtatcagaaaagagctaagtggggtgtgagcaagccgtctcaccgcagagactttaaatgcttcactgaa

SEQ ID NO: 385859 - DNA, 354 bp, Homo sapiens
gaaaacagcaaagtgataaataatatggcaacagataataaaggaaatacacatattaaactttttgaatccaggatctttgaaaatagaaaaagcagtaatagctttttgcatttctgaggttttttttttttttacaagttactctagtttgtgtaccatataatcctgttatcttatctcttcctgcctaacagggattcttgtagcatttctagtgccttcttttgaactatgaatatcatctggccccctggataaagacaaggctaggcaagtcagattagcttgtgaaacaggacctctaggatgactacagtaaacaataatttcttgtacacttaaaaataacta

SEQ ID NO: 385860 - DNA, 421 bp, Homo sapiens
tggatgtgtggaggtgtggatgctgtgtggatgtgtggatgtgtggaggtgtggatgctgtgtggatgtgtggatgtgtggatgtgtggaggtgtggatgctgtgtggatactgtgtggatgtgtgaatgtgtggaggtgtggatgctgcatggacgtgtggaggtgtggatgctatgtggatgatgtgtggatgtgagtaagtgaggatgctgtgtggaggtgagtaggtatggatgctgtgtggaggtgtggatgctatgtggatgctgtgtggatgctgtgtggatgctgtgtggaggtgtggatgctgtgtggagctgtggatgctgtgtggaggtgtgtatgtgtggaggtgtggaggtgtcaggtgtggatgctgtgtgaaagtgtggatgctgtgtggaggtgtgtatgtgtgg

SEQ ID NO: 385861 - DNA, 1221 bp, Homo sapiens
ctcctgcactgccagaacggagggacgtgccacaacaacgtgcgctgcctgtgcccggccgcatacacgggcatcctctgcgagaagctgcggtgcgaggaggctggcagctgcggctccgactctggccagggcgcgcccccgcacggctccccagcgctgctgctgctgaccacgctgctgggaaccgccagccccctggtgttctaggtgtcacctccagccacaccggacgggcctgtgccgtggggaagcagacacaacccaaacatttgctactaacataggaaacacacacatacagacacccccactcagacagtgtacaaactaagaaggcctaactgaactaagccatatttatcacccgtggacagcacatccgagtcaagactgttaatttctgactccagaggagttggcagctgttgatattatcactgcaaatcacattgccagctgcagagcatattgtggattggaaaggctgcgacagccccccaaacaggaaagacaaaaaacaaacaaatcaaccgacctaaaaacattggctactctagcgtggtgcgccctagtacgactccgcccagtgtgtggaccaaccaaatagcattctttgctgtcaggtgcattgtgggcataaggaaatctgttacaagctgccatattggcctgcttccgtccctgaatcccttccaacctgtgctttagtgaacgttgctctgtaacccttgttggttgaaagatttctttgtctgatgttagtgatgcacatgtgtaacagccccctctaaaagcgcaagccagtcatacccctgtatatcttagcagcactgagtccagtgcgagcacacacccactatacaagagtggctataggaaaaaagaaagtgtatctatccgtattcaaatgaagttattttcttgaactactgtaatatgtagattttttgtattattgccaatttgtgttaccagacaatctgttaatgtatctaattcgaatcagcaaagactgacattttattttgtcctctttcgttctgttttgtttcactgtgcagagatttctctgtaagggcaacgaacgtgctggcatcaaagaatatcagtttacatatataacaagtgtaataagattccaccaaaggacattctaaatgttttcttgttgctttaacactggaagatttaaagaataaaaactcctgcataaacgat

SEQ ID NO: 385862 - DNA, 1823 bp, Homo sapiens
cctcagcttcccagagtgctgagattacaggcatgagccacagagcccagcccaggtaacttctacatggggaaaggtgagcctgggaaggccattgttaagtgcctctccaggggtccatttcagagttagctgtcagttcctaacttgtccattcttcttgcctcccagttcctagtctccagccactcaacagtcctcagaaagccccagtaccaggcttctggggaccagggtgacatctagtggatggcaagcctccctggggtcactgcagcctgttgtgtcctaggagctggggaaaggcaactggctggtgctgaatttggcaagggagcggaatttgacttctctggtgtaatgcagctttgccgtgtgacggtccaggaaaggggattaggtggaagaaaatatttcagtgaacactgatttttacctataaggaattttctgtttggagaggaaaagttgagttttattctgctcctttcctcccactcgcctgacatagaggtccctaagccctttctccaaacctgcatggatgagtttcttttcttgttcaggtggttccttatgtcacgacgatttttggaggcctgcatgcaggcaagatggtcatgctgcaaggagtggtccctctagatgcacacaggtttcaggtggacttccagtgtggctgcagcctgtgtccccggccagatatcgccttccacttcaaccctcgcttccataccaccaagccccatgtcatctgcaacaccctgcatggtggacgctggcaaagggaggcccggtggccccacctggccctgcgaagaggctccagcttcctcatcctctttctcttcgggaatgaggaagtgaaggtgagtgtgaatggacagcactttctccacttccgctaccggctcccactgtctcatgtggacacgctgggtatatttggtgacatcctggtagaggctgttggattcctgaacatcaatccatttgtggagggcagcagagagtacccagctggacatcctttcctgctgatgagccccaggctggaggtgccctgctcacatgctcttccccagggtctctcgcctgggcaggtcatcatagtacggggactggtcttgcaagagccgaagcattttactgtgagcctgagggaccaggctgcccatgctcctgtgacactcagggcctccttcgcagacagaactctggcctggatctcccgctgggggcagaagaaactgatctcagcccccttcctcttttacccccagagattctttgaggtgctgctcctgttccaggagggagggctgaagctggcgctcaatgggcaggggctgggggccaccagcatgaaccagcaggccctggagcagctgcgggagctccggatcagtggaagtgtccagctctactgtgtccactcctgaggatggttccagggaaataccgccagaaaacaagaaggtcagcccactcccagggccccactctcctcccctcattaaaccatccacctgacaccagcacatcaggcctggttcacctctggggtcacgagactgagtctacaggagctttgggcctgagggaaggcacaagagtgcaaaggttcctcgaactctgcaccttcctccaccaggagcctgggatatggctccatctgccttcagggcctggactgcactcacagaggcaagtgttgtagactaacaaagatactccaaaatacaatggcttaaagaatgtggtcatttattctttattatttatttatttgtggtcaaataaataaataaggttatttattt

SEQ ID NO: 385863 - DNA, 1675 bp, Homo sapiens
acaaaccctcgttggccccacagggagccagcctctggcttctctctgcaatggccatgtgctgcagacccggagtgggtagttagttggttaatgccagtcttcctcccctggacactgagttctgctgacagcccccgcccagccagagctctgctgtataccaccgggagtggggctggtgtggagcctggaggtcgcccgctgccctcctagggctgctccagacagcattaaaacgctgcaggtcgcaggtgagactaacagctgggagagctgctccaggcatttaggaccctgactggggcagatgagtcagcccagtgggggcagggctcctggaacgaggatctacagttggagttgccccactgtcatgtcacctggagaaaaactggacccaattcctgacagcttcattctgcaaccaccagtcttccacccggtggttccttatgtcacgacgatttttggaggcctgcatgcaggcaagatggtcatgctgcaaggagtggtccctctagatgcacacaggtttcaggtggacttccagtgtggctgcagcctgtgtccccggccagatatcgccttccacttcaaccctcgcttccataccaccaagccccatgtcatctgcaacaccctgcatggtggacgctggcaaagggaggcccggtggccccacctggccctgcgaagaggctccagcttcctcatcctctttctcttcgggaatgaggaagtgaaggtgagtgtgaatggacagcactttctccacttccgctaccggctcccactgtctcatgtggacacgctgggtatatttggtgacatcctggtagaggctgttggattcctgaacatcaatccatttgtggagggcagcagagagtacccagctggacatgaggtgccctgctcacatgctcttccccagggtctctcgcctgggcaggtcatcatagtacggggactggtcttgcaagagccgaagcattttactgtgagcctgagggaccaggctgcccatgctcctgtgacactcagggcctccttcgcagacagaactctggcctggatctcccgctgggggcagaagaaactgatctcagcccccttcctcttttacccccagagattctttgaggtgctgctcctgttccaggagggagggctgaagctggcgctcaatgggcaggggctgggggccaccagcatgaaccagcaggccctggagcagctgcgggagctccggatcagtggaagtgtccagctctactgtgtccactcctgaggatggttccagggaaataccgccagaaaacaagaaggtcagcccactcccagggccccactctcctcccctcattaaaccatccacctgacaccagcacatcaggcctggttcacctctggggtcacgagactgagtctacaggagctttgggcctgagggaaggcacaagagtgcaaaggttcctcgaactctgcaccttcctccaccaggagcctgggatatggctccatctgccttcagggcctggactgcactcacagaggcaagtgttgtagactaacaaagatactccaaaatacaatggcttaaagaatgtggtcatttattctttattatttatttatttgtggtcaaataaataaataaggttatttattt

SEQ ID NO: 385864 - DNA, 1870 bp, Homo sapiens
acaaaccctcgttggccccacagggagccagcctctggcttctctctgcaatggccatgtgctgcagacccggagtgggtagttagttggttaatgccagtcttcctcccctggacactgagttctgctgacagcccccgcccagccagagctctgctgtataccaccgggagtggggctggtgtggagcctggaggtcgcccgctgccctcctagggctgctccagacagcattaaaacgctgcaggtcgcaggtgagactaacagctgggagagctgctccaggcatttaggaccctgactggggcagatgagtcagcccagtgggggcagggctcctggaacgaggatctacagttggagttgccccactgtcatgtcacctggagaaaaactggacccaattcctgacagcttcattctgcaaccaccagtcttccacccggtggttccttatgtcacgacgatttttggaggcctgcatgcaggcaagatggtcatgctgcaaggagtggtccctctagatgcacacaggtttcaggtggacttccagtgtggctgcagcctgtgtccccggccagatatcgccttccacttcaaccctcgcttccataccaccaagccccatgtcatctgcaacaccctgcatggtggacgctggcaaagggaggcccggtggccccacctggccctgcgaagaggctccagcttcctcatcctctttctcttcgggaatgaggaagtgaaggtgagtgtgaatggacagcactttctccacttccgctaccggctcccactgtctcatgtggacacgctgggtatatttggtgacatcctggtagaggctgttggattcctgaacatcaatccatttgtggagggcagcagagagtacccagctggacatcctttcctgctgatgagccccaggctggaggtgccctgctcacatgctcttccccagggtctctcgcctgggcaggtcatcatagtacggggactggtcttgcaagagccgaagcattttactgtgagcctgagggaccaggctgcccatgctcctgtgacactcagggcctccttcgcagacagaactctggcctggatctcccgctgggggcagaagaaactgatctcagcccccttcctcttttacccccagagattctttgaggtgctgctcctgttccaggagggagggctgaagctggcgctcaatgggcaggggctgggggccaccagcatgaaccagcaggccctggagcagctgcgggagctccggatcagtggaagtgtccagctctactgtgtccactcctgaggatggttccagggaaataccgccagaaaacaagaagaacagggtttcaccatgttggccaggatggtcttgatctcctgacctcgtgatccgcccacctcggcctcccaaagtgctgggattacaggcgtgacaccatgcccagccggacttgtatgttaattgcagcactattcacaatagcaaagacatggaatcaacctaggtgcctgtcaacagaggattggatgaagaaaatgtggtgcatatacaccatggattactacacagtcataaaaaagaatgaaactatgtcctttgcagcaacatagatgcagctggaggccattatccttagtgaattaacagaagaacagaaaaccaaataccatatattctcacttataagtaggagctaaacattgggtggtcatggacaaagagatggcaatagactctggggactactagactggagggagaaaagaaggaaggaatgggagaaagggttgaaaaaccattgggtattatgctcactacctgagtgacgggataattcacaccccaaac

SEQ ID NO: 385865 - DNA, 600 bp, Homo sapiens
caattacagttaaggatgcagtgaagggagaaggacatggtggtcgggacacagagaggccaagctcagcctggacaggccggggaaagtgttcggcaataacagagtacaggaggccaggtgcttaacaaataagcagcgtgtcctggcggcaggcctgggcagaacatgcctgccccagtgctcccctggcccccggggatgggcggtcctccccagtccccctggaagtcaacttctcaatacctcccttgttccttcaggaggtgccctgctcacatgctcttccccagggtctctcgcctgggcaggtcatcatagtacggggactggtcttgcaagagccgaagcagtaagtatccagcatctaagtggaggggagggagcagcctctctgtgacagtcacatgctataaaacatcatctcttttaatctcctagcaccaccatttaatccccattttacagatgaggaaacagaggagcagaaaggagaagtggcccaatttggcagagcttatgaaggtcaggctgggactgggaccgacagccccactgctgggagcatcattcctgctggtacatctagtcaggcctagc

SEQ ID NO: 385866 - DNA, 1702 bp, Homo sapiens
acaaaccctcgttggccccacagggagccagcctctggcttctctctgcaatggccatgtgctgcagacccggagtgggtagttagttggttaatgccagtcttcctcccctggacactgagttctgctgacagcccccgcccagccagagctctgctgtataccaccgggagtggggctggtgtggagcctggaggtcgcccgctgccctcctagggctgctccagacagcattaaaacgctgcaggtcgcaggtgagactaacagctgggagagctgctccaggcatttaggaccctgactggggcagatgagtcagcccagtgggggcagggctcctggaacgaggatctacagttggagttgccccactgtcatgtcacctggagaaaaactggacccaattcctgacagcttcattctgcaaccaccagtcttccacccggtggttccttatgtcacgacgatttttggaggcctgcatgcaggcaagatggtcatgctgcaaggagtggtccctctagatgcacacaggtttcaggtggacttccagtgtggctgcagcctgtgtccccggccagatatcgccttccacttcaaccctcgcttccataccaccaagccccatgtcatctgcaacaccctgcatggtggacgctggcaaagggaggcccggtggccccacctggccctgcgaagaggctccagcttcctcatcctctttctcttcgggaatgaggaagtgaaggtgagtgtgaatggacagcactttctccacttccgctaccggctcccactgtctcatgtggacacgctgggtatatttggtgacatcctggtagaggctgttggattcctgaacatcaatccatttgtggagggcagcagagagtacccagctggacatcctttcctgctgatgagccccaggctggaggtgccctgctcacatgctcttccccagggtctctcgcctgggcaggtcatcatagtacggggactggtcttgcaagagccgaagcattttactgtgagcctgagggaccaggctgcccatgctcctgtgacactcagggcctccttcgcagacagaactctggcctggatctcccgctgggggcagaagaaactgatctcagcccccttcctcttttacccccagagattctttgaggtgctgctcctgttccaggagggagggctgaagctggcgctcaatgggcaggggctgggggccaccagcatgaaccagcaggccctggagcagctgcgggagctccggatcagtggaagtgtccagctctactgtgtccactcctgaggatggttccagggaaataccgccagaaaacaagaaggtcagcccactcccagggccccactctcctcccctcattaaaccatccacctgacaccagcacatcaggcctggttcacctctggggtcacgagactgagtctacaggagctttgggcctgagggaaggcacaagagtgcaaaggttcctcgaactctgcaccttcctccaccaggagcctgggatatggctccatctgccttcagggcctggactgcactcacagaggcaagtgttgtagactaacaaagatactccaaaatacaatggcttaaagaatgtggtcatttattctttattatttatttatttgtggtcaaataaataaataaggttatttattt

SEQ ID NO: 385867 - DNA, 1796 bp, Homo sapiens
cctcagcttcccagagtgctgagattacaggcatgagccacagagcccagcccaggtaacttctacatggggaaaggtgagcctgggaaggccattgttaagtgcctctccaggggtccatttcagagttagctgtcagttcctaacttgtccattcttcttgcctcccagttcctagtctccagccactcaacagtcctcagaaagccccagtaccaggcttctggggaccagggtgacatctagtggatggcaagcctccctggggtcactgcagcctgttgtgtcctaggagctggggaaaggcaactggctggtgctgaatttggcaagggagcggaatttgacttctctggtgtaatgcagctttgccgtgtgacggtccaggaaaggggattaggtggaagaaaatatttcagtgaacactgatttttacctataaggaattttctgtttggagaggaaaagttgagttttattctgctcctttcctcccactcgcctgacatagaggtccctaagccctttctccaaacctgcatggatgagtttcttttcttgttcaggtggttccttatgtcacgacgatttttggaggcctgcatgcaggcaagatggtcatgctgcaaggagtggtccctctagatgcacacaggtttcaggtggacttccagtgtggctgcagcctgtgtccccggccagatatcgccttccacttcaaccctcgcttccataccaccaagccccatgtcatctgcaacaccctgcatggtggacgctggcaaagggaggcccggtggccccacctggccctgcgaagaggctccagcttcctcatcctctttctcttcgggaatgaggaagtgaaggtgagtgtgaatggacagcactttctccacttccgctaccggctcccactgtctcatgtggacacgctgggtatatttggtgacatcctggtagaggctgttggattcctgaacatcaatccatttgtggagggcagcagagagtacccagctggacatgaggtgccctgctcacatgctcttccccagggtctctcgcctgggcaggtcatcatagtacggggactggtcttgcaagagccgaagcattttactgtgagcctgagggaccaggctgcccatgctcctgtgacactcagggcctccttcgcagacagaactctggcctggatctcccgctgggggcagaagaaactgatctcagcccccttcctcttttacccccagagattctttgaggtgctgctcctgttccaggagggagggctgaagctggcgctcaatgggcaggggctgggggccaccagcatgaaccagcaggccctggagcagctgcgggagctccggatcagtggaagtgtccagctctactgtgtccactcctgaggatggttccagggaaataccgccagaaaacaagaaggtcagcccactcccagggccccactctcctcccctcattaaaccatccacctgacaccagcacatcaggcctggttcacctctggggtcacgagactgagtctacaggagctttgggcctgagggaaggcacaagagtgcaaaggttcctcgaactctgcaccttcctccaccaggagcctgggatatggctccatctgccttcagggcctggactgcactcacagaggcaagtgttgtagactaacaaagatactccaaaatacaatggcttaaagaatgtggtcatttattctttattatttatttatttgtggtcaaataaataaataaggttatttattt

SEQ ID NO: 385868 - DNA, 445 bp, Homo sapiens
tgagctgagaccgcgccactgcactccagcctgggtgacacagcgagactccatctgaaaaaaaaaaaaaaaaaaaaaaaaaaaaaagtctcactgtcctttgctatttgccagataaatggtgtctggagaaacgccagaccactggaggccctcctccatgtgccaactcagccccactccagccagtttccagcagccctattttgagagagggacatacatgtcacctgtaattaggaggctaaagttggcctcttgggggaggtacctgctgggtcctccttttcctctgactaacccttcagactttttcttaaccttttccagccctgagcctgccaaaagaactgtccttaaaatcccagccatttccatttatggagtgactactgtatacctctgtgcacaccccccattccaccccaacctcccagcccagccg

SEQ ID NO: 385869 - DNA, 413 bp, Homo sapiens
gtatgtcccttttcacatagggaaaatctcatgcgcttcagacattgatgaataatcactccaaaggattctaacagctctcttacttgagccaaggtattggtgaaatattggcaaaagagtttgtgattgggccgggcacggtggctcacacctgtaatcccagccccttgggaggccgaggcgggcggatcacaaggtcaggagatcaagaccatcctgactaacacggagaaactgggtctctactaaaaatacaaaaaattagctgacgtggtggcatgtgcctgtggtcccagctacttgggaggctgaggcaggagaatcacttgaacctgggaggcagaggctgcagtgagccgagatcgcaccactgcactccagcctgggcgacagagtgagattccgtctca

SEQ ID NO: 385870 - DNA, 441 bp, Homo sapiens
cgcaacacctctgccactgcaaaaaccacaaccactggaaactgcctgaggccacacagcaggctggcagcagataccagaccaggaacccacatcttctgacaaccttttctttctgtcctttgttcttttgttaatcaagtatgaattggttcactccctcccaggacatccttattgttaggaacctatgagatttcccttccatcccagacagaaaaagaatctcctcaggaacaagaaacccaaaccagcgtaagccaggggccagtggtactcagaggcacagggtagaatccttggccactgagtggtcctgctttggtaggtgttcttatgtcttccctccatgttgatggctgctgactgatttcagggtggtggtttcttgggctggggtgactgtggcaatttcttaaaataagacaacaatgaagtttg

SEQ ID NO: 385871 - DNA, 231 bp, Homo sapiens
attattaattatttttcaaggttctctagaaaaaaatatttcttccataaaacaaatcatttcgtttgtgattttgtggcaataacaaaagaatattgggaattgtctgtactggctgggcatggtggctcacacctgtaatcccagcattttgggaggtcgaggcgggtggatcacctgagatcaggagtttgagaccagcctggccaaaggctggtggtggcgcaggcc

SEQ ID NO: 385872 - DNA, 320 bp, Homo sapiens
gcctccaaagtaactgggactataggcatgtgccactacacctgtctaatttttctactgtttatagatatgaagtatcactatgttgcccacactggtcttgaactcctagattccagcgatcctcccgtctctgcctttctgctaggattatgggcatgagccaatacactcagcctaaggaaaactttctaaagtaaaacaattaagaaaaagaataacatctttttttttttttttgagatggattcttcctctgtcacccaggctggagtgtagtggcacgatctcagctcactgcaacctccacctcccgggtt

SEQ ID NO: 385873 - DNA, 382 bp, Homo sapiens
gcttctttctactagagggcaaactctatgacagctccaccaggagaactctgttctcctggagtttgtcctctagtataaagaagcagagagtgcaagtgaaacgaaggaacaagatatctgcgtggaatgggagttcacacaggatacagtggaaagcacagaccttgggaaagcctgtctagccagggaaggcctcttggaaaaggtgactttctatttaagacttaaagaatgatcctcggccaggcacagtggctcacgcctgtaatctcagcacgttggcaggctgagacgggcggatcacctcaagtcaggagttcgagaccaccttgactaacaaggtaaaaccctgtctctactaaaagtacaaaaaaaaaaa

SEQ ID NO: 385874 - DNA, 724 bp, Homo sapiens
accacactgcattattataaagagattagaaaaagaaaatgggcattaattttacttattatagaattccaggctctatcaatgaattgaatcctcttcacctgttccagtctctgctgattgattgtaaaagcccggatagcatttttttaaaatctttcccatgttgcatggaataaatatgtcggtgctggaatgcttaggaattttaaattgttcatatggtctaaaagggaaaagttatttgtttttaagattaacttcttttgagattattgctgtccatatttaggtttcaagtactgaatctaatgggagatttgtgcattgatataacagctgtttcctttcatactctgtagattatgtatctgcctaagagggaggctttgaatgtatcataatcatctatattcttaataatggtaaaaagttgtattcagaggatatctttaacattgtatcaacctaaatgcttcttttattaaatttggattaacatacttgcagatttgatttctttttcagttatttgaatatattttttcatttctatgaccatgttacagtttaaatatacaagcagtaaatgttatagtttaaaagtcttggtctttttccttaattttgtaagccatagaaattttaataagactgattatttatttcattttataagttgtgttttccctactaacggagccaacaaataaatattaaaagg

SEQ ID NO: 385875 - DNA, 463 bp, Homo sapiens
gatcactactagattgatagttactaatattttatttagcacttcattttatttatttttttgagacagagtcttgctctgttgccccggctggaatgcagtggcacgatcacagctcattgcagcctcaacctcctgggctcaggtgatcctcccacctcagcctcccaagtagctgggaccacaggccccagtacctggctaatttttttatttttaattttatagacacagtgtctcactatattgcccaggctggtcttgaactcctgggctcaaatgatcctcccacctcagtctccccaagtgctgggattacaggtataagccactatatccagccaactttctttcttttttttctttttttttttttgaggagtctcactctgttgcccaggctggagtgcagtggcgcgatctcggctcactgcaacctccgcctcctgggttcacaccattc

SEQ ID NO: 385876 - DNA, 340 bp, Homo sapiens
gagaaaggggcactttaagggttaaaccctcctgtgtaggccacctaccatcaggacccaccagccactgctcagatatgaacagggcaagagtaagatcaaagccagtttactctattttcattcattcattcattcattcattcctctattgaaaaaatatgtatgaaggcccccatggaccatcagcttgaagtgcaatgctaatgagtggctgtcactgtccttaaagagctctcagttcagtgagggaagactggtaagcaagcaaggaattgcttagctgtcatgccattggctgagtaaaataaacctggaagtagtttgaagagaaatcaaa

SEQ ID NO: 385877 - DNA, 782 bp, Homo sapiens
tcctgccttaggctcctgaatagctgggattacaagcatgtaccaccacacccagctaagtttttgtttttttagtagagagggggtttcaccatgttgtccaggctggtcttgaactcctgatctcaagtgatccacccccctcagcctcccgaagtgttgggattacaggcatgagccaccacactcagcccggattttaattctttgtttgattttgctaactagagcagcaaggacagtctacagtctttggttctaacttcaaaactgattttttctgatcagttttattaagccatatctactgaaacaaaaagtattcttgtacctctctaagatgcaacgctttaggattgaaactgacaattctctgaggctgcaaacatcaactctactgaaataatgctgtgattagcctagcggtttgctatcttttactatgaacaggagaatattcattcctaaaggtgatcccatctgatgattcctgtgaagagccgcagttcacacacacacttcagtgcattgatcgagagatcaggaattcaacttttgccacatctgccctcagggatagaaataatgcataccaagtttctctgtgaacatctttttaaattctgtcttccttcccagctcagactttcagtacccttcatgacttcatccagcagttctctatccatttttctgggggcacaagttattacttccccatctctcacccatgggacatgatggggtatgtgtgatttagtctattgtttatttaagaagaa

SEQ ID NO: 385878 - DNA, 404 bp, Homo sapiens
ttatagcgataactggtactgcctttgattaaaggtgagctatatggagttaagcatttttatactagtaactatttattgagaattttcagaattctatagctacttgtctttaacagttataagaggcatgtatttttttttccttcatggtctggaagttagttttctctttgtttgggtagatcggaatgagttgttgagctgtgttgaaaacacacatgaatcaaaaaagcagatgtattgtagaaatgtgatgttttcatgtttcgggaatttgaccggaaagctttatgtatgggttttatttttaacaaagcagtaagggcttactttttaccaacttgtgtgtgtgtaaagatgtatttgttcaagctttaagaataaacctgtcaatgtacaaa

SEQ ID NO: 385879 - DNA, 673 bp, Homo sapiens
aagtgggtggattgcttgagctcaggagtttgggacccgcccggccaatgtggcgggagtctgtctctactaaaaacccaaaaattagccaggagtggtggtgggcgcctgtggtcccagctactcatgaggctgaggtgggaggattgcctgagctcagagggcggagtttgcagtgagccatggttttatcactgcagtccagcttggcgaaccacttgttcttttttgcttgtttctttgtcttttgctttactttgcatcatagagatacgggtgaaaatttctttaaccctttaagtgtttctactttgtctcatatgctatacctcatttgttacttgggagtatactcttggccatgctattagaaatggatgatgtaaaaatggcgccccctgaagtcaagcaatgtgaaacatttgtaaatctctacaacaaatgccctaaattgtagtcgcttaattaaaataattattttctatttactgtaatagtcaacaggtaagaaatgcagtcttgcatggatgtcccactaaaaaatatatgccatcttttagtccgttgatacttagcatattgccctcatcttcatggacaaaaattggcaatttttctgtaaaatctctctttcatattactgatgacaaaattctgcactttatctgaggaa

SEQ ID NO: 385880 - DNA, 367 bp, Homo sapiens
tgaatacttgaaaacaaattcctggaagttgatacttttgcctaagaactgtgagatgtctgctgtctaaatcacaatggagttgcttatttaaaaatgaggcatttattgcctgactcctacatttattaaagtgttttcagtggaacctttaaagaactcaaaggcaaaaaaggggccatcgttttctatcccaggaagcgtcccattaatgttcctcgtataactcagcatgtgttgagtaatttctcatcttacattattatatagaaacccggaggccaactgaccacccaagcaggctgctttaggaagaaatagtctatctttgattgacagagcaagcccaacatgcagtataagagtg

SEQ ID NO: 385881 - DNA, 434 bp, Homo sapiens
taccccataaatttgtataaataataatataaaaggtctgtccaatgtggccacagtctgggaccaagtaaaaagtgttaagggatgaagaatctttaccctccaagttagaggaagaattttttcccagtcttcaatgtaaagcactgaaaaatgtggctttttcaacatttttgctgaaatggtacaaaaggccggaagagaaagcgctactgcagttaggaaaggtcaccaaaccccagcagctgctgcgagttggtctctcggacagggcctcatcattggttgaaaaaagttgatctgtttttcagtcctacgccagttcagtctagaatagtccaaaaatagaatgggctccctatgttcttttttatttatttcccaaagtggatattttaaaatcataaaggtaactaatttttaggtaaaacttt

SEQ ID NO: 385882 - DNA, 153 bp, Homo sapiens
agaatgaattggaaggtgttaacctctgatcctcagttcgcagcaccataaggtgggcatgataataatagtccccacctccccaagctgacagatgtgtgataattaaatgggcaaacatgcataaggtggctggagacggcagaccctcaa

SEQ ID NO: 385883 - DNA, 128 bp, Homo sapiens
agcagcttttcaggccgctcagtaaaccagctggagcaacacacgcaaatgagaaatgtgttgtcttcgaagtccagagaggcctgctagatgttatgcctcttttttgatgcaggaggcgccagatt

SEQ ID NO: 385884 - DNA, 746 bp, Homo sapiens
aatttgggaggggaggaagaggcagcattggctgctttgtttgtgaaggtggcaggtatggcaggaggaaggagtttgactccagtagagagcagagtgttgggatttaacctgcccttcccttccctcttcctgcctctctagttccctattctctactggtatagatagactggtatagatagaggaaagactgcctctctagttccctattctctactggtatagatagaggaaagactgacactcctcttcctttccattaatggctgctcctttgagtcagggctcctttccttccccatcctaggtcagcacagcagactcaaaggtttctcactggaccctgttctaaaagcaggtacagcctttctgagatttttcataagacttttacctgccaggaacaatggtaacagacatcaagaacaagatgtacaatccctggaaagcagatgaaggttaagttgctgtcctgttcacctgcccagtctctgtttcctgaatttccttccatttacagcaagaagcccattcatttatcctgaagctctcagtacttaggtgcttgtccttcttggtataagtcaacttggtgtacgtttcatttgagtgacagctagaaaagctccactcaatagtcaccttgattggaggcagaggccaagtcacttgccacacccaagtcaggttggtaaagatgcccattcccctccttcaatcctttttcttcagagtatttgata

SEQ ID NO: 385885 - DNA, 294 bp, Homo sapiens
aatttgggaggggaggaagaggcagcattggctgctttgtttgtgaaggtggcaggtatggcaggaggaaggagtttgactccagtagagagcagagtgttgggatttaacctgcccttcccttccctcttcctgcctctctagttccctattctctactggtatagatagactggtatagatagaggaaagactgcctctctagttccctattctctactggtatagatagactggtatagatagaggaaagactgcctctctagttccctattctctactggtatagataga

SEQ ID NO: 385886 - DNA, 1007 bp, Homo sapiens
ggcatggaagctccgcgccccttcccacagaccttgtcccgtgcatcgcttccatccggctcttcctgagttctggcccttgtagtaaacctgcagtcttaatctcaataagtatccaggctggagtgcagtggcgcgatctcggctcactgaaacctctgcctcccaggttcaagcgattctcctgcctcagcctctcgaatagctgggattacaggcaactaccatttttccccctctgtcttttgatgttcacctgacaagctcctggtggtagccggtagctctgacagagagcaaaagaaataaggggcggttttagctgataacctcaccagtcttcacttcggctcttccttcgctgccccttcagctgcggggaacttgctctagggcatcttggcaggagggagggcgtctgagggtactggtgcctgcagacttcaagcacggagagacttcttgaagcggtgctgcctggccacttggaaaaaggtggattaatttggggatatccgaggagccccagagggccattgtaattcaagatcttcagtaaacttctgccgcggagaaagaacccggccagtattgggaccatcgtggtgacgcaggattggaggaacaggggtttcggttgactgagaagttcctgtgagagaaacaggctcaaatagagagaatagaaagatgtcgtgaggagcccaggaaacaaaattttccaggggtcagggaatgaattctaatcagaacaaggagccagcaagaacttccagcctaggaggtacttttcaaaagaagcctgggactctaacccagcttctgagagtatactcagaattgttaagaatcaggcagggcgcggcggctcatgcctgtaatcccagcactttgggaggctgaggcgggagaattgcttgaacccaggaggtggaggttgcagtgagccaagatcgcgcccttgcactccagcctgggcaacaagagtgaaactctgcctcggaggg

SEQ ID NO: 385887 - DNA, 470 bp, Homo sapiens
tagagagaatagaaagatgtcgtgaggagcccaggaaacaaaattttccaggggtcagggaatgaattctaatcagaacaaggagccagcaagaacttccagcctaggaggtacttttcaaaagaagcctgggactctaacccagcttctgagagtatactcagaattgttaagaatcaggcagggcgcggcggctcatgcctgtaatcccagcactttgggaggctgaggcgggtggatcacttgaggtccggagtgtgagatcagcctgactaacaagatgaaaccccatctctactaaaaaaatacaaaattagctgggcgtcgtagcgcatgcctgtaatcccagctacttgggaggctgaggcaggagaattgcttgaacccaggaggtggaggttgcagtgagccaagatcgcgcccttgcactccagcctgggcaacaagagtgaaactctgcctcggaggga

SEQ ID NO: 385888 - DNA, 323 bp, Homo sapiens
ctttaggaggaattttagtactcctttacccaaaataaatagtggtaaatttccttctgttcttagctctgagtttgtatttatttataagtcattgtgatcatgtatacttatatatttttaatatgctaattgcttttaaatgggatttttgttctgattttaaaataatacatcctccctggacaatatttggaaatgtagcaaagtaaatcatgttaccattgttccattttgatatatataaactttaggtattattttatatataataaattttaagatattatatacaataaaattaaccaatttaagtatatgat

SEQ ID NO: 385889 - DNA, 702 bp, Homo sapiens
ctaagctgggccctcactgggatgtcaacacatctcttctcagaattgcctttgagaggaactttctcttcgggagtaaaatgtttaaggcttttgtccttcaggctaggtccttaagcaagggacttatacctccccagacaggtacctacctgagaggaatttgctccttcctcagccctcttgccacttcctttgttcaggcttctgctgttacctacatggtactgccatacctgcctaactcatcttcttgcttcagtccaacagtttttctatgatgcttctagagctgttatttaaaaggagattctgcctatgcaatgccccttaaatctcttcagtggttcttcattgctcttgggataaagcaccatttgcagtatcccagcctcccctctgggctctaacctcattagaccatatgttcctttggggctagaattgtatcttatttcttattctattccagggccataggtactctttgacagaatgaataaatttctctagttgtctgggattctttgaaactatttcctaaaggtcttcagggaaggagattcttccaccacctcaattcctgtggtcaattttacaagccctgagacttaggaaaggtgttctgcaggggacagagggacttagcacttactgagtggttaccatataccatataccattccatgctatattatttag

SEQ ID NO: 385890 - DNA, 253 bp, Homo sapiens
cacagccatgagaaggccacagtgtggaggtgggcattgtttgtgaaagtaggacctcatcactgcgttgatcacactagatgagttcattacattaagcacatatggttaaaagagcaagtcctaccaggaaatatgtatcaatgtacaggtcctttggaaactgttacatatgtacagtttggacatgcactaactacaaatgagatacagattctgggacactaatcatatttttagatgagctcaccgg

SEQ ID NO: 385891 - DNA, 373 bp, Homo sapiens
acaatccaaaaagaagggtctgaacaccaaaattctttatacatatttaagtaactgtattattattatacagatgtctttacctttttgactttatagatcactgcagcattaagaaagtttccagtttaccattccataagtacaattaatccttctagtgtaaatgttcaaatactgttataattatctaggcaattaataatttacaaactgatatttttgcacgattgtagtggtgtatagtcttgacttgcagagcattttgcttgagtccttgaaatgtcgtgttcattcattatttgctgagtgcttacaatgtattaggcactgttctaaatattaagtgtactaaataaacaaaaatccttgt

SEQ ID NO: 385892 - DNA, 243 bp, Homo sapiens
cattccttcattcactcatttttaaaagcgtcatatgtacaaatatatagtccagaaaatttttaaatataactgtctataaaagtatgtggcaaaatcccattcacagtcttattctccttccacagccaaacacttttaattcatttcttatatatcatttcagaatttatctttgcaaatacacatgtatattcttattctacccttctctctcaacacaaaaagtagcataccacacat

SEQ ID NO: 385893 - DNA, 297 bp, Homo sapiens
aaaagtctcactactacaatgaaatatttgcctgcctctacttacactttataccaaagttcaaagttaacaccgttaatcaccatccacaaaagcatgactaaccaagtgaagattaactagtcatttcctgattacaaatggaagtagaattttcccagtatcattgacagtgactattagaatgtgttgaaagtcccttacaatcactcttccaaaaatgctttaagacaaaatttaaataaaaattttattcactaacagctgtccaagattccaatacaaacataattctac

SEQ ID NO: 385894 - DNA, 495 bp, Homo sapiens
ttcaggcgattctcttgcttcagccacccgagtagctaggactacaggcgcgtgccaccacacccagctagtttttgtagttttagtagagatggggtttcaccatgttagccaggatggtctcaatcaagcttgacctcgtgatccacccgcctcggcctcccaaagtgctgggattacaggcgtgagccactgggcccagctaataataaagagttttaaagtgcagtgtggggaagttgtaggggccttacgtgctggatgctgggctgtgcttgctgggtgactgcccccaggagtagggaggagagcgggaaggaagggacacttatgcatctactgggcgctgggctggccatttgcttgagaatgtgcggtgaggccatgtccacgaagcaagaactgtctccccagcagagctggctgaacagacaaagaaataggcatgctgggccaggtaagcctcctgttcctgaggtgcacaggtgggggctg

SEQ ID NO: 385895 - DNA, 515 bp, Homo sapiens
aaaggacttggaaatcataagtgataaatggactaatgtgctccattttgtaaatgtttatctttgataaacacaagactttgtgcttttaagtgtctaacacagaacctggcttgaagtggatgttcaatgaatattggtttcctgaatacataagtgaacgaggtactcaatgtaatagcctaatagtctaaaataaaatactttcaaatgcttactttgcaacccctgactaataaagaacagaaatttaaaatgtacttttaagtctttgtatgtcttatgttggtggggattatttttaatgaagtaacacaaggtggaaatagtacaccagcagtggcttcattgaactgaatgctgtgtgggtgaattacttagctgaagcttctgcagtatagcagtaagaatagtacttccctcgtagggcagggggtaagggaattgtgtgaactactgcatgaaatcacttagcccagtgcctgccaccaggtaagcattcaacagctattgcc

SEQ ID NO: 385896 - DNA, 627 bp, Homo sapiens
attattattgataacttgaggatctgttctcagtataaatgacaaagccctgtcacatgccaagcaaaattctacgatccagatgctggtaatacaacagtgggcagataggacctttgctgtcactgccctgtcactatcatgtagttcatagtagaagcttatcagtatttttatggttttgttatatttatggtatttaattgttaaagatgtgttagatgctgtttgattgtttaaatttgcatttctcactcctgcaaatatctgatcatgccatacccttttcgcagtgggctatagaaacctaaaggctgttcttaaaactttgttttttaatttatttttgacacggactctcgctctgtcgcccaggctggagtacagtggcacaatctcagctcactgcaacctccgcctcccaggagaatcacctgaacctgagaggcagaggcttcagtgagccgaggccacaccactgcactccggccttggtgacagagactctgcctcgaaagataaaaataataatgaaagtaatattgggattatactgtacattctttcttacatgtatggtgaatatattttgacaataaatatctttacatcagttaaaaaaaaaaa

SEQ ID NO: 385897 - DNA, 1378 bp, Homo sapiens
tcaagccttcaaactatttaaggaagcaaaatagtttcctaaatgcatattgtttgtgagaatttctcattaatatcctgaataattctttttttttttttgagacggagtctcactctgtctcccaggctggagtgtgatggcgtgatctcggctcactgcaagctctgcctctcgggttcacgctatcctcccgcctcagcctcccgagtagctgggactacaggcgtccaccaccacgcccggctaattttttgtatttttagtagagacagggttttaccgtgttagccatgatggtctcgatctcctgacctcgtgatctgcccacctcagcctcccaaagtgccgggattacaggcgtgagccaccgcgcccagccctgaataattcattcttgctaagcttcatgttgactctatatatcatctaagaaagtattgttttgtggtccaaacctgttgccgtggttagtaaggctttcttaggtgtgaaatatttagatgaaattttctcttttaaagttctgtatagggttagggtgttggaaaatgctatattaataaatctgtagtgttttgtgtttataggttcagaaccagagtaactggattgaaagatggactgatagattagatatatcagtctaatttatcatgactgatagatctggttaagttgtgtactaaaggattaggagagcccttcctgtcacaaaagtgccactaaaacagcctaaggagaaaaatggcttgcttttctaaacttcagatgtatctgggctctaatcatatagacaggcttctgatagattgcaactgtaagtagaaacctacatatagttaaaatcctggtctttcttggtaaacagatttaaaatgtctgatgtaaaacatgccacaggagaattcagggatttgagtttccctgaatagcatatatatgatgcatcaaatgggttattactattttttaccatttccacttacataatgaaaaacaattcattttaaatatcacattattattttgtaagtcatggaaaagggcaattgaagttttcattatgaagttttcccaataaaccaggaattctaaacttgaaaaaaaaaaatagaattagccaggtatggttgcacaggcctgtaatcccagctacccgggaggctgaggcaggagaatcacctgaacctgagaggcagaggcttcagtgagccgaggccacaccactgcactccggccttggtgacagagactctgcctcgaaagataaaaataataatgaaagtaatattgggattatactgtacattctttcttacatgtatggtgaatatattttgacaataaatatctttacatcagttaaaaaaaaaaa

SEQ ID NO: 385898 - DNA, 1247 bp, Homo sapiens
tgacagtgagactccatctcaaacaaacaaacacctccaatgctgtatctcaaataccatgtctacccttcttcctgctttacttcatctattacacaagtaatacatactcattaaagaaaaagacaagcaaaatgaaaacaaaagtcatccctgatcccaccagtgaagagttactatcctaccaacatttttctaagcatatgtacaactttaagacaagcacgaaagaataatactcgcgcccagccctgaataattcattcttgctaagcttcatgttgactctatatatcatctaagaaagtattgttttgtggtccaaacctgttgccgtggttagtaaggctttcttaggtgtgaaatatttagatgaaattttctcttttaaagttctgtatagggttagggtgttggaaaatgctatattaataaatctgtagtgttttgtgtttataggttcagaaccagagtaactggattgaaagatggactgatagattagatatatcagtctaatttatcatgactgatagatctggttaagttgtgtactaaaggattaggagagcccttcctgtcacaaaagtgccactaaaacagcctaaggagaaaaatggcttgcttttctaaacttcagatgtatctgggctctaatcatatagacaggcttctgatagattgcaactgtaagtagaaacctacatatagttaaaatcctggtctttcttggtaaacagatttaaaatgtctgatgtaaaacatgccacaggagaattcagggatttgagtttccctgaatagcatatatatgatgcatcaaatgggttattactattttttaccatttccacttacataatgaaaaacaattcattttaaatatcacattattattttgtaagtcatggaaaagggcaattgaagttttcattatgaagttttcccaataaaccaggaattctaaacttgaaaaaaaaaaatagaattagccaggtatggttgcacaggcctgtaatcccagctacccgggaggctgaggcaggagaatcacctgaacctgagaggcagaggcttcagtgagccgaggccacaccactgcactccggccttggtgacagagactctgcctcgaaagataaaaataataatgaaagtaatattgggattatactgtacattctttcttacatgtatggtgaatatattttgacaataaatatctttacatcagttaaaaaaaaaaa

SEQ ID NO: 385899 - DNA, 243 bp, Homo sapiens
aaaaggaaaaaaaaaaaagaaagtaaaattatagggtaactagaaagttacaatagtgtaacaagcataatcatttagaagattttcacctgtaacgtggttaagataagtttgagactcagttcaattcaacacatttgactttcagacagatccaatgtagtctgttgtatttagaaagaattcagacctttataaggacgatttcatgacattaatgaaatttatgtgttaatggaactg

SEQ ID NO: 385900 - DNA, 186 bp, Homo sapiens
aagaccttgtctctacaaaaaaaaaaaaaaaaaattagccaggcgcggtagcgtgaacttgtggtaccagctactcaggacgctgaggtgggaggatcatttgggcctgggaggtcaaggctacagcaagctatgacggcactactgcactccagcctgagagagctaagactctctctccaaaaa

SEQ ID NO: 385901 - DNA, 338 bp, Homo sapiens
ggcacagcggggctgtcagcgccgctcccaggctaatccccgccccgcccccgccgcccccgcgttcccggggctgggaacccagcgcggcccggggcccgggcgccgctgccgccgcgagaggccgcaggccggccggaaacgaggggcgcccgccctgtgaacccgccctcggcccctcttccccgaggcgcccccagggctggggcgtctaggattggggcgagtgagcggcgcggctgggaccccgaggccgggagcacaactggacgcgggacgtcgggcccccttgccgccgtcctcggtcggccctggcagcgcaggcgcggggcgcgggc

SEQ ID NO: 385902 - DNA, 672 bp, Homo sapiens
ttttacaggctcatcagtggaagggacttgccttgtctcagaagaaactgcactttcgagtgatgccgaaacaggttgagacttttgggggactattgagaagggatgattgtattttgcaatgtgagaagaacatgagatttgaagggccagggatggaatgaaatagtttggatgttgtaccctttaagtctcatgtcgaattgtaatttccagtgttggagtcggggtctggtgggaggtgatgcggtcatgaaggctgatttctcatgtttaacaccatcctcttggcactgtccttgcaagagtgagtgagttctcattacatctggctgttaaaagtgtgtggcacctctccctgcttgctgctgctctggccatgtgacataccttcttttgcttcaccttctgccatgtgtaaaagctccctgaggacgcttcttgaagtcaagcaactgccaatgcaaagcttcctgtacagcctgcagaactgtgagccaagtcaatcttttttttcagtataaattatgtagtgcttaggtattcctttatagtaacgcaagaatgccataatacaaggcataatggtttgcattttaaaaatgaaaattaaatttttgtaatttatcatgaaaagatgaaatgtgttaataatgagcaatatctacatgt

SEQ ID NO: 385903 - DNA, 387 bp, Homo sapiens
tataaggacacttgtaatgggacttagggtccacccacatagtccaggatgatctccaaatctcaagatccttaattacatctgcacaggcactcttcaaggaaaaggtcacagcccagggttctggagaagaagatgtggacagatctttttgggggccattagtcaagccaccaccgcaatgtctgtttccccatcacagatcaatagccccatccctaattgcctggtcctgtgactgccacctcccacctcccctgagagggtaaggatatggtcttggtccccaggaagtggcagggggttctgtgagtcctggtgttggtggaagtcaggctctggaaggaccccggaggcgaaggctctggagggaggacccgacggaag

SEQ ID NO: 385904 - DNA, 850 bp, Homo sapiens
gaaagtccctgactggagttggcagccaagccaggccctggagtgggcacccagagggaagacaggttggctaatttcctggagcccctaagggtgcaagggggaagaacacccacccgcaaagccccgtagctggaccctacgttagcctgccctgctcggggttggcgatgctggaggtgggccttggaccagagaaaatgctttaattaggtgacaagcgggcagaggcctttgtctctggagccggcagccacggcccccgctgacggcgtgggaaacagaccctgttccactccggtctccagccttggaatggttgccttcgtgcagtgcaggaggacgcggcagagggcggacgatcgctccactcgccgggaccaggtgcgggggccctgcccagccgctggggcgtggccaggctcgaagcacccaggtgtcgggggccgactctaagccctggcaccggaagagagagggcggcggattggacctcccggctccagcattgcaactgggcgctccgtctcctggtccacgcaatgatggtgcggctgctcagaagccaggtagcctgccctgggtgaagccttcgcgcaggtcaatgacggggcggaggggcagggcgcggtcccctgcatccccgatctggggagcggtgggcccaggggccatcgccttagccccctggcgctggggctcggcgccaagtgacgggcggggctccaccttccagccatccgcccggcccgggagggcggacgctgcgagactcccggccgcgccctctccttcctctcctccccaagccctcgctgccagtccggacaggctgcgcggaggggagggc

SEQ ID NO: 385905 - DNA, 647 bp, Homo sapiens
gaaagtccctgactggagttggcagccaagccaggccctggagtgggcacccagagggaagacaggggaagaacacccacccgcaaagccccgtagctggaccctacgttagcctgccctgctcggggttggcgatgctggaggtgggccttggaccagagaaaatgctttaattaggtgacaagcgggcagaggcctttgtctctggagccggcagccacggcccccgctgacggcgtgggaaacagaccctgttccactccggtctccagccttggaatggttgccttcgtgcagtgcaggaggacgcggcagagggcggacgatcgctccactcgccgggaccaggtgcgggggccctgcccagccgctggggcgtggccaggctcgaagcacccaggtgtcgggggccgactctaagccctggcaccggaagagagagggcggcggattggacctcccggctccagcattgcaactgggcgctccgtctcctggtccacgcaatgatggtgcggctgctcagaagccagccatccgcccggcccgggagggcggacgctgcgagactcccggccgcgccctctccttcctctcctccccaagccctcgctgccagtccggacaggctgcgcggaggggagggc

SEQ ID NO: 385906 - DNA, 850 bp, Homo sapiens
ctgcgtcttgatggtagtggtcccccgggcccagctgttttctctttatctctttgtcttgtgtctttatttcttacaatctctccttcctctcctcacaggggaagaacacccacccgcaaagccccgtagctggaccctacgttagcctgccctgctcggggttggcgatgctggaggtgggccttggaccagagaaaatgctttaattaggtgacaagcgggcagaggcctttgtctctggagccggcagccacggcccccgctgacggcgtgggaaacagaccctgttccactccggtctccagccttggaatggttgccttcgtgcagtgcaggaggacgcggcagagggcggacgatcgctccactcgccgggaccaggtgcgggggccctgcccagccgctggggcgtggccaggctcgaagcacccaggtgtcgggggccgactctaagccctggcaccggaagagagagggcggcggattggacctcccggctccagcattgcaactgggcgctccgtctcctggtccacgcaatgatggtgcggctgctcagaagccaggtagcctgccctgggtgaagccttcgcgcaggtcaatgacggggcggaggggcagggcgcggtcccctgcatccccgatctggggagcggtgggcccaggggccatcgccttagccccctggcgctggggctcggcgccaagtgacgggcggggctccaccttccagccatccgcccggcccgggagggcggacgctgcgagactcccggccgcgccctctccttcctctcctccccaagccctcgctgccagtccggacaggctgcgcggaggggagggc

SEQ ID NO: 385907 - DNA, 814 bp, Homo sapiens
gaaagtccctgactggagttggcagccaagccaggccctggagtgggcacccagagggaagacaggggaagaacacccacccgcaaagccccgtagctggaccctacgttagcctgccctgctcggggttggcgatgctggaggtgggccttggaccagagaaaatgctttaattaggtgacaagcgggcagaggcctttgtctctggagccggcagccacggcccccgctgacggcgtgggaaacagaccctgttccactccggtctccagccttggaatggttgccttcgtgcagtgcaggaggacgcggcagagggcggacgatcgctccactcgccgggaccaggtgcgggggccctgcccagccgctggggcgtggccaggctcgaagcacccaggtgtcgggggccgactctaagccctggcaccggaagagagagggcggcggattggacctcccggctccagcattgcaactgggcgctccgtctcctggtccacgcaatgatggtgcggctgctcagaagccaggtagcctgccctgggtgaagccttcgcgcaggtcaatgacggggcggaggggcagggcgcggtcccctgcatccccgatctggggagcggtgggcccaggggccatcgccttagccccctggcgctggggctcggcgccaagtgacgggcggggctccaccttccagccatccgcccggcccgggagggcggacgctgcgagactcccggccgcgccctctccttcctctcctccccaagccctcgctgccagtccggacaggctgcgcggaggggagggc

SEQ ID NO: 385908 - DNA, 683 bp, Homo sapiens
ctgcgtcttgatggtagtggtcccccgggcccagctgttttctctttatctctttgtcttgtgtctttatttcttacaatctctccttcctctcctcacaggggaagaacacccacccgcaaagccccgtagctggaccctacgttagcctgccctgctcggggttggcgatgctggaggtgggccttggaccagagaaaatgctttaattaggtgacaagcgggcagaggcctttgtctctggagccggcagccacggcccccgctgacggcgtgggaaacagaccctgttccactccggtctccagccttggaatggttgccttcgtgcagtgcaggaggacgcggcagagggcggacgatcgctccactcgccgggaccaggtgcgggggccctgcccagccgctggggcgtggccaggctcgaagcacccaggtgtcgggggccgactctaagccctggcaccggaagagagagggcggcggattggacctcccggctccagcattgcaactgggcgctccgtctcctggtccacgcaatgatggtgcggctgctcagaagccagccatccgcccggcccgggagggcggacgctgcgagactcccggccgcgccctctccttcctctcctccccaagccctcgctgccagtccggacaggctgcgcggaggggagggc

SEQ ID NO: 385909 - DNA, 463 bp, Homo sapiens
agttttccatgtagtataggaatgtcaataaatactgattaataggtcaaatgtttgctcttctttccttctttgtaactgtctcgttatattaaaaatacagcacacactaagttatgtttaaatttgttaatattgttctcaacatttacaaggacagtcttcaacaaatggtgctggggactgggtgtagtggctcacacctgtaatcccagcactttgggaggccaaggcaggtggatcacctgaggtcaggagttcgagaccagccggaccaacatggtgaaaccccatctctactgaaaatataaaacttagctgggcatggtggtgggtgcctgtagtcactgctactcgggatgctgaggcaggagaatcgcttgaacccaggaggtggaggttgcagtgagctgagatcacaccattgcactccagcctgggcgacagagcaactctccatctc

SEQ ID NO: 385910 - DNA, 427 bp, Homo sapiens
  misc_feature (258)..(258): n is a, c, g, or t
  misc_feature (286)..(286): n is a, c, g, or t
  misc_feature (397)..(397): n is a, c, g, or t
agttttccatgtagtataggaatgtcaataaatactgattaataggtcaaatgtttgctcttctttccttctttgtaactgtctcgttatattaaaaatacagcacacactaagttatgtttaaatttgttaatattgttctcaacatttacaaggacagtcttcaacaaatggtgctggggactgggtgtagtggctcacacctgtaatcccagcactttgggaggccaaggcaggtgatccaccaggcgtgacacnctcacccagccctgtatgcctaaatttnttcaggcatccgtaggaattaattcatgggttaaagatttcttttaccatttgaggttttttttttttttaactcattggggatttgttatgttcccgtaattttttcccnctaacaatttcttagggaattaaaggttat

SEQ ID NO: 385911 - DNA, 271 bp, Homo sapiens
tttctctcattctttatgacagactataagaggattcatagtctccaatcaatttttcttcaaaatttggccttgcgtcatatgaatatgatggatttgacacatttatgttgatcaattttgttgataaaaatggagaggcatttaaaatctagaatttagaagaagaatgcaatctactgctttatctttaccatggaagtgggtatccttccatttttaattgtaattgaacttaatattatattcatcctattattataattacagt

SEQ ID NO: 385912 - DNA, 399 bp, Homo sapiens
gtttccttctacttcactggctgcatattttcaggatcctcgccggctgcttaatctctaaatattggattactcagccttccctttttactatctaaactcttctgaggtaacctgatcaagtcccatgcttttaaataccatgtatgtgctgatgttgctcaaatttgtatttcctatcctggctctccccagagcatcatatatttaaccatctctaccaggtcattaagttggtatcgcaaacctaacaaatctaggacagaattcttaaagacttccctctccccatctcagcccatacacctgctcttctcaatcttcatatttctggtatagtatcatcattcacctagttatcaggccaaaaaactagtcaaatctgatttttcttccttc

SEQ ID NO: 385913 - DNA, 337 bp, Homo sapiens
  misc_feature (248)..(248): n is a, c, g, or t
atacgttcacacttacatctctacaatttacatgtaacatattgtctttagtttaccaatagggaaactgaggcctgatcagagatattaatttgtgtaaaacagctcataagaggaggaggtaggattcatatctagatatttatgggtccaaaacccatgttttttcaaccaccattcccggcctagatacattttttagcctgggcattcacattcagttggtcagcagagtctgacaaattctncaccattccttcttctacttgtttggttcagccccatattatttcttgcctagattatcataggcagtttttacccagaatctcacttc

SEQ ID NO: 385914 - DNA, 4247 bp, Homo sapiens
gagttgatatcttcccatccacccgccgcttctttcctccatctagcgatttttattttttaagtgtctcttcctttttctttcttttcttcttttttattttttatatatattttttggcattgctttgcagatgttgggatgagagtcggagccgaataccaagctcggatccctgaatttgatccaggtgctacaaagtacacagataaagacaatggagggatgcttgtatggtctccatatcacagtatcccagatgccaaattggatgaatacattgcaattgcaaaggaaaagcatggctacaatgtggaacaggcacttggcatgttgttctggcataaacataacattgagaagtcccttgctgatctccctaatttcactccctttccggatgagtggacagtggaagataaagtcctatttgaacaagcctttagttttcatggaaagagctttcacaggattcagcaaatgcttccagataagacaattgcaagccttgtaaaatattactattcttggaaaaaaactcgctctaggacaagtttgatggatcgccaggctcgtaaactagctaatagacataatcagggtgacagtgatgatgatgtagaagaaacacatccaatggatgggaatgatagtgattatgatcccaaaaaagaagccaaaaaagagggtaatactgaacaacctgtccaaactagcaagattggacttggaagaagagagtatcagagtttacaacatcgccatcattctcagcgttctaagtgccgtccacctaagggcatgtatttaacccaggaagatgtggtagcagtttcctgtagtcccaatgcagccaacaccatcctgaggcaactggacatggagttgatctctctaaaacgtcaggttcagaatgctaagcaagtaaacagtgcacttaaacagaaaatggaaggtggaattgaagaattcaaacctcctgagtcaaatcagaaaattaatgcccgttggaccacagaggagcagcttctagcagtgcaaggtgtccgcaaatatggtaaagattttcaagctattgcagatgtaattggcaacaagactgttggccaagtgaagaacttctttgtaaactacaggcgtcggtttaacttagaggaggtattgcaggagtgggaagcagaacaaggaacccaggcttctaatggtgatgcttctactttaggggaggagacaaaaagtgcttctaatgtgccatcagggaagagcactgatgaagaagaggaggcacagaccccacaggctcctcggacactgggtccatcacctcctgccccatcatccactccaacaccaacagcccctattgccactctgaaccagcctccaccacttcttcgtccaacactgcctgctgccccggctcttcaccggcagcctcctccactccagcagcaggctcggttcatccagccccggccaactttaaatcagcctccaccacctcttattcgccctgctaattccatgccaccccgtctaaacccaagaccggtgttgtccacggttggtggtcaacagccaccatcacttattggaattcagacagattcacagtcctcactgcactaaaaattaaattggacacagctgcagtaacttttcaccccatcattataccagtgctcatctgactgatgaaaaagaggaaagaataatcatttctagatactgaggctgcgaactagttctgtggcagtggactagcataagtggatgtctaagaaatttttcagttcactagactaaaatgttttacaacaaaaagcctccagttagcctcctttctagagtatatgttcagcaatgtgatctcataaaaggaaaaacaaaagatttaagtattctatataccaagtttttgttttgtttttactgtatttattttattgaggttctttatattcctgcctcttcatagtcaaggctcttagtacaggaatattgacttaggaattgtgaaaactccttaagtttcttaagttaaggatgtttggcttttttctttaattttttaaaaaccattttcctatgttaggagtgcaagaatagccagcatttccgattttgacatatgttcattttatgcatatttaagaaattatagctgcatatcccttctttcaaaaaatgttgcttttttttttaaaggaattttaatatattcctttaaaagaaagcaatttaatcaattgcaaagcaattatataaaaccacaaagaatgtactgaacctactaaccctttaacatacagtttagggtcctagcgcagagtccttgtttaaaggtcattgactcatcatctgtcagtaatgagaggattggaagaataattttgcatacaaatgaggacttaatttgttgaaatataatctctttaagttccttgaaaatggagttggttttttttgtttctaaatgctatctgcttttaactagtagttgcctacatctggggacttcagagaagaattatattttgttagttaagtagacacagtggttatggaagcatttctttacagtaccctttacgtgtttggtttctgaacttaaaattgccctcatacttaataatatggtctgcatttaatatgaaaggtgttttattgataaatctattgtactatttggatacatttgtgtattccttgcagccaacctgtattcgtgggattggtgtagggttaaatcatcaacattatttcataaaataagaatttgttctgtgttatctaaagatgtatcagtatattgtcacagttgtgctgttaactaaaaatgctgagacccctttttatagaaaaacaaaaagacatcaagtcttcttaattcaacccataatcattaagtacttaacaaagaatattttacaagtgatagtatttcaacaatgtgtaattaatatttttgatacagtgatttcatattggaatcattatttgtgcaaagggacagacagatcacttagattgctatactagtggacataggctaaatgtttgcacattcacattcttatcacgtgtagaatacttcacaaaatagtcaacatctaaggccctaatttatgttttgaaagatcatgtgttcccaaagtattccctattgttggctccacagccttaaagtgctatagatttaaattcattgattagttttaatttttaattttagactgtgtatttccataaataccctacgtactggcatatttgaaactctttttccaggttaggtccttttctttctcattgaatcatcttaaatagttcttggccctgaatttagctgatttaaaattcttaatattcaagaatttatacttattttttccttaaaagccacaggggacagttaaatatcttaaaatatctaaaacattttttaaagcacttagattgtcttacgtatgtgcatactatacctttacagcgtttattgtcttgtctcttgtcagtagaccttcagtacacagtatgtgggatatgtcagtcaagttggtcagcaccagcatctgtccagctgttcagtatattgtgattcattaaaaaatctcttctatcccagacatgggccaaggtgctgtatctgagggatgtgctgtaatttgatttacatgcattagagcacacagtagaaaaacgttagcttcattagtaatatgacacatgtatatagtgagatgtctttattgtgtgctttgcatattttgtaaatattttgcacgtcattatttttcttttttgtttaagcagtgtttggcctggaagagtgatatgcttgctgcttaatcaaaggattaaagatttaaagatgtctatgtcttctatttttatataatttcatgttctatgaggaatttagtacctcttcactgtgaaattcgaaataatgatttttataaaagcaaaactagaaatcttttaatgacaattttcattaatttcagggttatcatttttgagaaatctacaccaaagtggttttttaaaattacataactaaaaataaaccacactgtggatacatcttataaaactaatggaaacaatgtttttctatatgatttaattctagtgtaatatggatgaggtaagagtaagttatgatcaaactttttatgttcttaataagcttgcaattgagtaaaatagaatataaaataaaggtgaaataatataaaaaa

SEQ ID NO: 385915 - DNA, 4339 bp, Homo sapiens
gagttgatatcttcccatccacccgccgcttctttcctccatctagcgatttttattttttaagtgtctcttcctttttctttcttttcttcttttttattttttatatatattttttggcattgctttgcagatgttgggatgagagtcggagccgaataccaagctcggatccctgaatttgatccaggtgctacaaagtacacagataaagacaatggagggatgcttgtatggtctccatatcacagtatcccagatgccaaattggatgaatacattgcaattgcaaaggaaaagcatggctacaatgtggaacaggcacttggcatgttgttctggcataaacataacattgagaagtcccttgctgatctccctaatttcactccctttccggatgagtggacagtggaagataaagtcctatttgaacaagcctttagttttcatggaaagagctttcacaggattcagcaaatgcttccagataagacaattgcaagccttgtaaaatattactattcttggaaaaaaactcgctctaggacaagtttgatggatcgccaggctcgtaaactagctaatagacataatcagggtgacagtgatgatgatgtagaagaaacacatccaatggatgggaatgatagtgattatgatcccaaaaaagaagccaaaaaagagggtaatactgaacaacctgtccaaactagcaagattggacttggaagaagagagtatcagagtttacaacatcgccatcattctcagcgttctaagtgccgtccacctaagggcatgtatttaacccaggaagatgtggtagcagtttcctgtagtcccaatgcagccaacaccatcctgaggcaactggacatggagttgatctctctaaaacgtcaggttcagaatgctaagcaagtaaacagtgcacttaaacagaaaatggaaggtggaattgaagaattcaaacctcctgagtcaaatcagaaaattaatgcccgttggaccacagaggagcagcttctagcagtgcaaggtgtccgcaaatatggtaaagattttcaagctattgcagatgtaattggcaacaagactgttggccaagtgaagaacttctttgtaaactacaggcgtcggtttaacttagaggaggtattgcaggagtgggaagcagaacaaggaacccaggcttctaatggtgatgcttctactttaggggaggagacaaaaagtgcttctaatgtgccatcagggaagagcactgatgaagaagaggaggtgtgtttgtgtatggaatttgagctaatatgagttgaggaatcaccattttgtgtggtattctgtaaggttaatttgtcaagaggactagctaaattgagcatgaaaggttgacaatacacttcttcagtggtgcatctctcgtgactcttaagtcataatgacatgctaagttctgattctagaagaatggagagtgtattgttctttcatagtcttatttttattttcagtgttaagctgtttacaaataaagatgcctgtttggtagcctcattggtttttggtttttggttttgttttgtttaaaataaaagaagcttgtgcttccaataaacactggtgttatgtttttgttttgttttgatttgttttgtttttcctgtgacagcccaaactatattgtattaagttcattaggacttacatctcatacgtgtatttttgtttcctcacctctaggcacagaccccacaggctcctcggacactgggtccatcacctcctgccccatcatccactccaacaccaacagcccctattgccactctgaaccagcctccaccacttcttcgtccaacactgcctgctgccccggctcttcaccggcagcctcctccactccagcagcaggctcggttcatccagccccggccaactttaaatcagcctccaccacctcttattcgccctgctaattccatgccaccccgtctaaacccaagaccggtgttgtccacggttggtggtcaacagccaccatcacttattggaattcagacagattcacagtcctcactgcactaaaaattaaattggacacagctgcagtaacttttcaccccatcattataccagtgctcatctgactgatgaaaaagaggaaagaataatcatttctagatactgaggctgcgaactagttctgtggcagtggactagcataagtggatgtctaagaaatttttcagttcactagactaaaatgttttacaacaaaaagcctccagttagcctcctttctagagtatatgttcagcaatgtgatctcataaaaggaaaaacaaaagatttaagtattctatataccaagtttttgttttgtttttactgtatttattttattgaggttctttatattcctgcctcttcatagtcaaggctcttagtacaggaatattgacttaggaattgtgaaaactccttaagtttcttaagttaaggatgtttggcttttttctttaattttttaaaaaccattttcctatgttaggagtgcaagaatagccagcatttccgattttgacatatgttcattttatgcatatttaagaaattatagctgcatatcccttctttcaaaaaatgttgcttttttttttaaaggaattttaatatattcctttaaaagaaagcaatttaatcaattgcaaagcaattatataaaaccacaaagaatgtactgaacctactaaccctttaacatacagtttagggtcctagcgcagagtccttgtttaaaggtcattgactcatcatctgtcagtaatgagaggattggaagaataattttgcatacaaatgaggacttaatttgttgaaatataatctctttaagttccttgaaaatggagttggttttttttgtttctaaatgctatctgcttttaactagtagttgcctacatctggggacttcagagaagaattatattttgttagttaagtagacacagtggttatggaagcatttctttacagtaccctttacgtgtttggtttctgaacttaaaattgccctcatacttaataatatggtctgcatttaatatgaaaggtgttttattgataaatctattgtactatttggatacatttgtgtattccttgcagccaacctgtattcgtgggattggtgtagggttaaatcatcaacattatttcataaaataagaatttgttctgtgttatctaaagatgtatcagtatattgtcacagttgtgctgttaactaaaaatgctgagacccctttttatagaaaaacaaaaagacatcaagtcttcttaattcaacccataatcattaagtacttaacaaagaatattttacaagtgatagtatttcaacaatgtgtaattaatatttttgatacagtgatttcatattggaatcattatttgtgcaaagggacagacagatcacttagattgctatactagtggacataggctaaatgtttgcacattcacattcttatcacgtgtagaatacttcacaaaatagtcaacatctaaggccctaatttatgttttgaaagatcatgtgttcccaaagtattccctattgttggctccacagccttaaagtgctatagatttaaattcattgattagttttaatttttaattttagactgtgtatttccataaataccctacgtactggcatatttgaaactctttttccaggttaggtccttttctttctcattgaatcatcttaaatagttcttggccctgaatttagctgatttaaaattcttaatattcaagaatttatacttattttttccttaaaagccacaggggacagttaaatatcttaaaatatctaaaacattttttaaagcacttagattgtcttacgtatgtgcatactatacctttacagcgtttattgtcttgtctcttgtcagtagaccttcagtacacagtatgtgggatatgtcagtcaagttggtcagcaccagcatctgtccagctgttcagtatattgtgattcattaaaaaatctcttctatcccagacatgggccaaggtgctgtatctgagggatgtgctgtaatttgatttacatgcattagagcacacagtagaaaaacgttagcttcattagtaatatgacacatgtatatagtgagatgtctttattgtgtgctttgcatattttgtaaatattttgcacgtcattatttttcttttttgtttaagcagtgtttggcctggaagagtgatatgcttgctgcttaatcaaaggattaaagatttaaagatg

SEQ ID NO: 385916 - DNA, 4472 bp, Homo sapiens
gagttgatatcttcccatccacccgccgcttctttcctccatctagcgatttttattttttaagtgtctcttcctttttctttcttttcttcttttttattttttatatatattttttggcattgctttgcagatgttgggatgagagtcggagccgaataccaagctcggatccctgaatttgatccaggtgctacaaagtacacagataaagacaatggagggatgcttgtatggtctccatatcacagtatcccagatgccaaattggatgaatacattgcaattgcaaaggaaaagcatggctacaatgtggaacaggcacttggcatgttgttctggcataaacataacattgagaagtcccttgctgatctccctaatttcactccctttccggatgagtggacagtggaagataaagtcctatttgaacaagcctttagttttcatggaaagagctttcacaggattcagcaaatgcttccagataagacaattgcaagccttgtaaaatattactattcttggaaaaaaactcgctctaggacaagtttgatggatcgccaggctcgtaaactagctaatagacataatcagggtgacagtgatgatgatgtagaagaaacacatccaatggatgggaatgatagtgattatgatcccaaaaaagaagccaaaaaagagggtaatactgaacaacctgtccaaactagcaagattggacttggaagaagagagtatcagagtttacaacatcgccatcattctcagcgttctaagtgccgtccacctaagggcatgtatttaacccaggaagatgtggtagcagtttcctgtagtcccaatgcagccaacaccatcctgaggcaactggacatggagttgatctctctaaaacgtcaggttcagaatgctaagcaagtaaacagtgcacttaaacagaaaatggaaggtggaattgaagaattcaaacctcctgagtcaaatcagaaaattaatgcccgttggaccacagaggagcagcttctagcagtgcaaggtgactggctactagggaaataaatgaatgtggaattgaggatggaacaaagaattcaatgctttacaataaatggactgtatttgagagttcaagagaggattggagaaaataactgagtatgtaaaaaatggtgtccgcaaatatggtaaagattttcaagctattgcagatgtaattggcaacaagactgttggccaagtgaagaacttctttgtaaactacaggcgtcggtttaacttagaggaggtattgcaggagtgggaagcagaacaaggaacccaggcttctaatggtgatgcttctactttaggggaggagacaaaaagtgcttctaatgtgccatcagggaagagcactgatgaagaagaggaggtgtgtttgtgtatggaatttgagctaatatgagttgaggaatcaccattttgtgtggtattctgtaaggttaatttgtcaagaggactagctaaattgagcatgaaaggttgacaatacacttcttcagtggtgcatctctcgtgactcttaagtcataatgacatgctaagttctgattctagaagaatggagagtgtattgttctttcatagtcttatttttattttcagtgttaagctgtttacaaataaagatgcctgtttggtagcctcattggtttttggtttttggttttgttttgtttaaaataaaagaagcttgtgcttccaataaacactggtgttatgtttttgttttgttttgatttgttttgtttttcctgtgacagcccaaactatattgtattaagttcattaggacttacatctcatacgtgtatttttgtttcctcacctctaggcacagaccccacaggctcctcggacactgggtccatcacctcctgccccatcatccactccaacaccaacagcccctattgccactctgaaccagcctccaccacttcttcgtccaacactgcctgctgccccggctcttcaccggcagcctcctccactccagcagcaggctcggttcatccagccccggccaactttaaatcagcctccaccacctcttattcgccctgctaattccatgccaccccgtctaaacccaagaccggtgttgtccacggttggtggtcaacagccaccatcacttattggaattcagacagattcacagtcctcactgcactaaaaattaaattggacacagctgcagtaacttttcaccccatcattataccagtgctcatctgactgatgaaaaagaggaaagaataatcatttctagatactgaggctgcgaactagttctgtggcagtggactagcataagtggatgtctaagaaatttttcagttcactagactaaaatgttttacaacaaaaagcctccagttagcctcctttctagagtatatgttcagcaatgtgatctcataaaaggaaaaacaaaagatttaagtattctatataccaagtttttgttttgtttttactgtatttattttattgaggttctttatattcctgcctcttcatagtcaaggctcttagtacaggaatattgacttaggaattgtgaaaactccttaagtttcttaagttaaggatgtttggcttttttctttaattttttaaaaaccattttcctatgttaggagtgcaagaatagccagcatttccgattttgacatatgttcattttatgcatatttaagaaattatagctgcatatcccttctttcaaaaaatgttgcttttttttttaaaggaattttaatatattcctttaaaagaaagcaatttaatcaattgcaaagcaattatataaaaccacaaagaatgtactgaacctactaaccctttaacatacagtttagggtcctagcgcagagtccttgtttaaaggtcattgactcatcatctgtcagtaatgagaggattggaagaataattttgcatacaaatgaggacttaatttgttgaaatataatctctttaagttccttgaaaatggagttggttttttttgtttctaaatgctatctgcttttaactagtagttgcctacatctggggacttcagagaagaattatattttgttagttaagtagacacagtggttatggaagcatttctttacagtaccctttacgtgtttggtttctgaacttaaaattgccctcatacttaataatatggtctgcatttaatatgaaaggtgttttattgataaatctattgtactatttggatacatttgtgtattccttgcagccaacctgtattcgtgggattggtgtagggttaaatcatcaacattatttcataaaataagaatttgttctgtgttatctaaagatgtatcagtatattgtcacagttgtgctgttaactaaaaatgctgagacccctttttatagaaaaacaaaaagacatcaagtcttcttaattcaacccataatcattaagtacttaacaaagaatattttacaagtgatagtatttcaacaatgtgtaattaatatttttgatacagtgatttcatattggaatcattatttgtgcaaagggacagacagatcacttagattgctatactagtggacataggctaaatgtttgcacattcacattcttatcacgtgtagaatacttcacaaaatagtcaacatctaaggccctaatttatgttttgaaagatcatgtgttcccaaagtattccctattgttggctccacagccttaaagtgctatagatttaaattcattgattagttttaatttttaattttagactgtgtatttccataaataccctacgtactggcatatttgaaactctttttccaggttaggtccttttctttctcattgaatcatcttaaatagttcttggccctgaatttagctgatttaaaattcttaatattcaagaatttatacttattttttccttaaaagccacaggggacagttaaatatcttaaaatatctaaaacattttttaaagcacttagattgtcttacgtatgtgcatactatacctttacagcgtttattgtcttgtctcttgtcagtagaccttcagtacacagtatgtgggatatgtcagtcaagttggtcagcaccagcatctgtccagctgttcagtatattgtgattcattaaaaaatctcttctatcccagacatgggccaaggtgctgtatctgagggatgtgctgtaatttgatttacatgcattagagcacacagtagaaaaacgttagcttcattagtaatatgacacatgtatatagtgagatgtctttattgtgtgctttgcatattttgtaaatattttgcacgtcattatttttcttttttgtttaagcagtgtttggcctggaagagtgatatgcttgctgcttaatcaaaggattaaagatttaaagatg

SEQ ID NO: 385917 - DNA, 3635 bp, Homo sapiens
gagttgatatcttcccatccacccgccgcttctttcctccatctagcgatttttattttttaagtgtctcttcctttttctttcttttcttcttttttattttttatatatattttttggcattgctttgcagatgttgggatgagagtcggagccgaataccaagctcggatccctgaatttgatccaggtgctacaaagtacacagataaagacaatggagggatgcttgtatggtctccatatcacagtatcccagatgccaaattggatgaatacattgcaattgcaaaggaaaagcatggctacaatgtggaacaggcacttggcatgttgttctggcataaacataacattgagaagtcccttgctgatctccctaatttcactccctttccggatgagtggacagtggaagataaagtcctatttgaacaagcctttagttttcatggaaagagctttcacaggattcagcaaatgcttccagataagacaattgcaagccttgtaaaatattactattcttggaaaaaaactcgctctaggacaagtttgatggatcgccaggctcgtaaactagctaatagacataatcagggtgacagtgatgatgatgtagaagaaacacatccaatggatgggaatgatagtgattatgatcccaaaaaagaagccaaaaaagagggtaatactgaacaacctgtccaaactagcaagattggacttggaagaagagagtatcagagtttacaacatcgccatcattctcagcgttctaagtgccgtccacctaagggcatgtatttaacccaggaagatgtggtagcagtttcctgtagtcccaatgcagccaacaccatcctgaggcaactggacatggagttgatctctctaaaacgtcaggttcagaatgctaagcaagtaaacagtgcacttaaacagaaaatggaaggtggaattgaagaattcaaacctcctgagtcaaatcagaaaattaatgcccgttggaccacagaggagcagcttctagcagtgcaaggcacagaccccacaggctcctcggacactgggtccatcacctcctgccccatcatccactccaacaccaacagcccctattgccactctgaaccagcctccaccacttcttcgtccaacactgcctgctgccccggctcttcaccggcagcctcctccactccagcagcaggctcggttcatccagccccggccaactttaaatcagcctccaccacctcttattcgccctgctaattccatgccaccccgtctaaacccaagaccggtgttgtccacggttggtggtcaacagccaccatcacttattggaattcagacagattcacagtcctcactgcactaaaaattaaattggacacagctgcagtaacttttcaccccatcattataccagtgctcatctgactgatgaaaaagaggaaagaataatcatttctagatactgaggctgcgaactagttctgtggcagtggactagcataagtggatgtctaagaaatttttcagttcactagactaaaatgttttacaacaaaaagcctccagttagcctcctttctagagtatatgttcagcaatgtgatctcataaaaggaaaaacaaaagatttaagtattctatataccaagtttttgttttgtttttactgtatttattttattgaggttctttatattcctgcctcttcatagtcaaggctcttagtacaggaatattgacttaggaattgtgaaaactccttaagtttcttaagttaaggatgtttggcttttttctttaattttttaaaaaccattttcctatgttaggagtgcaagaatagccagcatttccgattttgacatatgttcattttatgcatatttaagaaattatagctgcatatcccttctttcaaaaaatgttgcttttttttttaaaggaattttaatatattcctttaaaagaaagcaatttaatcaattgcaaagcaattatataaaaccacaaagaatgtactgaacctactaaccctttaacatacagtttagggtcctagcgcagagtccttgtttaaaggtcattgactcatcatctgtcagtaatgagaggattggaagaataattttgcatacaaatgaggacttaatttgttgaaatataatctctttaagttccttgaaaatggagttggttttttttgtttctaaatgctatctgcttttaactagtagttgcctacatctggggacttcagagaagaattatattttgttagttaagtagacacagtggttatggaagcatttctttacagtaccctttacgtgtttggtttctgaacttaaaattgccctcatacttaataatatggtctgcatttaatatgaaaggtgttttattgataaatctattgtactatttggatacatttgtgtattccttgcagccaacctgtattcgtgggattggtgtagggttaaatcatcaacattatttcataaaataagaatttgttctgtgttatctaaagatgtatcagtatattgtcacagttgtgctgttaactaaaaatgctgagacccctttttatagaaaaacaaaaagacatcaagtcttcttaattcaacccataatcattaagtacttaacaaagaatattttacaagtgatagtatttcaacaatgtgtaattaatatttttgatacagtgatttcatattggaatcattatttgtgcaaagggacagacagatcacttagattgctatactagtggacataggctaaatgtttgcacattcacattcttatcacgtgtagaatacttcacaaaatagtcaacatctaaggccctaatttatgttttgaaagatcatgtgttcccaaagtattccctattgttggctccacagccttaaagtgctatagatttaaattcattgattagttttaatttttaattttagactgtgtatttccataaataccctacgtactggcatatttgaaactctttttccaggttaggtccttttctttctcattgaatcatcttaaatagttcttggccctgaatttagctgatttaaaattcttaatattcaagaatttatacttattttttccttaaaagccacaggggacagttaaatatcttaaaatatctaaaacattttttaaagcacttagattgtcttacgtatgtgcatactatacctttacagcgtttattgtcttgtctcttgtcagtagaccttcagtacacagtatgtgggatatgtcagtcaagttggtcagcaccagcatctgtccagctgttcagtatattgtgattcattaaaaaatctcttctatcccagacatgggccaaggtgctgtatctgagggatgtgctgtaatttgatttacatgcattagagcacacagtagaaaaacgttagcttcattagtaatatgacacatgtatatagtgagatgtctttattgtgtgctttgcatattttgtaaatattttgcacgtcattatttttcttttttgtttaagcagtgtttggcctggaagagtgatatgcttgctgcttaatcaaaggattaaagatttaaagatg

SEQ ID NO: 385918 - DNA, 3897 bp, Homo sapiens
gagttgatatcttcccatccacccgccgcttctttcctccatctagcgatttttattttttaagtgtctcttcctttttctttcttttcttcttttttattttttatatatattttttggcattgctttgcagatgttgggatgagagtcggagccgaataccaagctcggatccctgaatttgatccaggtgctacaaagtacacagataaagacaatggagggatgcttgtatggtctccatatcacagtatcccagatgccaaattggatgaatacattgcaattgcaaaggaaaagcatggctacaatgtggaacaggcacttggcatgttgttctggcataaacataacattgagaagtcccttgctgatctccctaatttcactccctttccggatgagtggacagtggaagataaagtcctatttgaacaagcctttagttttcatggaaagagctttcacaggattcagcaaatgcttccagataagacaattgcaagccttgtaaaatattactattcttggaaaaaaactcgctctaggacaagtttgatggatcgccaggctcgtaaactagctaatagacataatcagggtgacagtgatgatgatgtagaagaaacacatccaatggatgggaatgatagtgattatgatcccaaaaaagaagccaaaaaagagggtaatactgaacaacctgtccaaactagcaagattggacttggaagaagagagtatcagagtttacaacatcgccatcattctcagcgttctaagtgccgtccacctaagggcatgtatttaacccaggaagatgtggtagcagtttcctgtagtcccaatgcagccaacaccatcctgaggcaactggacatggagttgatctctctaaaacgtcaggttcagaatgctaagcaagtaaacagtgcacttaaacagaaaatggaaggtggaattgaagaattcaaacctcctgagtcaaatcagaaaattaatgcccgttggaccacagaggagcagcttctagcagtgcaaggtgtccgcaaatatggtaaagattttcaagctattgcagatgtaattggcaacaagactgttggccaagtgaagaacttctttgtaaactacaggcgtcggtttaacttagaggaggtattgcaggagtgggaagcagaacaaggaacccaggcttctaatggtgatgcttctactttaggggaggagacaaaaagtgcttctaatgtgccatcagggaagagcactgatgaagaagaggaggtgtgtttgtgtatggaatttgagctaatatgagttgaggaatcaccattttgtgtggtattctgtaaggttaatttgtcaagaggactagctaaattgagcatgaaaggttgacaatacacttcttcagtggtgcatctctcgtgactcttaagtcataatgacatgctaagttctgattctagaagaatggagagtgtattgttctttcatagtcttatttttattttcagtgttaagctgtttacaaataaagatgcctgtttggtagcctcattggtttttggtttttggttttgttttgtttaaaataaaagaagcttgtgcttccaataaacactggtgttatgtttttgttttgttttgatttgttttgtttttcctgtgacagcccaaactatattgtattaagttcattaggacttacatctcatacgtgtatttttgtttcctcacctctaggcacagaccccacaggctcctcggacactgggtccatcacctcctgccccatcatccactccaacaccaacagcccctattgccactctgaaccagcctccaccacttcttcgtccaacactgcctgctgccccggctcttcaccggcagcctcctccactccagcagcaggctcggttcatccagccccggccaactttaaatcagcctccaccacctcttattcgccctgctaattccatgccaccccgtctaaacccaagaccggtgttgtccacggttggtggtcaacagccaccatcacttattggaattcagacagattcacagtcctcactgcactaaaaattaaattggacacagctgcagtaacttttcaccccatcattataccagtgctcatctgactgatgaaaaagaggaaagaataatcatttctagatactgaggctgcgaactagttctgtggcagtggactagcataagtggatgtctaagaaatttttcagttcactagactaaaatgttttacaacaaaaagcctccagttagcctcctttctagagtatatgttcagcaatgtgatctcataaaaggaaaaacaaaagatttaagtattctatataccaagtttttgttttgtttttactgtatttattttattgaggttctttatattcctgcctcttcatagtcaaggctcttagtacaggaatattgacttaggaattgtgaaaactccttaagtttcttaagttaaggatgtttggcttttttctttaattttttaaaaaccattttcctatgttaggagtgcaagaatagccagcatttccgattttgacatatgttcattttatgcatatttaagaaattatagctgcatatcccttctttcaaaaaatgttgcttttttttttaaaggaattttaatatattcctttaaaagaaagcaatttaatcaattgcaaagcaattatataaaaccacaaagaatgtactgaacctactaaccctttaacatacagtttagggtcctagcgcagagtccttgtttaaaggtcattgactcatcatctgtcagtaatgagaggattggaagaataattttgcatacaaatgaggacttaatttgttgaaatataatctctttaagttccttgaaaatggagttggttttttttgtttctaaatgctatctgcttttaactagtagttgcctacatctggggacttcagagaagaattatattttgttagttaagtagacacagtggttatggaagcatttctttacagtaccctttacgtgtttggtttctgaacttaaaattgccctcatacttaataatatggtctgcatttaatatgaaaggtgttttattgataaatctattgtactatttggatacatttgtgtattccttgcagccaacctgtattcgtgggattggtgtagggttaaatcatcaacattatttcataaaataagaatttgttctgtgttatctaaagatgtatcagtatattgtcacagttgtgctgttaactaaaaatgctgagacccctttttatagaaaaacaaaaagacatcaagtcttcttaattcaacccataatcattaagtacttaacaaagaatattttacaagtgatagtatttcaacaatgtgtaattaatatttttgatacagtgatttcatattggaatcattatttgtgcaaagggacagacagatcacttagattgctatatatacctttacagcgtttattgtcttgtctcttgtcagtagaccttcagtacacagtatgtgggatatgtcagtcaagttggtcagcaccagcatctgtccagctgttcagtatattgtgattcattaaaaaatctcttctatcccagacatgggccaaggtgctgtatctgagggatgtgctgtaatttgatttacatgcattagagcacacagtagaaaaacgttagcttcattagtaatatgacacatgtatatagtgagatgtctttattgtgtgctttgcatattttgtaaatattttgcacgtcattatttttcttttttgtttaagcagtgtttggcctggaagagtgatatgcttgctgcttaatcaaaggattaaagatttaaagatg

SEQ ID NO: 385919 - DNA, 2448 bp, Homo sapiens
gagttgatatcttcccatccacccgccgcttctttcctccatctagcgatttttattttttaagtgtctcttcctttttctttcttttcttcttttttattttttatatatattttttggcattgctttgcagatgttgggatgagagtcggagccgaataccaagctcggatccctgaatttgatccaggtgctacaaagtacacagataaagacaatggagggatgcttgtatggtctccatatcacagtatcccagatgccaaattggatgaatacattgcaattgcaaaggaaaagcatggctacaatgtggaacaggcacttggcatgttgttctggcataaacataacattgagaagtcccttgctgatctccctaatttcactccctttccggatgagtggacagtggaagataaagtcctatttgaacaagcctttagttttcatggaaagagctttcacaggattcagcaaatgcttccagataagacaattgcaagccttgtaaaatattactattcttggaaaaaaactcgctctaggacaagtttgatggatcgccaggctcgtaaactagctaatagacataatcagggtgacagtgatgatgatgtagaagaaacacatccaatggatgggaatgatagtgattatgatcccaaaaaagaagccaaaaaagagggtaatactgaacaacctgtccaaactagcaagattggacttggaagaagagagtatcagagtttacaacatcgccatcattctcagcgttctaagtgccgtccacctaagggcatgtatttaacccaggaagatgtggtagcagtttcctgtagtcccaatgcagccaacaccatcctgaggcaactggacatggagttgatctctctaaaacgtcaggttcagaatgctaagcaagtaaacagtgcacttaaacagaaaatggaaggtggaattgaagaattcaaacctcctgagtcaaatcagaaaattaatgcccgttggaccacagaggagcagcttctagcagtgcaaggtgtccgcaaatatggtaaagattttcaagctattgcagatgtaattggcaacaagactgttggccaagtgaagaacttctttgtaaactacaggcgtcggtttaacttagaggaggtattgcaggagtgggaagcagaacaaggaacccaggcttctaatggtgatgcttctactttaggggaggagacaaaaagtgcttctaatgtgccatcagggaagagcactgatgaagaagaggaggcacagaccccacaggctcctcggacactgggtccatcacctcctgccccatcatccactccaacaccaacagcccctattgccactctgaaccagcctccaccacttcttcgtccaacactgcctgctgccccggctcttcaccggcagcctcctccactccagcagcaggctcggttcatccagccccggccaactttaaatcagcctccaccacctcttattcgccctgctaattccatgccaccccgtctaaacccaagaccggtgttgtccacggttggtggtcaacagccaccatcacttattggaattcagacagattcacagtcctcactgcactaaaaattaaattggacacagctgcagtaacttttcaccccatcattataccagtgctcatctgactgatgaaaaagaggaaagaataatcatttctagatactgaggctgcgaactagttctgtggcagtggactagcataagtggatgtctaagaaatttttcagttcactagactaaaatgttttacaacaaaaagcctccagttagcctcctttctagagtatatgttcagcaatgtgatctcataaaaggaaaaacaaaagatttaagtattctatataccaagtttttgttttgtttttactgtatttattttattgaggttctttatattcctgcctcttcatagtcaaggctcttagtacaggaatattgacttaggaattgtgaaaactccttaagtttcttaagttaaggatgtttggcttttttctttaattttttaaaaaccattttcctatgttaggagtgcaagaatagccagcatttccgattttgacatatgttcattttatgcatatttaagaaattatagctgcatatcccttctttcaaaaaatgttgcttttttttttaaaggaattttaatatattcctttaaaagaaagcaatttaatcaattgcaaagcaattatataaaaccacaaagaatgtactgaacctactaaccctttaacatacagtttagggtcctagcgcagagtccttgtttaaaggtcattgactcatcatctgtcagtaatgagaggattggaagaataattttgcatacaaatgaggacttaatttgttgaaatataatctctttaagttccttga

SEQ ID NO: 385920 - DNA, 3430 bp, Homo sapiens
aaattcttagccaagtacacgggccacttaaccaaaaaagggaaggtggatttaaagaattcaaccctcttgagccaattcagaaatttaatgccccgttggaccccagagaagcagtttccagcagtgcaaggtgtccgcaaatatggtaaagattttcaagctattgcagatgtaattggcaacaagactgttggccaagtgaagaacttctttgtaaactacaggcgtcggtttaacttagaggaggtattgcaggagtgggaagcagaacaaggaacccaggcttctaatggtgatgcttctactttaggggaggagacaaaaagtgcttctaatgtgccatcagggaagagcactgatgaagaagaggaggtgtgtttgtgtatggaatttgagctaatatgagttgaggaatcaccattttgtgtggtattctgtaaggttaatttgtcaagaggactagctaaattgagcatgaaaggttgacaatacacttcttcagtggtgcatctctcgtgactcttaagtcataatgacatgctaagttctgattctagaagaatggagagtgtattgttctttcatagtcttatttttattttcagtgttaagctgtttacaaataaagatgcctgtttggtagcctcattggtttttggtttttggttttgttttgtttaaaataaaagaagcttgtgcttccaataaacactggtgttatgtttttgttttgttttgatttgttttgtttttcctgtgacagcccaaactatattgtattaagttcattaggacttacatctcatacgtgtatttttgtttcctcacctctaggcacagaccccacaggctcctcggacactgggtccatcacctcctgccccatcatccactccaacaccaacagcccctattgccactctgaaccagcctccaccacttcttcgtccaacactgcctgctgccccggctcttcaccggcagcctcctccactccagcagcaggctcggttcatccagccccggccaactttaaatcagcctccaccacctcttattcgccctgctaattccatgccaccccgtctaaacccaagaccggtgttgtccacggttggtggtcaacagccaccatcacttattggaattcagacagattcacagtcctcactgcactaaaaattaaattggacacagctgcagtaacttttcaccccatcattataccagtgctcatctgactgatgaaaaagaggaaagaataatcatttctagatactgaggctgcgaactagttctgtggcagtggactagcataagtggatgtctaagaaatttttcagttcactagactaaaatgttttacaacaaaaagcctccagttagcctcctttctagagtatatgttcagcaatgtgatctcataaaaggaaaaacaaaagatttaagtattctatataccaagtttttgttttgtttttactgtatttattttattgaggttctttatattcctgcctcttcatagtcaaggctcttagtacaggaatattgacttaggaattgtgaaaactccttaagtttcttaagttaaggatgtttggcttttttctttaattttttaaaaaccattttcctatgttaggagtgcaagaatagccagcatttccgattttgacatatgttcattttatgcatatttaagaaattatagctgcatatcccttctttcaaaaaatgttgcttttttttttaaaggaattttaatatattcctttaaaagaaagcaatttaatcaattgcaaagcaattatataaaaccacaaagaatgtactgaacctactaaccctttaacatacagtttagggtcctagcgcagagtccttgtttaaaggtcattgactcatcatctgtcagtaatgagaggattggaagaataattttgcatacaaatgaggacttaatttgttgaaatataatctctttaagttccttgaaaatggagttggttttttttgtttctaaatgctatctgcttttaactagtagttgcctacatctggggacttcagagaagaattatattttgttagttaagtagacacagtggttatggaagcatttctttacagtaccctttacgtgtttggtttctgaacttaaaattgccctcatacttaataatatggtctgcatttaatatgaaaggtgttttattgataaatctattgtactatttggatacatttgtgtattccttgcagccaacctgtattcgtgggattggtgtagggttaaatcatcaacattatttcataaaataagaatttgttctgtgttatctaaagatgtatcagtatattgtcacagttgtgctgttaactaaaaatgctgagacccctttttatagaaaaacaaaaagacatcaagtcttcttaattcaacccataatcattaagtacttaacaaagaatattttacaagtgatagtatttcaacaatgtgtaattaatatttttgatacagtgatttcatattggaatcattatttgtgcaaagggacagacagatcacttagattgctatactagtggacataggctaaatgtttgcacattcacattcttatcacgtgtagaatacttcacaaaatagtcaacatctaaggccctaatttatgttttgaaagatcatgtgttcccaaagtattccctattgttggctccacagccttaaagtgctatagatttaaattcattgattagttttaatttttaattttagactgtgtatttccataaataccctacgtactggcatatttgaaactctttttccaggttaggtccttttctttctcattgaatcatcttaaatagttcttggccctgaatttagctgatttaaaattcttaatattcaagaatttatacttattttttccttaaaagccacaggggacagttaaatatcttaaaatatctaaaacattttttaaagcacttagattgtcttacgtatgtgcatactatacctttacagcgtttattgtcttgtctcttgtcagtagaccttcagtacacagtatgtgggatatgtcagtcaagttggtcagcaccagcatctgtccagctgttcagtatattgtgattcattaaaaaatctcttctatcccagacatgggccaaggtgctgtatctgagggatgtgctgtaatttgatttacatgcattagagcacacagtagaaaaacgttagcttcattagtaatatgacacatgtatatagtgagatgtctttattgtgtgctttgcatattttgtaaatattttgcacgtcattatttttcttttttgtttaagcagtgtttggcctggaagagtgatatgcttgctgcttaatcaaaggattaaagatttaaagatg

SEQ ID NO: 385921 - DNA, 2989 bp, Homo sapiens
taatttttgtttcttctcagtgatgatgatgtagaagaaacacatccaatggatgggaatgatagtgattatgatcccaaaaaagaagccaaaaaagagggtaatactgaacaacctgtccaaactagcaagattggacttggaagaagagagtatcagagtttacaacatcgccatcattctcagcgttctaagtgccgtccacctaagggcatgtatttaacccaggaagatgtggtagcagtttcctgtagtcccaatgcagccaacaccatcctgaggcaactggacatggagttgatctctctaaaacgtcaggttcagaatgctaagcaagtaaacagtgcacttaaacagaaaatggaaggtggaattgaagaattcaaacctcctgaggcacagaccccacaggctcctcggacactgggtccatcacctcctgccccatcatccactccaacaccaacagcccctattgccactctgaaccagcctccaccacttcttcgtccaacactgcctgctgccccggctcttcaccggcagcctcctccactccagcagcaggctcggttcatccagccccggccaactttaaatcagcctccaccacctcttattcgccctgctaattccatgccaccccgtctaaacccaagaccggtgttgtccacggttggtggtcaacagccaccatcacttattggaattcagacagattcacagtcctcactgcactaaaaattaaattggacacagctgcagtaacttttcaccccatcattataccagtgctcatctgactgatgaaaaagaggaaagaataatcatttctagatactgaggctgcgaactagttctgtggcagtggactagcataagtggatgtctaagaaatttttcagttcactagactaaaatgttttacaacaaaaagcctccagttagcctcctttctagagtatatgttcagcaatgtgatctcataaaaggaaaaacaaaagatttaagtattctatataccaagtttttgttttgtttttactgtatttattttattgaggttctttatattcctgcctcttcatagtcaaggctcttagtacaggaatattgacttaggaattgtgaaaactccttaagtttcttaagttaaggatgtttggcttttttctttaattttttaaaaaccattttcctatgttaggagtgcaagaatagccagcatttccgattttgacatatgttcattttatgcatatttaagaaattatagctgcatatcccttctttcaaaaaatgttgcttttttttttaaaggaattttaatatattcctttaaaagaaagcaatttaatcaattgcaaagcaattatataaaaccacaaagaatgtactgaacctactaaccctttaacatacagtttagggtcctagcgcagagtccttgtttaaaggtcattgactcatcatctgtcagtaatgagaggattggaagaataattttgcatacaaatgaggacttaatttgttgaaatataatctctttaagttccttgaaaatggagttggttttttttgtttctaaatgctatctgcttttaactagtagttgcctacatctggggacttcagagaagaattatattttgttagttaagtagacacagtggttatggaagcatttctttacagtaccctttacgtgtttggtttctgaacttaaaattgccctcatacttaataatatggtctgcatttaatatgaaaggtgttttattgataaatctattgtactatttggatacatttgtgtattccttgcagccaacctgtattcgtgggattggtgtagggttaaatcatcaacattatttcataaaataagaatttgttctgtgttatctaaagatgtatcagtatattgtcacagttgtgctgttaactaaaaatgctgagacccctttttatagaaaaacaaaaagacatcaagtcttcttaattcaacccataatcattaagtacttaacaaagaatattttacaagtgatagtatttcaacaatgtgtaattaatatttttgatacagtgatttcatattggaatcattatttgtgcaaagggacagacagatcacttagattgctatactagtggacataggctaaatgtttgcacattcacattcttatcacgtgtagaatacttcacaaaatagtcaacatctaaggccctaatttatgttttgaaagatcatgtgttcccaaagtattccctattgttggctccacagccttaaagtgctatagatttaaattcattgattagttttaatttttaattttagactgtgtatttccataaataccctacgtactggcatatttgaaactctttttccaggttaggtccttttctttctcattgaatcatcttaaatagttcttggccctgaatttagctgatttaaaattcttaatattcaagaatttatacttattttttccttaaaagccacaggggacagttaaatatcttaaaatatctaaaacattttttaaagcacttagattgtcttacgtatgtgcatactatacctttacagcgtttattgtcttgtctcttgtcagtagaccttcagtacacagtatgtgggatatgtcagtcaagttggtcagcaccagcatctgtccagctgttcagtatattgtgattcattaaaaaatctcttctatcccagacatgggccaaggtgctgtatctgagggatgtgctgtaatttgatttacatgcattagagcacacagtagaaaaacgttagcttcattagtaatatgacacatgtatatagtgagatgtctttattgtgtgctttgcatattttgtaaatattttgcacgtcattatttttcttttttgtttaagcagtgtttggcctggaagagtgatatgcttgctgcttaatcaaaggattaaagatttaaagatg

SEQ ID NO: 385922 - DNA, 1394 bp, Homo sapiens
gagttgatatcttcccatccacccgccgcttctttcctccatctagcgatttttattttttaagtgtctcttcctttttctttcttttcttcttttttattttttatatatattttttggcattgctttgcagatgttgggatgagagtcggagccgaataccaagctcggatccctgaatttgatccaggtgctacaaagtacacagataaagacaatggagggatgcttgtatggtctccatatcacagtatcccagatgccaaattggatgaatacattgcaattgcaaaggaaaagcatggctacaatgtggaacaggcacttggcatgttgttctggcataaacataacattgagaagtcccttgctgatctccctaatttcactccctttccggatgagtggacagtggaagataaagtcctatttgaacaagcctttagttttcatggaaagagctttcacaggattcagcaaatgcttccagataagacaattgcaagccttgtaaaatattactattcttggaaaaaaactcgctctaggacaagtttgatggatcgccaggctcgtaaactagctaatagacataatcagggtgacagtgatgatgatgtagaagaaacacatccaatggatgggaatgatagtgattatgatcccaaaaaagaagccaaaaaagaggtaatgatgatcactagaagtacttgtgattgttctacaaatctgctgaaaaagaatgaacagtacttcgtattaagaaaaactttttaatgtaatgctttatgagatagtaaatttcagtgttaattagcaatacagtcatacctagaaccccagttaaccaagttgttgaaagttgaaaataccattgaaactggaaaaagatctgagtttgtttaaacttagcatttgctagttatgtgacctcattcagtttagtgactctcattcttctgaagaaacccaatgccatgggccattcatcaccttaagctctttcatcaatgttatttaaaaaattctcttctactgtaattttgtgttttactgattttctttctactgctaaatattctcaaattccttaattccttcattttctcccccaagtctgccttacctttgtttcccagaaacgtggtcccaatgatcaactattcgaatctccttctttcccatttccccattcctttaactccccacttcccttatccttctgctataccatccctaaccctgtaacctcatgatgctggattcgttgctattcacggtctaagagatgccccggaactggttccctcttccttgtcgtccatgaaacagtccagccctggaccctaaggcccattccctccagtctcctctcacagaccacgaggttcgcc

SEQ ID NO: 385923 - DNA, 180 bp, Homo sapiens
agtcttggcccttttcaatccactctctacaaagtacagtaaacttttaaagtatagatctgatcatgatatcctgtgctcaaaactcttcactggctcctttcaggaaaagaaccaaattcattaggaactggcccttgcttatctctccagaggatcataaaaaataaaactgggaag

SEQ ID NO: 385924 - DNA, 2786 bp, Homo sapiens
caatgagataccatctcatgccggtcagaatggtgattattaaaaagtcaaaaaacaacagatgctggcgaggctgtggagaagtaggaacacttttacattgttggtgggaatgtaaattagttcaaccgttgtggaagtgtgtgtggctattcctcaaagatctagaactagaaatactatttgtcccagcaatcccattactgggtatatacccaaaggaatataaaccattttattataaagatacatgcacatttttgttcattgcagcactcttcacaatagcaaagacacaatagcaaatgcccatcaaagatagactggataaagaaaatgtggtacatatacaccatggaatactgtgcagtgcagccattacagcttttggtgatacagtgaatcagatttttcattaattcttttaattggttattactgaacatgaaaaagtaatgtttgtattgaaatcttgagtctggccatgtttctattttaaattcataaagaattctaacaagaggaattccaagaatgtcataaatggatgtttctccatggatgaaggaactgttttattcacttgctgataattcagcctaatccagtttgacatcatatagataagtagttgaattatggatttaaaatacatatcattttctaactccaaaggtaatacttatttaaatggttttgaaaatatagaaaggcacaatttctttttaaatctgttattctccaccaccactcaatctgtctatcatctatctctccattcattcttccatttgtttatatctgttaatctttgtatgtgttcatgtatagcttttacatgattggaatcataatgcatattccattttgaagtctgcttttttttacacaaaaatatgttgtgaatattttcctatattatgaaatatcattagctgagcttttagaattgactgcatgttttggtaccatttagatatagtttaagatacttagaagttatgtggctttgccactatggatgaatcttatttactcaatattaattacttacaaataacctcacctaaacactactcagccataaaaaggaatgaattaatgacattcacagcaacctggagactattactctaaaggaagtaactgaggaatggaaaaccaaacattgtatgttctcactcataagtgggagataagctatgaggatgcaaaggcataagaaggatacaatggactttggggacttaggggaaagggtgggaggggggtgaaggataaaagaatacaaattgggttcagtgtatactgctcaggtgatgggtgcaccagaatctcacaagtaaccacttaattacttacgcatgtaaccagataccacctgttccccaaacacctatggaaataattttgtttttttttttaaaaaaggaatgagatcatgtcctttgcagggacatggatgaagctggaagccattatcctcagcaaactaacagaggagcaggaaaccaaacaccacatgttctcacttgtaagcggaagctgaacaatgagaacacacggacacagggatgagatcaacacacactggggcctgatgcaggggccgtagcggggagagcatcaggataactagctaatgcatgtggggcttaatacctaggtgataggttgataggtgcagcaaaccaccatgggacacgtttacctatgtaacaaacccgcacatcctgcacttgtatccagaacttaaaatattttaaaaatctttagagaatacaaaaaaaaaaagattcttcaatgcatacacaataaaattgcagttcagtcaaacattggaagtctttctctaactgtctagttggtatcttcattttcagcttcttcaagatcccactccaaacactgttagctcagccaaattgaacagctcatatctcctacctctggatctttggttctggtgattgtatatttctggaccatctggaaccccagcatatcaccctaccccacatctccacatccccaaaatataaccatacttcaagggcagttcaaataccatctccttctatcctccatgaagtcagttatctcttccattggaattatcgccccctctcctgaacagtactatttcgtgtgaatctcctccaagccttcttttcattttatatctcatgctgtaattcttggaaagtatgctgtagctcaagtgcagaattctcatcagttttatctttatatctctcctaaacactttacctgatgaagagcctggcatacacataaatatatattgaatgaatcagtgatggattgaaaagagaaatgatggatctcctaaattttaacttttataaaatattttgatacattcatgaccttactttagcaagcaatgaacgtgatgtaaactattgttgatatagtttttatattggaagtgtaagtagtttgtggcatgggattgtgacatatcctaggtttcctcatcttctttttattgaaatgtaattcacaagccataaaatttgcccctttaaagtaaatgatgcagtggattttagtatatttacagagttgtgcaatcatcaccactatctaattccagaacatttccatctacctagaaactccataccagtgagctgccactctaatcctcctcttcccccagcctctagaaacaataatccattttctgtctctatgatttgcctgttctagatattttataaaaataaacatgtggcctttcgtgtctgacttccttcact

SEQ ID NO: 385925 - DNA, 2732 bp, Homo sapiens
caatgagataccatctcatgccggtcagaatggtgattattaaaaagtcaaaaaacaacagatgctggcgaggctgtggagaagtaggaacacttttacattgttggtgggaatgtaaattagttcaaccgttgtggaagtgtgtgtggctattcctcaaagatctagaactagaaatactatttgtcccagcaatcccattactgggtatatacccaaaggaatataaaccattttattataaagatacatgcacatttttgttcattgcagcactcttcacaatagcaaagacacaatagcaaatgcccatcaaagatagactggataaagaaaatgtggtacatatacaccatggaatactgtgcagtgcagccattacagcttttggtgatacagtgaatcagatttttcattaattcttttaattggttattactgaacatgaaaaagtaatgtttgtattgaaatcttgagtctggccatgtttctattttaaattcataaagaattctaacaagaggaattccaagaatgtcataaatggatgtttctccatggatgaaggaactgttttattcacttgctgataattcagcctaatccagtttgacatcatatagataagtagttgaattatggatttaaaatacatatcattttctaactccaaaggtaatacttatttaaatggttttgaaaatatagaaaggcacaatttctttttaaatctgttattctccaccaccactcaatctgtctatcatctatctctccattcattcttccatttgtttatatctgttaatctttgtatgtgttcatgtatagcttttacatgattggaatcataatgcatattccattttgaagtctgcttttttttacacaaaaatatgttgtgaatattttcctatattatgaaatatcattagctgagcttttagaattgactgcatgttttggtaccatttagatatagtttaagatacttagaagttatgtggctttgccactatggatgaatcttatttactcaatattaattacttacaaataacctcacctaaacactactcagccataaaaaggaatgaattaatgacattcacagcaacctggagactattactctaaaggaagtaactgaggaatggaaaaccaaacattgtatgttctcactcataagtgggagataagctatgaggatgcaaaggcataagaaggatacaatggactttggggacttaggggaaagggtgggaggggggtgaaggataaaagaatacaaattgggttcagtgtatactgctcaggtgatgggtgcaccagaatctcacaagtaaccacttaattacttacgcatgtaaccagataccacctgttccccaaacacctatggaaataattttgtttttttttttaaatcctcagcaaactaacagaggagcaggaaaccaaacaccacatgttctcacttgtaagcggaagctgaacaatgagaacacacggacacagggatgagatcaacacacactggggcctgatgcaggggccgtagcggggagagcatcaggataactagctaatgcatgtggggcttaatacctaggtgataggttgataggtgcagcaaaccaccatgggacacgtttacctatgtaacaaacccgcacatcctgcacttgtatccagaacttaaaatattttaaaaatctttagagaatacaaaaaaaaaaagattcttcaatgcatacacaataaaattgcagttcagtcaaacattggaagtctttctctaactgtctagttggtatcttcattttcagcttcttcaagatcccactccaaacactgttagctcagccaaattgaacagctcatatctcctacctctggatctttggttctggtgattgtatatttctggaccatctggaaccccagcatatcaccctaccccacatctccacatccccaaaatataaccatacttcaagggcagttcaaataccatctccttctatcctccatgaagtcagttatctcttccattggaattatcgccccctctcctgaacagtactatttcgtgtgaatctcctccaagccttcttttcattttatatctcatgctgtaattcttggaaagtatgctgtagctcaagtgcagaattctcatcagttttatctttatatctctcctaaacactttacctgatgaagagcctggcatacacataaatatatattgaatgaatcagtgatggattgaaaagagaaatgatggatctcctaaattttaacttttataaaatattttgatacattcatgaccttactttagcaagcaatgaacgtgatgtaaactattgttgatatagtttttatattggaagtgtaagtagtttgtggcatgggattgtgacatatcctaggtttcctcatcttctttttattgaaatgtaattcacaagccataaaatttgcccctttaaagtaaatgatgcagtggattttagtatatttacagagttgtgcaatcatcaccactatctaattccagaacatttccatctacctagaaactccataccagtgagctgccactctaatcctcctcttcccccagcctctagaaacaataatccattttctgtctctatgatttgcctgttctagatattttataaaaataaacatgtggcctttcgtgtctgacttccttcact

SEQ ID NO: 385926 - DNA, 1713 bp, Homo sapiens
caatgagataccatctcatgccggtcagaatggtgattattaaaaagtcaaaaaacaacagatgctggcgaggctgtggagaagtaggaacacttttacattgttggtgggaatgtaaattagttcaaccgttgtggaagtgtgtgtggctattcctcaaagatctagaactagaaatactatttgtcccagcaatcccattactgggtatatacccaaaggaatataaaccattttattataaagatacatgcaccagaatctcacaagtaaccacttaattacttacgcatgtaaccagataccacctgttccccaaacacctatggaaataattttgtttttttttttaaaaaaggaatgagatcatgtcctttgcagggacatggatgaagctggaagccattatcctcagcaaactaacagaggagcaggaaaccaaacaccacatgttctcacttgtaagcggaagctgaacaatgagaacacacggacacagggatgagatcaacacacactggggcctgatgcaggggccgtagcggggagagcatcaggataactagctaatgcatgtggggcttaatacctaggtgataggttgataggtgcagcaaaccaccatgggacacgtttacctatgtaacaaacccgcacatcctgcacttgtatccagaacttaaaatattttaaaaatctttagagaatacaaaaaaaaaaagattcttcaatgcatacacaataaaattgcagttcagtcaaacattggaagtctttctctaactgtctagttggtatcttcattttcagcttcttcaagatcccactccaaacactgttagctcagccaaattgaacagctcatatctcctacctctggatctttggttctggtgattgtatatttctggaccatctggaaccccagcatatcaccctaccccacatctccacatccccaaaatataaccatacttcaagggcagttcaaataccatctccttctatcctccatgaagtcagttatctcttccattggaattatcgccccctctcctgaacagtactatttcgtgtgaatctcctccaagccttcttttcattttatatctcatgctgtaattcttggaaagtatgctgtagctcaagtgcagaattctcatcagttttatctttatatctctcctaaacactttacctgatgaagagcctggcatacacataaatatatattgaatgaatcagtgatggattgaaaagagaaatgatggatctcctaaattttaacttttataaaatattttgatacattcatgaccttactttagcaagcaatgaacgtgatgtaaactattgttgatatagtttttatattggaagtgtaagtagtttgtggcatgggattgtgacatatcctaggtttcctcatcttctttttattgaaatgtaattcacaagccataaaatttgcccctttaaagtaaatgatgcagtggattttagtatatttacagagttgtgcaatcatcaccactatctaattccagaacatttccatctacctagaaactccataccagtgagctgccactctaatcctcctcttcccccagcctctagaaacaataatccattttctgtctctatgatttgcctgttctagatattttataaaaataaacatgtggcctttcgtgtctgacttccttcact

SEQ ID NO: 385927 - DNA, 269 bp, Homo sapiens
gtccaccagagcttgctctaataagagtaagaccaacacggtcaaccccaagaaaccgaccccatagagaagaagtgcgctggcaggcacttggggcccactccctggtgctcctaaacagtgtgtccaaaccccggctgcccgcagcagatccaggtcatgtactccaggactgtagccacacctcactgcccactcctgcgttagcactctccagccttaccttgctcaaatagctcaccctccatgcaaaaataaaaacaaaagca

SEQ ID NO: 385928 - DNA, 482 bp, Homo sapiens
gggagtgaggtgagggtatgggacaggtgcagagaagggagagtgaggctactggcctactagagaagaacttgctgtgacctctgtgttcattacctgttgttgctataacaagtgactacaaacttggtggcttaaaccgatccagatttattatcttccctctctggaggtcagaagtcctaaatggctctcagtgggctcaattcaagaatgtcagcaggaccatgtttcttctggaggctccagggaggattcatttcctggcctgtcccagcatctagggactgcctgtgtttcttggctggtggtcccttcctccccttcaaagccagcgattctgtgtcttctaatttctctcatgcttctctctctctgtcactgtaaagacccttgagattacattgggcccacctgaattacccagcataatctcctcattgtaagatccttaacttaatcacgtctgcaaggaacccacg

SEQ ID NO: 385929 - DNA, 300 bp, Homo sapiens
atcagctgagtgccgttggaggaaaatgttcatgagatgcggcctgaggcctgtccccagcccaagctgggtctcctggcgactgcagcttggagcacctttggaaagcctcctgggacttgggatgtctttggggctgggaacaagtgtgggtggaggaagggccggtcctgtggtcacccagccctgtcttgtagggaaggaactgctggggtcccaggagaagccagagccaggcagtgagctccagatggtgggggagtggctgccaccttgaccatcttcccccgcatggctgtt

SEQ ID NO: 385930 - DNA, 2272 bp, Homo sapiens
cagtcctcctgccttagtttcccaaagcactgggattacaggtgtgagccactgcccccggccagcacccgtcttctggaacatttgtaagcatttctgttgggtgtgtacttgcgcgtggaattgctggctctcagttatgcacatttcttagaagatcctgccagtccttcatcccagaccccgaccccagcgtggaaaacgcagtgcatcctcaacgcctagtgtttgcggctgtggcggctcatgatcgacttggaaggcccacagtgtgtggtgtggagttttgcagggagccagtgacactgcccaccttcgatccagacctaaccttgatcctgttctctgaggccaccttaccaaaaccttgacttacccgtcttagatcacttaccctgggggaaatgtgccgcaagctcacgagggcactcagccagcctacaaaggttaccatggcagagaactgaggcctcctgccagcagccagcagcagctgaccagccgcgagggcccctccgggaaggagagctttctgtgtttcttcctgtaccccatatatgttgacgtgatacgttttactttctgatttcccttgtgagatctttggtctgtgggttatttggaagtatggtttaatttccaaacatttagggttttcctccagattgttgttgtttctggtttctggttttaattccactgtggtctcagaatatactttgctgacttccctctctttagatttgttgagccctgttttgtgcttcatagtgggagggtgattgtatgtgcacgtgcagatatgtgtggcccccacacggtatctccagctatccgtgtcttgcctctccgtgcccagtgcacccttctcagccctgccgtgtgaccctgggctgggccctccctgtaccctcctttgcaggttggcacagtgtttggctctgtcactggaaggagctggagggactccacaggagggaggggcctgccctcctggttccagtgtgcttgcttttcctggcttccgtggtgtgtgcctgccagcctcatggtgggggcgggggctctcagtgacagtctgcaggagtttagcaacacccaggttcattcaccacggtgggaaggattcctgctaagcttccttgcctctgtccagctcccagggcgtctgcctccctcctgccccagggagagcttctgggtgagtctcgctggcactcctgccccgggcttcctgctctcaggccttggcctgctgcaccttggccaactgcaccacccggcacatcatagccccactcaggtcagagctgcgtctcagccgacgtggggttccgaggttctcaccaagatccagactcaacgcttgtgggtttgttgtctcagtcctggcggtggaggttctcccgaggcctcagcgcctctgttctcggaagtctctttacatgttagtggaaccctctgttcctgttgaatcattcttcgtgttaaatgtttctatctcttgactgatacatgatagtcatcatgtatgtattctgcggctgcttttgattttttctctttatccctggttttctgtaatttgataagctttagggtatgtgtgtgtgttttgggggtttgtcaagatttgtaggctttgtcatttttatgcaatttggaaatattctagctattcggtctcttcccctgcctcctgcagtcccaggtactcgaatgggctgcttgctgtggactcatgggtccgtgagtctgctcatcttcttcagtttgcgtttcattttggtagattctgtttccacgtcttcaagcccactgatcttttaagctgctgttaagctatggccattttctgtatgagccattgtgttttttcatctctataaatttggttttggtatttaaaaaaatgtcttccagctaggctggcggctcacacctgtgatcccaacactttgggaagttgaggcagggggattgcttgagcccaggagtttgagactagcctgggcaatacagtgagacctcatctttaaaaataattaaaaaggtcaggtgcggtggctcacgcctgtaatcccagcattttgggaggacagtggatcacaaggttaggagtttgagaccagcttggccaatatggtgaaaccctgtctctactaaaaatataaaaaattagctgggcacatgcctgttgtcccagttatttgagaggctaaagcaggagaatcgcttgaacctgggaggcggaggttgcagtgagccgaga

SEQ ID NO: 385931 - DNA, 344 bp, Homo sapiens
acaacaaaataagaatatgttacagagattggcctgcaaaaccttaaatatttactatttggccctttgcagaaaatttactaattcttggtcatattctatattaatagttactcttagcattttaaagacaatattccattgtctttcagcttccactgttgctgttgagaaatcaatatacagttactagtcactacttggtagaagtacgatttttttctctggctactttcaatatcttccctttgtgttagatgcctttcagtttcactttgaatttatgggtgtagatcccattactcaggaaatcctaagttattacctgaggatattgcctcttt

SEQ ID NO: 385932 - DNA, 429 bp, Homo sapiens
tgcatgtgtgtgtgtgcgtgtgtgtgcatgtgcgtgtgtgtgtgcgtgcgtgtgtgtgcatgtgcgtgtgtgtgcgcgcgtgtgcgtgtgtgtgtgggcgtgcacgctctaacatgcaagaaaggactagaacggtagcccccgacacgatgagacaactgatgggggtggaattattgatgatctgttttcctcttatgcaatgtttgactttttgcaatgagcttgtattttttaaattttggtgcgttttaagataggcactacatgctcatgaaacaaaatgtaaaatatagcaaaggggcacagaaaaaagtctgcctccctcctccctgctccatcagctgtcaggtgctgccccacagaggggccactgttaccagttccttactccccttcctgagatactcagcccacttgcagacccgg

SEQ ID NO: 385933 - DNA, 450 bp, Homo sapiens
ttttgtttgcttcttgctggtatccttcaggtcttatctctgtaaagtgcaggtgtcatttttaagagaactcaatcttactcttggcagagtttcataaaaatgatgtgttatgggcagaatatgcaaccatttgtgaagtgattttgcctccattctcttgctctgccctctctgagacatcatgaagcagacagagaatgggtttgtcatccccactttacagatgagaatgctgaggcccaagacctgctgctttcccatactcacccagtgggagaatggcagtgctgggactcctagtgcagtgctccctctgcggtagtagcagcaaatgctgctgtcgagatgagtggcaggagagactctgctgccttcattttggcccctgcatcactgcctgctgccagggcctgcagggaatctggccgagtcttccctgacctgggc

SEQ ID NO: 385934 - DNA, 436 bp, Homo sapiens
gacgtttcggagtcttgcagcctgcaggggtccatgtggttacccggaacaggaaccgtgggggtgctttccgggacccagggggcccgtgccaatgtttctgagtcttggagcctgcaggggtccacgtgtttaccctgaacaggaacatgcgggtgttttccggaatctggcgaggccgcgcggcagttttgcatttacattccttgttttgtttttaaggataaagcggtgctgggtggggtctgtgggaggggtttgagccatggcggaagatccctggtgaatggcttggatgtttgtcgcctccgagtctcatgctgagacgtgatccgtggtgctgggtggggtctgtgggaggggtttgagccatggcggaagatccctggtgaatggcttggatgtttgtcgcctccgagtctcatgctgagacgtg

SEQ ID NO: 385935 - DNA, 733 bp, Homo sapiens
caggagttggagaccaacctggccaacatgatgaaaccccatctctactaaaaatacaaaaaattatccaggtgttgtggcaggtgcctgtaatcccagctactctcgaaaaaacagaaacaaaaactctgacatgtagagtatgtagatgtagagaaaaaagtaaaatgattgttgaaaaaaatgtctattttttatcttctaaatagctttgtgtgtcagagatcagaacgctcattttacatgatatcaagaaccagaatgctagatagctagaatggttgttaacttcctagataaccattgtagaggaacacataaggtaaaacaaatgaataaaaattaaaaaaaaatgagatagccaaagatttgaagctctttacccattaacatgataatcatttcgactttgaatatttgtagaacaagagtcagaactcagaacaaagatctctgaggaaataaaaaaaaaatcaagctgcctcctaatttctcatttagtctgtcattgggcattgtcaaactgtcaaactatatttagagattctggttttcatctggagacttagtgagttgtgtaatatcttgaatacacatataagatcttgccaggtggggtggctcatgtctgtaatcccagcactttgggaggatgaggtgggaggatcgctggagcccaggagttcaagaccagcctgggcaacatagcaagtccctggctctatttaaaaaa

SEQ ID NO: 385936 - DNA, 677 bp, Homo sapiens
attttggttcagaaacaagactgccatgtatgtatttaatgcttattatgtgccaagcactattccaggtactaagatacagtgatggacaaaacaagatcccttctcctctatctcaggacttattaatttgggcattttcattttccaatataggatcttttagtactggtataggattcctgaaggaattcctgaaatataattatttttctgctagagcaaatcaattttgttttttgttttttttttgagatggagtttcgctcttgtcgcccaggctggagtgcaatggcgcaatctcggctcactgcaacctccgactcccgggttcaagcgattctcctgcctcagcctcccaagtagctgggattacaggcattagccaccacgctaggctaatttttgtatttttagtagagacagggtttcaccaggttggccaggctggtctcgaactcctgacctcaggtgatcctccaggctcagcctcccaaagtgctaggattacaggcaggagccaccacgcccagaagagcaaaattcttctgttgacaaaaatttctttcctctgaggaagagacactgtgtgcctgtgttttatccaggaattccattggatagtttgtcctttgggatgtcagtggattaaatcctccattaagaatcaaagtact

SEQ ID NO: 385937 - DNA, 481 bp, Homo sapiens
tcccaagtaggtgggactgcaggtgcacaccactacaaccagctaattgttgttttttggttcttttgtagagatgggggtctcactatgttgcccaggctgatgtcaaactcctgacctcaagggactgttccatctcagcctctcaacatgctgggaccacagccgtgagccactgtgcctggccttatatagaaattatgagccatctggaatagccaaagccccaggaacctgaatgaaaacagcatttcccactcccacaggtctctttgccctgtctcttgttcttagttttgcttccctcttgtctacagctagctcttgcaaggccttctgcctgccctcctgatccccgccctagccacttctctatggttttagggacccatccatccatgttaaccaagagagatttccccctgccttctctgagacctctggcatcaggaaccctgatgtcccaaagccttctgtggcc

SEQ ID NO: 385938 - DNA, 518 bp, Homo sapiens
gatataatcaccactgactgtttagtatagagatttctttttagcattttatgtttatgtgtgtgactactttttagaaaaatattgagtctagattatttatggcctgcttttcttaatataaccttatgtaatgaacattttcctatcaataaatatgctttacaacatgactataattaggagctatgatgcagttataccataatttacctgaaccagttcacttttttgaagataaagatatatatgtccatctatcttatattataactaatatttattaatatatctttgggtacaacctctgtgtagaccagtaggatatttttataagtataaattggtgggccaaagagtgtgagacacacaaagttttaaggcttttgaaatgtattggcactttcctctccagaagagttataccactgtacactcccaccagtagcacctgcctctccaggcttctctaacagtgggtattattcttattttactatgctaatttgataagcaaa

SEQ ID NO: 385939 - DNA, 190 bp, Homo sapiens
caaaagcaagtgcataataggaggtaacagttattatgggaggctttattgattgaagatccaatgaaaagggatttaattcatttaatgttccctggctctgttatactacaattctgcacatgccctttcagacagaaagtttccatctgtgttgatgaggtagagtaagcttggcctaggtctatct

SEQ ID NO: 385940 - DNA, 487 bp, Homo sapiens
ctcagcctcccaagtagctggaaccatggtgtgtggcaccaagcctggctaatttaaagaacgtttttttgtagagacggtggtctccctatgttgcccagactggtctcgaactcctgggcacaagtgatcccccagctttggccacccaggtatgagccaccgtgcctgaccatccaaatgttactttaattttaaattccctaatgacatatgacgctgagcatcttttcatatgctatttgccatatatgtgccttctttggtgaggtgtctcttcagatattttgcccattttgaaattgtgtagtttattttcttgatgttcagtttttggagtttattgtaaattttggatacaactctttatcagatatgtgttttggaaatattttctcccagtctgtggcttgtctttattctctaaaccgtagacaattttgagaatgcatgatcttaggaaatatagttctcatgagcccttctt

SEQ ID NO: 385941 - DNA, 199 bp, Homo sapiens
gagatcacaccactgcactccagcctgggtgagagagcaaaactgcatctcaaagaacaaaaaacagacacttttcttagatttttttctctttcaaacatcccatgaatactttaaatgtatgtaaatgtatgcatgtaacttacatctatatctagggtattcattttaacgagttagttactgcagcagtattata

SEQ ID NO: 385942 - DNA, 846 bp, Homo sapiens
taggaactaagtgtaggaaggtgtacagtggggtggtgtgggggtggaattgtggcagccagatggtgttggcctaaggcctcttggcccttgttaggacttggtttaccatggcgcaacacatccatgagattggcaaaaattaaaaagtctgacaacagaaaatctggtaatctggtgaggatgtggagcagtgggaattctccaatactgccagggagcatgggcatcaatcccaccacactggaatgcaaaggggcattctgagtagaactgaagatgtgcccatccttgaccccacagttccagccatgggcatgcgcatgaatgtgcacacgtgttgactgcggcatttgtttgtaattatgaaaacatctaagtttccatctatgggagaggggataatgtgggagtgcccaacagtggagttctagagagcagtaaaaataaatggactagagctgcacacgtcaaaatggatgaagataaaagacataaggatgggagaagaccacctggccacagaagtatatgtccaatatgatgctggtgtatccagagtgttcaaacaaacaacacaacactactcattgtttccaacgtgagtatgaaagtatggagcagtgcggagggccaggagtgctgaatccacatggttacttctccaggcgggggccgaggaccagggctggaggtttactccaggagcttcagtggtgcatgctgaatgtgctgtttcttgggctgggggacagagatgtgcatgctgttatacactctatattgaaatgattgtataacaatatactaatttatcatgtaataaatttgaccagaaagaaacaa

SEQ ID NO: 385943 - DNA, 571 bp, Homo sapiens
agacgttccatttcaaagaaaaaagagcaacacgaaggccctctttaaggagagagtaaacattcactttaggtaaaaaatagtcttttacacgcctgtgcacggcacacctcttttgctgttcaccttgagcccaagagtttggaaaggctgcccccatttcagagaggaagaaacgcaggcacacgtgaatgacagactcctctgtggtggcctagactccagccaacacttcctaggacagcctgccattgtgcaaagtcaccatgtaacaaatgcagacatctctgagatcaccatgcagtgaggaagtctaagctggtggcatgaagaggccacatggaaagggctaaaaaaggggccagcctcagtcatcccagctgagcacctagctgggaataaaagaggactccgtggaggtttactccaggagcttcagtggtgcatgctgaatgtgctgtttcttgggctgggggacagagatgtgcatgctgttatacactctatattgaaatgattgtataacaatatactaatttatcatgtaataaatttgaccagaaagaaacaa

SEQ ID NO: 385944 - DNA, 145 bp, Homo sapiens
gcatatttagtatattgatgagacagttatgctactgggttttataaagtggagttgcctcaaacttttcacttatgttttaaagtataaggtttttcataagttatatgaaaaaataattcttaggctaggttcggtggctcac

SEQ ID NO: 385945 - DNA, 5123 bp, Homo sapiens
  misc_feature (109)..(109): n is a, c, g, or t
  misc_feature (113)..(113): n is a, c, g, or t
  misc_feature (120)..(120): n is a, c, g, or t
taaagccacacagaggaagttacgcagcccggatcagaccgagagataaaagccccgatggtgatcgtgagtgatggcaagaggatttagcctcggcattaacttggancggntgcgggnggctccctggccccgatctgacggcggcggcggcggcggccacagcggcgggagcggcgcggggaaggagcagcggctcgcagccctcggcccgcgcccccacccagcgccagcccgaggggggaggcgcagcgccggagggtggcggtcctcggccctcccaggtctccgcgccgggaagccgctccgagccgggattgtgcctatgattggggggctgtttctcagtgcctggctcttcatggttggccagcacgtggagcactctgttcatctgtacatataggtgttgttgctaatgagctctctctctctcctcccctcttacaatgaaagacaagtcagaccccaggtacctggatggattgagagctgagatctcagaaacttcataataagttgccgatggctaccagccaaggctggagggttgttttgccgttgtgttgagcacgtcacccattaagagccctttaaagacctggattgattggaaggacaaaaattaaaagcaatctgatccagcctcatgcaggatccctgcggattttctccttatcccatttccatccactgtcacaatttgagaatctgcctgatttgatcagattcacctccaggggaggtgtgataccagggttaggaggacgtgaagttatgggcaactttctgatctgtccatcagcagtctgagaaacgctggctctgaattttccgtgtcggccttttggaaacaacaagttcctcgctgtttgcaaagcttcagtgctcgggtccctgggacaccccggccaccctcgcctggtagatgtggcatttccatgctgaggccgcgagtcccgcctgaccccgtcgctgcctctccagggcttctctgggccgcgcctctgcagactgcgcagccatgctgcatctgctggcgctcttcctgcactgcctccctctggcctctggggactatgacatctgcaaatcctgggtgaccacagatgagggccccacctgggagttctacgcctgccagcccaaggtgatgcgcctgaaggactacgtcaaggtgaaggtggagccctcaggcatcacatgtggagacccccctgagaggttctgctcccatgagaatccctacctatgcagcaacgagtgtgacgcctccaacccggacctggcccacccgcccaggctcatgttcgacaaggaggaggagggcctggccacctactggcagagcatcacctggagccgctaccccagcccgctggaagccaacatcaccctttcgtggaacaagaccgtggagctgaccgacgacgtggtgatgaccttcgagtacggccggcccacggtcatggtcctggagaagtccctggacaacgggcgcacctggcagccctaccagttctacgccgaggactgcatggaggccttcggtatgtccgcccgccgggcccgcgacatgtcatcctccagcgcgcaccgcgtgctctgcaccgaggagtactcgcgctgggcaggctccaagaaggagaagcacgtgcgcttcgaggtgcgggaccgcttcgccatctttgccggccccgacctgcgcaacatggacaacctctacacgcggctggagagcgccaagggcctcaaggagttcttcaccctcaccgacctgcgcatgcggctgctgcgcccggcgctgggcggcacctatgtgcagcgggagaacctctacaagtacttctacgccatctccaacatcgaggtcatcggcaggtgcaagtgcaacctgcacgccaacctgtgctccatgcgcgagggcagcctgcagtgcgagtgcgagcacaacaccaccggccccgactgcggcaagtgcaagaagaatttccgcacccggtcctggcgggccggctcctacctgccgctgccccatggctctcccaacgcctgtgccgctgcaggttcctttggcacaactctcaggctctcccaggagctccatcagtgctgctttggaaaacgggacaggactttttgcaggtctcttggcccctgggtgggctccctgctcctcctgccacccacgccacttctctcacctggatctgggagagcagtctctcctgccagtcaagagtggggtgaccttcccccaccaggggcagaatccaccccctagcctaaccatgggggcagcctccctctgggcagcctctgcagccagcttgtcccagggctctgctcgtccaggtcagctcaggtcccaggggagtcggaccagggaggggcatctgcaggaggtgggggtcctgagagttccccaggagggcgagggcgacatggcgcccacaggttatcagtaaatgtcatcgagactgtccccagacactcacagggtgccaggcacggtctctcctttcagccttgcaaacccctccccctgggaggtcgccatctgctctgcgaggcagcaggagaggactggccaatgtcaaagagccagccgggagcagaccccaaatctcagagatgcttctggggtgcaccgtcaccctccaccagggctctgtggggccccacatcccacccaagttgtccctcccggacccagggggcccctggctgggaagccagtgagccgagagggcgccagaaagaagctggaccctgcagggacgctggtctgcacagccgtcgtaagttgcttctctgtggtgtccccaccccggcaaccccccaaccctctcttgcttttcccatctctcaccaggcatcagcaggtcccagaaagaccccgaccccaaaggccctgtggccactgcggccaccacagccatgacaggggcccctactactcctgtcccctccacgtccactgcctgggcccccatggcgcccagcaccccacagcccacaggtgggtgccagggtacagcgacccctgtcatcccaccctctcctgcttctagcctgggtccctgcctctcttggggtgggagggtcggcagccctgggcagagagcaggggcttggctcttagaatagagacgctagaaccctagagctgggaggccacaggccaaaggggcttgaggacacctgggtcaacctgttcctgagcccagccaggggattcagggatcagttcagcttccaaagtcgtcttcctcctgcccttcaagccattgcttggaagggctcccagaccattgtggccagacggctgcaggaactgagaggaaaggtgctgggggcagcgaggccatcctgacatgcagccaaagactggccttatctcccaatggtgcttctgcctccgtggtccctggagccccgcccacaccctgtccccacctggcccccagggcctctctgtccttagcccctcagcagcacaccggtgggatggatggagcagggttagcccagaaagcaaatgtctctgatcagcagggcaaagggagcctctggagctgagtttggacaccgtgggctgctgggaatgtggaggctgtgtgtgtagtgcaaggccaggccagggccagacgtcctgccccctcaggggtctgccacagacaggcatggaaacctgattctcgctcccctccaacggagggattcacgtgtattcaaggctgggggtgctggagtgggcctctgctctcacctggactcacctggggagtatccctgcactctgtgcagtgcaggtgccaggggtctgaaaggatttatccttcccagagggcaccaggaagacgatgaccaaggggaattcttcctggtcccagccagggaggggtgctccaatagcctgccacaccctgtcccccgccaccctgcagggaggacctggtggggactcctggccccttgggtagtgccctggccctccatctctctgatccaaggagacctgccccactgatccttcccccttggggggtggcatttctaaagggcagagtcccctccatcagctcctgcctcggcctgttgctgggtggacactcaggctccccagacaggggcaaatgctgagagaaagacctcctccttcctaggccatccagagcagctcccctgggggcagcacaccccacctctttctacatccttccttttctgcaggaggcatttacaggaggcaggggctagccaaaagattggaggatttccgggaagcctcctgacccaggaatcctctttggggtggaagacatgggtcactctgagaattctggacttcagacataggttggcccagccacaagggacctgtgctttgctgctgagcctgtggtgggcagacagaagcaaaaacagtggtggtgggtgctgtgcctgtctccaaacaggggtttggctgggaggccagatactctccatatcacatgtgcaagtgcacacatgcacacacacacatgcatgcacacacacaggcatgcacacgcacatgtacacacacacacacacagaggaatccatttgcagagctgcttctgacttggtgccagggcagccgtgggaggctgggcagattgtgcaaagttgggaattaaagaggaaaagtcagaggccagagtgggaaatgcaggggaggtgagggtccccaggaccccctcagtgagcagaaggcacaccctccctctcggcaagacagtgctgctctgcaccctcagccctgtatcaagaagcaggacattaggggaggaggtggctccaatgtgacagccagtggcccctacagcccacatctaggggctcctccctcctcttcagcaactgaagcccctgtccagagcccccattaatgaaaacgatcattgcagtagctgagggtgagttctcctgggctgtgctcgtatcattgtatcatcatatcattgtattctgggctcacagctccgtgagatggaggctgttattttcctagtcccacaggtgaggggatcgaggcttaggaagaagcagctggattttatgatatgtaaattacacctcaatcaagctgtttc

SEQ ID NO: 385946 - DNA, 3339 bp, Homo sapiens
  misc_feature (109)..(109): n is a, c, g, or t
  misc_feature (113)..(113): n is a, c, g, or t
  misc_feature (120)..(120): n is a, c, g, or t
taaagccacacagaggaagttacgcagcccggatcagaccgagagataaaagccccgatggtgatcgtgagtgatggcaagaggatttagcctcggcattaacttggancggntgcgggnggctccctggccccgatctgacggcggcggcggcggcggccacagcggcgggagcggcgcggggaaggagcagcggctcgcagccctcggcccgcgcccccacccagcgccagcccgaggggggaggcgcagcgccggagggtggcggtcctcggccctcccaggtctccgcgccgggaagccgctccgagccgggattgtgcctatgattggggggctgtttctcagtgcctggctcttcatggttggccagcacgtggagcactctgttcatctgtacatataggtgttgttgctaatgagctctctctctctcctcccctcttacaatgaaagacaagtcagaccccaggtacctggatggattgagagctgagatctcagaaacttcataataagttgccgatggctaccagccaaggctggagggttgttttgccgttgtgttgagcacgtcacccattaagagccctttaaagacctggattgattggaaggacaaaaattaaaagcaatctgatccagcctcatgcaggatccctgcggattttctccttatcccatttccatccactgtcacaatttgagaatctgcctgatttgatcagattcacctccaggggaggtgtgataccagggttaggaggacgtgaagttatgggcaactttctgatctgtccatcagcagtctgagaaacgctggctctgaattttccgtgtcggccttttggaaacaacaagttcctcgctgtttgcaaagcttcagtgctcgggtccctgggacaccccggccaccctcgcctggtagatgtggcatttccatgctgaggccgcgagtcccgcctgaccccgtcgctgcctctccagggcttctctgggccgcgcctctgcagactgcgcagccatgctgcatctgctggcgctcttcctgcactgcctccctctggcctctggggactatgacatctgcaaatcctgggtgaccacagatgagggccccacctgggagttctacgcctgccagcccaaggtgatgcgcctgaaggactacgtcaaggtgaaggtggagccctcaggcatcacatgtggagacccccctgagaggttctgctcccatgagaatccctacctatgcagcaacgagtgtgacgcctccaacccggacctggcccacccgcccaggctcatgttcgacaaggaggaggagggcctggccacctactggcagagcatcacctggagccgctaccccagcccgctggaagccaacatcaccctttcgtggaacaagaccgtggagctgaccgacgacgtggtgatgaccttcgagtacggccggcccacggtcatggtcctggagaagtccctggacaacgggcgcacctggcagccctaccagttctacgccgaggactgcatggaggccttcggtatgtccgcccgccgggcccgcgacatgtcatcctccagcgcgcaccgcgtgctctgcaccgaggagtactcgcgctgggcaggctccaagaaggagaagcacgtgcgcttcgaggtgcgggaccgcttcgccatctttgccggccccgacctgcgcaacatggacaacctctacacgcggctggagagcgccaagggcctcaaggagttcttcaccctcaccgacctgcgcatgcggctgctgcgcccggcgctgggcggcacctatgtgcagcgggagaacctctacaagtacttctacgccatctccaacatcgaggtcatcggcaggtgcaagtgcaacctgcacgccaacctgtgctccatgcgcgagggcagcctgcagtgcgagtgcgagcacaacaccaccggccccgactgcggcaagtgcaagaagaatttccgcacccggtcctggcgggccggctcctacctgccgctgccccatggctctcccaacgcctgtgccgctgcaggttcctttggcaactgcgaatgctacggtcactccaaccgctgcagctacattgacttcctgaatgtggtgacctgcgtcagctgcaagcacaacacgcgaggtcagcactgccagcactgccggctgggctactaccgcaacggctcggcagagctggatgatgagaacgtctgcattgagtgtaactgcaaccagataggctccgtgcacgaccggtgcaacgagaccggcttctgcgagtgccgcgagggcgcggcgggccccaagtgcgacgactgcctccccacgcactactggcgccagggctgctaccccaacgtgtgcgacgacgaccagctgctgtgccagaacggaggcacctgcctgcagaaccagcgctgcgcctgcccgcgcggctacaccggcgtgcgctgcgagcagccccgctgcgaccccgccgacgatgacggcggtctggactgcgaccgcgcgcccggggccgccccgcgccccgccaccctgctcggctgcctgctgctgctggggctggccgcccgcctgggccgctgagccccgcccggaggacgctccccgcacccggaggccgggggtcccggggtcccggggcggggccggcgtccgaggccgggcggtgagaagggtgcggcccgaggtgctcccaggtgctactcagcagggccccccgcccggcccgcgctcccgcccgcactgccctccccccgcagcaggggcgccttgggactccggtccccgcgcctgcgatttggtttcgtttttcttttgtattatccgccgcccagttccttttttgtctttctctctctctctttttttttttttttttctggcggtgagccagagggtcgggagaaacgctgctcgccccacaccccgtcctgcctcccaccacacttacacacacgggactgtggccgacaccccctggcctgtgccaggctcacgggcggcggcggaccccgacctccagttgcctacaattccagtcgctgacttggtcctgttttctattctttatttttcctgcaacccaccagaccccaggcctcaccggaggcccggtgaccacggaactcaccgtctgggggaggaggagagaaggaaggggtggggggcctggaaacttcgttctgtagagaactatttttgtttgtattcactgtcccctgcaagggggacggggcgggagcactggtcaccgcgggggccgatggtggagaatccgaggagtaaagagtttgctcactgctgcc

SEQ ID NO: 385947 - DNA, 480 bp, Homo sapiens
ttgtgcctatgattggggggctgtttctcagtgcctggctcttcatggttggccagcacgtggagcactctgttcatctgtacatataggtatgggtccatctgcacctatagttacatgctcatctttgcctttaacaactttgacattctgacttgacagtcatggtattttaaagcaaccattaaatcttggctcctggggatgcttttgaaagtctctgacccccaagccggggcacttctgctgaactaacactcccataaatgagaaaaaaatgcatcaccttttaaataacatgcccgatctccaaatgtgcaactctgatattaataaaaataacccagttttctcgggagactttgctaatgcagcctcattttttgcacattttgccggagagcttttgttcttatacgtctctattctccccctctttaatttgttgcaggtgttgttgctaatgagctctctctctct

SEQ ID NO: 385948 - DNA, 990 bp, Homo sapiens
cgagaaagaccgagctggggttggttggaaagccaacgtgtgcgacgacgaccagctgctgtgccagaacggaggcacctgcctgcagaaccagcgctgcgcctgcccgcgcggctacaccggcgtgcgctgcgagcagccccgctgcgaccccgccgacgatgacggcggtctggactgcgaccgcgcgcccggggccgccccgcgccccgccaccctgctcggctgcctgctgctgctggggctggccgcccgcctgggccgctgagccccgcccggaggacgctccccgcacccggaggccgggggtcccggggtcccggggcggggccggcgtccgaggccgggcggtgagaagggtgcggcccgaggtgctcccaggtgctactcagcagggccccccgcccggcccgcgctcccgcccgcactgccctccccccgcagcaggggcgccttgggactccggtccccgcgcctgcgatttggtttcgtttttcttttgtattatccgccgcccagttccttttttgtctttctctctctctctttttttttttttttttctggcggtgagccagagggtcgggagaaacgctgctcgccccacaccccgtcctgcctcccaccacacttacacacacgggactgtggccgacaccccctggcctgtgccaggctcacgggcggcggcggaccccgacctccagttgcctacaattccagtcgctgacttggtcctgttttctattctttatttttcctgcaacccaccagaccccaggcctcaccggaggcccggtgaccacggaactcaccgtctgggggaggaggagagaaggaaggggtggggggcctggaaacttcgttctgtagagaactatttttgtttgtattcactgtcccctgcaagggggacggggcgggagcactggtcaccgcgggggccgatggtggagaatccgaggagtaaagagtttgctcactgctgcc

SEQ ID NO: 385949 - DNA, 545 bp, Homo sapiens
atgacacttcactccagcctgggcgaaacagtgggatcctgtctcaaaaaaaaaaaaaaaaaaaaaaagagaaagaaagaaaagaaaagaaaaagaaaagccgttaggcttgaactttggggtaaaccacctcctcttcactcctcacaaacgactaactctatataacctgtttgtgatgtgttctgtgtgtttggtggcattaaaatattcagcagaaaagcaagcttggtacaatttttaaaattcatcttataaaatgaggaataattcaccataaagaagagataccaagtgtatgagtttaggaatcaagtggcaaagtgattgcatacagcaggtagattggctccaaagaagagtcccaaataactttggtgaagggacacaagtttgcgtgggtgaggtcatagtgagggaattggaatcccgttaaattgttctctgcatagtaaagagcaatagccagtaagaggtacaccaagatgcagaaaatgttcactcaggcacaaatgaaagcaaatgtaataaacagtttttgtaag

SEQ ID NO: 385950 - DNA, 749 bp, Homo sapiens
ggagggcagatatcttttcaagatagggagtttatttgctttcgatatatacacagaagtgaaattgctggatcatagggtagctctatttttaattttttgagaaacctccacactgttttccataatagatgtaccaattcacattcccaccaacagtatgtaaaggttccctttatccacatccacaccaatcttgttttgttttttgttttgattttttggcaacagccatcccaacaggtataaggtaatatcttattgtgactttgatttacatttccctgacgattagtgatgttgagcatcttttcataaaccacttggccattgtatgtcttctttagagaaatgtctatgcaggtcctttgcccacttttttttttttttctcaaagcagaaaatttattgcctacattctttgactacaatgctataacaacagaaatattttcttttacaaaaatctcaatcaccttaaacattttttaagtcactaaataactttgggtcaaagaagaaatcaaaactgcaaatacataaaagcaaacatcaattggcattgtatacattagaacatatgaaatagattatagtaaacaattattaaaacacaaagaatccaggatgcggaaagctgggatgagtattacaccctaacagcaacgatagcagataaactacaaaatcataacttttcctaaactcatttgagaactgagatcatagggcaatcaaaaagtctaaaa

SEQ ID NO: 385951 - DNA, 191 bp, Homo sapiens
gaaacaagggccctgtggctagtccttgtttgacccttccctcccttggcttaacacagcctttggcaaaggtcataaccaaagcagcctgtactgaggaaaagctctgtgctgagtgcttttgtgtgcctgattccatttaaacctcagcaaccctaggagggaggtactattattactgtccccattgt

SEQ ID NO: 385952 - DNA, 457 bp, Homo sapiens
cggcacgaggcctaaagaggtcctgaccaactcagaagttatagaaatcaaagaaggtatgcatctaaaatgctctctataaagagtagggagcatagtgtggtaatgaattaaagagtcagagagacctcgactgagatatgagtcagttaaccactcaatcacggagcctctgctctatataatggatatcacataattccacctttgtcagggtgttggaagtattttaaataacactcaggtgatactgaataataagatgctacaataattatcattctccaacaatttgaataactattcttcaaaaatttgttattctcaaaagtttataggttttgcattattccagagcgggcatggcaaaggaatacagtgctttattggggtttagaggtcccaatcagttgatataaatgttacagggtagtattaatgttttagaagattccgt

SEQ ID NO: 385953 - DNA, 423 bp, Homo sapiens
gggtattagaatatttccaagggacagtgataaagggtagaagataggcactctctttgggtggaatcttttgtatttgcttcttttaaggtgtgccccaagtccccaaatggctcagttgtcaccaaagcaagtgtaacaactcatccctcatgttcccttcacgatcaacagatttattcattttcaatctccaaatgctatttgaatgggcaaagatctcttaaaggacctgggaaaaatttgtacaacatggaattggactggtttgtgttctgggttttggccagttgttttcaatgtatgagaactctagtactccatgctatttcaagaaaaggggattaaaagtaatgccagtaaggtggagacaatgcattgcttggtcagcttagggaggaaaaacaatagaactaccctttg

SEQ ID NO: 385954 - DNA, 277 bp, Homo sapiens
atagcatgaccctcagtaatccctatcacgcaggcaggggtcaagtggccaagtggtgctctgtgcaccatcgtccggtcatggttagcacattcctgccgaacgccttcctccactcggccaagcagaagcacccccactcccatcacccatcatgacctgctgtgggatggctcctctctggggtcttccatgggcctggctcaccattgtccagcgtcccacaatcctttatcaggtttgcttccttcagctagccttctctccagctgccgct

SEQ ID NO: 385955 - DNA, 330 bp, Homo sapiens
acaaaacaaaaagtagtagcatctctgtgagaggtacacagttagaaaaatgattccacacacgagtaaagagatttaccaggaagagtcttgttttctaaaagttgatacaactagtagaaaaatacttgtcagtggtaaatagagcagaagtagaaaaagcagttaatctattagatcagatcagagtgtaaggcaggtatatcaggccaaaggtgataagacagagcagaaataaagtattgttaattcatgcatttgctgactcatttatttatacattgatactgtcacttataaatcaaatcttacaggtcaggttctgtgcta

SEQ ID NO: 385956 - DNA, 1668 bp, Homo sapiens
agcgggggcggtgcccggacgcaggtgccggccggagcggagctagtggcgccgacgggccgggccgggccgggaccggggccgaggcgaaccgaggggcctgtgcggccgcccggcccggccgcggatcaggagactggagactgggtcttgctctgttacccaggctggagtgcagtggtgtgatcatagctcactacagccttgaactcctgggctcaagaggttgaggctccctcctcagcctcccaagtagctgggactacaggctttcagcaccatgcctggctaattcaaaaaaaccttcagagagatagggtctctctatgttgccctagctcgtctcaaactcctggcctcaagtgatcctcctgcttggacctcccaaagcgctgggattacaggctcctggaaccatgggcctcaggccctgaggatacggggctcccggtggccatgacgacgggtgactgctgccacctccccggctccctgtgtgactgctccggcagccctgccttctccaaggtcgtggaggctacgggcctcggaccgccccagtatgtggcacaggtgacttcaagggatggccggctcctctccaccgtcatccgtgccttggacacaccgagtgatggtcctttctgccggatctgccatgagggagcgaacggggagtgcttgctgtccccgtgtggctgcaccggcacgctgggtgccgtgcataagagctgtctggagaagtggctttcctcatctaacaccagctactgcgagctgtgccacacggagtttgcagtggagaaacggcctcgacccctcacagagtggctgaaggacccggggccgcggacggagaagcggacactgtgctgcgacatggtgtgtttcctgttcatcacaccgctggccgccatctcaggctggttgtgcctgcgcggggcccaggaccacctccggctccacagccagctggaggccgtgggtctcattgccctcaccatcgccctcttcaccatctatgtcctctggacgctggtctccttccgctaccactgccagctgtactccgagtggagaaagaccaaccagaaagttcgcctgaagatccgggaggcggacagccccgagggcccccagcattctccactggcagctggactcctgaagaaggtggcagaggagacaccagtatgaatgctgggctctccggaccctgcagcagagaggccagaggtagctggtgataccctgtcctgtggaaggacttccacttcaacacttccacttcaacagttcccgcacggcctgaacgcttcttaggccaagagacaccatgcggagcctagtctgtgatcctgtgtgaagatattttcagggtttttttttttttttttttgcatatggaggacaggtggacatggtcctgagctctggacggagcaggcaccctgatctcattctgaggtccacatggcaccttctgggccagcagctgtggccggtgtatcaagggcgcccttaaagctggaacattccagcaagcttcttgcgcttctctgcacccggcaggcccactttcctggcaccctcgactttatataaaagttgcactgcgtttcaaaaacccacccctgaatgaataaaaggagccctggctggaaaaaa

SEQ ID NO: 385957 - DNA, 1713 bp, Homo sapiens
agcgggggcggtgcccggacgcaggtgccggccggagcggagctagtggcgccgacgggccgggccgggccgggaccggggccgaggcgaaccgaggggcctgtgcggccgcccggcccggccgcggatcaggagactggagactgggtcttgctctgttacccaggctggagtgcagtggtgtgatcatagctcactacagccttgaactcctgggctcaagaggttgaggctccctcctcagcctcccaagtagctgggactacaggctttcagcaccatgcctggctaattcaaaaaaaccttcagagagatagggtctctctatgttgccctagctcgtctcaaactcctggcctcaagtgatcctcctgcttggacctcccaaagcgctgggattacaggctcctggaaccatgggcctcaggccctgaggatacggggctcccggtggccatgacgacgggtgactgctgccacctccccggctccctgtgtgactgctccggcagccctgccttctccaaggtcgtggaggctacgggcctcggaccgccccagtatgtggcacaggtgacttcaagggatggccggctcctctccaccgtcatccgtgccttggacacaccgagtgatggtcctttctgccggatctgccatgagggagcgaacggggagtgcttgctgtccccgtgtggctgcaccggcacgctgggtgccgtgcataagagctgtctggagaagtggctttcctcatctaacaccagctactgcgagctgtgccacacggagtttgcagtggagaaacggcctcgacccctcacagagtggctgaaggacccggggccgcggacggagaagcggacactgtgctgcgacatggtgtgtttcctgttcatcacaccgctggccgccatctcaggctggttgtgcctgcgcggggcccaggaccacctccggctccacagccagctggaggccgtgggtctcattgccctcaccatcgccctcttcaccatctatgtcctctggacgctggtctccttccgctaccactgccagctgtactccgagtggagaaagaccaaccagaaagttcgcctgaagatccgggaggcggacagccccgagggcccccagcattctccactggcagctggactcctgaagaaggtggcagaggagacaccagtatgaatgctgggctctccggaccctgcagcagagaggccagaggtagctggtgataccctgtcctgtggaaggacttccacttcaacacttccacttcaacagttcccgcacggcctgaacgcttcttaggccaagagacaccatgcggagcctagtctgtgatcctgtgtgaagatattttcagggtttttttttttttttttttgcatatggaggacaggtggacatggtcctgagctctggacggagcaggcaccctgatctcattctgaggtccacatggcaccttctgggccagcagctgtggccggtgtatcaagggcgcccttaaagctggaacattccagcaagcttcttgcgcttctctgcacccggcaggcccactttcctggcaccctcgactttatataaaagttgcactgcgtttcaaaaacccacccctgaatgaataaaaggagccctggctggaaaaaaaaaaaagtcgacgcggccgcgaatttagtagtagtaggcggccgc

SEQ ID NO: 385958 - DNA, 1666 bp, Homo sapiens
  misc_feature (90)..(90): n is a, c, g, or t
  misc_feature (92)..(92): n is a, c, g, or t
  misc_feature (96)..(96): n is a, c, g, or t
  misc_feature (100)..(100): n is a, c, g, or t
  misc_feature (119)..(119): n is a, c, g, or t
  misc_feature (122)..(122): n is a, c, g, or t
cagtttatccagcagtgaactgtcctagcgcaagagttcgtaacttgctcccctgtcccttcacctccccacttggagctcagattgttntntgtntgtntgtttgcttgctttctttngtnctgttttagagactggagactgggtcttgctctgttacccaggctggagtgcagtggtgtgatcatagctcactacagccttgaactcctgggctcaagaggttgaggctccctcctcagcctcccaagtagctgggactacaggctttcagcaccatgcctggctaattcaaaaaaaccttcagagagatagggtctctctatgttgccctagctcgtctcaaactcctggcctcaagtgatcctcctgcttggacctcccaaagcgctgggattacaggctcctggaaccatgggcctcaggccctgaggatacggggctcccggtggccatgacgacgggtgactgctgccacctccccggctccctgtgtgactgctccggcagccctgccttctccaaggtcgtggaggctacgggcctcggaccgccccagtatgtggcacaggtgacttcaagggatggccggctcctctccaccgtcatccgtgccttggacacaccgagtgatggtcctttctgccggatctgccatgagggagcgaacggggagtgcttgctgtccccgtgtggctgcaccggcacgctgggtgccgtgcataagagctgtctggagaagtggctttcctcatctaacaccagctactgcgagctgtgccacacggagtttgcagtggagaaacggcctcgacccctcacagagtggctgaaggacccggggccgcggacggagaagcggacactgtgctgcgacatggtgtgtttcctgttcatcacaccgctggccgccatctcaggctggttgtgcctgcgcggggcccaggaccacctccggctccacagccagctggaggccgtgggtctcattgccctcaccatcgccctcttcaccatctatgtcctctggacgctggtctccttccgctaccactgccagctgtactccgagtggagaaagaccaaccagaaagttcgcctgaagatccgggaggcggacagccccgagggcccccagcattctccactggcagctggactcctgaagaaggtggcagaggagacaccagtatgaatgctgggctctccggaccctgcagcagagaggccagaggtagctggtgataccctgtcctgtggaaggacttccacttcaacacttccacttcaacagttcccgcacggcctgaacgcttcttaggccaagagacaccatgcggagcctagtctgtgatcctgtgtgaagatattttcagggtttttttttttttttttttgcatatggaggacaggtggacatggtcctgagctctggacggagcaggcaccctgatctcattctgaggtccacatggcaccttctgggccagcagctgtggccggtgtatcaagggcgcccttaaagctggaacattccagcaagcttcttgcgcttctctgcacccggcaggcccactttcctggcaccctcgactttatataaaagttgcactgcgtttcaaaaacccacccctgaatgaataaaaggagccctggctggaaaaaa

SEQ ID NO: 385959 - DNA, 1186 bp, Homo sapiens
agcgggggcggtgcccggacgcaggtgccggccggagcggagctagtggcgccgacgggccgggccgggccgggaccggggccgaggcgaaccgaggggcctgtgcggccgcccggcccggccgcggatcaggctcctggaaccatgggcctcaggccctgaggatacggggctcccggtggccatgacgacgggtgactgctgccacctccccggctccctgtgtgactgctccggcagccctgccttctccaaggtcgtggaggctacgggcctcggaccgccccagtatgtggcacaggtgacttcaagggatggccggctcctctccaccgtcatccgtgccttggacacaccgagtgatggtcctttctgccggatctgccatgagggagcgaacggggagtgcttgctgtccccgtgtggctgcaccggcacgctgggtgccgtgcataagagctgtctggagaagtggctttcctcatctaacaccagctactgcgagctgtgccacacggagtttgcagtggagaaacggcctcgacccctcacagaggtctccttccgctaccactgccagctgtactccgagtggagaaagaccaaccagaaagttcgcctgaagatccgggaggcggacagccccgagggcccccagcattctccactggcagctggactcctgaagaaggtggcagaggagacaccagtatgaatgctgggctctccggaccctgcagcagagaggccagaggtagctggtgataccctgtcctgtggaaggacttccacttcaacacttccacttcaacagttcccgcacggcctgaacgcttcttaggccaagagacaccatgcggagcctagtctgtgatcctgtgtgaagatattttcagggtttttttttttttttttttgcatatggaggacaggtggacatggtcctgagctctggacggagcaggcaccctgatctcattctgaggtccacatggcaccttctgggccagcagctgtggccggtgtatcaagggcgcccttaaagctggaacattccagcaagcttcttgcgcttctctgcacccggcaggcccactttcctggcaccctcgactttatataaaagttgcactgcgtttcaaaaacccacccctgaatgaataaaaggagccctggctggaaaaaa

SEQ ID NO: 385960 - DNA, 1061 bp, Homo sapiens
  misc_feature (90)..(90): n is a, c, g, or t
  misc_feature (92)..(92): n is a, c, g, or t
  misc_feature (96)..(96): n is a, c, g, or t
  misc_feature (100)..(100): n is a, c, g, or t
  misc_feature (119)..(119): n is a, c, g, or t
  misc_feature (122)..(122): n is a, c, g, or t
cagtttatccagcagtgaactgtcctagcgcaagagttcgtaacttgctcccctgtcccttcacctccccacttggagctcagattgttntntgtntgtntgtttgcttgctttctttngtnctgttttagagactggagactgggtcttgctctgttacccaggctggagtgcagtggtgtgatcatagctcactacagccttgaactcctgggctcaagaggttgaggctccctcctcagcctcccaagtagctgggactacaggctttcagcaccatgcctggctaattcaaaaaaaccttcagagagatagggtctctctatgttgccctagctcgtctcaaactcctggcctcaagtgatcctcctgcttggacctcccaaagcgctgggattacaggctcctggaaccatgggcctcaggccctgaggatacggggctcccggtggccatgacgacgggtgactgctgccacctccccggctccctgtgtgactgctccggcagccctgccttctccaaggtcgtggaggctacgggcctcggaccgccccagtatgtggcacaggtgacttcaagggatggccggctcctctccaccgtcatccgtgccttggacacaccgagtgatggtcctttctgccggatctgccatgagggagcgaacggggagtgcttgctgtccccgtgtggctgcaccggcacgctgggtgccgtgcataagagctgtctggagaagtggctttcctcatctaacaccagctactgcgagctgtgccacacggagtttgcagtggagaaacggcctcgacccctcacagagtggctgaaggacccggggccgcggacggagaagcggacactgtgctgcgacatggtgtgtttcctgttcatcacaccgctggccgccatctcaggctggttgtgcctgcgcggggcccaggaccacctccggctccacagccagctggaggccgtgggtctcattgccctcaccatcgccctcttcaccatctatgtcctctggacgctggtgagtggctgtggttgtgcagcac

SEQ ID NO: 385961 - DNA, 583 bp, Homo sapiens
agcgggggcggtgcccggacgcaggtgccggccggagcggagctagtggcgccgacgggccgggccgggccgggaccggggccgaggcgaaccgaggggcctgtgcggccgcccggcccggccgcggatcagggtaggcacgggcctgcaggtagggccggaggacgccagtccgcgggccggccccgggttcgaggccggagctcggcacccgggcgggacggctgggctcgatcccttggccacagccttctcggggacgcggggacctcagttcccgtgtcaaggccggtgggaggtctccggggtccggcacacataggcgcctctccgagcctcggtttccccacctgtgaaactgggtcatcccattgccaacctgatggggcttctgggaggattcaggaggtggctggtgcagaaaacgcctgacacacagtaggcaactgctaagtggccaatgcccttccccaacctccttctcagagcggctctgcctgcaaaataattttgagacagagtcttactctgtcacccaggctggagtgcagtggcacgatcttggcttactgcaacctccacc

SEQ ID NO: 385962 - DNA, 1423 bp, Homo sapiens
agcgggggcggtgcccggacgcaggtgccggccggagcggagctagtggcgccgacgggccgggccgggccgggaccggggccgaggcgaaccgaggggcctgtgcggccgcccggcccggccgcggatcagggtaggcacgggcctgcaggtagggccggaggacgccagtccgcgggccggccccgggttcgaggccggagctcggcacccgggcgggacggctgggctcgatcccttggccacagccttctcggggacgcggggacctcagttcccgtgtcaaggccggtgggaggtctccggggtccggcacacataggcgcctctccgagcctcggtttccccacctgtgaaactgggtcatcccattgccaacctgatggggcttctgggaggattcaggaggtggctggtgcagaaaacgcctgacacacagtaggcaactgctaagtggccaatgcccttccccaacctccttctcagagcggctctgcctgcaaaatagtaagttataatataatgacccagccactttgcacaaagatgctgaaacaggatgccctgtgctatgtgggtgctcaaaacggggtagtcaaatgggcatgttgagctcattcagttcttttgaaaccatactgagtaggtggaagcagtagaaatgtcccctgttatacagttgagagagtccaggctcaaagaggttaagtgtcttgcccagggccacacagcacataaggagtagagctgggattggaaccttgcttctcatgcagggaggaatgaatgcaataacaacctccacatttaccctaaaaaatattaatagagcttttattgagcacttactgtgtgtgccagggttgactgtgtgacctctcatcaacaactctgtaagctgatgatagtaattataataagagctaatagttattaacttcttaattttttactaatttatgaactacatatcattatgactccccgtcttttttttttttagacagagtctctctctcttgcccaggctggaatgcagtggcacgatctgagctcattgcaacctctgcctcccagattcaagcgattcctacctcaccctggtcaagtagttgggattacaggcccccgccaccgtgcctggccaatttttgtctttttagcagaaacggggtttcaccatgttgaccaggctggtctcgaactcctggcctcaagtgatccaccttccttgaactcccaaagtgcacaaagtgctgggattacaggcgtgagccactgcgcccggcctgtaacactcattttagagatgataatactgaggctgagagagtaaaacagctgcctgagaccacaatgtagggagttttagggccctctgattcctctgccctctgtttcctaccttcaggaaaaggagcct

SEQ ID NO: 385963 - DNA, 1396 bp, Homo sapiens
agcgggggcggtgcccggacgcaggtgccggccggagcggagctagtggcgccgacgggccgggccgggccgggaccggggccgaggcgaaccgaggggcctgtgcggccgcccggcccggccgcggatcaggctcctggaaccatgggcctcaggccctgaggatacggggctcccggtggccatgacgacgggtgactgctgccacctccccggctccctgtgtgactgctccggcagccctgccttctccaaggtcgtggaggctacgggcctcggaccgccccagtatgtggcacaggtgacttcaagggatggccggctcctctccaccgtcatccgtgccttggacacaccgagtgatggtcctttctgccggatctgccatgagggagcgaacggggagtgcttgctgtccccgtgtggctgcaccggcacgctgggtgccgtgcataagagctgtctggagaagtggctttcctcatctaacaccagctactgcgagctgtgccacacggagtttgcagtggagaaacggcctcgacccctcacagagtggctgaaggacccggggccgcggacggagaagcggacactgtgctgcgacatggtgtgtttcctgttcatcacaccgctggccgccatctcaggctggttgtgcctgcgcggggcccaggaccacctccggctccacagccagctggaggccgtgggtctcattgccctcaccatcgccctcttcaccatctatgtcctctggacgctggtctccttccgctaccactgccagctgtactccgagtggagaaagaccaaccagaaagttcgcctgaagatccgggaggcggacagccccgagggcccccagcattctccactggcagctggactcctgaagaaggtggcagaggagacaccagtatgaatgctgggctctccggaccctgcagcagagaggccagaggtagctggtgataccctgtcctgtggaaggacttccacttcaacacttccacttcaacagttcccgcacggcctgaacgcttcttaggccaagagacaccatgcggagcctagtctgtgatcctgtgtgaagatattttcagggtttttttttttttttttttgcatatggaggacaggtggacatggtcctgagctctggacggagcaggcaccctgatctcattctgaggtccacatggcaccttctgggccagcagctgtggccggtgtatcaagggcgcccttaaagctggaacattccagcaagcttcttgcgcttctctgcacccggcaggcccactttcctggcaccctcgactttatataaaagttgcactgcgtttcaaaaacccacccctgaatgaataaaaggagccctggctggaaaaaa

SEQ ID NO: 385964 - DNA, 1050 bp, Homo sapiens
agcgggggcggtgcccggacgcaggtgccggccggagcggagctagtggcgccgacgggccgggccgggccgggaccggggccgaggcgaaccgaggggcctgtgcggccgcccggcccggccgcggatcaggagactggagactgggtcttgctctgttacccaggctggagtgcagtggtgtgatcatagctcactacagccttgaactcctgggctcaagaggttgaggctccctcctcagcctcccaagtagctgggactacaggctttcagcaccatgcctggctaattcaaaaaaaccttcagagagatagggtctctctatgttgccctagctcgtctcaaactcctggcctcaagtgatcctcctgcttggacctcccaaagcgctgggattacaggctcctggaaccatgggcctcaggccctgaggatacggggctcccggtggccatgacgacgggtgactgctgccacctccccggctccctgtgtgactgctccggcagccctgccttctccaaggtcgtggaggctacgggcctcggaccgccccagtatgtgacaccagtatgaatgctgggctctccggaccctgcagcagagaggccagaggtagctggtgataccctgtcctgtggaaggacttccacttcaacacttccacttcaacagttcccgcacggcctgaacgcttcttaggccaagagacaccatgcggagcctagtctgtgatcctgtgtgaagatattttcagggtttttttttttttttttttgcatatggaggacaggtggacatggtcctgagctctggacggagcaggcaccctgatctcattctgaggtccacatggcaccttctgggccagcagctgtggccggtgtatcaagggcgcccttaaagctggaacattccagcaagcttcttgcgcttctctgcacccggcaggcccactttcctggcaccctcgactttatataaaagttgcactgcgtttcaaaaacccacccctgaatgaataaaaggagccctggctggaaaaaa

SEQ ID NO: 385965 - DNA, 1087 bp, Homo sapiens
gtagggggtgagttgcaggggctgggacagagcaccagcatcctgcatcattagcagcacgtgggaaccctagtgtatgggtgcaaggccacttgcctcagttttccaggcgttcccaggggcctccatttctcatcttgaaaaaagcagcaaggctttggtaccagagggtcttggtgtaagtgcaaatctgcttcagatatatattagctgtggatttggggctggttacaaggcttatctgagcctcactcttttcttgggagataagggaaaatagtccttgcctgatgggctgcagtgaggattcaattaggcaatgtcccttagagctctggggagctgtgaaaccggtgatgccaggctgatgtctatgaaatgcactgggagtgaggaaagggtcacagatctccgcctgggtgttggaatatccagggaccgtgggaggctcccgggggccccatgctagtgttctccaccaaagacagaggagacaggtgatgtgcatgggagagctttgccttcctctctcacggaaccacaggctgtcagagccttgctccgcagcttcagtttgacaacctcagagaaccataatgatataggagttaaaaagaaattactcgggcagatagtgagggtatggaagtccttggtaagattttccttttaatgaaaagcagcccctaaatccttttctaacaaaaagcagctgtcagcagttgtgtccattggaatgtactaccctaagactaagcatgttcaaaatggcggctccgtcttctctttttgccagctatgagtgcagtaaggagaagacaagatggccaagtggaaagtccatttgcataatcagatttgggtggggtggccagcctttctcgtgcactacgtaaacgtcacacctggtcaaaccaatctgtgagccctatgtaaatcagacaccacctcctcaagcctgcctataaaatacgctgtggtccaccacttttcccttttcagatgcctctgtctcacgagagagagagctgctctcctctctcctttcttctgcctattaaacattctgttccttaacccacccaca

SEQ ID NO: 385966 - DNA, 377 bp, Homo sapiens
ttcgagaccagcctggccaacatggagaaacaccgtctctactaaaaatacaaaaattagctgggcgtggtggcgggcatccgtaatcccagctactggagaggctgaggcaggagaatcacgccactgcactccagcctgggcgactgagcgagactgtctccaaaaacaaaaaacaaaaaaaaaacacctcgcttttttggtgatagtcactgtgtaaaagttggaaaaaaaattaaaattacaaccctagacaccgagggttgtacggtgggaggtaattttaatattttttgtattttattttccaacgaggttacaaccctaagccacacagggttgcggcgtgagcgtcgggctgcgggggcgcctccacc

SEQ ID NO: 385967 - DNA, 1079 bp, Homo sapiens
tggtgagaacaagggcccttagacatttgtgacttgtcacttgtggagtgtctgggggacacaggaggcagatcttgctagttgggaccaaggaaaagcctcatagacctcagcagcaggtcagggacttggcctccatagctaatatgaaaggtaagcagtagatatcacaggagtcactggaaatagcctgagttagcctggacaacatagtgagaccctgtctctacaaaaaaaacatttttttttaattagctgagtgtggtggcatgcgcctgtggtctcagctactttggaggctgaggtgggaggatcacttgagcttggaaggtcaaggctacagtgagctgagttcatgccattgcactacaacctgggcaacagagtgagaccttgtctcaaaaaacaaaagaaagaaggaaagggaaagggaaatgcaaggaagaaagaaagaaagaaacgaaagaaaatagcctgagtttgaaaggcccggagacacccaggtgggctgtgagaggggccagcagctttgacacagcaggctgtgcccacagaggaagcagacagctctgagggatgcagcacacagcaggccgccccgaatgaccgcagctgcaggtgataaaatggctgtccagtgggagacagggacgggccataactgctgctttgtgctgtatctcttgcttgttaacatgtttgggtgaattgactgcaacagatgggcctttcagccctcagcaccttggtttctaggcaagaccggggtgacttgcaccttggcgaccccctcccctccctgagcagcagagcaacctgcgcataaagaagcctgagaagattggagtgggacgaggcgcagtgccctgtgggggtggaaagagctctggactggcagtgcaaagccagggctaacatcccttcgttctcctgatcttgagcacatcctccccactctggtggccacagtttccttatctattgaatgagagggttcaattagtgtcatcttggaagtttctattgtctgtattgtgtgtccatgattgtgtctatcgagctacccttgatgaacaaaa

SEQ ID NO: 385968 - DNA, 671 bp, Homo sapiens
atatcgcaaattcacaggcatattcttgagggaacatagaagtaaccagtaacgctgctagtggcaatcatgggaggctttatgcagtagtactcgatgaaggaataaagaggattagattatgctacaggaagtgacagtggggttaggggggacatctcattgtggaagccctcatgaatcaatagaattttaggaaagaaaagactggaacaaaaaaaattttttgagtgcccccacccaccagacaaaaaatttttaaaaatgaattaatgatcttcacagctgctgaagtaaaggtggggatggatctcatttccatggtagattgattgattatgaaaggaagagatgatggtccctattttatcaagaagtggtttgtgttcaaaaaggagttagtagaaagaggggattaaaaatcggagaaagcttaaatatttgaaaatcttgaggatcaatcagttaagatctgtatctttctctgtgtgatgctttaggaacagccagcgaagaagtagtgggaatattaggaactattcaagttaaaaaaacatgttaaaaggcttaacttgaagaaaagcatcaaggagaaaagctggaaggaatgaggaagtgtaggaaagtatcttaacaagtcagaatatctttgacaccaacaaggaaatatg

SEQ ID NO: 385969 - DNA, 529 bp, Homo sapiens
aaaccagatccttgctagaaagtagcagatattttagctgaatcatgttctactatcaagtagaaagcaagacttgcaaggttaaacttgaatatataactgagaaagtttcaagtgaggtgttgagggtgaagtatggtttttccttgttccttatagtaaaatataaaagaaaagagataaactgaagatgaaacttctgtgtgagaaggaatcagcacttgatgatgtggaagattcttagcatatctacattgcaaaggatggaagaattaggaatttcactgttggaagagcaaattctaaagagagggtcaaaggtatggctgaacaaacttttgttgaaaaaattaggtgtgtgattcatggatccagtcaaccatcttaggagaagccagaaatagaaatggagttatttcagaaatgcacaacctttttctaatggtgcagatcacttcatacatagtagacccacaatgtttttgaaaatgttatataagcataaacattggcagcttggattgaaaga

SEQ ID NO: 385970 - DNA, 1196 bp, Homo sapiens
tcaaatctacaaaataaggaactttcagcgttgttctcttcatcctgttttctatttccaatgtaaacatttatttttgtttgttttacttaatactttgaaaaaaggcaagaaaatgtgaatatatattcgcaggtcccctttcttagataaatggtagtatactatgcacatttttattatctcacttttttctgaagattgttctataacagtatatagagatattcctcattcctttcttacggttgcatactactcaaatgcgtaaacattttatagtttgttctaccaatttccttttgagagcatagtgctataattaatagtcttttgcatacttttttcatatttttattggttatcttttggatagattcctagaaatggaattgcgaagtcaaagggtaaatgcatacgtaactttgctagacatcatcaaatatccctccagaggggtagtatttcagaggggtaatatttttcccaccaggaatgatgaaggtgcctgtcttctcacagccataccaacaaagtatgttgtggaatattttttttaaccaatctgaccgatgagaaaggcctttcagggtagttttaatttgcatttctcttattaagaactaggttgaagagattttcatatgattaaggctatttgcatttcttttttctgtaagctgttcgtatctttggcccactttcctatagggttgttagtcttctctctatttttagaatatctttacacattagagatggtaatactttgcccatcatacaaattgcaagtattttctcccagtttattacttgtcttgattttacttctcgtgtttgtttgtttgtttgttttgccatccaaaggctgcttttttcgtgttttttctgtttaatgtaagcaaactttttttcttcttgcttccagattttaatcatagaaaatcttacccactctcaggttataaagaaattcacttatgttttcttctaatacttacatgactatattttttacattttagtctccgattcattcagaattgatcctgcagtttggtgtgaggaatggatccaatgtcttatttttctatatggtcaaccagttatcgtaacaccttctattcaaaataatatctttcctcactgttttgcaaaactacctttattgtacaataaattgccacatacttttg

SEQ ID NO: 385971 - DNA, 271 bp, Homo sapiens
cccaaatgcactgaccctccctgattccgtcacacacgctgtgccctttgagcctagtcaccctctgctcctccttcaagcaccgcctgaatcttgggaagcccttctctgcggtgcttccccttgcaatcacccccactcccacccagggatctgccccactcctccaggtctgtggcctgtttgtccttgtgcgccaagagcctggcagagagatgggacaaggcagacttagagtgggaggaggagaaagaaaaacaggtcccacccc

SEQ ID NO: 385972 - DNA, 275 bp, Homo sapiens
gggtggccttccaatgccacaggctgcctccatgactctgtaatgtgaacaaatggttcaaagttggggtcttaaatttccccaaagggcttgagcttttcccagccaggcagaactctgcagttctatctaataggagtctgataattggccaccttaagatgctacagaccaagtccaactatgaagtaggaaactggccccgggggctcacacctgtaatctcagcactttgggaggttgaggcgggcagatcacttaggagttcaagacca

SEQ ID NO: 385973 - DNA, 761 bp, Homo sapiens
tctatggggtctcactgttccctcaggttggtcttgaactcctggcctccagcgatcctcccgccttagcctcctaaagtcctgggattataggtgtgaaccacagtgcctggccacaagtttatcttttagaaaatggaaattatttttaagttataatttctttcttgacagtgatgtgtggcatttaagaagtcagtaataaaataatagtgtacttccctgttggggcttttcatattgttttctattcgtcaatattgttgattcttctctccgtccctcccctgggacatgggatttagaacagtgtcggggtccttgtagcccactgctcagctgtcctaagggaggcaggccagctgccctgtgctctcactatcaggaaatgagccaatccgagatctctggccagtttgatttctatgatacacacatgctatgaacacagaggccacttcaattgagcccttatttatctacatgcctgagtatcgttttaaaaatatttttattgattgataagtgtacatatttataaagtacatgtgatattttgatacatgcataaatgtgtaatggtcaaatcagaaattcaggatatctataacctcaaaaatttatcatttctttatgttgggaatattcagaaaccattaagtgctcttggtcctggaccaggccctgtgctgactggttaatccaagttctttccattaaacctcacaataattagttttgtgatgcctgatttatagctg

SEQ ID NO: 385974 - DNA, 677 bp, Homo sapiens
tgtaccttagagaatacctgagtgggctgtcaatttcaggaaggggcactgcttcaggggctatggaaggaatagatgtgtgattcacccacgggcctgcacttcacacctcggtgtgctgctctcaccatgcagatcccatctgtgtctctaaggcttgctcctggagctggtggcaacttagtcacagaggaaatggccttcctgtcactgccatcatttgctacttgaagagaggtaatccttcacgcatttgctttacttgcaatgattatacaagggcagactctctctggggagcaaatcctgcctgggaagccttcttgggaacaaggctgactccagcaacctgttagatggccaggatagccctggggtgtggatggttgaccacagggcatgtgcctctgtcttgctgtttgtgacctggttctctgaccctcctcatctcatgcttccttccaagaactttctggaagagatgctggctttggagatgatatagggttttctcttcagaccacctgttctgcctagcaaaaagggcctaccttggccgggcacggtggctcacgcttgtaaccccagccctttgggaggctgagacggtggatggcttaagcccaggagttcgaaactagcgtgggcaacttggcgaaaccccatctctgcaaaaa

SEQ ID NO: 385975 - DNA, 304 bp, Homo sapiens
attttacttgggaggacaaattataagtaattgtagatagtgagatgatgaactttttttctaacacctacagcttgctggccttctatatttttaatccttagaatctatttttcttgctttgtgttatttcattatacatcagtgcccttctttggttatttggttattattctgtccatagactctcaagaggttttactgtaattttacctaactctgcagttggagtcattatctctttacttggttaaatattgagttagatgactttcatactaggggtgaaatatatatttctgac

SEQ ID NO: 385976 - DNA, 672 bp, Homo sapiens
tacaccttatgaaactggtagctttcactttctgtctcttggaacactctctctggaaacacttagtcactatgtaagaagttctactaccctaaagccaccctactagagaggccatgtgtagacactccagacaacaagcccagctgaaccccactttctagccagtggcagtcatgtgaggaaagccatcctgaccctcctgacaagccgacccaccagctgaaaaccattgagtgtcctcagtcaatttgaaatggagcggaagaatcacccagcagaggcatgcccaaatgcccaagcaacaaggtcctgatataataaaatgattgttatttttagccactaagttttggagtaatttgctatgctgcagtagataataagaacagaatttgatacctggaagtggagtgctgccataactatctaaaacatgtggccatggttttggaaccagacaatgagcaaacgctgcaaagatcttgaggacactgttaatgagaatagaaaaacctgaaggagacttctagtgaatacttagaggaagatactacaggaattactattggaggctggagaaaaagtgaccctggttatgaagtggcagaaattttgacaatactgttgcctgttgtgatctagacaatagaatatatacctaatgaactg

SEQ ID NO: 385977 - DNA, 400 bp, Homo sapiens
gaaggagcactgggaaaggttgtctgagaagctgcgagatctcaagagacggtctctccttcgtcattcctcagcccttgagcccctcatccttcacccaacaggagtatggaagcttattctctgtattatggacactagacacagttggaagtctgatcgtcatacgcaaaacagaaagaataagtgatcttatgctcagcaaatcccggctgcagagccctccctgacctttccactcaggtccaggacaccaacagccagactctgacccttccagataagatattggaaatggcttcttcataaaggctaaatttatgcttgcccctcaagattgcaaaattaagcaacatatcacttaaggacacatatgtaggtgatataaccaaaagaaaaa

SEQ ID NO: 385978 - DNA, 277 bp, Homo sapiens
ttagaaccttacatctaaatcaaagcagcaagcaaaaacttggcccctgttgtcggaatgccagggaagccatgtgactcaccagtgtacggttttctagaaaagacagaagcagttattacagaatgttaggctgcgttctggtattttgaaagtataacaacaactctgccacgcctatagtgacataagcattggtatgcccctttgtttcagaaacacacttctgtatttcacctcattgggacaatccaaccccatatcatgtttcatcacg

SEQ ID NO: 385979 - DNA, 228 bp, Homo sapiens
ctgacttcaagtctgcgccctcattttacaccagtggttttcattcattggctcagaatccacaggggaggcagatttagggtgaagcccagagtcactgccaggaaatgagcattgtgcgatgtgaaacaataacacttctcacacttacgtgtactattggtttgaattatatgtgacatgaagtaaaaatttatttaaaagcattactgattcagtaatgattca

SEQ ID NO: 385980 - DNA, 338 bp, Homo sapiens
actaatggaatagatatatatatataaagagtttattaaggagtattaaatcacacaatcgtatataaaaaaagtttattaaggagcattaaatcacacaatcatatataaagagagtttattaaggagtattaaactcacacaaaggtcccacaataagccatctacaaactgaggagcaaggaagccagttcaagtcccaaagctgaagaacttgaagtctgatgtttgaggacaggaagcatccagcacgggagaaagatgtaggctgggaggctaagcctgtctagccttttcacgttttcctgcctgctttatatcctggccaagcaaacagt

SEQ ID NO: 385981 - DNA, 313 bp, Homo sapiens
tgacaaggaataaacacaggcaaagcaatattatctctagttgggaaaacttcatagtgcatttttcagatgccaagcttgaatgaattcaaatagtgttcatagttttaagccttcatagaactagttccttttgatactaagaagatcctgaatggctttcttaagaaaaatgtatttaggccgggcgcgatggctcacacctgtaatcccaacactttgggaagccaaggcaggcagatcatctgaggttgggagttcaagaccagcctagccaacatggtgaaaccccatttctactaaaaatgcgaaa

SEQ ID NO: 385982 - DNA, 230 bp, Homo sapiens
aaacagaaggctcctttttctttgtccctcatccaagaggtattccatatcctgaattttgtgtttatcattcatttgcatttccatgtttgatttcttaaaaaatgtatttttaatgtttttgaaattttttttaccaacaaaatgattacatgtattcttttacaacatgcgtttttttgtttgtcattatgttcctgagatttatccatgtttcattgtagctctgg

SEQ ID NO: 385983 - DNA, 293 bp, Homo sapiens
ttctaatactgcaatcgttaaggtcaataatgatttagatttaaccagcttacaggttttactagcttctttgttttccattgtttcatatgtttgaaatttgacagggcaaagagacctcaagtagtgacaagataaactacctgaatataaggaagaggaggacaaagaccttgagagagaagagggcctgcagtgttcaaaaaagagcaagaaagtcagtcagaaagaaaggctaaagtggaatagtgaggtaaaatgtagtagaaagtgaagttgcagaagtaacaata

SEQ ID NO: 385984 - DNA, 653 bp, Homo sapiens
caggtgcccgccaccatgcccagctaatttttgtatttatagtggaggcagggtttcaccatgttggccaggctggtctcgaacttctgacctcagatgatccacccaccttgggctcccagagtgccgggattacagccatgagccaccgcgtctggccaaacattcatatattttatataacattggcaactgtcctgtttgtagtgttcttgcttcacatatggatacacctggtgtcagtttttacaaaaaccaagtgagttttggtgcgtatgccaggagggacaccccagaatgttaactgtcatgatcactggctggtagatgctgtgatttttgtagtgttttcatccttcgtgcctggttgacttatctgtctcctgagtgtatccagaattactgtcctttattttttattacacagatgtatgcatgtgcactgtttaaaaaaaaagatgagaacacatcaaaaaaaattttaattaaaaaaaagaaaaagagagatctatacatacagatcccagctgtccttctaatctttttctgaggcgggagaattgcttgaacccgggagcgcgggttgcagtgagctgagatcgcgccactgcactccagcctgggagacagagccagaaccgtctcaaaaaaaa

SEQ ID NO: 385985 - DNA, 293 bp, Homo sapiens
cgtcgaccgaggaactaactgcaccctggtcctcgtgtttgagttcaaagatggagcgagggtggatatggtgggaaggggcacacgggttctcacgcaacaacggaggaactaactgcaccctggtcctctccccagtccccagttcaccctccatccctcaccttcctccactctaagggatatcaacactgcccagcacaggggccctgaatttatgtggtttttatacattttttaataagatgcactttatgtcattttttaataaagtctgaagaattactgtttaa

SEQ ID NO: 385986 - DNA, 641 bp, Homo sapiens
tgcctggagctggctaggctgggcagaggaccacagagggaagatggacgggaagcttgaccttctgggtccaaggatgatgcctatgggagaggagggaggctcagcaaaccctccattttgtccactaccttcccctttctcattccccagctgctttggggtgcagacgcagagaagaaacagcagtgcagcttcaagggcaaggacccacagcgcgactgtcaaaactacatcaagatcctcctgccgctcagcggcagtcacctgttcacctgtggcacagcagccttcagccccatgtgtacctacatcgtgagtgacctgtcctcagccctgaggctgacctgggaactgcccctctttctgccccagggatcctgttctgtagcatagacccctgaggaaaggcagggcccagagggaggtttctaggtaccactggcctccaagagccctgaggtcccacaccctggcacaaagcgcagccctgacagccatgtctccctgtgcggggaggcgggggcacatgcggtcacttacccatgaagatcctgtgccacccaggccttgctgccctcttctgcttcttccagcatctctccctctcctttgcttgattctcttgtcttatcttgtac

SEQ ID NO: 385987 - DNA, 3363 bp, Homo sapiens
tgcctggagctggctaggctgggcagaggaccacagagggaagatggacgggaagcttgaccttctgggtccaaggatgatgcctatgggagaggagggaggctcagcaaaccctccattttgtccactaccttcccctttctcattccccagctgctttggggtgcagacgcagagaagaaacagcagtgcagcttcaagggcaaggacccacagcgcgactgtcaaaactacatcaagatcctcctgccgctcagcggcagtcacctgttcacctgtggcacagcagccttcagccccatgtgtacctacatcaacatggagaacttcaccctggcaagggacgagaaggggaatgtcctcctggaagatggcaagggccgttgtcccttcgacccgaatttcaagtccactgccctggtggttgatggcgagctctacactggaacagtcagcagcttccaagggaatgacccggccatctcgcggagccaaagccttcgccccaccaagaccgagagctccctcaactggctgcaagacccagcttttgtggcctcagcctacattcctgagagcctgggcagcttgcaaggcgatgatgacaagatctactttttcttcagcgagactggccaggaatttgagttctttgagaacaccattgtgtcccgcattgcccgcatctgcaagggcgatgagggtggagagcgggtgctacagcagcgctggacctccttcctcaaggcccagctgctgtgctcacggcccgacgatggcttccccttcaacgtgctgcaggatgtcttcacgctgagccccagcccccaggactggcgtgacacccttttctatggggtcttcacttcccagtggcacaggggaactacagaaggctctgccgtctgtgtcttcacaatgaaggatgtgcagagagtcttcagcggcctctacaaggaggtgaaccgtgagacacagcagtggtacaccgtgacccacccggtgcccacaccccggcctggagcgtgcatcaccaacagtgcccgggaaaggaagatcaactcatccctgcagctcccagaccgcgtgctgaacttcctcaaggaccacttcctgatggacgggcaggtccgaagccgcatgctgctgctgcagccccaggctcgctaccagcgcgtggctgtacaccgcgtccctggcctgcaccacacctacgatgtcctcttcctgggcactggtgacggccggctccacaaggcagtgagcgtgggcccccgggtgcacatcattgaggagctgcagatcttctcatcgggacagcccgtgcagaatctgctcctggacacccacagggggctgctgtatgcggcctcacactcgggcgtagtccaggtgcccatggccaactgcagcctgtacaggagctgtggggactgcctcctcgcccgggacccctactgtgcttggagcggctccagctgcaagcacgtcagcctctaccagcctcagctggccaccaggccgtggatccaggacatcgagggagccagcgccaaggacctttgcagcgcgtcttcggttgtgtccccgtcttttgtaccaacaggggagaagccatgtgagcaagtccagttccagcccaacacagtgaacactttggcctgcccgctcctctccaacctggcgacccgactctggctacgcaacggggcccccgtcaatgcctcggcctcctgccacgtgctacccactggggacctgctgctggtgggcacccaacagctgggggagttccagtgctggtcactagaggagggcttccagcagctggtagccagctactgcccagaggtggtggaggacggggtggcagaccaaacagatgagggtggcagtgtacccgtcattatcagcacatcgcgtgtgagtgcaccagctggtggcaaggccagctggggtgcagacaggtcctactggaaggagttcctggtgatgtgcacgctctttgtgctggccgtgctgctcccagttttattcttgctctaccggcaccggaacagcatgaaagtcttcctgaagcagggggaatgtgccagcgtgcaccccaagacctgccctgtggtgctgccccctgagacccgcccactcaacggcctagggccccctagcaccccgctcgatcaccgagggtaccagtccctgtcagacagccccccgggggcccgagtcttcactgagtcagagaagaggccactcagcatccaagacagcttcgtggaggtatccccagtgtgcccccggccccgggtccgccttggctcggagatccgtgactctgtggtgtgagagctgacttccagaggacgctgccctggcttcaggggctgtgaatgctcggagagggtcaactggacctcccctccgctctgctcttcgtggaacacgaccgtggtgcccggcccttgggagccttggggccagctggcctgctgctctccagtcaagtagcgaagctcctaccacccagacacccaaacagccgtggccccagaggtcctggccaaatatgggggcctgcctaggttggtggaacagtgctccttatgtaaactgagccctttgtttaaaaaacaattccaaatgtgaaactagaatgagagggaagagatagcatggcatgcagcacacacggctgctccagttcatggcctcccaggggtgctggggatgcatccaaagtggttgtctgagacagagttggaaaccctcaccaactggcctcttcaccttccacattatcccgctgccaccggctgccctgtctcactgcagattcaggaccagcttgggctgcgtgcgttctgccttgccagtcagccgaggatgtagttgttgctgccgtcgtcccaccacctcagggaccagagggctaggttggcactgcggccctcaccaggtcctgggctcggacccaactcctggacctttccagcctgtatcaggctgtggccacacgagaggacagcgcgagctcaggagagatttcgtgacaatgtacgcctttccctcagaattcagggaagagactgtcgcctgccttcctccgttgttgcgtgagaacccgtgtgccccttcccaccatatccaccctcgctccatctttgaactcaaacacgaggaactaactgcaccctggtcctctccccagtccccagttcaccctccatccctcaccttcctccactctaagggatatcaacactgcccagcacaggggccctgaatttatgtggtttttatacattttttaataagatgcactttatgtcattttttaataaagtctgaagaattactgtttaa

SEQ ID NO: 385988 - DNA, 3851 bp, Homo sapiens
cgggccggcctggcaagggggacgagtcagtggacactccaggaagagcggccccgcggggggcgatgaccgtgcgctgaccctgactcactccaggtccggaggcgggggcccccggggcgactcgggggcggaccgcggggcggagctgccgcccgtgagtccggccgagccacctgagcccgagccgcgggacaccgtcgctcctgctctccgaatgctgcgcaccgcgatgggcctgaggagctggctcgccgccccatggggcgcgctgccgcctcggccaccgctgctgctgctcctgctgctgctgctcctgctgcagccgccgcctccgacctgggcgctcagcccccggatcagcctgcctctgggctctgaagagcggccattcctcagattcgaagctgaacacatctccaactacacagcccttctgctgagcagggatggcaggaccctgtacgtgggtgctcgagaggccctctttgcactcagtagcaacctcagcttcctgccaggcggggagtaccaggagctgctttggggtgcagacgcagagaagaaacagcagtgcagcttcaagggcaaggacccacagcgcgactgtcaaaactacatcaagatcctcctgccgctcagcggcagtcacctgttcacctgtggcacagcagccttcagccccatgtgtacctacatcaacatggagaacttcaccctggcaagggacgagaaggggaatgtcctcctggaagatggcaagggccgttgtcccttcgacccgaatttcaagtccactgccctggtggttgatggcgagctctacactggaacagtcagcagcttccaagggaatgacccggccatctcgcggagccaaagccttcgccccaccaagaccgagagctccctcaactggctgcaagacccagcttttgtggcctcagcctacattcctgagagcctgggcagcttgcaaggcgatgatgacaagatctactttttcttcagcgagactggccaggaatttgagttctttgagaacaccattgtgtcccgcattgcccgcatctgcaagggcgatgagggtggagagcgggtgctacagcagcgctggacctccttcctcaaggcccagctgctgtgctcacggcccgacgatggcttccccttcaacgtgctgcaggatgtcttcacgctgagccccagcccccaggactggcgtgacacccttttctatggggtcttcacttcccagtggcacaggggaactacagaaggctctgccgtctgtgtcttcacaatgaaggatgtgcagagagtcttcagcggcctctacaaggaggtgaaccgtgagacacagcagtggtacaccgtgacccacccggtgcccacaccccggcctggagcgtgcatcaccaacagtgcccgggaaaggaagatcaactcatccctgcagctcccagaccgcgtgctgaacttcctcaaggaccacttcctgatggacgggcaggtccgaagccgcatgctgctgctgcagccccaggctcgctaccagcgcgtggctgtacaccgcgtccctggcctgcaccacacctacgatgtcctcttcctgggcactggtaagtgcctgcagcccagcaggctcaggggaaggggtgcacgtggctggtgggtcatgggcagtgggctccacccagggcctgagtcctgtccacaccccaggtgacggccggctccacaaggcagtgagcgtgggcccccgggtgcacatcattgaggagctgcagatcttctcatcgggacagcccgtgcagaatctgctcctggacacccacagggggctgctgtatgcggcctcacactcgggcgtagtccaggtgcccatggccaactgcagcctgtacaggagctgtggggactgcctcctcgcccgggacccctactgtgcttggagcggctccagctgcaagcacgtcagcctctaccagcctcagctggccaccaggccgtggatccaggacatcgagggagccagcgccaaggacctttgcagcgcgtcttcggttgtgtccccgtcttttgtaccaacaggggagaagccatgtgagcaagtccagttccagcccaacacagtgaacactttggcctgcccgctcctctccaacctggcgacccgactctggctacgcaacggggcccccgtcaatgcctcggcctcctgccacgtgctacccactggggacctgctgctggtgggcacccaacagctgggggagttccagtgctggtcactagaggagggcttccagcagctggtagccagctactgcccagaggtggtggaggacggggtggcagaccaaacagatgagggtggcagtgtacccgtcattatcagcacatcgcgtgtgagtgcaccagctggtggcaaggccagctggggtgcagacaggtcctactggaaggagttcctggtgatgtgcacgctctttgtgctggccgtgctgctcccagttttattcttgctctaccggcaccggaacagcatgaaagtcttcctgaagcagggggaatgtgccagcgtgcaccccaagacctgccctgtggtgctgccccctgagacccgcccactcaacggcctagggccccctagcaccccgctcgatcaccgagggtaccagtccctgtcagacagccccccgggggcccgagtcttcactgagtcagagaagaggccactcagcatccaagacagcttcgtggaggtatccccagtgtgcccccggccccgggtccgccttggctcggagatccgtgactctgtggtgtgagagctgacttccagaggacgctgccctggcttcaggggctgtgaatgctcggagagggtcaactggacctcccctccgctctgctcttcgtggaacacgaccgtggtgcccggcccttgggagccttggggccagctggcctgctgctctccagtcaagtagcgaagctcctaccacccagacacccaaacagccgtggccccagaggtcctggccaaatatgggggcctgcctaggttggtggaacagtgctccttatgtaaactgagccctttgtttaaaaaacaattccaaatgtgaaactagaatgagagggaagagatagcatggcatgcagcacacacggctgctccagttcatggcctcccaggggtgctggggatgcatccaaagtggttgtctgagacagagttggaaaccctcaccaactggcctcttcaccttccacattatcccgctgccaccggctgccctgtctcactgcagattcaggaccagcttgggctgcgtgcgttctgccttgccagtcagccgaggatgtagttgttgctgccgtcgtcccaccacctcagggaccagagggctaggttggcactgcggccctcaccaggtcctgggctcggacccaactcctggacctttccagcctgtatcaggctgtggccacacgagaggacagcgcgagctcaggagagatttcgtgacaatgtacgcctttccctcagaattcagggaagagactgtcgcctgccttcctccgttgttgcgtgagaacccgtgtgccccttcccaccatatccaccctcgctccatctttgaactcaaacacgaggaactaactgcaccctggtcctctccccagtccccagttcaccctccatccctcaccttcctccactctaagggatatcaacactgcccagcacaggggccctgaatttatgtggtttttatacattttttaataagatgcactttatgtcattttttaataaagtctgaagaattactgtttaa

SEQ ID NO: 385989 - DNA, 2220 bp, Homo sapiens
acgcgaaggcagccacaggacactgacgagcggagagcccggcaacgcgtccctggcctgcaccacacctacgatgtcctcttcctgggcactggtgacggccggctccacaaggcagtgagcgtgggcccccgggtgcacatcattgaggagctgcagatcttctcatcgggacagcccgtgcagaatctgctcctggacacccacagggggctgctgtatgcggcctcacactcgggcgtagtccaggtgcccatggccaactgcagcctgtacaggagctgtggggactgcctcctcgcccgggacccctactgtgcttggagcggctccagctgcaagcacgtcagcctctaccagcctcagctggccaccaggccgtggatccaggacatcgagggagccagcgccaaggacctttgcagcgcgtcttcggttgtgtccccgtcttttgtaccaacaggggagaagccatgtgagcaagtccagttccagcccaacacagtgaacactttggcctgcccgctcctctccaacctggcgacccgactctggctacgcaacggggcccccgtcaatgcctcggcctcctgccacgtgctacccactggggacctgctgctggtgggcacccaacagctgggggagttccagtgctggtcactagaggagggcttccagcagctggtagccagctactgcccagaggtggtggaggacggggtggcagaccaaacagatgagggtggcagtgtacccgtcattatcagcacatcgcgtgtgagtgcaccagctggtggcaaggccagctggggtgcagacaggtcctactggaaggagttcctggtgatgtgcacgctctttgtgctggccgtgctgctcccagttttattcttgctctaccggcaccggaacagcatgaaagtcttcctgaagcagggggaatgtgccagcgtgcaccccaagacctgccctgtggtgctgccccctgagacccgcccactcaacggcctagggccccctagcaccccgctcgatcaccgagggtaccagtccctgtcagacagccccccgggggcccgagtcttcactgagtcagagaagaggccactcagcatccaagacagcttcgtggaggtatccccagtgtgcccccggccccgggtccgccttggctcggagatccgtgactctgtggtgtgagagctgacttccagaggacgctgccctggcttcaggggctgtgaatgctcggagagggtcaactggacctcccctccgctctgctcttcgtggaacacgaccgtggtgcccggcccttgggagccttggggccagctggcctgctgctctccagtcaagtagcgaagctcctaccacccagacacccaaacagccgtggccccagaggtcctggccaaatatgggggcctgcctaggttggtggaacagtgctccttatgtaaactgagccctttgtttaaaaaacaattccaaatgtgaaactagaatgagagggaagagatagcatggcatgcagcacacacggctgctccagttcatggcctcccaggggtgctggggatgcatccaaagtggttgtctgagacagagttggaaaccctcaccaactggcctcttcaccttccacattatcccgctgccaccggctgccctgtctcactgcagattcaggaccagcttgggctgcgtgcgttctgccttgccagtcagccgaggatgtagttgttgctgccgtcgtcccaccacctcagggaccagagggctaggttggcactgcggccctcaccaggtcctgggctcggacccaactcctggacctttccagcctgtatcaggctgtggccacacgagaggacagcgcgagctcaggagagatttcgtgacaatgtacgcctttccctcagaattcagggaagagactgtcgcctgccttcctccgttgttgcgtgagaacccgtgtgccccttcccaccatatccaccctcgctccatctttgaactcaaacacgaggaactaactgcaccctggtcctctccccagtccccagttcaccctccatccctcaccttcctccactctaagggatatcaacactgcccagcacaggggccctgaatttatgtggtttttatacattttttaataagatgcactttatgtcattttttaataaagtctgaagaattactgtttaa

SEQ ID NO: 385990 - DNA, 2166 bp, Homo sapiens
gataaaggatccagtcatgaactattagaaagtggggtcgcctgttacgtaacaggcctcttgggggtggctctgggaggcatacaagccgggtggccatgggtgatggccctggctgcccatgcccgcttctcatccccgtgtctggctgtgcaggggctgctgtatgcggcctcacactcgggcgtagtccaggtgcccatggccaactgcagcctgtacaggagctgtggggactgcctcctcgcccgggacccctactgtgcttggagcggctccagctgcaagcacgtcagcctctaccagcctcagctggccaccaggccgtggatccaggacatcgagggagccagcgccaaggacctttgcagcgcgtcttcggttgtgtccccgtcttttgtaccaacaggggagaagccatgtgagcaagtccagttccagcccaacacagtgaacactttggcctgcccgctcctctccaacctggcgacccgactctggctacgcaacggggcccccgtcaatgcctcggcctcctgccacgtgctacccactggggacctgctgctggtgggcacccaacagctgggggagttccagtgctggtcactagaggagggcttccagcagctggtagccagctactgcccagaggtggtggaggacggggtggcagaccaaacagatgagggtggcagtgtacccgtcattatcagcacatcgcgtgtgagtgcaccagctggtggcaaggccagctggggtgcagacaggtcctactggaaggagttcctggtgatgtgcacgctctttgtgctggccgtgctgctcccagttttattcttgctctaccggcaccggaacagcatgaaagtcttcctgaagcagggggaatgtgccagcgtgcaccccaagacctgccctgtggtgctgccccctgagacccgcccactcaacggcctagggccccctagcaccccgctcgatcaccgagggtaccagtccctgtcagacagccccccgggggcccgagtcttcactgagtcagagaagaggccactcagcatccaagacagcttcgtggaggtatccccagtgtgcccccggccccgggtccgccttggctcggagatccgtgactctgtggtgtgagagctgacttccagaggacgctgccctggcttcaggggctgtgaatgctcggagagggtcaactggacctcccctccgctctgctcttcgtggaacacgaccgtggtgcccggcccttgggagccttggggccagctggcctgctgctctccagtcaagtagcgaagctcctaccacccagacacccaaacagccgtggccccagaggtcctggccaaatatgggggcctgcctaggttggtggaacagtgctccttatgtaaactgagccctttgtttaaaaaacaattccaaatgtgaaactagaatgagagggaagagatagcatggcatgcagcacacacggctgctccagttcatggcctcccaggggtgctggggatgcatccaaagtggttgtctgagacagagttggaaaccctcaccaactggcctcttcaccttccacattatcccgctgccaccggctgccctgtctcactgcagattcaggaccagcttgggctgcgtgcgttctgccttgccagtcagccgaggatgtagttgttgctgccgtcgtcccaccacctcagggaccagagggctaggttggcactgcggccctcaccaggtcctgggctcggacccaactcctggacctttccagcctgtatcaggctgtggccacacgagaggacagcgcgagctcaggagagatttcgtgacaatgtacgcctttccctcagaattcagggaagagactgtcgcctgccttcctccgttgttgcgtgagaacccgtgtgccccttcccaccatatccaccctcgctccatctttgaactcaaacacgaggaactaactgcaccctggtcctctccccagtccccagttcaccctccatccctcaccttcctccactctaagggatatcaacactgcccagcacaggggccctgaatttatgtggtttttatacattttttaataagatgcactttatgtcattttttaataaagtctgaagaattactgtttaa

SEQ ID NO: 385991 - DNA, 2920 bp, Homo sapiens
caggtgcccgccaccatgcccagctaatttttgtatttatagtggaggcagggtttcaccatgttggccaggctggtctcgaacttctgacctcagatgatccacccaccttgggctcccagagtgccgggattacagccatgagccaccgcgtctggccaaacattcatatattttatataacattggcaactgtcctgtttgtagtgttcttgcttcacatatggatacacctggtgtcagtttttacaaaaaccaagtgagttttggtgcgtatgccaggagggacaccccagaatgttaactgtcatgatcactggctggtagatgctgtgatttttgtagtgttttcatccttcgtgcctggttgacttatctgtctcctgagtgtatccagaattactgtcctttattttttattacacagatgtatgcatgtgcactgtttaaaaaaaaagatgagaacacatcaaaaaaaattttaattaaaaaaaagaaaaagagagatctatacatacagatcccagctgtccttctaatctttttctgagggtacatactattttttattattattttttgagacagggtctctctgtgttgctcaggctggagtgtagtggtgtgattacagctcactgcagccttggcctcctgggctcaagcaatcgatcctccaacctcagcctcctgagcaggtggaaccacaggcgtgcgccaccatgcctggctaatttttctattttttgtagagatggggtctcgctatgttgcccaggttgtcttgaattcctgggctcaagcgatctaccggccttggcctcccaaagtgctgggattacaggcgtgggccaccatgcctggccactgagggtacatactgtttatgtaattaagggaagtgttatcttagctttgacttgaaataatgtgtagacagaggagatgctgactcctgtgggtggggaatcagctcaggaaaggcccttgcccaggcccaagtctgcagtgaggggtgagggaatgtgagctcaggggacttcctgggccaatcccagaattctctctggccctcaggccgtggatccaggacatcgagggagccagcgccaaggacctttgcagcgcgtcttcggttgtgtccccgtcttttgtaccaacaggggagaagccatgtgagcaagtccagttccagcccaacacagtgaacactttggcctgcccgctcctctccaacctggcgacccgactctggctacgcaacggggcccccgtcaatgcctcggcctcctgccacgtgctacccactggggacctgctgctggtgggcacccaacagctgggggagttccagtgctggtcactagaggagggcttccagcagctggtagccagctactgcccagaggtggtggaggacggggtggcagaccaaacagatgagggtggcagtgtacccgtcattatcagcacatcgcgtgtgagtgcaccagctggtggcaaggccagctggggtgcagacaggtcctactggaaggagttcctggtgatgtgcacgctctttgtgctggccgtgctgctcccagttttattcttgctctaccggcaccggaacagcatgaaagtcttcctgaagcagggggaatgtgccagcgtgcaccccaagacctgccctgtggtgctgccccctgagacccgcccactcaacggcctagggccccctagcaccccgctcgatcaccgagggtaccagtccctgtcagacagccccccgggggcccgagtcttcactgagtcagagaagaggccactcagcatccaagacagcttcgtggaggtatccccagtgtgcccccggccccgggtccgccttggctcggagatccgtgactctgtggtgtgagagctgacttccagaggacgctgccctggcttcaggggctgtgaatgctcggagagggtcaactggacctcccctccgctctgctcttcgtggaacacgaccgtggtgcccggcccttgggagccttggggccagctggcctgctgctctccagtcaagtagcgaagctcctaccacccagacacccaaacagccgtggccccagaggtcctggccaaatatgggggcctgcctaggttggtggaacagtgctccttatgtaaactgagccctttgtttaaaaaacaattccaaatgtgaaactagaatgagagggaagagatagcatggcatgcagcacacacggctgctccagttcatggcctcccaggggtgctggggatgcatccaaagtggttgtctgagacagagttggaaaccctcaccaactggcctcttcaccttccacattatcccgctgccaccggctgccctgtctcactgcagattcaggaccagcttgggctgcgtgcgttctgccttgccagtcagccgaggatgtagttgttgctgccgtcgtcccaccacctcagggaccagagggctaggttggcactgcggccctcaccaggtcctgggctcggacccaactcctggacctttccagcctgtatcaggctgtggccacacgagaggacagcgcgagctcaggagagatttcgtgacaatgtacgcctttccctcagaattcagggaagagactgtcgcctgccttcctccgttgttgcgtgagaacccgtgtgccccttcccaccatatccaccctcgctccatctttgaactcaaacacgaggaactaactgcaccctggtcctctccccagtccccagttcaccctccatccctcaccttcctccactctaagggatatcaacactgcccagcacaggggccctgaatttatgtggtttttatacattttttaataagatgcactttatgtcattttttaataaagtctgaagaattactgtttaa

SEQ ID NO: 385992 - DNA, 2759 bp, Homo sapiens
cgggccggcctggcaagggggacgagtcagtggacactccaggaagagcggccccgcggggggcgatgaccgtgcgctgaccctgactcactccaggtccggaggcgggggcccccggggcgactcgggggcggaccgcggggcggagctgccgcccgtgagtccggccgagccacctgagcccgagccgcgggacaccgtcgctcctgctctccgaatgctgcgcaccgcgatgggcctgaggagctggctcgccgccccatggggcgcgctgccgcctcggccaccgctgctgctgctcctgctgctgctgctcctgctgcagccgccgcctccgacctgggcgctcagcccccggatcagcctgcctctgggctctgaagagcggccattcctcagattcgaagctgaacacatctccaactacacagcccttctgctgagcagggatggcaggaccctgtacgtgggtgctcgagaggccctctttgcactcagtagcaacctcagcttcctgccaggcggggagtaccaggagctgctttggggtgcagacgcagagaagaaacagcagtgcagcttcaagggcaaggacccacagcgcgactgtcaaaactacatcaagatcctcctgccgctcagcggcagtcacctgttcacctgtggcacagcagccttcagccccatgtgtacctacatcaacatggagaacttcaccctggcaagggacgagaaggggaatgtcctcctggaagatggcaagggccgttgtcccttcgacccgaatttcaagtccactgccctggtggttgatggcgagctctacactggaacagtcagcagcttccaagggaatgacccggccatctcgcggagccaaagccttcgccccaccaagaccgagagctccctcaactggctgcaagacccagcttttgtggcctcagcctacattcctgagagcctgggcagcttgcaaggcgatgatgacaagatctactttttcttcagcgagactggccaggaatttgagttctttgagaacaccattgtgtcccgcattgcccgcatctgcaagggcgatgagggtggagagcgggtgctacagcagcgctggacctccttcctcaaggcccagctgctgtgctcacggcccgacgatggcttccccttcaacgtgctgcaggatgtcttcacgctgagccccagcccccaggactggcgtgacacccttttctatggggtcttcacttcccagtggcacaggggaactacagaaggctctgccgtctgtgtcttcacaatgaaggatgtgcagagagtcttcagcggcctctacaaggaggtgaaccgtgagacacagcagtggtacaccgtgacccacccggtgcccacaccccggcctggagcgtgcatcaccaacagtgcccgggaaaggaagatcaactcatccctgcagctcccagaccgcgtgctgaacttcctcaaggaccacttcctgatggacgggcaggtccgaagccgcatgctgctgctgcagccccaggctcgctaccagcgcgtggctgtacaccgcgtccctggcctgcaccacacctacgatgtcctcttcctgggcactggtgacggccggctccacaaggcagtgagcgtgggcccccgggtgcacatcattgaggagctgcagatcttctcatcgggacagcccgtgcagaatctgctcctggacacccacagggggctgctgtatgcggcctcacactcgggcgtagtccaggtgcccatggccaactgcagcctgtacaggagctgtggggactgcctcctcgcccgggacccctactgtgcttggagcggctccagctgcaagcacgtcagcctctaccagcctcagctggccaccaggccgtggatccaggacatcgagggagccagcgccaaggacctttgcagcgcgtcttcggttgtgtccccgtcttttgtaccaacaggggagaagccatgtgagcaagtccagttccagcccaacacagtgaacactttggcctgcccgctcctctccaacctggcgacccgactctggctacgcaacggggcccccgtcaatgcctcggcctcctgccacgtgctacccactggggacctgctgctggtgggcacccaacagctgggggagttccagtgctggtcactagaggagggcttccagcagctggtagccagctactgcccagaggtggtggaggacggggtggcagaccaaacagatgagggtggcagtgtacccgtcattatcagcacatcgcgtgtgagtgcaccagctggtggcaaggccagctggggtgcagacaggtcctgggctcggacccaactcctggacctttccagcctgtatcaggctgtggccacacgagaggacagcgcgagctcaggagagatttcgtgacaatgtacgcctttccctcagaattcagggaagagactgtcgcctgccttcctccgttgttgcgtgagaacccgtgtgccccttcccaccatatccaccctcgctccatctttgaactcaaacacgaggaactaactgcaccctggtcctctccccagtccccagttcaccctccatccctcaccttcctccactctaagggatatcaacactgcccagcacaggggccctgaatttatgtggtttttatacattttttaataagatgcactttatgtcattttttaataaagtctgaagaattactgtttaa

SEQ ID NO: 385993 - DNA, 1143 bp, Homo sapiens
taggatcccctgcctgctgcgtagaagaggccactcagcatccaagacagcttcgtggaggtatccccagtgtgcccccggccccgggtccgccttggctcggagatccgtgactctgtggtgtgagagctgacttccagaggacgctgccctggcttcaggggctgtgaatgctcggagagggtcaactggacctcccctccgctctgctcttcgtggaacacgaccgtggtgcccggcccttgggagccttggggccagctggcctgctgctctccagtcaagtagcgaagctcctaccacccagacacccaaacagccgtggccccagaggtcctggccaaatatgggggcctgcctaggttggtggaacagtgctccttatgtaaactgagccctttgtttaaaaaacaattccaaatgtgaaactagaatgagagggaagagatagcatggcatgcagcacacacggctgctccagttcatggcctcccaggggtgctggggatgcatccaaagtggttgtctgagacagagttggaaaccctcaccaactggcctcttcaccttccacattatcccgctgccaccggctgccctgtctcactgcagattcaggaccagcttgggctgcgtgcgttctgccttgccagtcagccgaggatgtagttgttgctgccgtcgtcccaccacctcagggaccagagggctaggttggcactgcggccctcaccaggtcctgggctcggacccaactcctggacctttccagcctgtatcaggctgtggccacacgagaggacagcgcgagctcaggagagatttcgtgacaatgtacgcctttccctcagaattcagggaagagactgtcgcctgccttcctccgttgttgcgtgagaacccgtgtgccccttcccaccatatccaccctcgctccatctttgaactcaaacacgaggaactaactgcaccctggtcctctccccagtccccagttcaccctccatccctcaccttcctccactctaagggatatcaacactgcccagcacaggggccctgaatttatgtggtttttatacattttttaataagatgcactttatgtcattttttaataaagtctgaagaattactgtttaa

SEQ ID NO: 385994 - DNA, 1125 bp, Homo sapiens
ggtccgccttggctcggagatccgtgactctgtggtgtgagagctgacccggggccgggggcacactggggataccttggctcggagatccgtgactctgtggtgtgagagctgacttccagaggacgctgccctggcttcaggggctgtgaatgctcggagagggtcaactggacctcccctccgctctgctcttcgtggaacacgaccgtggtgcccggcccttgggagccttggggccagctggcctgctgctctccagtcaagtagcgaagctcctaccacccagacacccaaacagccgtggccccagaggtcctggccaaatatgggggcctgcctaggttggtggaacagtgctccttatgtaaactgagccctttgtttaaaaaacaattccaaatgtgaaactagaatgagagggaagagatagcatggcatgcagcacacacggctgctccagttcatggcctcccaggggtgctggggatgcatccaaagtggttgtctgagacagagttggaaaccctcaccaactggcctcttcaccttccacattatcccgctgccaccggctgccctgtctcactgcagattcaggaccagcttgggctgcgtgcgttctgccttgccagtcagccgaggatgtagttgttgctgccgtcgtcccaccacctcagggaccagagggctaggttggcactgcggccctcaccaggtcctgggctcggacccaactcctggacctttccagcctgtatcaggctgtggccacacgagaggacagcgcgagctcaggagagatttcgtgacaatgtacgcctttccctcagaattcagggaagagactgtcgcctgccttcctccgttgttgcgtgagaacccgtgtgccccttcccaccatatccaccctcgctccatctttgaactcaaacacgaggaactaactgcaccctggtcctctccccagtccccagttcaccctccatccctcaccttcctccactctaagggatatcaacactgcccagcacaggggccctgaatttatgtggtttttatacattttttaataagatgcactttatgtcattttttaataaagtctgaagaattactgtttaa

SEQ ID NO: 385995 - DNA, 433 bp, Homo sapiens
tgaccccttctgtcccacacacctcacctgcctgcagagttgccttctcctgcacgcctctctctttctcaccaagcctgctcctcattccctggagtgcccctgagcccatgtgtccaccctcctgcagaacatggagaacttcaccctggcaagggacgagaaggggaatgtcctcctggaagatggcaagggccgttgtcccttcgacccgaatttcaagtccactgccctggtggttggtgagtgttgagggcaggatggcttcattgaggttccatgtaggggcacacagggctagagggctagctttggacaggctgagtccatgccatgcttatttccaaggggacagaatggccaggggcttgccttgggtttggtttttccaagttccagcttccttctctgcccaccacaggcaaaacgggca

SEQ ID NO: 385996 - DNA, 3768 bp, Homo sapiens
gctctgcccaagccgaggctgcggggccggcgccggcgggaggactgcggtgccccgcggaggggctgagtttgccagggcccacttgaccctgtttcccacctcccgccccccaggtccggaggcgggggcccccggggcgactcgggggcggaccgcggggcggagctgccgcccgtgagtccggccgagccacctgagcccgagccgcgggacaccgtcgctcctgctctccgaatgctgcgcaccgcgatgggcctgaggagctggctcgccgccccatggggcgcgctgccgcctcggccaccgctgctgctgctcctgctgctgctgctcctgctgcagccgccgcctccgacctgggcgctcagcccccggatcagcctgcctctgggctctgaagagcggccattcctcagattcgaagctgaacacatctccaactacacagcccttctgctgagcagggatggcaggaccctgtacgtgggtgctcgagaggccctctttgcactcagtagcaacctcagcttcctgccaggcggggagtaccaggagctgctttggggtgcagacgcagagaagaaacagcagtgcagcttcaagggcaaggacccacagcgcgactgtcaaaactacatcaagatcctcctgccgctcagcggcagtcacctgttcacctgtggcacagcagccttcagccccatgtgtacctacatcaacatggagaacttcaccctggcaagggacgagaaggggaatgtcctcctggaagatggcaagggccgttgtcccttcgacccgaatttcaagtccactgccctggtggttgatggcgagctctacactggaacagtcagcagcttccaagggaatgacccggccatctcgcggagccaaagccttcgccccaccaagaccgagagctccctcaactggctgcaagacccagcttttgtggcctcagcctacattcctgagagcctgggcagcttgcaaggcgatgatgacaagatctactttttcttcagcgagactggccaggaatttgagttctttgagaacaccattgtgtcccgcattgcccgcatctgcaagggcgatgagggtggagagcgggtgctacagcagcgctggacctccttcctcaaggcccagctgctgtgctcacggcccgacgatggcttccccttcaacgtgctgcaggatgtcttcacgctgagccccagcccccaggactggcgtgacacccttttctatggggtcttcacttcccagtggcacaggggaactacagaaggctctgccgtctgtgtcttcacaatgaaggatgtgcagagagtcttcagcggcctctacaaggaggtgaaccgtgagacacagcagtggtacaccgtgacccacccggtgcccacaccccggcctggagcgtgcatcaccaacagtgcccgggaaaggaagatcaactcatccctgcagctcccagaccgcgtgctgaacttcctcaaggaccacttcctgatggacgggcaggtccgaagccgcatgctgctgctgcagccccaggctcgctaccagcgcgtggctgtacaccgcgtccctggcctgcaccacacctacgatgtcctcttcctgggcactggtgacggccggctccacaaggcagtgagcgtgggcccccgggtgcacatcattgaggagctgcagatcttctcatcgggacagcccgtgcagaatctgctcctggacacccacagggggctgctgtatgcggcctcacactcgggcgtagtccaggtgcccatggccaactgcagcctgtacaggagctgtggggactgcctcctcgcccgggacccctactgtgcttggagcggctccagctgcaagcacgtcagcctctaccagcctcagctggccaccaggccgtggatccaggacatcgagggagccagcgccaaggacctttgcagcgcgtcttcggttgtgtccccgtcttttgtaccaacaggggagaagccatgtgagcaagtccagttccagcccaacacagtgaacactttggcctgcccgctcctctccaacctggcgacccgactctggctacgcaacggggcccccgtcaatgcctcggcctcctgccacgtgctacccactggggacctgctgctggtgggcacccaacagctgggggagttccagtgctggtcactagaggagggcttccagcagctggtagccagctactgcccagaggtggtggaggacggggtggcagaccaaacagatgagggtggcagtgtacccgtcattatcagcacatcgcgtgtgagtgcaccagctggtggcaaggccagctggggtgcagacaggtcctactggaaggagttcctggtgatgtgcacgctctttgtgctggccgtgctgctcccagttttattcttgctctaccggcaccggaacagcatgaaagtcttcctgaagcagggggaatgtgccagcgtgcaccccaagacctgccctgtggtgctgccccctgagacccgcccactcaacggcctagggccccctagcaccccgctcgatcaccgagggtaccagtccctgtcagacagccccccgggggcccgagtcttcactgagtcagagaagaggccactcagcatccaagacagcttcgtggaggtatccccagtgtgcccccggccccgggtccgccttggctcggagatccgtgactctgtggtgtgagagctgacttccagaggacgctgccctggcttcaggggctgtgaatgctcggagagggtcaactggacctcccctccgctctgctcttcgtggaacacgaccgtggtgcccggcccttgggagccttggggccagctggcctgctgctctccagtcaagtagcgaagctcctaccacccagacacccaaacagccgtggccccagaggtcctggccaaatatgggggcctgcctaggttggtggaacagtgctccttatgtaaactgagccctttgtttaaaaaacaattccaaatgtgaaactagaatgagagggaagagatagcatggcatgcagcacacacggctgctccagttcatggcctcccaggggtgctggggatgcatccaaagtggttgtctgagacagagttggaaaccctcaccaactggcctcttcaccttccacattatcccgctgccaccggctgccctgtctcactgcagattcaggaccagcttgggctgcgtgcgttctgccttgccagtcagccgaggatgtagttgttgctgccgtcgtcccaccacctcagggaccagagggctaggttggcactgcggccctcaccaggtcctgggctcggacccaactcctggacctttccagcctgtatcaggctgtggccacacgagaggacagcgcgagctcaggagagatttcgtgacaatgtacgcctttccctcagaattcagggaagagactgtcgcctgccttcctccgttgttgcgtgagaacccgtgtgccccttcccaccatatccaccctcgctccatctttgaactcaaacacgaggaactaactgcaccctggtcctctccccagtccccagttcaccctccatccctcaccttcctccactctaagggatatcaacactgcccagcacaggggccctgaatttatgtggtttttatacattttttaataagatgcactttatgtcattttttaataaagtctgaagaattactgtttaa

SEQ ID NO: 385997 - DNA, 3748 bp, Homo sapiens
cgggccggcctggcaagggggacgagtcagtggacactccaggaagagcggccccgcggggggcgatgaccgtgcgctgaccctgactcactccaggtccggaggcgggggcccccggggcgactcgggggcggaccgcggggcggagctgccgcccgtgagtccggccgagccacctgagcccgagccgcgggacaccgtcgctcctgctctccgaatgctgcgcaccgcgatgggcctgaggagctggctcgccgccccatggggcgcgctgccgcctcggccaccgctgctgctgctcctgctgctgctgctcctgctgcagccgccgcctccgacctgggcgctcagcccccggatcagcctgcctctgggctctgaagagcggccattcctcagattcgaagctgaacacatctccaactacacagcccttctgctgagcagggatggcaggaccctgtacgtgggtgctcgagaggccctctttgcactcagtagcaacctcagcttcctgccaggcggggagtaccaggagctgctttggggtgcagacgcagagaagaaacagcagtgcagcttcaagggcaaggacccacagcgcgactgtcaaaactacatcaagatcctcctgccgctcagcggcagtcacctgttcacctgtggcacagcagccttcagccccatgtgtacctacatcaacatggagaacttcaccctggcaagggacgagaaggggaatgtcctcctggaagatggcaagggccgttgtcccttcgacccgaatttcaagtccactgccctggtggttgatggcgagctctacactggaacagtcagcagcttccaagggaatgacccggccatctcgcggagccaaagccttcgccccaccaagaccgagagctccctcaactggctgcaagacccagcttttgtggcctcagcctacattcctgagagcctgggcagcttgcaaggcgatgatgacaagatctactttttcttcagcgagactggccaggaatttgagttctttgagaacaccattgtgtcccgcattgcccgcatctgcaagggcgatgagggtggagagcgggtgctacagcagcgctggacctccttcctcaaggcccagctgctgtgctcacggcccgacgatggcttccccttcaacgtgctgcaggatgtcttcacgctgagccccagcccccaggactggcgtgacacccttttctatggggtcttcacttcccagtggcacaggggaactacagaaggctctgccgtctgtgtcttcacaatgaaggatgtgcagagagtcttcagcggcctctacaaggaggtgaaccgtgagacacagcagtggtacaccgtgacccacccggtgcccacaccccggcctggagcgtgcatcaccaacagtgcccgggaaaggaagatcaactcatccctgcagctcccagaccgcgtgctgaacttcctcaaggaccacttcctgatggacgggcaggtccgaagccgcatgctgctgctgcagccccaggctcgctaccagcgcgtggctgtacaccgcgtccctggcctgcaccacacctacgatgtcctcttcctgggcactggtgacggccggctccacaaggcagtgagcgtgggcccccgggtgcacatcattgaggagctgcagatcttctcatcgggacagcccgtgcagaatctgctcctggacacccacagggggctgctgtatgcggcctcacactcgggcgtagtccaggtgcccatggccaactgcagcctgtacaggagctgtggggactgcctcctcgcccgggacccctactgtgcttggagcggctccagctgcaagcacgtcagcctctaccagcctcagctggccaccaggccgtggatccaggacatcgagggagccagcgccaaggacctttgcagcgcgtcttcggttgtgtccccgtcttttgtaccaacaggggagaagccatgtgagcaagtccagttccagcccaacacagtgaacactttggcctgcccgctcctctccaacctggcgacccgactctggctacgcaacggggcccccgtcaatgcctcggcctcctgccacgtgctacccactggggacctgctgctggtgggcacccaacagctgggggagttccagtgctggtcactagaggagggcttccagcagctggtagccagctactgcccagaggtggtggaggacggggtggcagaccaaacagatgagggtggcagtgtacccgtcattatcagcacatcgcgtgtgagtgcaccagctggtggcaaggccagctggggtgcagacaggtcctactggaaggagttcctggtgatgtgcacgctctttgtgctggccgtgctgctcccagttttattcttgctctaccggcaccggaacagcatgaaagtcttcctgaagcagggggaatgtgccagcgtgcaccccaagacctgccctgtggtgctgccccctgagacccgcccactcaacggcctagggccccctagcaccccgctcgatcaccgagggtaccagtccctgtcagacagccccccgggggcccgagtcttcactgagtcagagaagaggccactcagcatccaagacagcttcgtggaggtatccccagtgtgcccccggccccgggtccgccttggctcggagatccgtgactctgtggtgtgagagctgacttccagaggacgctgccctggcttcaggggctgtgaatgctcggagagggtcaactggacctcccctccgctctgctcttcgtggaacacgaccgtggtgcccggcccttgggagccttggggccagctggcctgctgctctccagtcaagtagcgaagctcctaccacccagacacccaaacagccgtggccccagaggtcctggccaaatatgggggcctgcctaggttggtggaacagtgctccttatgtaaactgagccctttgtttaaaaaacaattccaaatgtgaaactagaatgagagggaagagatagcatggcatgcagcacacacggctgctccagttcatggcctcccaggggtgctggggatgcatccaaagtggttgtctgagacagagttggaaaccctcaccaactggcctcttcaccttccacattatcccgctgccaccggctgccctgtctcactgcagattcaggaccagcttgggctgcgtgcgttctgccttgccagtcagccgaggatgtagttgttgctgccgtcgtcccaccacctcagggaccagagggctaggttggcactgcggccctcaccaggtcctgggctcggacccaactcctggacctttccagcctgtatcaggctgtggccacacgagaggacagcgcgagctcaggagagatttcgtgacaatgtacgcctttccctcagaattcagggaagagactgtcgcctgccttcctccgttgttgcgtgagaacccgtgtgccccttcccaccatatccaccctcgctccatctttgaactcaaacacgaggaactaactgcaccctggtcctctccccagtccccagttcaccctccatccctcaccttcctccactctaagggatatcaacactgcccagcacaggggccctgaatttatgtggtttttatacattttttaataagatgcactttatgtcattttttaataaagtctgaagaattactgtttaa

SEQ ID NO: 385998 - DNA, 3643 bp, Homo sapiens
agatggagtctcgctctgtcgcccaggctggagtgcagtggcacgatctcggctcactgcaagctctgcctcctgggttcacgccattctcctgcctcagcctcccgagtagctgggactacaggtgcccgccaccacgcctggctaattttttctatttttcggtagagaggggggtttcaccgtgttagccaggatggtcttgatctcctgacctcgtgatccacccgcctcggcctcccagagtgctgggattacaggtgtgagccaccacgcccggccaggctcacatcattttctaagcctcacctcctccgccaggtgggtctgataatgtgtcccgcgtcgggtcactgtgaggcagtgtggcactgtgtctgggtgaggcctctcctgaggccgactgtccaggttcaaacccttcggcaccgtgtcctggctgaggaggacggcgtccctgacacctgaccccttctgtcccacacacctcacctgcctgcagagttgccttctcctgcacgcctctctctttctcaccaagcctgctcctcattccctggagtgcccctgagcccatgtgtccaccctcctgcagaacatggagaacttcaccctggcaagggacgagaaggggaatgtcctcctggaagatggcaagggccgttgtcccttcgacccgaatttcaagtccactgccctggtggttgatggcgagctctacactggaacagtcagcagcttccaagggaatgacccggccatctcgcggagccaaagccttcgccccaccaagaccgagagctccctcaactggctgcaagacccagcttttgtggcctcagcctacattcctgagagcctgggcagcttgcaaggcgatgatgacaagatctactttttcttcagcgagactggccaggaatttgagttctttgagaacaccattgtgtcccgcattgcccgcatctgcaagggcgatgagggtggagagcgggtgctacagcagcgctggacctccttcctcaaggcccagctgctgtgctcacggcccgacgatggcttccccttcaacgtgctgcaggatgtcttcacgctgagccccagcccccaggactggcgtgacacccttttctatggggtcttcacttcccagtggcacaggggaactacagaaggctctgccgtctgtgtcttcacaatgaaggatgtgcagagagtcttcagcggcctctacaaggaggtgaaccgtgagacacagcagtggtacaccgtgacccacccggtgcccacaccccggcctggagcgtgcatcaccaacagtgcccgggaaaggaagatcaactcatccctgcagctcccagaccgcgtgctgaacttcctcaaggaccacttcctgatggacgggcaggtccgaagccgcatgctgctgctgcagccccaggctcgctaccagcgcgtggctgtacaccgcgtccctggcctgcaccacacctacgatgtcctcttcctgggcactggtgacggccggctccacaaggcagtgagcgtgggcccccgggtgcacatcattgaggagctgcagatcttctcatcgggacagcccgtgcagaatctgctcctggacacccacagggggctgctgtatgcggcctcacactcgggcgtagtccaggtgcccatggccaactgcagcctgtacaggagctgtggggactgcctcctcgcccgggacccctactgtgcttggagcggctccagctgcaagcacgtcagcctctaccagcctcagctggccaccaggccgtggatccaggacatcgagggagccagcgccaaggacctttgcagcgcgtcttcggttgtgtccccgtcttttgtaccaacaggggagaagccatgtgagcaagtccagttccagcccaacacagtgaacactttggcctgcccgctcctctccaacctggcgacccgactctggctacgcaacggggcccccgtcaatgcctcggcctcctgccacgtgctacccactggggacctgctgctggtgggcacccaacagctgggggagttccagtgctggtcactagaggagggcttccagcagctggtagccagctactgcccagaggtggtggaggacggggtggcagaccaaacagatgagggtggcagtgtacccgtcattatcagcacatcgcgtgtgagtgcaccagctggtggcaaggccagctggggtgcagacaggtcctactggaaggagttcctggtgatgtgcacgctctttgtgctggccgtgctgctcccagttttattcttgctctaccggcaccggaacagcatgaaagtcttcctgaagcagggggaatgtgccagcgtgcaccccaagacctgccctgtggtgctgccccctgagacccgcccactcaacggcctagggccccctagcaccccgctcgatcaccgagggtaccagtccctgtcagacagccccccgggggcccgagtcttcactgagtcagagaagaggccactcagcatccaagacagcttcgtggaggtatccccagtgtgcccccggccccgggtccgccttggctcggagatccgtgactctgtggtgtgagagctgacttccagaggacgctgccctggcttcaggggctgtgaatgctcggagagggtcaactggacctcccctccgctctgctcttcgtggaacacgaccgtggtgcccggcccttgggagccttggggccagctggcctgctgctctccagtcaagtagcgaagctcctaccacccagacacccaaacagccgtggccccagaggtcctggccaaatatgggggcctgcctaggttggtggaacagtgctccttatgtaaactgagccctttgtttaaaaaacaattccaaatgtgaaactagaatgagagggaagagatagcatggcatgcagcacacacggctgctccagttcatggcctcccaggggtgctggggatgcatccaaagtggttgtctgagacagagttggaaaccctcaccaactggcctcttcaccttccacattatcccgctgccaccggctgccctgtctcactgcagattcaggaccagcttgggctgcgtgcgttctgccttgccagtcagccgaggatgtagttgttgctgccgtcgtcccaccacctcagggaccagagggctaggttggcactgcggccctcaccaggtcctgggctcggacccaactcctggacctttccagcctgtatcaggctgtggccacacgagaggacagcgcgagctcaggagagatttcgtgacaatgtacgcctttccctcagaattcagggaagagactgtcgcctgccttcctccgttgttgcgtgagaacccgtgtgccccttcccaccatatccaccctcgctccatctttgaactcaaacacgaggaactaactgcaccctggtcctctccccagtccccagttcaccctccatccctcaccttcctccactctaagggatatcaacactgcccagcacaggggccctgaatttatgtggtttttatacattttttaataagatgcactttatgtcattttttaataaagtctgaagaattactgtttaa

SEQ ID NO: 385999 - DNA, 3778 bp, Homo sapiens
cgggccggcctggcaagggggacgagtcagtggacactccaggaagagcggccccgcggggggcgatgaccgtgcgctgaccctgactcactccaggtccggaggcgggggcccccggggcgactcgggggcggaccgcggggcggagctgccgcccgtgagtccggccgagccacctgagcccgagccgcgggacaccgtcgctcctgctctccgaatgctgcgcaccgcgatgggcctgaggagctggctcgccgccccatggggcgcgctgccgcctcggccaccgctgctgctgctcctgctgctgctgctcctgctgcagccgccgcctccgacctgggcgctcagcccccggatcagcctgcctctgggctctgaagagcggccattcctcagattcgaagctgaacacatctccaactacacagcccttctgctgagcagggatggcaggaccctgtacgtgggtgctcgagaggccctctttgcactcagtagcaacctcagcttcctgccaggcggggagtaccaggagctgctttggggtgcagacgcagagaagaaacagcagtgcagcttcaagggcaaggacccacagcgcgactgtcaaaactacatcaagatcctcctgccgctcagcggcagtcacctgttcacctgtggcacagcagccttcagccccatgtgtacctacatcaacatggagaacttcaccctggcaagggacgagaaggggaatgtcctcctggaagatggcaagggccgttgtcccttcgacccgaatttcaagtccactgccctggtggttgatggcgagctctacactggaacagtcagcagcttccaagggaatgacccggccatctcgcggagccaaagccttcgccccaccaagaccgagagctccctcaactggctgcaagacccagcttttgtggcctcagcctacattcctgagagcctgggcagcttgcaaggcgatgatgacaagatctactttttcttcagcgagactggccaggaatttgagttctttgagaacaccattgtgtcccgcattgcccgcatctgcaagggcgatgagggtggagagcgggtgctacagcagcgctggacctccttcctcaaggcccagctgctgtgctcacggcccgacgatggcttccccttcaacgtgctgcaggatgtcttcacgctgagccccagcccccaggactggcgtgacacccttttctatggggtcttcacttcccagtggcacaggggaactacagaaggctctgccgtctgtgtcttcacaatgaaggatgtgcagagagtcttcagcggcctctacaaggaggtgaaccgtgagacacagcagtggtacaccgtgacccacccggtgcccacaccccggcctggagcgtgcatcaccaacagtgcccgggaaaggaagatcaactcatccctgcagctcccagaccgcgtgctgaacttcctcaaggaccacttcctgatggacgggcaggtccgaagccgcatgctgctgctgcagccccaggctcgctaccagcgcgtggctgtacaccgcgtccctggcctgcaccacacctacgatgtcctcttcctgggcactggtgacggccggctccacaaggcagtgagcgtgggcccccgggtgcacatcattgaggagctgcagatcttctcatcgggacagcccgtgcagaatctgctcctggacacccacagggtgagcaggccaacgaggaatcctggcagggggctgctgtatgcggcctcacactcgggcgtagtccaggtgcccatggccaactgcagcctgtacaggagctgtggggactgcctcctcgcccgggacccctactgtgcttggagcggctccagctgcaagcacgtcagcctctaccagcctcagctggccaccaggccgtggatccaggacatcgagggagccagcgccaaggacctttgcagcgcgtcttcggttgtgtccccgtcttttgtaccaacaggggagaagccatgtgagcaagtccagttccagcccaacacagtgaacactttggcctgcccgctcctctccaacctggcgacccgactctggctacgcaacggggcccccgtcaatgcctcggcctcctgccacgtgctacccactggggacctgctgctggtgggcacccaacagctgggggagttccagtgctggtcactagaggagggcttccagcagctggtagccagctactgcccagaggtggtggaggacggggtggcagaccaaacagatgagggtggcagtgtacccgtcattatcagcacatcgcgtgtgagtgcaccagctggtggcaaggccagctggggtgcagacaggtcctactggaaggagttcctggtgatgtgcacgctctttgtgctggccgtgctgctcccagttttattcttgctctaccggcaccggaacagcatgaaagtcttcctgaagcagggggaatgtgccagcgtgcaccccaagacctgccctgtggtgctgccccctgagacccgcccactcaacggcctagggccccctagcaccccgctcgatcaccgagggtaccagtccctgtcagacagccccccgggggcccgagtcttcactgagtcagagaagaggccactcagcatccaagacagcttcgtggaggtatccccagtgtgcccccggccccgggtccgccttggctcggagatccgtgactctgtggtgtgagagctgacttccagaggacgctgccctggcttcaggggctgtgaatgctcggagagggtcaactggacctcccctccgctctgctcttcgtggaacacgaccgtggtgcccggcccttgggagccttggggccagctggcctgctgctctccagtcaagtagcgaagctcctaccacccagacacccaaacagccgtggccccagaggtcctggccaaatatgggggcctgcctaggttggtggaacagtgctccttatgtaaactgagccctttgtttaaaaaacaattccaaatgtgaaactagaatgagagggaagagatagcatggcatgcagcacacacggctgctccagttcatggcctcccaggggtgctggggatgcatccaaagtggttgtctgagacagagttggaaaccctcaccaactggcctcttcaccttccacattatcccgctgccaccggctgccctgtctcactgcagattcaggaccagcttgggctgcgtgcgttctgccttgccagtcagccgaggatgtagttgttgctgccgtcgtcccaccacctcagggaccagagggctaggttggcactgcggccctcaccaggtcctgggctcggacccaactcctggacctttccagcctgtatcaggctgtggccacacgagaggacagcgcgagctcaggagagatttcgtgacaatgtacgcctttccctcagaattcagggaagagactgtcgcctgccttcctccgttgttgcgtgagaacccgtgtgccccttcccaccatatccaccctcgctccatctttgaactcaaacacgaggaactaactgcaccctggtcctctccccagtccccagttcaccctccatccctcaccttcctccactctaagggatatcaacactgcccagcacaggggccctgaatttatgtggtttttatacattttttaataagatgcactttatgtcattttttaataaagtctgaagaattactgtttaa

SEQ ID NO: 386000 - DNA, 2103 bp, Homo sapiens
acggcagtactctaacggtttaaggtagcgaggctgggtggcccgtgcagaatctgctcctggacacccacagggggctgctgtatgcggcctcacactcgggcgtagtccaggtgcccatggccaactgcagcctgtacaggagctgtggggactgcctcctcgcccgggacccctactgtgcttggagcggctccagctgcaagcacgtcagcctctaccagcctcagctggccaccagaattctctctggccctcaggccgtggatccaggacatcgagggagccagcgccaaggacctttgcagcgcgtcttcggttgtgtccccgtcttttgtaccaacaggggagaagccatgtgagcaagtccagttccagcccaacacagtgaacactttggcctgcccgctcctctccaacctggcgacccgactctggctacgcaacggggcccccgtcaatgcctcggcctcctgccacgtgctacccactggggacctgctgctggtgggcacccaacagctgggggagttccagtgctggtcactagaggagggcttccagcagctggtagccagctactgcccagaggtggtggaggacggggtggcagaccaaacagatgagggtggcagtgtacccgtcattatcagcacatcgcgtgtgagtgcaccagctggtggcaaggccagctggggtgcagacaggtcctactggaaggagttcctggtgatgtgcacgctctttgtgctggccgtgctgctcccagttttattcttgctctaccggcaccggaacagcatgaaagtcttcctgaagcagggggaatgtgccagcgtgcaccccaagacctgccctgtggtgctgccccctgagacccgcccactcaacggcctagggccccctagcaccccgctcgatcaccgagggtaccagtccctgtcagacagccccccgggggcccgagtcttcactgagtcagagaagaggccactcagcatccaagacagcttcgtggaggtatccccagtgtgcccccggccccgggtccgccttggctcggagatccgtgactctgtggtgtgagagctgacttccagaggacgctgccctggcttcaggggctgtgaatgctcggagagggtcaactggacctcccctccgctctgctcttcgtggaacacgaccgtggtgcccggcccttgggagccttggggccagctggcctgctgctctccagtcaagtagcgaagctcctaccacccagacacccaaacagccgtggccccagaggtcctggccaaatatgggggcctgcctaggttggtggaacagtgctccttatgtaaactgagccctttgtttaaaaaacaattccaaatgtgaaactagaatgagagggaagagatagcatggcatgcagcacacacggctgctccagttcatggcctcccaggggtgctggggatgcatccaaagtggttgtctgagacagagttggaaaccctcaccaactggcctcttcaccttccacattatcccgctgccaccggctgccctgtctcactgcagattcaggaccagcttgggctgcgtgcgttctgccttgccagtcagccgaggatgtagttgttgctgccgtcgtcccaccacctcagggaccagagggctaggttggcactgcggccctcaccaggtcctgggctcggacccaactcctggacctttccagcctgtatcaggctgtggccacacgagaggacagcgcgagctcaggagagatttcgtgacaatgtacgcctttccctcagaattcagggaagagactgtcgcctgccttcctccgttgttgcgtgagaacccgtgtgccccttcccaccatatccaccctcgctccatctttgaactcaaacacgaggaactaactgcaccctggtcctctccccagtccccagttcaccctccatccctcaccttcctccactctaagggatatcaacactgcccagcacaggggccctgaatttatgtggtttttatacattttttaataagatgcactttatgtcattttttaataaagtctgaagaattactgtttaa

SEQ ID NO: 386001 - DNA, 3663 bp, Homo sapiens
cgggccggcctggcaagggggacgagtcagtggacactccaggaagagcggccccgcggggggcgatgaccgtgcgctgaccctgactcactccaggtccggaggcgggggcccccggggcgactcgggggcggaccgcggggcggagctgccgcccgtgagtccggccgagccacctgagcccgagccgcgggacaccgtcgctcctgctctccgaatgctgcgcaccgcgatgggcctgaggagctggctcgccgccccatggggcgcgctgccgcctcggccaccgctgctgctgctcctgctgctgctgctcctgctgcagccgccgcctccgacctgggcgctcagcccccggatcagcctgcctctgggctctgaagagcggccattcctcagattcgaagctgaacacatctccaactacacagcccttctgctgagcagggatggcaggaccctgtacgtgggtgctcgagaggccctctttgcactcagtagcaacctcagcttcctgccaggcggggagtaccaggagctgctttggggtgcagacgcagagaagaaacagcagtgcagcttcaagggcaaggacccacagcgcgactgtcaaaactacatcaagatcctcctgccgctcagcggcagtcacctgttcacctgtggcacagcagccttcagccccatgtgtacctacatcaacatggagaacttcaccctggcaagggacgagaaggggaatgtcctcctggaagatggcaagggccgttgtcccttcgacccgaatttcaagtccactgccctggtggttgatggcgagctctacactggaacagtcagcagcttccaagggaatgacccggccatctcgcggagccaaagccttcgccccaccaagaccgagagctccctcaactggctgcaagacccagcttttgtggcctcagcctacattcctgagagcctgggcagcttgcaaggcgatgatgacaagatctactttttcttcagcgagactggccaggaatttgagttctttgagaacaccattgtgtcccgcattgcccgcatctgcaagggcgatgagggtggagagcgggtgctacagcagcgctggacctccttcctcaaggcccagctgctgtgctcacggcccgacgatggcttccccttcaacgtgctgcaggatgtcttcacgctgagccccagcccccaggactggcgtgacacccttttctatggggtcttcacttcccagtggcacaggggaactacagaaggctctgccgtctgtgtcttcacaatgaaggatgtgcagagagtcttcagcggcctctacaaggaggtgaaccgtgagacacagcagtggtacaccgtgacccacccggtgcccacaccccggcctggagcgtgcatcaccaacagtgcccgggaaaggaagatcaactcatccctgcagctcccagaccgcgtgctgaacttcctcaaggaccacttcctgatggacgggcaggtccgaagccgcatgctgctgctgcagccccaggctcgctaccagcgcgtggctgtacaccgcgtccctggcctgcaccacacctacgatgtcctcttcctgggcactggtgacggccggctccacaaggcagtgagcgtgggcccccgggtgcacatcattgaggagctgcagatcttctcatcgggacagcccgtgcagaatctgctcctggacacccacagggggctgctgtatgcggcctcacactcgggcgtagtccaggtgcccatggccaactgcagcctgtacaggagctgtggggactgcctcctcgcccgggacccctactgtgcttggagcggctccagctgcaagcacgtcagcctctaccagcctcagctggccaccaggccgtggatccaggacatcgagggagccagcgccaaggacctttgcagcgcgtcttcggttgtgtccccgtcttttgtaccaacaggggagaagccatgtgagcaagtccagttccagcccaacacagtgaacactttggcctgcccgctcctctccaacctggcgacccgactctggctacgcaacggggcccccgtcaatgcctcggcctcctgccacgtgctacccactggggacctgctgctggtgggcacccaacagctgggggagttccagtgctggtcactagaggagggcttccagcagctggtagccagctactgcccagaggtggtggaggacggggtggcagaccaaacagatgagggtggcagtgtacccgtcattatcagcacatcgcgtgtgagtgcaccagctggtggcaaggccagctggggtgcagacaggtcctactggaaggagttcctggtgatgtgcacgctctttgtgctggccgtgctgctcccagttttattcttgctctaccggcaccggaacagcatgaaagtcttcctgaagcagggggaatgtgccagcgtgcaccccaagacctgccctgtggtgctgccccctgagacccgcccactcaacggcctagggccccctagcaccccgctcgatcaccgagggtaccagtccctgtcagacagccccccgggggcccgagtcttcactgagtcagagaagaggccactcagcatccaagacagcttcgtggaggtatccccagtgtgcccccggccccgggtccgccttggctcggagatccgtgactctgtggtgtgagagctgacttccagaggacgctgccctggcttcaggggctgtgaatgctcggagagggtcaactggacctcccctccgctctgctcttcgtggaacacgaccgtggtgcccggcccttgggagccttggggccagctggcctgctgctctccagtcaagtagcgaagctcctaccacccagacacccaaacagccgtggccccagaggtcctggccaaatatgggggcctgcctaggttggtggaacagtgctccttatgtaaactgagccctttgtttaaaaaacaattccaaatgtgaaactagaatgagagggaagagatagcatggcatgcagcacacacggctgctccagttcatggcctcccaggggtgctggggatgcatccaaagtggttgtctgagacagagttggaaaccctcaccaactggcctcttcaccttccacattatcccgctgccaccggctgccctgtctcactgcagattcaggaccagcttgggctgcgtgcgttctgccttgccagtcagccgaggatgtagttgttgctgccgtcgtcccaccacctcagggaccagagggctaggttggcactgcggccctcaccaggtcctgggctcggacccaactcctggacctttccagcctgtatcaggctgtggccacacgagaggacagcgcgagctcaggagagatttcgtgacaatgtacgcctttccctcagaattcagggaagagactgtcgcctgccttcctccgttgttgcgtgagaacccgtgtgccccttcccaccatatccaccctcgctccatctttgaactcaaacacgaggaactaactgcaccctggtcctctccccagtccccagttcaccctccatccctctcacgtcgacgcggccgcgaatttagtagtagtagttggcggccgc

SEQ ID NO: 386002 - DNA, 1323 bp, Homo sapiens
gtcatgtccctgtttgccagctggcattccatcgcgtagcagggggaatgtgccagcgtgcaccccaagacctgccctgtggtgctgccccctgagacccgcccactcaacggcctagggccccctagcaccccgctcgatcaccgagggtaccagtccctgtcagacagccccccgggggcccgagtcttcactgagtcagagaagaggccactcagcatccaagacagcttcgtggaggtatccccagtgtgcccccggccccgggtccgccttggctcggagatccgtgactctgtggtgtgagagctgacttccagaggacgctgccctggcttcaggggctgtgaatgctcggagagggtcaactggacctcccctccgctctgctcttcgtggaacacgaccgtggtgcccggcccttgggagccttggggccagctggcctgctgctctccagtcaagtagcgaagctcctaccacccagacacccaaacagccgtggccccagaggtcctggccaaatatgggggcctgcctaggttggtggaacagtgctccttatgtaaactgagccctttgtttaaaaaacaattccaaatgtgaaactagaatgagagggaagagatagcatggcatgcagcacacacggctgctccagttcatggcctcccaggggtgctggggatgcatccaaagtggttgtctgagacagagttggaaaccctcaccaactggcctcttcaccttccacattatcccgctgccaccggctgccctgtctcactgcagattcaggaccagcttgggctgcgtgcgttctgccttgccagtcagccgaggatgtagttgttgctgccgtcgtcccaccacctcagggaccagagggctaggttggcactgcggccctcaccaggtcctgggctcggacccaactcctggacctttccagcctgtatcaggctgtggccacacgagaggacagcgcgagctcaggagagatttcgtgacaatgtacgcctttccctcagaattcagggaagagactgtcgcctgccttcctccgttgttgcgtgagaacccgtgtgccccttcccaccatatccaccctcgctccatctttgaactcaaacacgaggaactaactgcaccctggtcctctccccagtccccagttcaccctccatccctcaccttcctccactctaagggatatcaacactgcccagcacaggggccctgaatttatgtggtttttatacattttttaataagatgcactttatgtcattttttaataaagtctgaagaattactgtttaa

SEQ ID NO: 386003 - DNA, 1933 bp, Homo sapiens
cgggccggcctggcaagggggacgagtcagtggacactccaggaagagcggccccgcggggggcgatgaccgtgcgctgaccctgactcactccaggtccggaggcgggggcccccggggcgactcgggggcggaccgcggggcggagctgccgcccgtgagtccggccgagccacctgagcccgagccgcgggacaccgtcgctcctgctctccgaatgctgcgcaccgcgatgggcctgaggagctggctcgccgccccatggggcgcgctgccgcctcggccaccgctgctgctgctcctgctgctgctgctcctgctgcagccgccgcctccgacctgggcgctcagcccccggatcagcctgcctctgggctctgaagagcggccattcctcagattcgaagctgaacacatctccaactacacagcccttctgctgagcagggatggcaggaccctgtacgtgggtgctcgagaggccctctttgcactcagtagcaacctcagcttcctgccaggcggggagtaccaggagctgctttggggtgcagacgcagagaagaaacagcagtgcagcttcaagggcaaggacccacagcgcgactgtcaaaactacatcaagatcctcctgccgctcagcggcagtcacctgttcacctgtggcacagcagccttcagccccatgtgtacctacatcaacatggagaacttcaccctggcaagggacgagaaggggaatgtcctcctggaagatggcaagggccgttgtcccttcgacccgaatttcaagtccactgccctggtggttgatggcgagctctacactggaacagtcagcagcttccaagggaatgacccggccatctcgcggagccaaagccttcgccccaccaagaccgagagctccctcaactggctgcaagacccagcttttgtggcctcagcctacattcctgagagcctgggcagcttgcaaggcgatgatgacaagatctactttttcttcagcgagactggccaggaatttgagttctttgagaacaccattgtgtcccgcattgcccgcatctgcaagggcgatgagggtggagagcgggtgctacagcagcgctggacctccttcctcaaggcccagctgctgtgctcacggcccgacgatggcttccccttcaacgtgctgcaggatgtcttcacgctgagccccagcccccaggactggcgtgacacccttttctatggggtcttcacttcccagtggcacaggggaactacagaaggctctgccgtctgtgtcttcacaatgaaggatgtgcagagagtcttcagcggcctctacaaggaggtgaaccgtgagacacagcagtggtacaccgtgacccacccggtgcccacaccccggcctggagcgtgcatcaccaacagtgcccgggaaaggaagatcaactcatccctgcagctcccagaccgcgtgctgaacttcctcaaggaccacttcctgatggacgggcaggtccgaagccgcatgctgctgctgcagccccaggctcgctaccagcgcgtggctgtacaccgcgtccctggcctgcaccacacctacgatgtcctcttcctgggcactggtaagtgcctgcagcccagcaggctcaggggaaggggtgcacgtggctggtgggtcatgggcagtgggctccacccagggcctgagtcctgtccacaccccaggtgacggccggctccacaaggcagtgagcgtgggcccccgggtgcacatcattgaggagctgcagatcttctcatcgggacagcccgtgcagaatctgctcctggacacccacagggtgagcaggccaacgaggaatcctggcagggtacttggggggtgccctccattagcaccaagcagtccccacccagcttctcctcccttgcc

SEQ ID NO: 386004 - DNA, 454 bp, Homo sapiens
tcggaaaactgagttcaaatatagggtctgggacttctcaggtgatattttatcttaaattagaatctgcatgaggtagggtggggccactcatgcctataatctcagcactttgagaggccgaggcaggagcgtcccttgagaccaggagttcgagaccagcctgagcaacatagcaagaccttctctctatttttaaaaaactaaaattggatttaaataaagaatctgcatgaactttcttgtcacttattcttacatattatttgccagtgtgcgatacttaataaccaagtaagacacttgaaatgagtcttttaaggctacaacttaggtaacattttataaatattactgctacatacataatacagtaactttttttagcctcacaataataccttgtacaatttataactgctaaagggcctatagaaggctacccacctatgta

SEQ ID NO: 386005 - DNA, 3347 bp, Homo sapiens
gaattccgaagacgcaaaagcagaaacccctgataaaaccatcagacttcatgagacttattcaccaccatgagaacagtatgggggaaaccaccccagtgattcaattttctcccaccagttgcctcccacaacatgtggcaattatgggagttcaattaaagatgagatttggatggggacacagagccaaaccatatcaagtacaaagaaaagagtctcataagatgcaagtgaggaagagttttgtcaaagcaacaggcttcacaagtcctggttaggaagcgtcgtgcaaattctttacttgaagaaaccaaacagggtaatcttgaaagagaatgcatcgaagaactgtgcaataaagaagaagccagggaggtctttgaaaatgacccggaaacggattatttttatccaaaatacttagtttgtcttcgctcttttcaaactgggttattcactgctgcacgtcagtcaactaatgcttatcctgacctaagaagctgtgtcaatgccattccagaccagtgtagtcctctgccatgcaatgaagatggatatatgagctgcaaagatggaaaagcttcttttacttgcacttgtaaaccaggttggcaaggagaaaagtgtgaatttgacataaatgaatgcaaagatccctcaaatataaatggaggttgcagtcaaatttgtgataatacacctggaagttaccactgttcctgtaaaaatggttttgttatgctttcaaataagaaagattgtaaagatgtggatgaatgctctttgaagccaagcatttgtggcacagctgtgtgcaagaacatcccaggagattttgaatgtgaatgccccgaaggctacagatataatctcaaatcaaagtcttgtgaagatatagatgaatgctctgagaacatgtgtgctcagctttgtgtcaattaccctggaggttacacttgctattgtgatgggaagaaaggattcaaacttgcccaagatcagaagagttgtgaggttgtttcagtgtgccttcccttgaaccttgacacaaagtatgaattactttacttggcggagcagtttgcaggggttgttttatatttaaaatttcgtttgccagaaatcagcagattttcagcagaatttgatttccggacatatgattcagaaggcgtgatactgtacgcagaatctatcgatcactcagcgtggctcctgattgcacttcgtggtggaaagattgaagttcagcttaagaatgaacatacatccaaaatcacaactggaggtgatgttattaataatggtctatggaatatggtgtctgtggaagaattagaacatagtattagcattaaaatagctaaagaagctgtgatggatataaataaacctggacccctttttaagccggaaaatggattgctggaaaccaaagtatactttgcaggattccctcggaaagtggaaagtgaactcattaaaccgattaaccctcgtctagatggatgtatacgaagctggaatttgatgaagcaaggagcttctggaataaaggaaattattcaagaaaaacaaaataagcattgcctggttactgtggagaagggctcctactatcctggttctggaattgctcaatttcacatagattataataatgtatccagtgctgagggttggcatgtaaatgtgaccttgaatattcgtccatccacgggcactggtgttatgcttgccttggtttctggtaacaacacagtgccctttgctgtgtccttggtggactccacctctgaaaaatcacaggatattctgttatctgttgaaaatactgtaatatatcggatacaggccctaagtctatgttccgatcaacaatctcatctggaatttagagtcaacagaaacaatctggagttgtcgacaccacttaaaatagaaaccatctcccatgaagaccttcaaagacaacttgccgtcttggacaaagcaatgaaagcaaaagtggccacatacctgggtggccttccagatgttccattcagtgccacaccagtgaatgccttttataatggctgcatggaagtgaatattaatggtgtacagttggatctggatgaagccatttctaaacataatgatattagagctcactcatgtccatcagtttggaaaaagacaaagaattcttaaggcatcttttctctgcttataataccttttccttgtgtgtaattatacttatgtttcaataacagctgaagggttttatttacaatgtgcagtctttgattattttgtggtcctttcctgggatttttaaaaggtcctttgtcaaggaaaaaaattctgttgtgatataaatcacagtaaagaaattcttacttctcttgctatctaagaatagtgaaaaataacaattttaaatttgaatttttttcctacaaatgacagtttcaatttttgtttgtaaaactaaatttttaattttatcatcatgaactagtgtctaaatacctatgtttttttcagaaagcaaggaagtaaactcaaacaaaagtgcgtgtaattaaatactattaatcataggcagatactattttgtttatgtttttgtttttttcctgatgaaggcagaagagatggtggtctattaaatatgaattgaatggagggtcctaatgccttatttcaaaacaattcctcagggggaccagctttggcttcatctttctcttgtgtggcttcacatttaaaccagtatctttattgaattagaaaacaagtgggacatattttcctgagagcagcacaggaatcttcttcttggcagctgcagtctgtcaggatgagatatcagattaggttggataggtggggaaatctgaagtgggtacattttttaaattttgctgtgtgggtcacacaaggtctacattacaaaagacagaattcagggatggaaaggagaatgaacaaatgtgggagttcatagttttccttgaatccaacttttaattaccagagtaagttgccaaaatgtgattgttgaagtacaaaaggaactatgaaaaccagaacaaattttaacaaaaggacaaccacagagggatatagtgaatatcgtatcattgtaatcaaagaagtaaggaggtaagattgccacgtgcctgctggtactgtgatgcatttcaagtggcagttttatcacgtttgaatctaccattcatagccagatgtgtatcagatgtttcactgacagtttttaacaataaattcttttcactgtattttatatcacttataataaatcggtgtataattttaaaaaaaaggaattc

SEQ ID NO: 386006 - DNA, 3592 bp, Homo sapiens
aaaagcagcaactagggagctggtgaagaaggatgtctcagcagtgtttactaggcctccaacactagagcccatcccccagctccgaaaagcttcctggaaatgtccttgttatcacttcccctctcgggctgggcgctgggagcgggcggtctcctccgcccccggctgttccgccgaggctcgctgggtcgctggcgccgccgcgcagcacggctcagaccgaggcgcacaggctcgcagctccgcggcgcctagcgctccggtccccgccgcgacgcgccaccgtccctgccggcgcctccgcgcgcttcgaaatgagggtcctgggtgggcgctgcggggcgctgctggcgtgtctcctcctagtgcttcccgtctcagaggcaaacttttttttatattttagaaatgattctatatacaaccatacatgcatttctgtattggtcggcttatctggatgctattttttctattctctatgctttttgtcaaagcaacaggcttcacaagtcctggttaggaagcgtcgtgcaaattctttacttgaagaaaccaaacagggtaatcttgaaagagaatgcatcgaagaactgtgcaataaagaagaagccagggaggtctttgaaaatgacccggaaacggattatttttatccaaaatacttagtttgtcttcgctcttttcaaactgggttattcactgctgcacgtcagtcaactaatgcttatcctgacctaagaagctgtgtcaatgccattccagaccagtgtagtcctctgccatgcaatgaagatggatatatgagctgcaaagatggaaaagcttcttttacttgcacttgtaaaccaggttggcaaggagaaaagtgtgaatttgacataaatgaatgcaaagatccctcaaatataaatggaggttgcagtcaaatttgtgataatacacctggaagttaccactgttcctgtaaaaatggttttgttatgctttcaaataagaaagattgtaaagatgtggatgaatgctctttgaagccaagcatttgtggcacagctgtgtgcaagaacatcccaggagattttgaatgtgaatgccccgaaggctacagatataatctcaaatcaaagtcttgtgaagatatagatgaatgctctgagaacatgtgtgctcagctttgtgtcaattaccctggaggttacacttgctattgtgatgggaagaaaggattcaaacttgcccaagatcagaagagttgtgaggttgtttcagtgtgccttcccttgaaccttgacacaaagtatgaattactttacttggcggagcagtttgcaggggttgttttatatttaaaatttcgtttgccagaaatcagcagattttcagcagaatttgatttccggacatatgattcagaaggcgtgatactgtacgcagaatctatcgatcactcagcgtggctcctgattgcacttcgtggtggaaagattgaagttcagcttaagaatgaacatacatccaaaatcacaactggaggtgatgttattaataatggtctatggaatatggtgtctgtggaagaattagaacatagtattagcattaaaatagctaaagaagctgtgatggatataaataaacctggacccctttttaagccggaaaatggattgctggaaaccaaagtatactttgcaggattccctcggaaagtggaaagtgaactcattaaaccgattaaccctcgtctagatggatgtatacgaagctggaatttgatgaagcaaggagcttctggaataaaggaaattattcaagaaaaacaaaataagcattgcctggttactgtggagaagggctcctactatcctggttctggaattgctcaatttcacatagattataataatgtatccagtgctgagggttggcatgtaaatgtgaccttgaatattcgtccatccacgggcactggtgttatgcttgccttggtttctggtaacaacacagtgccctttgctgtgtccttggtggactccacctctgaaaaatcacaggatattctgttatctgttgaaaatactgtaatatatcggatacaggccctaagtctatgttccgatcaacaatctcatctggaatttagagtcaacagaaacaatctggagttgtcgacaccacttaaaatagaaaccatctcccatgaagaccttcaaagacaacttgccgtcttggacaaagcaatgaaagcaaaagtggccacatacctgggtggccttccagatgttccattcagtgccacaccagtgaatgccttttataatggctgcatggaagtgaatattaatggtgtacagttggatctggatgaagccatttctaaacataatgatattagagctcactcatgtccatcagtttggaaaaagacaaagaattcttaaggcatcttttctctgcttataataccttttccttgtgtgtaattatacttatgtttcaataacagctgaagggttttatttacaatgtgcagtctttgattattttgtggtcctttcctgggatttttaaaaggtcctttgtcaaggaaaaaaattctgttgtgatataaatcacagtaaagaaattcttacttctcttgctatctaagaatagtgaaaaataacaattttaaatttgaatttttttcctacaaatgacagtttcaatttttgtttgtaaaactaaatttttaattttatcatcatgaactagtgtctaaatacctatgtttttttcagaaagcaaggaagtaaactcaaacaaaagtgcgtgtaattaaatactattaatcataggcagatactattttgtttatgtttttgtttttttcctgatgaaggcagaagagatggtggtctattaaatatgaattgaatggagggtcctaatgccttatttcaaaacaattcctcagggggaccagctttggcttcatctttctcttgtgtggcttcacatttaaaccagtatctttattgaattagaaaacaagtgggacatattttcctgagagcagcacaggaatcttcttcttggcagctgcagtctgtcaggatgagatatcagattaggttggataggtggggaaatctgaagtgggtacattttttaaattttgctgtgtgggtcacacaaggtctacattacaaaagacagaattcagggatggaaaggagaatgaacaaatgtgggagttcatagttttccttgaatccaacttttaattaccagagtaagttgccaaaatgtgattgttgaagtacaaaaggaactatgaaaaccagaacaaattttaacaaaaggacaaccacagagggatatagtgaatatcgtatcattgtaatcaaagaagtaaggaggtaagattgccacgtgcctgctggtactgtgatgcatttcaagtggcagttttatcacgtttgaatctaccattcatagccagatgtgtatcagatgtttcactgacagtttttaacaataaattcttttcactgtattttatatcacttataataaatcggtgtataattttaaaaaaaaggaattc

SEQ ID NO: 386007 - DNA, 3328 bp, Homo sapiens
ctgcagggggggggggggggggggggggggggggggggcgcagcacggctcagaccgaggcgcacaggctcgcagctccgcggcgcctagcgctccggtccccgccgcgacgcgccaccgtccctgccggcgcctccgcgcgcttcgaaatgagggtcctgggtgggcgctgcggggcgctgctggcgtgtctcctcctagtgcttcccgtctcagaggcaaactttttgtcaaagcaacaggcttcacaagtcctggttaggaagcgtcgtgcaaattctttacttgaagaaaccaaacagggtaatcttgaaagagaatgcatcgaagaactgtgcaataaagaagaagccagggaggtctttgaaaatgacccggaaacggattatttttatccaaaatacttagtttgtcttcgctcttttcaaactgggttattcactgctgcacgtcagtcaactaatgcttatcctgacctaagaagctgtgtcaatgccattccagaccagtgtagtcctctgccatgcaatgaagatggatatatgagctgcaaagatggaaaagcttcttttacttgcacttgtaaaccaggttggcaaggagaaaagtgtgaatttgacataaatgaatgcaaagatccctcaaatataaatggaggttgcagtcaaatttgtgataatacacctggaagttaccactgttcctgtaaaaatggttttgttatgctttcaaataagaaagattgtaaagatgtggatgaatgctctttgaagccaagcatttgtggcacagctgtgtgcaagaacatcccaggagattttgaatgtgaatgccccgaaggctacagatataatctcaaatcaaagtcttgtgaagatatagatgaatgctctgagaacatgtgtgctcagctttgtgtcaattaccctggaggttacacttgctattgtgatgggaagaaaggattcaaacttgcccaagatcagaagagttgtgaggttgtttcagtgtgccttcccttgaaccttgacacaaagtatgaattactttacttggcggagcagtttgcaggggttgttttatatttaaaatttcgtttgccagaaatcagcagattttcagcagaatttgatttccggacatatgattcagaaggcgtgatactgtacgcagaatctatcgatcactcagcgtggctcctgattgcacttcgtggtggaaagattgaagttcagcttaagaatgaacatacatccaaaatcacaactggaggtgatgttattaataatggtctatggaatatggtgtctgtggaagaattagaacatagtattagcattaaaatagctaaagaagctgtgatggatataaataaacctggacccctttttaagccggaaaatggattgctggaaaccaaagtatactttgcaggattccctcggaaagtggaaagtgaactcattaaaccgattaaccctcgtctagatggatgtatacgaagctggaatttgatgaagcaaggagcttctggaataaaggaaattattcaagaaaaacaaaataagcattgcctggttactgtggagaagggctcctactatcctggttctggaattgctcaatttcacatagattataataatgtatccagtgctgagggttggcatgtaaatgtgaccttgaatattcgtccatccacgggcactggtgttatgcttgccttggtttctggtaacaacacagtgccctttgctgtgtccttggtggactccacctctgaaaaatcacaggatattctgttatctgttgaaaatactgtaatatatcggatacaggccctaagtctatgttccgatcaacaatctcatctggaatttagagtcaacagaaacaatctggagttgtcgacaccacttaaaatagaaaccatctcccatgaagaccttcaaagacaacttgccgtcttggacaaagcaatgaaagcaaaagtggccacatacctgggtggccttccagatgttccattcagtgccacaccagtgaatgccttttataatggctgcatggaagtgaatattaatggtgtacagttggatctggatgaagccatttctaaacataatgatattagagctcactcatgtccatcagtttggaaaaagacaaagaattcttaaggcatcttttctctgcttataataccttttccttgtgtgtaattatacttatgtttcaataacagctgaagggttttatttacaatgtgcagtctttgattattttgtggtcctttcctgggatttttaaaaggtcctttgtcaaggaaaaaaattctgttgtgatataaatcacagtaaagaaattcttacttctcttgctatctaagaatagtgaaaaataacaattttaaatttgaatttttttcctacaaatgacagtttcaatttttgtttgtaaaactaaatttttaattttatcatcatgaactagtgtctaaatacctatgtttttttcagaaagcaaggaagtaaactcaaacaaaagtgcgtgtaattaaatactattaatcataggcagatactattttgtttatgtttttgtttttttcctgatgaaggcagaagagatggtggtctattaaatatgaattgaatggagggtcctaatgccttatttcaaaacaattcctcagggggaccagctttggcttcatctttctcttgtgtggcttcacatttaaaccagtatctttattgaattagaaaacaagtgggacatattttcctgagagcagcacaggaatcttcttcttggcagctgcagtctgtcaggatgagatatcagattaggttggataggtggggaaatctgaagtgggtacattttttaaattttgctgtgtgggtcacacaaggtctacattacaaaagacagaattcagggatggaaaggagaatgaacaaatgtgggagttcatagttttccttgaatccaacttttaattaccagagtaagttgccaaaatgtgattgttgaagtacaaaaggaactatgaaaaccagaacaaattttaacaaaaggacaaccacagagggatatagtgaatatcgtatcattgtaatcaaagaagtaaggaggtaagattgccacgtgcctgctggtactgtgatgcatttcaagtggcagttttatcacgtttgaatctaccattcatagccagatgtgtatcagatgtttcactgacagtttttaacaataaattcttttcactgtattttatatcacttataataaatcggtgtataattttaaaaaaaaggaattc

SEQ ID NO: 386008 - DNA, 3496 bp, Homo sapiens
aaaagcagcaactagggagctggtgaagaaggatgtctcagcagtgtttactaggcctccaacactagagcccatcccccagctccgaaaagcttcctggaaatgtccttgttatcacttcccctctcgggctgggcgctgggagcgggcggtctcctccgcccccggctgttccgccgaggctcgctgggtcgctggcgccgccgcgcagcacggctcagaccgaggcgcacaggctcgcagctccgcggcgcctagcgctccggtccccgccgcgacgcgccaccgtccctgccggcgcctccgcgcgcttcgaaatgagggtcctgggtgggcgctgcggggcgctgctggcgtgtctcctcctagtgcttcccgtctcagaggcaaactttttgtcaaagcaacaggcttcacaagtcctggttaggaagcgtcgtgcaaattctttacttgaagaaaccaaacagggtaatcttgaaagagaatgcatcgaagaactgtgcaataaagaagaagccagggaggtctttgaaaatgacccggaaacggattatttttatccaaaatacttagtttgtcttcgctcttttcaaactgggttattcactgctgcacgtcagtcaactaatgcttatcctgacctaagaagctgtgtcaatgccattccagaccagtgtagtcctctgccatgcaatgaagatggatatatgagctgcaaagatggaaaagcttcttttacttgcacttgtaaaccaggttggcaaggagaaaagtgtgaatttgacataaatgaatgcaaagatccctcaaatataaatggaggttgcagtcaaatttgtgataatacacctggaagttaccactgttcctgtaaaaatggttttgttatgctttcaaataagaaagattgtaaagatgtggatgaatgctctttgaagccaagcatttgtggcacagctgtgtgcaagaacatcccaggagattttgaatgtgaatgccccgaaggctacagatataatctcaaatcaaagtcttgtgaagatatagatgaatgctctgagaacatgtgtgctcagctttgtgtcaattaccctggaggttacacttgctattgtgatgggaagaaaggattcaaacttgcccaagatcagaagagttgtgaggttgtttcagtgtgccttcccttgaaccttgacacaaagtatgaattactttacttggcggagcagtttgcaggggttgttttatatttaaaatttcgtttgccagaaatcagcagattttcagcagaatttgatttccggacatatgattcagaaggcgtgatactgtacgcagaatctatcgatcactcagcgtggctcctgattgcacttcgtggtggaaagattgaagttcagcttaagaatgaacatacatccaaaatcacaactggaggtgatgttattaataatggtctatggaatatggtgtctgtggaagaattagaacatagtattagcattaaaatagctaaagaagctgtgatggatataaataaacctggacccctttttaagccggaaaatggattgctggaaaccaaagtatactttgcaggattccctcggaaagtggaaagtgaactcattaaaccgattaaccctcgtctagatggatgtatacgaagctggaatttgatgaagcaaggagcttctggaataaaggaaattattcaagaaaaacaaaataagcattgcctggttactgtggagaagggctcctactatcctggttctggaattgctcaatttcacatagattataataatgtatccagtgctgagggttggcatgtaaatgtgaccttgaatattcgtccatccacgggcactggtgttatgcttgccttggtttctggtaacaacacagtgccctttgctgtgtccttggtggactccacctctgaaaaatcacaggatattctgttatctgttgaaaatactgtaatatatcggatacaggccctaagtctatgttccgatcaacaatctcatctggaatttagagtcaacagaaacaatctggagttgtcgacaccacttaaaatagaaaccatctcccatgaagaccttcaaagacaacttgccgtcttggacaaagcaatgaaagcaaaagtggccacatacctgggtggccttccagatgttccattcagtgccacaccagtgaatgccttttataatggctgcatggaagtgaatattaatggtgtacagttggatctggatgaagccatttctaaacataatgatattagagctcactcatgtccatcagtttggaaaaagacaaagaattcttaaggcatcttttctctgcttataataccttttccttgtgtgtaattatacttatgtttcaataacagctgaagggttttatttacaatgtgcagtctttgattattttgtggtcctttcctgggatttttaaaaggtcctttgtcaaggaaaaaaattctgttgtgatataaatcacagtaaagaaattcttacttctcttgctatctaagaatagtgaaaaataacaattttaaatttgaatttttttcctacaaatgacagtttcaatttttgtttgtaaaactaaatttttaattttatcatcatgaactagtgtctaaatacctatgtttttttcagaaagcaaggaagtaaactcaaacaaaagtgcgtgtaattaaatactattaatcataggcagatactattttgtttatgtttttgtttttttcctgatgaaggcagaagagatggtggtctattaaatatgaattgaatggagggtcctaatgccttatttcaaaacaattcctcagggggaccagctttggcttcatctttctcttgtgtggcttcacatttaaaccagtatctttattgaattagaaaacaagtgggacatattttcctgagagcagcacaggaatcttcttcttggcagctgcagtctgtcaggatgagatatcagattaggttggataggtggggaaatctgaagtgggtacattttttaaattttgctgtgtgggtcacacaaggtctacattacaaaagacagaattcagggatggaaaggagaatgaacaaatgtgggagttcatagttttccttgaatccaacttttaattaccagagtaagttgccaaaatgtgattgttgaagtacaaaaggaactatgaaaaccagaacaaattttaacaaaaggacaaccacagagggatatagtgaatatcgtatcattgtaatcaaagaagtaaggaggtaagattgccacgtgcctgctggtactgtgatgcatttcaagtggcagttttatcacgtttgaatctaccattcatagccagatgtgtatcagatgtttcactgacagtttttaacaataaattcttttcactgtattttatatcacttataataaatcggtgtataattttaaaaaaaaggaattc

SEQ ID NO: 386009 - DNA, 246 bp, Homo sapiens
cccccccagaacattatgtttaaaacagtcctcttctgtaattaacccattgccccctccgcagaacattatgtttaaaacagtcctcttctgtaattaacccattgccccccccagaacattatgtttaaaacagtcctcttctgtaattaacccattgccccccccagaacattatgtttaaaacagtcctcttctgtaattaacccattgcccccccaaataaatttctctcctgctaaatca

SEQ ID NO: 386010 - DNA, 402 bp, Homo sapiens
catacagatctgacttttgcccagagtgtcaaaaataaaatcaaggtaggatcagagaacagtggggagctgaaggggcagaaggaaagaaggaactctgaataaaacttcaccccacaatccagtctattctgttcatgtgttgagcacagctatggattagtgctggaataagcaggggaatatgaagatgaatgggtcttggagtttctccacccaggggagacaagcacatacatgcataaccctgacacagggcagactatggtctgtgctaagagaagagtgtaattattcttccccaaactgagtccggagcagacgggaggtggtgtggtaagaaacagggttgaacactggggagagggatttttgggacctggagcttgggcaattcctata

SEQ ID NO: 386011 - DNA, 641 bp, Homo sapiens
aaaaaaaaaacaatacaaaaaaaagaaaggaagagactgtggaacggtgcagagccagaaggagtttgtgacttttcatcttcaaattgtccaaatgaggctctcatgtctagtgattattaccattactgcagaactctgtgtgccactgatgctctgtgcccacggagaacaggcacagctgccaaggggtgtgtgtgtgttggggaccggcacgtctcctgcttggtctcctgtcttgctcggtaggctgccattcccgcattaacagccaacaatgcctgaagcgtagccttcatggagagtccacacgtctaggcaggccagagatttgagttcttgagaataaagccactgggccaggaactcacctttcaaaccctggtagagcattaaaatttccttgcaagaccagccaatgaataatggtaatcaatcaaatacaaaataactttcaaatagcattgtgctttatagcacacaaagcccttatttaaccttcaagaaaaccctgaggagtgggttttcaaaattattatattagtatccctattatacaggtgaagacaccaagagtagaaagattaagtgacaagcctggggtagcacatagaaggcacatggctcagtaaatattgatg

SEQ ID NO: 386012 - DNA, 163 bp, Homo sapiens
ataatccagagtgacaataggttggcaaagtggttacgttggatgcatattgaaaagattatttcatattttgagacagcatgaaggcattacagctttttagtggtgtgccaatttctcggtggaaagtggaattctcttctcagcccagtcctctccaagc

SEQ ID NO: 386013 - DNA, 360 bp, Homo sapiens
tcagttttgtgaatgggaattttatgtaactcaaaactgcatactagaaaatttcctacgtacattttaaaaagatattgtgactgcctttaaaattattttaattgattcaatttagaagacatttattgattatctgctctgttcaagcaattgttcaggccatggggatgaatatgggaggaacatacctgtgtatgtggaggttgttttttggtaggagattcaatcagtaacaaatattgaaagaaacagcatcaggttctttctaattatcatgctatcacaattagaaagcttacaaagtgtcattagcccttacaatatgtctgatttttttagccccaaacacaaccgtgt

SEQ ID NO: 386014 - DNA, 411 bp, Homo sapiens
agatgctatccctgcctttgatgagtttaaagtctagaggagaaggtgaacagaggcagcatgaggatctataagaaggtatggagtacagtagaaagagcagtaaactcagagccaagaagcctcagttctaactcagtttcctcctgttttagcagtctaagatttggcaagccatgttctctctctgggctttagtcttccatttataaaacaaatggactgaataagatgatatttaaggtccttttcagctacaagagtccatgttccaagagaagataaaaattgcagcagcagcagcagcaatattcactgaagacttagcatgtgccagaatcttgctaggaaccatttacttaagattccattttgtatgaaatggcattaccggcattactacatcacttt

SEQ ID NO: 386015 - DNA, 1650 bp, Homo sapiens
  misc_feature (1)..(1): n is a, c, g, or t
  misc_feature (573)..(573): n is a, c, g, or t
  misc_feature (702)..(702): n is a, c, g, or t
  misc_feature (1284)..(1284): n is a, c, g, or t
  misc_feature (1650)..(1650): n is a, c, g, or t
ngcagtttgatctcagactgctgtgctagcaatcagcgagactccatgggcgtaggaccctcggagccaggtgcgggatgtaatctcgtggtgcgccgttttttaagcccgtcggaaaagcgcaatattcgggtgggagtgacccgattttccaggtagagacacttttgacttgatctctgcagtcctcaacatggtcgaagtctgaaatcaagtgtgagcagggccacatgggcccattctgaagacccgaaggagagtccccctttccctcttccagcgtctggcagtcctaggccttctttggttgacggcagcctcacttccatctgtgcctgtgactcacatagccctcttctcaaagtctctgactttctcttctcttaaaagaacacctcggctgggtgtggtggcacacgcctgtaatcccagcactttgggagccccaggcaggtgatctgcctgcctcggcctcccaaagtgctaggattataggcatgagccacagcatggggcccagtttcaatcttttaccaatgaaaacctgaacacaaaacaataattcttaaccantcatgatgaaacacagtaacttttttttttaataaaaggaagaagaaagtgttgaaaattgacatctatgtttacatatcacagcaacacaaagtgccagcaaaaaaaaaaaagtggaaaaatgaaagnatcttggccccatgagttttgctctgcttcccactgtcatttattcagtacatgtgtcactagatccaggacttgctctagaagttggaggaagtcaatggcactgtgagaaacgtgaattaccaagggactctgtcatgtccttcgttactcatgtgacttccttacatgaaaggaaaatagatcctggggcctccaaatcactcagctaaagggaaaagtcaagctggatctgcttagggcaaacctgcctcccatttattcaaagtcatcccactcttcactgagataaatgcatatctgatggcctcctttggaaaggctcatcagaaactcagaagaatgcaaccatttgtctcttatctacctatgacctggaatttcagtattaaaccaatgtttatcttgcatatattgattgatgtctcatatctctgtagagactacatgaaaattttgttgttgaaataattcgttgtactgagcttcaattgaaatgcttaaataccttgaaaacatttccatttttgcctttactcaaatcaggtggtggctactttctaatgaatgcaaatcccagtntgtgaaaagtgtgggttaggacaataaaaggggaggtgacaccattttaatggtttctcagaagctgtgctccaatgtccttgggcacatgtcatcagtacctcctgaggttatgtcacaggtgcatgtccttaactttggcaaaataaacttcctaaattaactgagatctgtctcagatattcaggcttcagagctatgccagctaaccccttatgctgaaaacgaggacttagaaggaaagggcaagagagccagacttgctttttccttttttttttttttaaagtcttttcttattcatcaataagccaaaagtagaggttgttagtagaaaatgtgtgcaccaagaagtgaaataaagan

SEQ ID NO: 386016 - DNA, 714 bp, Homo sapiens
tgtggttagtgcaataccataaaccttgaataacaccatgggacccatatgaagggccactaggaatgctggaagtgctcccaagaagcagagatcagtcatgactttacaagaagaagttgaattgctcgagtcttgctctgtcatccaggctggagtgcaatgtcgccagctcggctcactgcaacctccacctcccaggttcaaacgattctcctgcctcagcctcccgagtagccgggactacaggtagagacacttttgacttgatctctgcagtcctcaacatgccatcttctatcccaagggcagccatcttctatcccaagggcagccatcttctatcctgagggaagctggcctgaggatgaagccagaatatggagaagaggagaaggagatggctgagaagcagaacggaaacctgaactgcatttttcttagagcaagaattacatcaattcttcaagccaagttgagcactgttggtttctgctacttggaactgaataaactctgacagatactgtacagggaacagtacttggggagctccacttcatctgaggccttcgtgagtggcttgtgtcacattcctggctgttcaggcatcagtcctggtttcctggtgagctctctgctgactccacccagagctcccttgcttccgtctctgcagcagctacctccgttctcacacatggcttcttctga

SEQ ID NO: 386017 - DNA, 288 bp, Homo sapiens
tttttaggtcccgtcattttttttaaaatggaaaacgtaaggagattgagagagcaatggtgctttaattcttttgttggttccattgtagttcaagcattttgctctacttctgagcatgactcactccagttcatcttaagtactagcagtagaattttacatagattataccaattttaaattattgcttaattatttcaattaagacatttccaaattctcaattatataaatgatgctatgctgaacatctttgtagcaaaatctttgttcatatcaatgata

SEQ ID NO: 386018 - DNA, 504 bp, Homo sapiens
gcatgcctcactacaccatccccaccctttctggaatttaggcaaaactgacaagcattaacattaaaatggagatcataagactgataagacagattctttgtaacaataagataccaaactataaacaagaccactgaccataggctaattctggctagtttacaaaaagtacacatttgcatgcctttatgtcctaaaaagaccttttgatgtctagggcctaattataatacattatatgttaagtccccacacaaaaataaacatgagtcatatgttacatacatatttgttccatacacatgtgtcaagactgccttcataaacatttatgacctctcctgtatgtcttaaccaaaagatgtgggaaatataaactaaaaaaaaactgttaaatttgtgtattgagtccacctgtccatcatatccccacaagaactctgggacacaattgatagtggggactgtgcatggataaattaagtaattaagactgaatgc

SEQ ID NO: 386019 - DNA, 1096 bp, Homo sapiens
gtaggagcggggccaacggtcgccctggctgggtcgccctgactgtccgacgcgccctggctcagccccagcagaggaaaaaaataacagctgagggaggggtttagatgctcctccaagggcagagggcagcgctggaagagctgtgagccggagaatcccacactgagcatgtacggaaagacaacgctgccgtgggacacccaccagactgagaatgccaatgcttagcaaagaataagttcacttcaactttttctactctggtatcaggagaacggactgtgctacaaaaacaatctggtactccttacaaagctgaacatgtgtgctcctcacaacccagcaattctacttttaatacatttatattctagaaaaactcaccaggatgcaccaaacacagacaacgctgttcacagaagcaccgttcaaagcggcaggaatgtggaagccacccacctgagcgttcattcaacagcagcgtggaccaagggactgtggcgcacagaactgcatgtttaaaacccttgggcagatgggttttggaattcagaattcttcaatgtacaacgattatttggcacaatttaccatgtaacagcctcactggggtttgggggcactccccatcatcagacgttatttcttcactgaaatgtgttaggtatctatactaagtggtagaggctattaaactttacctggtgaggttttggccaccaaataggttaaaaacaaaaccaaaaactgtggtttcagagatgtttagatttttagcattgctgagaagggactgtggtcatgtattcacacaagagaatttcataaagcagttaaaataaatgaacatgacacaaagtcacctggatgactctcataaaacaatgctgaatgaaaaaagagagttgcggccgggcgcggtggctcacgcctgtaatcccagcactttgggaggccgaggcgggcggatcacaaggtcaggagatccagaccatcctggctaacacggtgaaaccccgtctctactaaaaatacaaaaaattagccgtgctcggtggcgggcgcctgtagtcccagctactccagaggctga

SEQ ID NO: 386020 - DNA, 496 bp, Homo sapiens
caatattttcttttactagactgacagacatataggagcagaaaattgcattaaagaagaatttcagtttttctcttaagagagttgtaataaacagaaaaattatggaccctccaaaaatacaaaatgaaacacatccttttcattcataatttgatcaactgacacctattttgtgattcttacaaaaattcaatcttgataatgtgtcttcctaagatctcaataaatctttattttagatggttttaaaagagcttggtaaatatttaattgataaaggtgtgattgaggattactgtttaagttttagattttttttttttttttgccatcgctactttaaaatgtaattttaggtattgactacatgacttatagcataacacatcttctttttgatttttatgtaacatgcaggctaatagaaaattttcctttgaaaataatttacctcttttttcctgctgcttggctgtccattcagtcctataac

SEQ ID NO: 386021 - DNA, 594 bp, Homo sapiens
gttcagtagaatcatggaatcactgcaccaggtatttcctgaagggccttcagaatcctattgccccacaatagaaagggctttcagggcaaagaccatattcattcaacacatgtatattgagtatacctgctgtctacatggcactgcactaggtcctgaacagcagtgagtaaaatggcccctgtccttattggtgttcctttataggtatgggagaagacaataaacagataagcaaataaatacagctgacccctgaacaacacagaggttagcaccaatcccccatgcaatcaaaaatatacatatggtcaggcacagtggctcacacctgtaatcccagcactttgggaggccgaagtggatggatcacttgaggtcaggagttcaagacaagcctggccaacatggtgataccccatctctactaaaaatacaaaacttagccgggcgtggtggcccacgtctacaatcccagctacccgagaggctgaggcaggagacttgcatgaacccgggaggcagaggtttcagtgagccaagatcgcggcactgcactccagcctgggtgatagagcgagactcggtctc

SEQ ID NO: 386022 - DNA, 413 bp, Homo sapiens
tgaagatctctgaacatatacctgaatttggctatgccttctgaaattgtgatgaaaacatagatagaaagcatcataaatgcatgcccatctgcaactgtttgactataaagctgtcagtgaagtagaatatcggaaatattttcatagaaatgttcgttggaattaatattttctttctggtggtggcaacaagaggacttgtcttaggaatgctgggaaacgggctcattggactggtaaactgcattgagtgggccaagagttggaaggtctcatcagctgatttcatcctcaccagcttggctatagtcagaatcattcgactgtatttaatactatttgattcatttataatggtattgtcccctcatctatataccatccgtaaactagtaaaactgtttactatt

SEQ ID NO: 386023 - DNA, 402 bp, Homo sapiens
tttatgtaaagaactgtacagtagaaatgaagaaattgtcagttaatagcctcttgtagattctattttaagaaattaactgatcatatgtaataagtaagggaacccaggtggccaccagtcttcacctaactcttagtgtagtaatgtatctaacaggatctcagattggtgtgctccactccccctcttgaatgccagcaatgatccaagtgtgctacaaagcaacagcaccctccaatgtcatgaggctatgacaggatttcttcagttggatagaaacaagcctctgaaacttcccttcagtgctttccaaagtctgactttttttcctcttttcgaggtccttattcctaatccttaaaacattaatactctctaggttctctcctaacatagacc

SEQ ID NO: 386024 - DNA, 294 bp, Homo sapiens
gataatttgcagggtttttttgttttgttttgctatgttagtaattttcgttcaggtataaataggtgagatataaaggcactgtaaaaagtaatataccattgtctttgcttgttaaaggaactctggctctcataaaaactatttcacatcaagagggccccctaaacaattttcttctttgacattacaaacttctttacttcacagttgtgatttcttccttgagctgtaatgttttctctctatgcctagaacattatgcaaaaacagacatcataggtaaccccattt

SEQ ID NO: 386025 - DNA, 763 bp, Homo sapiens
tctatggatttttgtatatttatgtttacctagccaccttatcaaggtacatattagtaagaggttgctcaagtaagcattcctgggtattcccaagaggatacttgtgaaaaatgtgtagtccctacctactcaaacagaatgcagaagtatgtttgggaaaaaggacagtgaggtgccttcattactgtatttttaacaaattttccagatgattttgatgctcatccatacttaggaaccagtaacttagaccactttagagagcttaaagcagactacattttcacaatatacatgaagttttaaatgacttcctacattgaaaacgtcagaagctgccatttatataacctcattagagacaaaaattagtctagcacaaaagctataaaaaagttccaaaagtttaattatattttaggagagttaacaggaaacagcgatgagcaataagtttccataaaacatatttacataaaatatcaccttcagctatatactctgaaatccctaaaaagtatagagtgtatcctatgaaaccaagaataacctctctgactccaaaaactccttttaacatgctcttctgtagaacaagcataatgaactctcagcattactccataaaaacaagagacagactaatgtgaaaaccattaacagctattattttgatttaatatggcatatagaaccacaaatcaatcttaagatgtctcaacatactttactaatatatgaatataagccaacattccat

SEQ ID NO: 386026 - DNA, 290 bp, Homo sapiens
aaagaaaggtcagctcccacggtgtacgtcgggtccccatgcccgtgggcccctgcaggcagctgacacggcgttggttgacatgacacacttatgctgtaggaaaagaactctgtccccacccccaccccacgggggacagatgccgcagtggggttggtcacgtgctgctcaatcacatgccctgacgcagattaaaaggaacacacagagtctgaagaggaaaggtgttcccacgccaggtgacaagccagctctggctgtgaggccttgcctgcatctcagcgtgt

SEQ ID NO: 386027 - DNA, 289 bp, Homo sapiens
aaagtattgaaaggcagagtaagaataaagcgggaaaagtggatttggtgacataaaaattgtctcaagtgaaacttaatgacactcaaaaaataggctttctatcaccattctgggccccgaaattctcatcaaatgtaatatccacctggatgcatcaaagatcattgacttctcagtccaaatgtctcttttccaccacttcaggcatccctcttaggcttgtcagcccagtggctgtaaatcactcctaaaatctcgatttcaagtatttgagaaccattttcaa

SEQ ID NO: 386028 - DNA, 428 bp, Homo sapiens
acatactgttcacaacaactctaagagatagatgtatcccatctcctacaagacgggtaaactgagactccaagagtcaaggggacatgacagagttaacagctagcaagtgacaaggctggaactgaataacattttgatgccaaggtccttgccctttctattaagttaaactgaagtttatgtgaacagtattaacttactgaagttgagtggtagataagaggagtgtttagcaggctggttctagacctctgcgtccatcttggttagaaagaaatagctccagggctcagccaggtgcagtggctcacacctgtaatcgtaacactttgggaggccgaggtgattggatcatttgaggtcaggagtttgagaccagcctgaccaacgtcgtgaaaccctgtctctaccaaaaatacaaaatt

SEQ ID NO: 386029 - DNA, 1558 bp, Homo sapiens
  misc_feature (815)..(815): n is a, c, g, or t
gacctgaactgtagctgcctggtccaagcagacaggattccgtcagttgtgatagagttctagattggcaatgcagttacattgtttcttctttgaaaataaagttctagacatataaaacaggaaaacaaaaaaaaaacaaaaaaaaacaaaaaaaaaaaaaaaacaaaaaggggggcagccgcccacaagaattactcccctccaaggagggcccacagaactcgcgcttcaaccagcgttcttgcgtgcgtcacaaggggggccccctcagaggagacggcgctatatataataacactcacagcgcgacaggcaggccccgggccggttatacaacacagccgctctgctgagaccgtgcggaacacaacaagcgcggcgcacaagcgcgggaagccacactctggagaaagaaaaagcgaacacaccctgatcatactacatgaagcgggagggacggtgacacacccacatacgggtggggacgacaaccaacacatcacacacaacacaagacggagagaaggtactattcaaacacgccccatcacagagggggcagtataaacctactagtttataccaagaaaccctgtacaaaagagaaggtagtctcatatacacgcggcgtggtggtagtcacacacacactacaagctgcagcggtacacaatatattctcgtcgcgacgcccccgccgtccttctagagaagacacatctctttcctgcgcagcgcatcacgcagcgggagaccaactagtcacagactatcttctgctgaacaccaaaacttctatttattccctcacncccacgcgcgtagagagctctcagagaaggagaaaaaaaaaagacggcagacccccagcacaagcgccgcacgccagacgcacgagccgcaccgcgaccccgccggaccctggcgcgaccagcgcccacgctgctgccacgcacgctgaccgacctgacgcccgcccgggcgcccaccgccagcgagcgcagcgcccgccaagggccggctgccacccgcacggccgcccgccagcagggacggcggggggagagggagctggaagctggggtggggagtgagagcgagcggcggcggggagggcgggaggggcgagaggcggacagggcggacgggcggggggcgcggaagaggatgtcgaggcgaggcggagagggacggggcacagaacgggccgagggcgaggcaggcgcacgaggagagcgggcagacaggaggggcgggggaagagggactggtagcgagcagagagacagtctgcggcggaaacggtggacgtcggagcagtcaggcgcgagacgcggagagaggcgggacgcggagcgaggcggaggagtggcggggcgcgagcgaagggaccgccgagcaagaacgcacaacagcggacgaagggtgagcaggggcacaggaagcgagcacggagacaaggacggagcggaggacagagcaagagccagtgaggaggagaggcgaacaagacgatacggcgaacacacagacactagcacgcccaacagcacgc

SEQ ID NO: 386030 - DNA, 221 bp, Homo sapiens
acatatatatggtgcttgcctgggcaacacagcaagacgtcatctctacaaaaagtaaaatcagctgggcatggtggcacactactgtagtagttccagctacctgggaagctcaggttggggagggtcgcttgagcccaggaggtcgaggttgcagtgagctgtgatcgtaccactgcactccagcctgggcaacagagtaagaccctgtctccaaaaaa

SEQ ID NO: 386031 - DNA, 291 bp, Homo sapiens
ataccctttcccccatacctcaccctatgcatgtctttatctgtatcctttctaatattctttctaataaaccagtaaacatgcttctctgagttctcctagatggtttagcaaattaatcaaatccaaagagagatttgggggaaccccagcttgaaaccaatggattgaggtattgcaaggtggttaaggtaggccctaatccaggatgattctagaggaaatctggacacagactcagagagaaaacaatatgaagacccggagagaagatggccatgtacaaggcaa

SEQ ID NO: 386032 - DNA, 402 bp, Homo sapiens
aatacctgctcctctgtggatctcaagctccatgatcctcaaactagaataacatcagctcctctccaggtctccagctgcagtatcctcaaacgagaacatcagcttctccctgagtcttcagcggcacgaccctcaaactagaacatcagctcttctccaggtctccagctgcaggacactcatactagaaaaataccagctccccctgggttctacagctgcacggccatcaaactaaagaaacaccagctgctctctgggtctccagctgcaggaccctcaaaccagaacatcagattctcccgggttctgcagctgcccaaccctcaaactaaagaaactcctgctcctcccagggtctatagctgcatgaccctcaaactaaaaaacaccagctcc

SEQ ID NO: 386033 - DNA, 308 bp, Homo sapiens
atttgtctgtaacaggctgaatcgccccactcccaaactcctggtcgtgatactggatatttgttatgccacttttagtttgcatgaggtatcttccaggaagtattagttattaacttgtgttctactaaactgtagatatttatttcctgttctggaagatttcttggagtgtccatctgtgcattcctggtgcctagtgtagtcttgctaatggaatagcacctttattggtgctacttaggggttggtagcttacaatcaatctacttggaacgtatccaaataaactggatatttttatacag

SEQ ID NO: 386034 - DNA, 350 bp, Homo sapiens
gcctgtggtcccagccacttgggaagctgaggcaggaggattgcctgagcctgggaggtcaaggctgtagagaggcatgatcataacactgcaccgcaacccaggcaacagaatgagtgagactgtctcagaaaataaaaacaaaagctggtagacccagtggacttaaattccacctctgctgcctactagttatgatttggggcaccactttaggcctataaacctgtttccttgtcctcacaacagagctatgggtacatatttcatactcatattcctaagttcctatgtatatctaaagtacccagcacaatgcctgccccagttagctttctaattccctggag

SEQ ID NO: 386035 - DNA, 653 bp, Homo sapiens
aaatatactttatggagttcttggcaaatagaaagtagtaggagctgaaaatattactataattatttaaggcaaaagaatataagtgaagaattttaagcaggagattaatatagatttaaaagttagaaaaactcctaggtagttgtgtagaggatacactggggaggagtgagagaggaagtgatggagaattgctaaaaagctagtcacagactgcaaaacaacattttggtcaacaatggaccacatagaagatgttggtcccatgagatcatagtggagcataaatagaaacctaataatatggtgcttgatgtgggcattgcagatcaagtatgggaaatgattgatatttaatgctgcttctgggatatttggttttccatgtgaaaaaatatgtatataaataaaaatatatatcatctaggtttgtgaaagtatagtctgtgatgtttgcacaaccacaaaattgcttaatgcgtttctcaaaatgtattcctgtccttgtgactcattactgtatgtgattaaactaggtgagatttgacggtcttctaaaccaaggacatgggagtaggttagagaaaggtgaatttttcagatagtaggagagagaatctgaatgaaagacttgctgactcacaggagtg

SEQ ID NO: 386036 - DNA, 542 bp, Homo sapiens
  misc_feature (405)..(405): n is a, c, g, or t
  misc_feature (419)..(419): n is a, c, g, or t
ctacgagactgtctcaaaaataaataaatatataaagtgcaggataaagtgatttcttaggactaattgtaggtcatctgccttccagttagagttatagaattaatcattgcctttctgtagttttgtcacctacttctattacaaaaatttgtttgccattcttttttctgaatgactccccttacctgaggaatgcagtctaataagctctttagcattttatactacagcctttactaaacagcccaatctatctttttgtcttcatctcctgaaattccttttcacatatactgtgcttcagccacagatacttgccatgtcttgaatataacatattctttcaaattgccttttctttgcatgaatccttctcctttccttggatttcttatttcttgncttctgctagcttnggtgtttgtttgctcttggttctctaattactttagttgtgatgttagtttgttaacgatatctttctagctttgggatgtgggcatttagtgctataagtttccctcttaacactgctttgc

SEQ ID NO: 386037 - DNA, 419 bp, Homo sapiens
ggctaatatccaacttattatagcactgtaaacaactacaaaagttaaataaaatatgtaaaagaactgataggacattgcatcaaggaagcccatttatattggcttttctgaaggcattttctaaaatagcacagggcagtaaaacccagacagaaagcataagtcttattaagcaaatgaggcagagatcctagtgctgggatctgaaggacagggtcccagagaaggaaccatagggaaagaactctaaaattctgctttaaaattccagttgggcgtggtgactcactcctataatcccagcactttgggaggctaaggtgggtggatcgcttgagcccaggaatttgaagctgcagtgagctatgattgcgccactgcactccagcctgggcaacagagcaagaccctgtctc

SEQ ID NO: 386038 - DNA, 301 bp, Homo sapiens
ggtgttccagcccctcctctcttccgccccctagtctcccacccttccctccccgtagtgaccaattcctatctcttccctctccttccctccctgtagttttgaagcggatgtttgttctttatagatgttgtttaaaaagcctgataatggtgattgaaatttacaaactttgtgtttttttttttttaagaaaaatataaaatagttttcttcaggctcaatgtgctttcctaaccgtgcccccccccccttttttttttgttaaataaagtgctttttgtttaaaaaaaaaaaaaaa

SEQ ID NO: 386039 - DNA, 2880 bp, Homo sapiens
gtgtggagcgaggccttgttcccgcgttgagccgccgccgccgccgccgcctcctcagcttcagcctccgcgccaggcccggccccgccgcgccatgtcggactacagccggcccgggcggggggtcggccgggggcccctctcagccacccggcggaggcggcccgggaatccgcaaggacgctttcgccgacgccgtgcagcgggcccgccagattgcagccaaaattggaggcgatgctgccacgacagtgaataacagcactcctgattttggttttgggggccaaaagagacagttggaagatggagatcaaccggagagcaagaagctggcttcccagggagactcaatcagttctcaacttggacccatccatcctcccccaaggacttcaatgacagaagagtacagggtcccagacggcatggtgggcctgatcattggcagaggaggtgaacaaattaacaaaatccaacaggattcaggctgcaaagtacagatttctccagacagcggtggcctacccgagcgcagtgtgtccttgacaggagccccagaagaaagccaagatgatgctggatgacattgtgtctcggggtcgtgggggccccccaggacagttccacgacaacgccaacgggggccagaacggcaccgtgcaggagatcatgatccccgcgggcaaggccggcctggtcattggcaagggcggggagaccattaagcagctgcaggaacgcgctggagtgaagatgatcttaattcaggacggatctcagaatacgaatgtggacaaacctctccgcatcattggggatccttacaaagtgcagcaagcctgtgagatggtgatggacatcctccgggaacgtgaccaaggcggctttggggaccggaatgagtacggatctcggattggcggaggcatcgatgtgccagtgcccaggcattctgttggcgtggtcattggccggagtggagagatgatcaagaagatccagaatgatgctggcgtgcggatacagttcaagcaagatgacgggacagggcccgagaagattgctcatataatggggcccccagacaggtgcgagcacgcagcccggatcatcaacgacctcctccagagcctcaggagtggtcccccaggtcctccagggggtccaggcatgcccccggggggccgaggccgaggaagaggccaaggcaattggggtccccctggcggggagatgaccttctccatccccactcacaagtgtgggctggtcatcggccgaggtggcgagaatgtgaaagccataaaccagcagacgggagccttcgtagagatctcccggcagctgccacccaacggggaccccaacttcaagttgttcatcatccggggttcaccccagcagattgaccacgccaagcagcttatcgaggaaaagatcgagggtcctctctgcccagttggaccaggcccaggtggcccaggccctgctggcccaatggggcccttcaatcctgggcccttcaaccaggggccacccggggctcccccacatgccggggggccccctcctcaccagtacccaccccagggctggggcaatacctacccccagtggcagccgcctgctcctcatgacccaagcaaagcagctgcagcggccgcggaccccaacgccgcgtgggccgcctactactcacactactaccagcagcccccgggccccgtccccggccccgcaccggcccctgcggccccaccggctcagggtgagccccctcagcccccacccaccggccagtcggactacactaaggcctgggaagagtattacaaaaagatcggccagcagccccagcagcccggagcgcccccacagcaggactacacgaaggcttgggaggagtactacaagaagcaagcgcaagtggccaccggagggggtccaggagctcccccaggctcccagccagactacagtgccgcctgggcggaatattacagacagcaggccgcttactacggacagaccccaggtcctggcggcccccagccgccgcccacgcagcagggacagcagcaggcaagtgggaattgccaccctcctcctcctcctttctccttccaacccccggccaccgtccatcctgccttagtgggtagcgccggaaaccccttcccctgcggggtgtgcccttgatgcctgcagcgggggccgtgtggccggaggtctccgggagtccccacgcaccgccagggaagcattcgctgggtccagaggttaaacgaagaggcctccctgcgccggctgcttgttcctgtgtgccgctgtcgtgatgctggggagcgctgagactcgcaggcgggacttctgaactgctggggagtcggggggcaggcagacagcgcggacggtgggcaccggcccggccgccaccacctcgctcacaatctggccacttgggaagaaaacgtctattttttccccttctctgcatcacttttttggtttttgttctttttattcttttattttttaaacccatgatcttttttcctgtgtccaagtgactgtgttgcaggcggcccggctctggcagggactggtggggacgcggggagcggcccaggcccctgccccgccgggctcagcctcccatgcgctcgcgcttgcctgtgtcccgggcttgtctgtgaagtgggcgtgaagatcgttgccaccttccaacctacctcacaggggtgttgtggggacaccatgatctctggattgttcatgtcgtcgtgctgcgccgggagccaccgccctccggagacagggcagctcccctacgaccctagcgcctccgccctccgcggcccctctcctctcttcctg

SEQ ID NO: 386040 - DNA, 2956 bp, Homo sapiens
gtgtggagcgaggccttgttcccgcgttgagccgccgccgccgccgccgcctcctcagcttcagcctccgcgccaggcccggccccgccgcgccatgtcggactacagccggcccgggcggggggtcggccgggggcccctctcagccacccggcggaggcggcccgggaatccgcaaggacgctttcgccgacgccgtgcagcgggcccgccagattgcagccaaaattggaggcgatgctgccacgacagtgaataacagcactcctgattttggttttgggggccaaaagagacagttggaagatggagatcaaccggagagcaagaagctggcttcccagggagactcaatcagttctcaacttggacccatccatcctcccccaaggacttcaatgacagaagagtacagggtcccagacggcatggtgggcctgatcattggcagaggaggtgaacaaattaacaaaatccaacaggattcaggctgcaaagtacagatttctccagacagcggtggcctacccgagcgcagtgtgtccttgacaggagccccagaagaaagccaagatgatgctggatgacattgtgtctcggggtcgtgggggccccccaggacagttccacgacaacgccaacgggggccagaacggcaccgtgcaggagatcatgatccccgcgggcaaggccggcctggtcattggcaagggcggggagaccattaagcagctgcaggaacgcgctggagtgaagatgatcttaattcaggacggatctcagaatacgaatgtggacaaacctctccgcatcattggggatccttacaaagtgcagcaagcctgtgagatggtgatggacatcctccgggaacgtgaccaaggcggctttggggaccggaatgagtacggatctcggattggcggaggcatcgatgtgccagtgcccaggcattctgttggcgtggtcattggccggagtggagagatgatcaagaagatccagaatgatgctggcgtgcggatacagttcaagcaagatgacgggacagggcccgagaagattgctcatataatggggcccccagacaggtgcgagcacgcagcccggatcatcaacgacctcctccagagcctcaggagtggtcccccaggtcctccagggggtccaggcatgcccccggggggccgaggccgaggaagaggccaaggcaattggggtccccctggcggggagatgaccttctccatccccactcacaagtgtgggctggtcatcggccgaggtggcgagaatgtgaaagccataaaccagcagacgggagccttcgtagagatctcccggcagctgccacccaacggggaccccaacttcaagttgttcatcatccggggttcaccccagcagattgaccacgccaagcagcttatcgaggaaaagatcgagggtcctctctgcccagttggaccaggcccaggtggcccaggccctgctggcccaatggggcccttcaatcctgggcccttcaaccaggggccacccggggctcccccacatgccggggggccccctcctcaccagtacccaccccagggctggggcaatacctacccccagtggcagccgcctgctcctcatgacccaagcaaagcagctgcagcggccgcggaccccaacgccgcgtgggccgcctactactcacactactaccagcagcccccgggccccgtccccggccccgcaccggcccctgcggccccaccggctcagggtgagccccctcagcccccacccaccggccagtcggactacactaaggcctgggaagagtattacaaaaagatcggtgagtctgcagggtggcgggggggctccagccctgccgggggagtggtttctgacctgtctcggcgcccgcacaggccagcagccccagcagcccggagcgcccccacagcaggactacacgaaggcttgggaggagtactacaagaagcaagcgcaagtggccaccggagggggtccaggagctcccccaggctcccagccagactacagtgccgcctgggcggaatattacagacagcaggccgcttactacggacagaccccaggtcctggcggcccccagccgccgcccacgcagcagggacagcagcaggcaagtgggaattgccaccctcctcctcctcctttctccttccaacccccggccaccgtccatcctgccttagtgggtagcgccggaaaccccttcccctgcggggtgtgcccttgatgcctgcagcgggggccgtgtggccggaggtctccgggagtccccacgcaccgccagggaagcattcgctgggtccagaggttaaacgaagaggcctccctgcgccggctgcttgttcctgtgtgccgctgtcgtgatgctggggagcgctgagactcgcaggcgggacttctgaactgctggggagtcggggggcaggcagacagcgcggacggtgggcaccggcccggccgccaccacctcgctcacaatctggccacttgggaagaaaacgtctattttttccccttctctgcatcacttttttggtttttgttctttttattcttttattttttaaacccatgatcttttttcctgtgtccaagtgactgtgttgcaggcggcccggctctggcagggactggtggggacgcggggagcggcccaggcccctgccccgccgggctcagcctcccatgcgctcgcgcttgcctgtgtcccgggcttgtctgtgaagtgggcgtgaagatcgttgccaccttccaacctacctcacaggggtgttgtggggacaccatgatctctggattgttcatgtcgtcgtgctgcgccgggagccaccgccctccggagacagggcagctcccctacgaccctagcgcctccgccctccgcggcccctctcctctcttcctg

SEQ ID NO: 386041 - DNA, 1591 bp, Homo sapiens
gtgtggagcgaggccttgttcccgcgttgagcccggcccgggcggggggtcggccgggggcccctctcagccacccggcggaggcggcccgggaatccgcaaggacgctttcgccgacgccgtgcagcgggcccgccagattgcagccaaaattggaggcgatgctgccacgacagtgaataacagcactcctgattttggttttgggggccaaaagagacagttggaagatggagatcaaccggagagcaagaagctggcttcccagggagactcaatcagttctcaacttggacccatccatcctcccccaaggacttcaatgacagaagagtacagggtcccagacggcatggtgggcctgatcattggcagaggaggtgaacaaattaacaaaatccaacaggattcaggctgcaaagtacagatttctccagacagcggtggcctacccgagcgcagtgtgtccttgacaggagccccagaaccccctcagcccccacccaccggccagtcggactacactaaggcctgggaagagtattacaaaaagatcggccagcagccccagcagcccggagcgcccccacagcaggactacacgaaggcttgggaggagtactacaagaagcaagcgcaagtggccaccggagggggtccaggagctcccccaggctcccagccagactacagtgccgcctgggcggaatattacagacagcaggccgcttactacggacagaccccaggtcctggcggcccccagccgccgcccacgcagcagggacagcagcaggcaagtgggaattgccaccctcctcctcctcctttctccttccaacccccggccaccgtccatcctgccttagtgggtagcgccggaaaccccttcccctgcggggtgtgcccttgatgcctgcagcgggggccgtgtggccggaggtctccgggagtccccacgcaccgccagggaagcattcgctgggtccagaggttaaacgaagaggcctccctgcgccggctgcttgttcctgtgtgccgctgtcgtgatgctggggagcgctgagactcgcaggcgggacttctgaactgctggggagtcggggggcaggcagacagcgcggacggtgggcaccggcccggccgccaccacctcgctcacaatctggccacttgggaagaaaacgtctattttttccccttctctgcatcacttttttggtttttgttctttttattcttttattttttaaacccatgatcttttttcctgtgtccaagtgactgtgttgcaggcggcccggctctggcagggactggtggggacgcggggagcggcccaggcccctgccccgccgggctcagcctcccatgcgctcgcgcttgcctgtgtcccgggcttgtctgtgaagtgggcgtgaagatcgttgccaccttccaacctacctcacaggggtgttgtggggacaccatgatctctggattgttcatgtcgtcgtgctgcgccgggagccaccgccctccggagacagggcagctcccctacgaccctagcgcctccgccctccgcggcccctctcctctcttcctg

SEQ ID NO: 386042 - DNA, 2727 bp, Homo sapiens
gtgtggagcgaggccttgttcccgcgttgagccgccgccgccgccgccgcctcctcagcttcagcctccgcgccaggcccggccccgccgcgccatgtcggactacagccggcccgggcggggggtcggccgggggcccctctcagccacccggcggaggcggcccgggaatccgcaaggacgctttcgccgacgccgtgcagcgggcccgccagattgcagccaaaattggaggcgatgctgccacgacagtgaataacagcactcctgattttggttttgggggccaaaagagacagttggaagatggagatcaaccggagagcaagaagctggcttcccagggagactcaatcagttctcaacttggacccatccatcctcccccaaggacttcaatgacagaagagtacagggtcccagacggcatggtgggcctgatcattggcagaggaggtgaacaaattaacaaaatccaacaggattcaggctgcaaagtacagatttctccagacagcggtggcctacccgagcgcagtgtgtccttgacaggagccccagaagaaagccaagatgatgctggatgacattgtgtctcggggtcgtgggggccccccaggacagttccacgacaacgccaacgggggccagaacggcaccgtgcaggagatcatgatccccgcgggcaaggccggcctggtcattggcaagggcggggagaccattaagcagctgcaggaacgcgctggagtgaagatgatcttaattcaggacggatctcagaatacgaatgtggacaaacctctccgcatcattggggatccttacaaagtgcagcaagcctgtgagatggtgatggacatcctccgggaacgtgaccaaggcggctttggggaccggaatgagtacggatctcggattggcggaggcatcgatgtgccagtgcccaggcattctgttggcgtggtcattggccggagtggagagatgatcaagaagatccagaatgatgctggcgtgcggatacagttcaagcaagatgacgggacagggcccgagaagattgctcatataatggggcccccagacaggtgcgagcacgcagcccggatcatcaacgacctcctccagagcctcaggagtggtcccccaggtcctccagggggtccaggcatgcccccggggggccgaggccgaggaagaggccaaggcaattggggtccccctggcggggagatgaccttctccatccccactcacaagtgtgggctggtcatcggccgaggtggcgagaatgtgaaagccataaaccagcagacgggagccttcgtagagatctcccggcagctgccacccaacggggaccccaacttcaagttgttcatcatccggggttcaccccagcagattgaccacgccaagcagcttatcgaggaaaagatcgagggtcctctctgcccagttggaccaggcccaggtggcccaggccctgctggcccaatggggcccttcaatcctgggcccttcaaccaggggccacccggggctcccccacatgccggggggccccctcctcaccagtacccaccccagggctggggcaatacctacccccagtggcagccgcctgctcctcatgacccaagcaaagcagctgcagcggccgcggaccccaacgccgcgtgggccgcctactactcacactactaccagcagcccccgggccccgtccccggccccgcaccggcccctgcggccccaccggctcagggtgagccccctcagcccccacccaccggccagtcggactacactaaggcctgggaagagtattacaaaaagatcggccagcagccccagcagcccggagcgcccccacagcaggactacacgaaggcttgggaggagtactacaagaagcaagcgcaagtggccaccggagggggtccaggagctcccccaggctcccagccagactacagtgccgcctgggcggaatattacagacagcaggccgcttactacggacagaccccaggtcctggcggcccccagccgccgcccacgcagcagggacagcagcagccttcctgaacctgcctctctgaggataaagcaattcattttctcccaccctcggccctcttgtttttaaaataaacttttaaaaaggaaaaaaaaagtcactcttgctatttcttttttttagttagaggtggaacattccttggaccaggtgttgtattgcaggaccccttcccccagcagccaagccccctcttctctccctcccgccctggctcagctcccgcggccccgcccgtcccccctcccaggactggtctgttgtcttttcatctgttcaagaggagattgaaactgaaaacaaaatgagaacaacaaaaaaaattgtatggcagtttttactttttatcgctcgtttttaacttcacaaataaatgataacaaaacctccccgtctgcgggtgctgtctgtctccccccctttccttccctccctgtagttttgaagcggatgtttgttctttatagatgttgtttaaaaagcctgataatggtgattgaaatttacaaactttgtgtttttttttttttaagaaaaatataaaatagttttcttcaggctcaatgtgctttcctaaccgtgcccccccccccttttttttttgttaaataaagtgctttttgtttaaaaaaaaaaaaaaa

SEQ ID NO: 386043 - DNA, 2826 bp, Homo sapiens
gtgtggagcgaggccttgttcccgcgttgagccgccgccgccgccgccgcctcctcagcttcagcctccgcgccaggcccggccccgccgcgccatgtcggactacagccggcccgggcggggggtcggccgggggcccctctcagccacccggcggaggcggcccgggaatccgcaaggacgctttcgccgacgccgtgcagcgggcccgccagattgcagccaaaattggaggcgatgctgccacgacagtgaataacagcactcctgattttggttttgggggccaaaagagacagttggaagatggagatcaaccggagagcaagaagctggcttcccagggagactcaatcagttctcaacttggacccatccatcctcccccaaggacttcaatgacagaagagtacagggtcccagacggcatggtgggcctgatcattggcagaggaggtgaacaaattaacaaaatccaacaggattcaggctgcaaagtacagatttctccagacagcggtggcctacccgagcgcagtgtgtccttgacaggagccccagaagaaagccaagatgatgctggatgacattgtgtctcggggtcgtgggggccccccaggacagttccacgacaacgccaacgggggccagaacggcaccgtgcaggagatcatgatccccgcgggcaaggccggcctggtcattggcaagggcggggagaccattaagcagctgcaggaacgcgctggagtgaagatgatcttaattcaggacggatctcagaatacgaatgtggacaaacctctccgcatcattggggatccttacaaagtgcagcaagcctgtgagatggtgatggacatcctccgggaacgtgaccaaggcggctttggggaccggaatgagtacggatctcggattggcggaggcatcgatgtgccagtgcccaggcattctgttggcgtggtcattggccggagtggagagatgatcaagaagatccagaatgatgctggcgtgcggatacagttcaagcaagatgacgggacagggcccgagaagattgctcatataatggggcccccagacaggtgcgagcacgcagcccggatcatcaacgacctcctccagagcctcaggagtggtcccccaggtcctccagggggtccaggcatgcccccggggggccgaggccgaggaagaggccaaggcaattggggtccccctggcggggagatgaccttctccatccccactcacaagtgtgggctggtcatcggccgaggtggcgagaatgtgaaagccataaaccagcagacgggagccttcgtagagatctcccggcagctgccacccaacggggaccccaacttcaagttgttcatcatccggggttcaccccagcagattgaccacgccaagcagcttatcgaggaaaagatcgagggtcctctctgcccagttggaccaggcccaggtggcccaggccctgctggcccaatggggcccttcaatcctgggcccttcaaccaggggccacccggggctcccccacatgccggggggccccctcctcaccagtacccaccccagggctggggcaatacctacccccagtggcagccgcctgctcctcatgacccaagcaaagcagctgcagcggccgcggaccccaacgccgcgtgggccgcctactactcacactactaccagcagcccccgggccccgtccccggccccgcaccggcccctgcggccccaccggctcagggtgagccccctcagcccccacccaccggccagtcggactacactaaggcctgggaagagtattacaaaaagatcggccagcagccccagcagcccggagcgcccccacagcaggactacacgaaggcttgggaggagtactacaagaagcaagcgcaagtggccaccggagggggtccaggagctcccccaggctcccagccagactacagtgccgcctgggcggaatattacagacagcaggccgcttactacggacagaccccaggtcctggcggcccccagccgccgcccacgcagcagggacagcagcaggcaagtgggaattgccaccctcctcctcctcctttctccttccaacccccggccaccgtccatcctgccttagtgggtagcgccggaaaccccttcccctgcggggtgtgcccttgatgcctgcagcgggggccgtgtggccggaggtctccgggagtccccacgcaccgccagggaagcattcgctgggtccagaggttaaacgaagaggcctccctgcgccggctgcttgttcctgtgtgccgctgtcgtgatgctggggagcgctgagactcgcaggcgggacttctgaactgctggggagtcggggggcaggcagacagcgcggacggtgggcaccggcccggccgccaccacctcgctcacaatctggccacttgggaagtattcttttattttttaaacccatgatcttttttcctgtgtccaagtgactgtgttgcaggcggcccggctctggcagggactggtggggacgcggggagcggcccaggcccctgccccgccgggctcagcctcccatgcgctcgcgcttgcctgtgtcccgggcttgtctgtgaagtgggcgtgaagatcgttgccaccttccaacctacctcacaggggtgttgtggggacaccatgatctctggattgttcatgtcgtcgtgctgcgccgggagccaccgccctccggagacagggcagctcccctacgaccctagcgcctccgccctccgcggcccctctcctctcttcctg

SEQ ID NO: 386044 - DNA, 2347 bp, Homo sapiens
gtgtggagcgaggccttgttcccgcgttgagccgccgccgccgccgccgcctcctcagcttcagcctccgcgccaggcccggccccgccgcgccatgtcggactacagccggcccgggcggggggtcggccgggggcccctctcagccacccggcggaggcggcccgggaatccgcaaggacgctttcgccgacgccgtgcagcgggcccgccagattgcagccaaaattggaggcgatgctgccacgacagtgaataacagcactcctgattttggttttgggggccaaaagagacagttggaagatggagatcaaccggagagcaagaagctggcttcccagggagactcaatcagttctcaacttggacccatccatcctcccccaaggacttcaatgacagaagagtacagggtcccagacggcatggtgggcctgatcattggcagaggaggtgaacaaattaacaaaatccaacaggattcaggctgcaaagtacagatttctccagacagcggtggcctacccgagcgcagtgtgtccttgacaggagccccagaagaaagccaagatgatgctggatgacattgtgtctcggggtcgtgggggccccccaggacagttccacgacaacgccaacgggggccagaacggcaccgtgcaggagatcatgatccccgcgggcaaggccggcctggtcattggcaagggcggggagaccattaagcagctgcaggaacgcgctggagtgaagatgatcttaattcaggacggatctcagaatacgaatgtggacaaacctctccgcatcattggggatccttacaaagtgcagcaagcctgtgagatggtgatggacatcctccgggaacgtgaccaaggcggctttggggaccggaatgagtacggatctcggattggcggaggcatcgatgtgccagtgcccaggcattctgttggcgtggtcattggccggagtggagagatgatcaagaagatccagaatgatgctggcgtgcggatacagttcaagcaagatgacgggacagggcccgagaagattgctcatataatggggcccccagacaggtgcgagcacgcagcccggatcatcaacgacctcctccagagcctcaggagtggtcccccaggtcctccagggggtccaggcatgcccccggggggccgaggccgaggaagaggccaaggcaattggggtccccctggcggggagatgaccttctccatccccactcacaagtgtgggctggtcatcggccgaggtggcgagaatgtgaaagccataaaccagcagacgggagccttcgtagagatctcccggcagctgccacccaacggggaccccaacttcaagttgttcatcatccggggttcaccccagcagattgaccacgccaagcagcttatcgaggaaaagatcgagggtcctctctgcccagttggaccaggcccaggtggcccaggccctgctggcccaatggggcccttcaatcctgggcccttcaaccaggggccacccggggctcccccacatgccggggggccccctcctcaccagtacccaccccagggctggggcaatacctacccccagtggcagccgcctgctcctcatgacccaagcaaagcagctgcagcggccgcggaccccaacgccgcgtgggccgcctactactcacactactaccagcagcccccgggccccgtccccggccccgcaccggcccctgcggccccaccggctcagggtgaggccagcagccccagcagcccggagcgcccccacagcaggactacacgaaggcttgggaggagtactacaagaagcaagcgcaagtggccaccggagggggtccaggagctcccccaggctcccagccagactacagtgccgcctgggcggaatattacagacagcaggccgcttactacggactggtctgttgtcttttcatctgttcaagaggagattgaaactgaaaacaaaatgagaacaacaaaaaaaattgtatggcagtttttactttttatcgctcgtttttaacttcacaaataaatgataacaaaacctccccgtctgcgggtgctgtctgtctccccccctttccttccctccctgtagttttgaagcggatgtttgttctttatagatgttgtttaaaaagcctgataatggtgattgaaatttacaaactttgtgtttttttttttttaagaaaaatataaaatagttttcttcaggctcaatgtgctttcctaaccgtgcccccccccccttttttttttgttaaataaagtgctttttgtttaaaaaaaaaaaaaaa

SEQ ID NO: 386045 - DNA, 3109 bp, Homo sapiens
gtgtggagcgaggccttgttcccgcgttgagccgccgccgccgccgccgcctcctcagcttcagcctccgcgccaggcccggccccgccgcgccatgtcggactacagccggcccgggcggggggtcggccgggggcccctctcagccacccggcggaggcggcccgggaatccgcaaggacgctttcgccgacgccgtgcagcgggcccgccagattgcagccaaaattggaggcgatgctgccacgacagtgaataacagcactcctgattttggttttgggggccaaaagagacagttggaagatggagatcaaccggagagcaagaagctggcttcccagggagactcaatcagttctcaacttggacccatccatcctcccccaaggacttcaatgacagaagagtacagggtcccagacggcatggtgggcctgatcattggcagaggaggtgaacaaattaacaaaatccaacaggattcaggctgcaaagtacagatttctccagacagcggtggcctacccgagcgcagtgtgtccttgacaggagccccagaagaaagccaagatgatgctggatgacattgtgtctcggggtcgtgggggccccccaggacagttccacgacaacgccaacgggggccagaacggcaccgtgcaggagatcatgatccccgcgggcaaggccggcctggtcattggcaagggcggggagaccattaagcagctgcaggaacgcgctggagtgaagatgatcttaattcaggacggatctcagaatacgaatgtggacaaacctctccgcatcattggggatccttacaaagtgcagcaagcctgtgagatggtgatggacatcctccgggaacgtgaccaaggcggctttggggaccggaatgagtacggatctcggattggcggaggcatcgatgtgccagtgcccaggcattctgttggcgtggtcattggccggagtggagagatgatcaagaagatccagaatgatgctggcgtgcggatacagttcaagcaagatgacgggacagggcccgagaagattgctcatataatggggcccccagacaggtgcgagcacgcagcccggatcatcaacgacctcctccagagcctcaggagtggtcccccaggtcctccagggggtccaggcatgcccccggggggccgaggccgaggaagaggccaaggcaattggggtccccctggcggggagatgaccttctccatccccactcacaagtgtgggctggtcatcggccgaggtggcgagaatgtgaaagccataaaccagcagacgggagccttcgtagagatctcccggcagctgccacccaacggggaccccaacttcaagttgttcatcatccggggttcaccccagcagattgaccacgccaagcagcttatcgaggaaaagatcgagggtcctctctgcccagttggaccaggcccaggtggcccaggccctgctggcccaatggggcccttcaatcctgggcccttcaaccaggggccacccggggctcccccacatgccggggggccccctcctcaccagtacccaccccagggctggggcaatacctacccccagtggcagccgcctgctcctcatgacccaagcaaagcagctgcagcggccgcggaccccaacgccgcgtgggccgcctactactcacactactaccagcagcccccgggccccgtccccggccccgcaccggcccctgcggccccaccggctcagggtgagccccctcagcccccacccaccggccagtcggactacactaaggcctgggaagagtattacaaaaagatcggccagcagccccagcagcccggagcgcccccacagcaggactacacgaaggcttgggaggagtactacaagaagcaagcgcaagtggccaccggagggggtccaggagctcccccaggctcccagccagactacagtgccgcctgggcggaatattacagacagcaggccgcttactacggacagaccccaggtcctggcggcccccagccgccgcccacgcagcagggacagcagcaggctcaatgaatcgaatgaatgtgaacttcttcatctgtgaaaaatcttttttttttccattttgttctgtttgggggcttctgttttgtttggcgagagagcgatggctgccgtggggagtactggggagccctcgcggcaagcagggtgggggggacttgggggcatgccgggccctcactctctcgcctgttctgtgtctcacatgctttttctttcaaaattgggatccttccatgttgagccagccagagaagatagcgagatctaaatctctgccaaaaaaaaaaaaaaacttaaaaattaaaaacacaaagagcaaagcagaacttataaaattatatatatatatattaaaaagtctctattcttcaccccccagccttcctgaacctgcctctctgaggataaagcaattcattttctcccaccctcggccctcttgtttttaaaataaacttttaaaaaggaaaaaaaaagtcactcttgctatttcttttttttagttagaggtggaacattccttggaccaggtgttgtattgcaggaccccttcccccagcagccaagccccctcttctctccctcccgccctggctcagctcccgcggccccgcccgtcccccctcccaggactggtctgttgtcttttcatctgttcaagaggagattgaaactgaaaacaaaatgagaacaacaaaaaaaattgtatggcagtttttactttttatcgctcgtttttaacttcacaaataaatgataacaaaacctccccgtctgcgggtgctgtctgtctccccccctttccttccctccctgtagttttgaagcggatgtttgttctttatagatgttgtttaaaaagcctgataatggtgattgaaatttacaaactttgtgtttttttttttttaagaaaaatataaaatagttttcttcaggctcaatgtgctttcctaaccgtgcccccccccccttttttttttgttaaataaagtgctttttgtttaaaaaaaaaaaaaaa

SEQ ID NO: 386046 - DNA, 2810 bp, Homo sapiens
gtgtggagcgaggccttgttcccgcgttgagccgccgccgccgccgccgcctcctcagcttcagcctccgcgccaggcccggccccgccgcgccatgtcggactacagccggcccgggcggggggtcggccgggggcccctctcagccacccggcggaggcggcccgggaatccgcaaggacgctttcgccgacgccgtgcagcgggcccgccagattgcagccaaaattggaggcgatgctgccacgacagtgaataacagcactcctgattttggttttgggggccaaaagagacagttggaagatggagatcaaccggagagcaagaagctggcttcccagggagactcaatcagttctcaacttggacccatccatcctcccccaaggacttcaatgacagaagagtacagggtcccagacggcatggtgggcctgatcattggcagaggaggtgaacaaattaacaaaatccaacaggattcaggctgcaaagtacagatttctccagacagcggtggcctacccgagcgcagtgtgtccttgacaggagccccagaagaaagccaagatgatgctggatgacattgtgtctcggggtcgtgggggccccccaggacagttccacgacaacgccaacgggggccagaacggcaccgtgcaggagatcatgatccccgcgggcaaggccggcctggtcattggcaagggcggggagaccattaagcagctgcaggaacgcgctggagtgaagatgatcttaattcaggacggatctcagaatacgaatgtggacaaacctctccgcatcattggggatccttacaaagtgcagcaagcctgtgagatggtgatggacatcctccgggaacgtgaccaaggcggctttggggaccggaatgagtacggatctcggattggcggaggcatcgatgtgccagtgcccaggcattctgttggcgtggtcattggccggagtggagagatgatcaagaagatccagaatgatgctggcgtgcggatacagttcaagcaagatgacgggacagggcccgagaagattgctcatataatggggcccccagacaggtgcgagcacgcagcccggatcatcaacgacctcctccagagcctcaggagtggtcccccaggtcctccagggggtccaggcatgcccccggggggccgaggccgaggaagaggccaaggcaattggggtccccctggcggggagatgaccttctccatccccactcacaagtgtgggctggtcatcggccgaggtggcgagaatgtgaaagccataaaccagcagacgggagccttcgtagagatctcccggcagctgccacccaacggggaccccaacttcaagttgttcatcatccggggttcaccccagcagattgaccacgccaagcagcttatcgaggaaaagatcgagggtcctctctgcccagttggaccaggcccaggtggcccaggccctgctggcccaatggggcccttcaatcctgggcccttcaaccaggggccacccggggctcccccacatgccggggggccccctcctcaccagtacccaccccagggctggggcaatacctacccccagtggcagccgcctgctcctcatgacccaagcaaagcagctgcagcggccgcggaccccaacgccgcgtgggccgcctactactcacactactaccagcagcccccgggccccgtccccggccccgcaccggcccctgcggccccaccggctcagggtgaggccagcagccccagcagcccggagcgcccccacagcaggactacacgaaggcttgggaggagtactacaagaagcaagcgcaagtggccaccggagggggtccaggagctcccccaggctcccagccagactacagtgccgcctgggcggaatattacagacagcaggccgcttactacggacagaccccaggtcctggcggcccccagccgccgcccacgcagcagggacagcagcaggcaagtgggaattgccaccctcctcctcctcctttctccttccaacccccggccaccgtccatcctgccttagtgggtagcgccggaaaccccttcccctgcggggtgtgcccttgatgcctgcagcgggggccgtgtggccggaggtctccgggagtccccacgcaccgccagggaagcattcgctgggtccagaggttaaacgaagaggcctccctgcgccggctgcttgttcctgtgtgccgctgtcgtgatgctggggagcgctgagactcgcaggcgggacttctgaactgctggggagtcggggggcaggcagacagcgcggacggtgggcaccggcccggccgccaccacctcgctcacaatctggccacttgggaagaaaacgtctattttttccccttctctgcatcacttttttggtttttgttctttttattcttttattttttaaacccatgatcttttttcctgtgtccaagtgactgtgttgcaggcggcccggctctggcagggactggtggggacgcggggagcggcccaggcccctgccccgccgggctcagcctcccatgcgctcgcgcttgcctgtgtcccgggcttgtctgtgaagtgggcgtgaagatcgttgccaccttccaacctacctcacaggggtgttgtggggacaccatgatctctggattgttcatgtcgtcgtgctgcgccgggagccaccgccctccggagacagggcagctcccctacgaccctagcgcctccgccctccgcggcccctctcctctcttcctg

SEQ ID NO: 386047 - DNA, 1169 bp, Homo sapiens
gtgtggagcgaggccttgttcccgcgttgagccgccgccgccgccgccgcctcctcagcttcagcccccctcagcccccacccaccggccagtcggactacactaaggcctgggaagagtattacaaaaagatcggccagcagccccagcagcccggagcgcccccacagcaggactacacgaaggcttgggaggagtactacaagaagcaagcgcaagtggccaccggagggggtccaggagctcccccaggctcccagccagactacagtgccgcctgggcggaatattacagacagcaggccgcttactacggacagaccccaggtcctggcggcccccagccgccgcccacgcagcagggacagcagcaggcaagtgggaattgccaccctcctcctcctcctttctccttccaacccccggccaccgtccatcctgccttagtgggtagcgccggaaaccccttcccctgcggggtgtgcccttgatgcctgcagcgggggccgtgtggccggaggtctccgggagtccccacgcaccgccagggaagcattcgctgggtccagaggttaaacgaagaggcctccctgcgccggctgcttgttcctgtgtgccgctgtcgtgatgctggggagcgctgagactcgcaggcgggacttctgaactgctggggagtcggggggcaggcagacagcgcggacggtgggcaccggcccggccgccaccacctcgctcacaatctggccacttgggaagaaaacgtctattttttccccttctctgcatcacttttttggtttttgttctttttattcttttattttttaaacccatgatcttttttcctgtgtccaagtgactgtgttgcaggcggcccggctctggcagggactggtggggacgcggggagcggcccaggcccctgccccgccgggctcagcctcccatgcgctcgcgcttgcctgtgtcccgggcttgtctgtgaagtgggcgtgaagatcgttgccaccttccaacctacctcacaggggtgttgtggggacaccatgatctctggattgttcatgtcgtcgtgctgcgccgggagccaccgccctccggagacagggcagctcccctacgaccctagcgcctccgccctccgcggcccctctcctctcttcctg

SEQ ID NO: 386048 - DNA, 3039 bp, Homo sapiens
gtgtggagcgaggccttgttcccgcgttgagccgccgccgccgccgccgcctcctcagcttcagcctccgcgccaggcccggccccgccgcgccatgtcggactacagccggcccgggcggggggtcggccgggggcccctctcagccacccggcggaggcggcccgggaatccgcaaggacgctttcgccgacgccgtgcagcgggcccgccagattgcagccaaaattggaggcgatgctgccacgacagtgaataacagcactcctgattttggttttgggggccaaaagagacagttggaagatggagatcaaccggagagcaagaagctggcttcccagggagactcaatcagttctcaacttggacccatccatcctcccccaaggacttcaatgacagaagagtacagggtcccagacggcatggtgggcctgatcattggcagaggaggtgaacaaattaacaaaatccaacaggattcaggctgcaaagtacagatttctccagacagcggtggcctacccgagcgcagtgtgtccttgacaggagccccagaagaaagccaagatgatgctggatgacattgtgtctcggggtcgtgggggccccccaggacagttccacgacaacgccaacgggggccagaacggcaccgtgcaggagatcatgatccccgcgggcaaggccggcctggtcattggcaagggcggggagaccattaagcagctgcaggaacgcgctggagtgaagatgatcttaattcaggacggatctcagaatacgaatgtggacaaacctctccgcatcattggggatccttacaaagtgcagcaagcctgtgagatggtgatggacatcctccgggaacgtgaccaaggcggctttggggaccggaatgagtacggatctcggattggcggaggcatcgatgtgccagtgcccaggcattctgttggcgtggtcattggccggagtggagagatgatcaagaagatccagaatgatgctggcgtgcggatacagttcaagcaagatgacgggacagggcccgagaagattgctcatataatggggcccccagacaggtgcgagcacgcagcccggatcatcaacgacctcctccagagcctcaggagtggtcccccaggtcctccagggggtccaggcatgcccccggggggccgaggccgaggaagaggccaaggcaattggggtccccctggcggggagatgaccttctccatccccactcacaagtgtgggctggtcatcggccgaggtggcgagaatgtgaaagccataaaccagcagacgggagccttcgtagagatctcccggcagctgccacccaacggggaccccaacttcaagttgttcatcatccggggttcaccccagcagattgaccacgccaagcagcttatcgaggaaaagatcgagggtcctctctgcccagttggaccaggcccaggtggcccaggccctgctggcccaatggggcccttcaatcctgggcccttcaaccaggggccacccggggctcccccacatgccggggggccccctcctcaccagtacccaccccagggctggggcaatacctacccccagtggcagccgcctgctcctcatgacccaagcaaagcagctgcagcggccgcggaccccaacgccgcgtgggccgcctactactcacactactaccagcagcccccgggccccgtccccggccccgcaccggcccctgcggccccaccggctcagggtgaggccagcagccccagcagcccggagcgcccccacagcaggactacacgaaggcttgggaggagtactacaagaagcaagcgcaagtggccaccggagggggtccaggagctcccccaggctcccagccagactacagtgccgcctgggcggaatattacagacagcaggccgcttactacggacagaccccaggtcctggcggcccccagccgccgcccacgcagcagggacagcagcaggctcaatgaatcgaatgaatgtgaacttcttcatctgtgaaaaatcttttttttttccattttgttctgtttgggggcttctgttttgtttggcgagagagcgatggctgccgtggggagtactggggagccctcgcggcaagcagggtgggggggacttgggggcatgccgggccctcactctctcgcctgttctgtgtctcacatgctttttctttcaaaattgggatccttccatgttgagccagccagagaagatagcgagatctaaatctctgccaaaaaaaaaaaaaaacttaaaaattaaaaacacaaagagcaaagcagaacttataaaattatatatatatatattaaaaagtctctattcttcaccccccagccttcctgaacctgcctctctgaggataaagcaattcattttctcccaccctcggccctcttgtttttaaaataaacttttaaaaaggaaaaaaaaagtcactcttgctatttcttttttttagttagaggtggaacattccttggaccaggtgttgtattgcaggaccccttcccccagcagccaagccccctcttctctccctcccgccctggctcagctcccgcggccccgcccgtcccccctcccaggactggtctgttgtcttttcatctgttcaagaggagattgaaactgaaaacaaaatgagaacaacaaaaaaaattgtatggcagtttttactttttatcgctcgtttttaacttcacaaataaatgataacaaaacctccccgtctgcgggtgctgtctgtctccccccctttccttccctccctgtagttttgaagcggatgtttgttctttatagatgttgtttaaaaagcctgataatggtgattgaaatttacaaactttgtgtttttttttttttaagaaaaatataaaatagttttcttcaggctcaatgtgctttcctaaccgtgcccccccccccttttttttttgttaaataaagtgctttttgtttaaaaaaaaaaaaaaa

SEQ ID NO: 386049 - DNA, 2378 bp, Homo sapiens
gtgtggagcgaggccttgttcccgcgttgagccgccgccgccgccgccgcctcctcagcttcagcctccgcgccaggcccggccccgccgcgccatgtcggactacagccggcccgggcggggggtcggccgggggcccctctcagccacccggcggaggcggcccgggaatccgcaaggacgctttcgccgacgccgtgcagcgggcccgccagattgcagccaaaattggaggcgatgctgccacgacagtgaataacagcactcctgattttggttttgggggccaaaagagacagttggaagatggagatcaaccggagagcaagaagctggcttcccagggagactcaatcagttctcaacttggacccatccatcctcccccaaggacttcaatgacagaagagtacagggtcccagacggcatggtgggcctgatcattggcagaggaggtgaacaaattaacaaaatccaacaggattcaggctgcaaagtacagatttctccagacagcggtggcctacccgagcgcagtgtgtccttgacaggagccccagaagaaagccaagatgatgctggatgacattgtgtctcggggtcgtgggggccccccaggacagttccacgacaacgccaacgggggccagaacggcaccgtgcaggagatcatgatccccgcgggcaaggccggcctggtcattggcaagggcggggagaccattaagcagctgcaggaacgcgctggagtgaagatgatcttaattcaggacggatctcagaatacgaatgtggacaaacctctccgcatcattggggatccttacaaagtgcagcaagcctgtgagatggtgatggacatcctccgggaacgtgaccaaggcggctttggggaccggaatgagtacggatctcggattggcggaggcatcgatgtgccagtgcccaggcattctgttggcgtggtcattggccggagtggagagatgatcaagaagatccagaatgatgctggcgtgcggatacagttcaagcaagatgacgggacagggcccgagaagattgctcatataatggggcccccagacaggtgcgagcacgcagcccggatcatcaacgacctcctccagagcctcaggagtggtcccccaggtcctccagggggtccaggcatgcccccggggggccgaggccgaggaagaggccaaggcaattggggtccccctggcggggagatgaccttctccatccccactcacaagtgtgggctggtcatcggccgaggtggcgagaatgtgaaagccataaaccagcagacgggagccttcgtagagatctcccggcagctgccacccaacggggaccccaacttcaagttgttcatcatccggggttcaccccagcagattgaccacgccaagcagcttatcgaggaaaagatcgagggtcctctctgcccagttggaccaggcccaggtggcccaggccctgctggcccaatggggcccttcaatcctgggcccttcaaccaggggccacccggggctcccccacatgccggggggccccctcctcaccagtacccaccccagggctggggcaatacctacccccagtggcagccgcctgctcctcatgacccaagcaaagcagctgcagcggccgcggaccccaacgccgcgtgggccgcctactactcacactactaccagcagcccccgggccccgtccccggccccgcaccggcccctgcggccccaccggctcagggtgagccccctcagcccccacccaccggccagtcggactacactaaggcctgggaagagtattacaaaaagatcggccagcagccccagcagcccggagcgcccccacagcaggactacacgaaggcttgggaggagtactacaagaagcaagccccctcttctctccctcccgccctggctcagctcccgcggccccgcccgtcccccctcccaggactggtctgttgtcttttcatctgttcaagaggagattgaaactgaaaacaaaatgagaacaacaaaaaaaattgtatggcagtttttactttttatcgctcgtttttaacttcacaaataaatgataacaaaacctccccgtctgcgggtgctgtctgtctccccccctttccttccctccctgtagttttgaagcggatgtttgttctttatagatgttgtttaaaaagcctgataatggtgattgaaatttacaaactttgtgtttttttttttttaagaaaaatataaaatagttttcttcaggctcaatgtgctttcctaaccgtgcccccccccccttttttttttgttaaataaagtgctttttgtttaaaaaaaaaaaaaaa

SEQ ID NO: 386050 - DNA, 2434 bp, Homo sapiens
gtgtggagcgaggccttgttcccgcgttgagccgccgccgccgccgccgcctcctcagcttcagcctccgcgccaggcccggccccgccgcgccatgtcggactacagccggcccgggcggggggtcggccgggggcccctctcagccacccggcggaggcggcccgggaatccgcaaggacgctttcgccgacgccgtgcagcgggcccgccagattgcagccaaaattggaggcgatgctgccacgacagtgaataacagcactcctgattttggttttgggggccaaaagagacagttggaagatggagatcaaccggagagcaagaagctggcttcccagggagactcaatcagttctcaacttggacccatccatcctcccccaaggacttcaatgacagaagagtacagggtcccagacggcatggtgggcctgatcattggcagaggaggtgaacaaattaacaaaatccaacaggattcaggctgcaaagtacagatttctccagacagcggtggcctacccgagcgcagtgtgtccttgacaggagccccagaagaaagccaagatgatgctggatgacattgtgtctcggggtcgtgggggccccccaggacagttccacgacaacgccaacgggggccagaacggcaccgtgcaggagatcatgatccccgcgggcaaggccggcctggtcattggcaagggcggggagaccattaagcagctgcaggaacgcgctggagtgaagatgatcttaattcaggacggatctcagaatacgaatgtggacaaacctctccgcatcattggggatccttacaaagtgcagcaagcctgtgagatggtgatggacatcctccgggaacgtgaccaaggcggctttggggaccggaatgagtacggatctcggattggcggaggcatcgatgtgccagtgcccaggcattctgttggcgtggtcattggccggagtggagagatgatcaagaagatccagaatgatgctggcgtgcggatacagttcaagcaagatgacgggacagggcccgagaagattgctcatataatggggcccccagacaggtgcgagcacgcagcccggatcatcaacgacctcctccagagcctcaggagtggtcccccaggtcctccagggggtccaggcatgcccccggggggccgaggccgaggaagaggccaaggcaattggggtccccctggcggggagatgaccttctccatccccactcacaagtgtgggctggtcatcggccgaggtgagtgtggccccctgcaccctatcccttgccccctcttccctgggccatcactgcaggccaccttcaccttctgcgtttctgcaggtggcgagaatgtgaaagccataaaccagcagacgggagccttcgtagagatctcccggcagctgccacccaacggggaccccaacttcaagttgttcatcatccggggttcaccccagcagattgaccacgccaagcagcttatcgaggaaaagatcgagggtcctctctgcccagttggaccaggcccaggtggcccaggccctgctggcccaatggggcccttcaatcctgggcccttcaaccaggggccacccggggctcccccacatgccggggggccccctcctcaccagtacccaccccagggctggggcaatacctacccccagtggcagccgcctgctcctcatgacccaagcaaagcagctgcagcggccgcggaccccaacgccgcgtgggccgcctactactcacactactaccagcagcccccgggccccgtccccggccccgcaccggcccctgcggccccaccggctcagggtgaggccagcagccccagcagcccggagcgcccccacagcaggactacacgaaggcttgggaggagtactacaagaagcaagcgcaagtggccaccggagggggtccaggagctcccccaggctcccagccagactacagtgccgcctgggcggaatattacagacagcaggccgcttactacggactggtctgttgtcttttcatctgttcaagaggagattgaaactgaaaacaaaatgagaacaacaaaaaaaattgtatggcagtttttactttttatcgctcgtttttaacttcacaaataaatgataacaaaacctccccgtctgcgggtgctgtctgtctccccccctttccttccctccctgtagttttgaagcggatgtttgttctttatagatgttgtttaaaaagcctgataatggtgattgaaatttacaaactttgtgtttttttttttttaagaaaaatataaaatagttttcttcaggctcaatgtgctttcctaaccgtgcccccccccccttttttttttgttaaataaagtgctttttgtttaaaaaaaaaaaaaaa

SEQ ID NO: 386051 - DNA, 2092 bp, Homo sapiens
  misc_feature (1524)..(1524): n is a, c, g, or t
caggttttccacatgaaaaggaagccaaataagtcctgttaggagattaggtgagaggaattagcaatgtagggactctgaaacccttccccttcccaaaacagagttcatatgcacttccaccaaagtaatgccaatgaaagtgctcgtgttaaggctgcagcaagcttgtttttcagtagtttaatgtcaagtgcctgatacagtcgactgcaagtctaaacaagcatgtttagtttttctcattcttgctttaattcagggagggggagatgtagagaagtggttgtgaaaacatgtacaggctttatgcagagcactgcgcatggctgttctgctgcaactgtgctccacgaaacagaagaaaaggtaaggtgttgtgtcacaaagaggccccagtctctttcttcttacatccatgcctcttactagatgatacatttacagattgggcagtttgttctcaaaacctgggtgagaagactattcctggactctagcaacttcaaaactgaggctgggtttcagaatctttttctgcatcaattcagtcaatttgccttcaacaaagagaagtcagcaagttctatttatgctgaaagaactattccatgagaaaagcagagaaccccaaagtgggcaggcaaccccgacgagagcttatccctgtggcggcatcaggagtggctgtacattgaattttcaagtgctggttggctgtcgccagcccatggtaggaggggaggaatggcttaagatgaggtaagatctggtggtggggcatctttcctcaattccatactgactttgatcttgagaaagaaaaactggctatgcattacctaaaaccagtccaaaatgaaacagaccaacacacacacaaaagcaaattgtcaatccctttggaattaagggaagcagcataaggtttttctttttggaaaaaatgcatttattttctttttctccaacagcaagaatcttttgttttcattttgcacgtgaccttatcttggaaactcttatacccaattgcctcccctcctattattcagagcttccctgtctttttacttgaagacaaataagtttgagcacttgagtaaaacttcacaggtgtgtaagtaggaaggcaacattttcaaaaagagaccatatgatgagaacgcctaatgatcaccacatgcaaacaaacaaaactgccagtctcatttcccacatttcttacttaagagaagagaagtaaatgaaaggaagaagaaatagatttgtaattaaagatgtggcaaaaaagatagggctgagccagttcaatttagccttcaggtgcagaatacttaggagtccaaagaaatgtggagtggacttaattagatgcagttgtctttatcctgaaagtagtgagctaagcctaatttccagcattttgaaagagattcctttttgtttctttccatggtgccctctttaaggcacagagttgctccacaccactgggtggagaaagaaagattgcgaaccctngaccatccttttgaggctacattctatgttatttggcagatttataaagctatcagtaataacaatgctatgtactgcaagctgcccttgtgttagttaaagggagcatttttaatcgttcggaaattttcgtgacatgtcaagtgcagttgtgaggactgtgtgggtgaacgaaaatgtgtctgtcaagttcagagtcctttagatttaaaaaaaaattatgacttatcaatggtgccgttatagctgtgtcagacaatgggtgtgcccattctcacaattatccttcaaaaaaaatctatgttcaaatgctttaaaaatttatcacacgatacaagagtatgactttgtcagccttctagagttctttttttcttttattttctttcgtattttttccttcaaaaaatcaatgaagacttgatttctgtcaataattgtatcaagggtgaatatactacctgaattttgtgcatgttacattgtagttgtaaccttttctaattcaggatgaatacgagatggttgtgattgtgcagtgtaccaataaagttcgagaaatttgtaa

SEQ ID NO: 386052 - DNA, 464 bp, Homo sapiens
catttcacaagttaggaaaagaaagtggtggttccgaagctcggaatgatgggctcttttcctcctccacccccccaccttccatatcaggaaagaaataaaacgcacaatgagcctttatttcaggagagaagacttcaaaatacgtgccagtaatggacaatttgagcttttcactggaaatactcacaccgcaagctggaaagggattaaaaagccccacgtggttgatctgggtttatacttgcaacctccagttccccacgtatgttctttgcaaaggttggcctctagatggatgcaagtaagggaccctctggggctcgggctcggcgcctcgggcagggctgacgttgggagcgctatgagctgccgggcagggtcctcaccgggggcttcctctgcgggccagggctgccgggcgccaccgggacgcgagcgcgcacgcctcggcccggcggccg

SEQ ID NO: 386053 - DNA, 407 bp, Homo sapiens
actccatctgtgcaatctggaacctgcagcacagagctaaccagctgagctgtgtattagagtcagtgaggctcccatcaatggagttttatttccaggaaaatggaaatgaaggatgaagtcttcctgagggcctcttgctggtgatgttatctgctacacgcccaagaccaagaacagtccctggcccacggtggtggcatgcagtcattgtttgaagagtccctcaacaaaggaagagaagagctctgcacatctgggcatgcctggtgtgggaccttctccttttcctccccactctgccatctcacccttcacccccagccaatgcagagagagggccaggggtcagcagactcccatccacagaacggattttggtatgaccagggaactaggaatttctt

SEQ ID NO: 386054 - DNA, 624 bp, Homo sapiens
gatcaaaatgttgccttgggctgtgaaggtcaggggtttcactactctacagcttcatgtgggtcataccgcctgccatctatgattgtagaagcgggactggcttggtatgagctcctttactgctacagtcccatagcacagcccagggctttgttgctttgccaatgcaggtagtaaggagtgctccatggccgagagtgctgaatggggcttgagtttcctcattaggtcttcggtgggtttaccttgttcagagaatgcatttccacccagcctccaccctgtttttcacctattggtggttacaggttatactagcaaccagtccaggggtatatgggagacagacagaaaacctaaggcttgtctgtttctggtcttgagcttcctagctagtctacctttttttcttccagctttcagagtcctgttgttgattgatggataatttccagggaagttagttgtatttagagggagaagcagggaaatgccatctcgttctgaagggtgagggttaagagaatatggatacattcttttaaattttctcattatagataaatgttcatatacatatatactgtgtatgtatatatacacacatgcttatgttgtatc

SEQ ID NO: 386055 - DNA, 445 bp, Homo sapiens
gtcttaggtctgtcccttaattctgcagagtacctaatgcatttccaaaaaaatcattctctgcttaggttacagttttagggtctaaccctacatggtgtagagtgtaacaatacaattacattaattttgcaaaattgcatactttattatacaaaatggaatttttgtaaaacagctccacaaattgtcattatctacaagttaggcttttttttttaggataaacatacattggctgcaacaaactcatagttaagatctcacagtgtgattagggagacaagattcaaaatatacaactttaaagagcatttttcttttaatgtcctattatttgctttctgtactttatcatacctgtaaattcttgtctctgtaaaactcaataatctggtggtttcactgtaattctttcagtattaatatattgtggtctgcttgt

SEQ ID NO: 386056 - DNA, 183 bp, Homo sapiens
tgctgggattacaggcatgagtcactgcgcccagccttatgttgttttactgacttcatagctgtaatttttaatggctatgtaatatatcatcctgtagacacaaagcaattaacttaccataaaccataatataagacattagagctgttttgaattcttcaaaattataatggatgacca

SEQ ID NO: 386057 - DNA, 1374 bp, Homo sapiens
cttcactccactgcgactgcagaactcagagctgctcttcctctgtggccagttggggaccagcatcatgaagtggatggtggtggtcttggtctgcctccagctcttggaggcagcagtggtcaaagtgcccctgaagaaatttaagtctatccgtgagaccatgaaggagaagggcttgctgggggagttcctgaggacccacaagtatgatcctgcttggaagtaccgctttggtgacctcagcgtgacctacgagcccatggcctacatggatgctgcctactttggtgagatcagcatcgggactccaccccagaacttcctggtcctttttgacaccggctcctccaacttgtgggtgccctctgtctactgccagagccaggcctgcaccagtcactcccgcttcaaccccagcgagtcgtccacctactccaccaatgggcagaccttctccctgcagtatggcagtggcagcctcaccggcttctttggctatgacaccctgactgtccagagcatccaggtccccaaccaggagttcggcttgagtgagaatgagcctggtaccaacttcgtctatgcgcagtttgatggcatcatgggcctggcctaccctgctctgtccgtggatgaggccaccacagctatgcagggcatggtgcaggagggcgccctcaccagccccgtcttcagcgtctacctcagcaaccagcagggctccagcgggggagcggttgtctttgggggtgtggatagcagcctgtacacggggcagatctactgggcgcctgtcaccaggaactctactggcagattggcattgaagagttcctcatcggcggccaggcctccggctggtgttctgagggttgccaggccatcgtggacacaggcacctctctgctcactgtgccccagcagtacatgagtgctcttctgcaggccacaggggcccaggaggatgagtatggacagtttctcgtgaactgtaacagcattcagaatctgcccagcttgaccttcatcatcaatggtgtggagttccctctgccaccttcctcctatatcctcagtaacaacggctactgcaccgtgggagtcgagcccacctacctgtcctcccagaacggccagcccctgtggatcctcggggatgtcttcctcaggtcctactattccgtctacgacttgggcaacaacagagtaggctttgccactgccgcctagacttgctgcctcgacacgtgggctcccctcttcctcttgaccctgcaccctcctagggcattgtatctgtctttccactctggattcagccttctttttctggactctggactttctctaataataaatagttcttcttta

SEQ ID NO: 386058 - DNA, 1954 bp, Homo sapiens
cttcactccactgcgactgcagaactcagagctgctcttcctctgtggccagttggggaccagcatcatgaagtggatggtggtggtcttggtctgcctccagctcttggaggcagcagtggtcaaagtgcccctgaagaaatttaagtctatccgtgagaccatgaaggagaagggcttgctgggggagttcctgaggacccacaagtatgatcctgcttggaagtaccgctttggtgacctcagcgtgacctacgagcccatggcctacatggatgctgcctactttggtgagatcagcatcgggactccaccccagaacttcctggtcctttttgacaccggctcctccaacttgtgggtgccctctgtctactgccagagccaggcctgcaccagtcactcccgcttcaaccccagcgagtcgtccacctactccaccaatgggcagaccttctccctgcagtatggcagtggcagcctcaccggcttctttggctatgacaccctgactgtccagagcatccaggtccccaaccaggagttcggcttgagtgagaatgagcctggtaccaacttcgtctatgcgcagtttgatggcatcatgggcctggcctaccctgctctgtccgtggatgaggccaccacagctatgcagggcatggtgcaggagggcgccctcaccagccccgtcttcagcgtctacctcagcaaccagcagggctccagcgggggagcggttgtctttgggggtgtggatagcagcctgtacacggggcagatctactgggcgcctgtcaccaggaactctactggcagattggcattgaagagttcctcatcggcggccaggcctccggctggtgttctgagggttgccaggccatcgtggacacaggcacctctctgctcactgtgccccagcagtacatgagtgctcttctgcaggccacaggggcccaggaggatgagtatggacagtttctcgtgaactgtaacagcattcagaatctgcccagcttgaccttcatcatcaatggtgtggagttccctctgccaccttcctcctatatcctcagtaacaacggctactgcaccgtgggagtcgagcccacctacctgtcctcccagaacggccagcccctgtggatcctcggggatgtcttcctcaggtcctactattccgtctacgacttgggcaacaacagagtaggctttgccactgccgcctagacttgctgcctcgacacgtgggctcccctcttcctcttgaccctgcaccctcctagggcattgtatctgtctttccactctggattcagccttctttttctggactctggactttctctaataataaatagttcttctttaaaaaaaaaaaaaaaaaaaaaaaaaaaaaaaaaaaaaaaaaaaaaaaaaaaaaaaaaaaaaaaaaaaaaaaaaaaaagagggggggggcgcccaaaaaaacccccccgggggggcgcaccaccaaaaatcaaacacgcaccccccacagcttttatgggtcagacaacggggcgcccacatatgagcgagagacaggcgcaataataaacagacgaaggagagaggacgggcgcgggtataaataaagagcacgaagacgagggagaaaacaaagacgacataggagaatacttttgagaaagcagcccaccacctcgcggcgggggggggcggaccacaagaggcggggacaccacacacccaccgcaagaggaaatttaaacagcgccccccagcgagaggaaaacaaaacacacaacctcacccgaggcgggccataagagcgggggggcacacaaaacccgggactacgtcgttgcgtcctccgccgaccgacgagaacatggcgcccaaccgggggcacactggatcacaaccagaataatcacaaccgcggcgcgagcgctcccgacaaaaagga

SEQ ID NO: 386059 - DNA, 1078 bp, Homo sapiens
ttggccgctgatgggaggacaggtaggtgggctcgactcccacggtgcagtagccgttgttactgaggatataggaggaaggtggcagagggaactgcaccagtcactcccgcttcaaccccagcgagtcgtccacctactccaccaatgggcagaccttctccctgcagtatggcagtggcagcctcaccggcttctttggctatgacaccctgactgtccagagcatccaggtccccaaccaggagttcggcttgagtgagaatgagcctggtaccaacttcgtctatgcgcagtttgatggcatcatgggcctggcctaccctgctctgtccgtggatgaggccaccacagctatgcagggcatggtgcaggagggcgccctcaccagccccgtcttcagcgtctacctcagcaaccagcagggctccagcgggggagcggttgtctttgggggtgtggatagcagcctgtacacggggcagatctactgggcgcctgtcaccaggaactctactggcagattggcattgaagagttcctcatcggcggccaggcctccggctggtgttctgagggttgccaggccatcgtggacacaggcacctctctgctcactgtgccccagcagtacatgagtgctcttctgcaggccacaggggcccaggaggatgagtatggacagtttctcgtgaactgtaacagcattcagaatctgcccagcttgaccttcatcatcaatggtgtggagttccctctgccaccttcctcctatatcctcagtaacaacggctactgcaccgtgggagtcgagcccacctacctgtcctcccagaacggccagcccctgtggatcctcggggatgtcttcctcaggtcctactattccgtctacgacttgggcaacaacagagtaggctttgccactgccgcctagacttgctgcctcgacacgtgggctcccctcttcctcttgaccctgcaccctcctagggcattgtatctgtctttccactctggattcagccttctttttctggactctggactttctctaataataaatagttcttcttta

SEQ ID NO: 386060 - DNA, 355 bp, Homo sapiens
  misc_feature (13)..(13): n is a, c, g, or t
catgattccaganctcagcagtatgtggagtccctctgcaccttcctcctatatcctcagtaacaacggctactgcaccgtgggagtcgagcccacctacctgtcctcccagaacggccagcccctgtggatcctcggggatgtcttcctcaggtcctactattccgtctacgacttgggcaacaacagagtaggctttgccactgccgcctagacttgctgcctcgacacgtgggctcccctcttcctcttgaccctgcaccctcctagggcattgtatctgtctttccactctggattcagccttctttttctggactctggactttctctaataataaatagttcttcttta

SEQ ID NO: 386061 - DNA, 546 bp, Homo sapiens
cttcactccactgcgactgcagaactcagagctgctcttcctctgtggccagttggggaccagcatcatgaagtggatggtggtggtcttggtctgcctccagctcttggaggcagcagtggtcaaagtgcccctgaagaaatttaagtctatccgtgagaccatgaaggagaagggcttgctgggggagttcctgaggacccacaagtatgatcctgcttggaagtaccgctttggtgacctcagcgtgacctacgagcccatggcctacatggatgctgcctactttggtgagatcagcatcgggactccaccccagaacttcctggtcctttttgacaccggctctcccctcttcctcttgaccctgcaccctcctagggcattgtatctgtctttccactctggattcagccttctttttctggactctggactttctctaataataaatagttcttctttaaaaaaagaaaaaaagcgacacataaaagacaacagaacgaatatacaaacaaaaaacaataaaaaaagaagggggcgggc

SEQ ID NO: 386062 - DNA, 611 bp, Homo sapiens
gagttcctgggtgacaggcgcgcagtagatctgcccggtgtacaggctgctatccacacccccaaagacaaccgctcgcccgctggagccctgctggttgctgaggtagacgctgaagacggggctggtgagggcgcacctctctgctcactgtgccccagcagtacatgagtgctcttctgcaggccacaggggcccaggaggatgagtatggacagtttctcgtgaactgtaacagcattcagaatctgcccagcttgaccttcatcatcaatggtgtggagttccctctgccaccttcctcctatatcctcagtaacaacggctactgcaccgtgggagtcgagcccacctacctgtcctcccagaacggccagcccctgtggatcctcggggatgtcttcctcaggtcctactattccgtctacgacttgggcaacaacagagtaggctttgccactgccgcctagacttgctgcctcgacacgtgggctcccctcttcctcttgaccctgcaccctcctagggcattgtatctgtctttccactctggattcagccttctttttctggactctggactttctctaataataaatagttcttcttta

SEQ ID NO: 386063 - DNA, 598 bp, Homo sapiens
cttcactccactgcgactgcagaactcagagctgctcttcctctgtggccagttggggaccagcatcatgaagtggatggtggtggtcttggtctgcctccagctcttggaggcagcagtggtcaaagtgcccctgaagaaatttaagtctatccgtgagaccatgaaggagaagggcttgctgggggagttcctgaggacccacaagtatgatcctgcttggaagtaccgctttggtgacctcagcgtgacctacgagcccatggcctacatggatgctgcctactttggtgagatcagcatcgggactccaccccagaacttcctggtcctttttgacaccggctcctccaacttgtgggtgccctctgtctactgccagagccaggcctgcaccagtcactcccgcttcaaccccagcgagtcgtccacctactccaccaatgggcagaccttctccctgcagtatggcagtggcagcctcaccggcttctttggctatgacaccctgactgtccagagcatccaggtccccaaccaggagttcggcttgagtgagaatgagcctggtaccacaagcgcctggtaatcctctaga

SEQ ID NO: 386064 - DNA, 485 bp, Homo sapiens
tcctcaagtaccacttgagcaattaaccgtaaattatgttcagtatagctttgtattaagcatttttgctcttttataattagtagaaaattgttcatctgtgtgtgatatatatagtatcactcatctagatatctcagactctgaaataatataattgactaatttggaatttataagttaaatttataaggtttttaacaaatatatttgtaatggaattatttgacttttccaaataaattgcataaagatgtaaggattgcaacagtttatattaaaatttttttctggtttgcaatacttgggtggcctgatgaaaagaaattcttcaactttagtctctttcctgcattgtgttcataccactcatattttaaaagttgaccagtactttttgttcacttcttaaatgatgaaaaagaagccatcatgtaatttttttaaatcgtaagtattgtgcaaaaagcattaaaaaaaaaaaa

SEQ ID NO: 386065 - DNA, 448 bp, Homo sapiens
ataaaaatgctgtatgattttaactttaaaggaaaaaatctgtaagatgtggttaattaccaaaaggtgtttacctaaggagcacacagactttaataccccaaattaaactttatattatactcaaggagttatcagtggttgcttgctacactgagaagctgctttatgtgttttagactccctagaccatcaacagtctctttttgcccagcagtgccacataaacataatatacgaatgaaaacactgtgcttcttatgaaaatacacgttcaaaacaaattccccagcaggaatattgaaggtgaatgtggtagtaccctgacttaggttacagattttcaaatctgggctactcttcattaggctcacctgggagagctgttaaacatggcagattcccagtgttcccacagaggtctttgtttttcagggttcccaaggga

SEQ ID NO: 386066 - DNA, 400 bp, Homo sapiens
gcagcccccgcgctccccaataaaggatgcacccaccgagcccgaggactgaaacattgtttaggggaccccaggcactgaagggcgggttcctggagatggacatttggagtgcggtgccaggggcttgggaggattcccgcgtatacgtggtgtgaaagtcagtctttgaatgtagagcagatcaatgtggaatgaggactgaaaggtctgtcaactgaaaaaaaaaacaagaatgaatataaaaaatcacaaattaaataaaccatggtccatccatattaatagacattactcagtgattatacaatataagcttatgggagcaagggagttcctgaatatccttgctgactgtgccgaaatgcaagacctacctaccctctaactctgagccact

SEQ ID NO: 386067 - DNA, 769 bp, Homo sapiens
gggcattgatgcagtaatgcccttcttcacgttgatgtgttctgtttacctcccagaggcaaggttgtcagtgagcacaaaggatcatctaattggacctggcatggaaatttggaatgcagtccgaagtttatcatctccatttatgtcctggaaaagggaagatttcttttacatcctgacctggtttctgtaccacttacttaacaaataagcatttagagaatgtctctcatatatggtctctcagtaaattctctaagtagttctgggaagtagacattatctccatttttaaaacttcttatttgagatgtaatttacatacctaaaattcacccaattaaaacatgcaagtcagtggtttctagtgtctttaaagagttgtgcaaccatcaccactatctaattttaaaacatttttatcatttcatacccatcaaaagtcacttccccttgctcactcccccaacccctggcaaccactgatctattttttaatctctatggatttgcctatgctggacatttcatataaatggaattatacaatatgcggtcttttttgtctggctcctttcactttagcataatgtttttgagggttgaggtttcctttttatgacttcattcctttttatgactgaataatatttccatggtattgcttagccatgttttatttatccaggtcattatggtggacaactggtttgtttccactttttggctattatgacgagatcaggcgcattcggggtggtatccc

SEQ ID NO: 386068 - DNA, 509 bp, Homo sapiens
gctcttgaaaagatctcatgcaaataattgagctccctcttgtaattagatctataaccctgaagtgaggagaccgcagatgtagtctagcactattttaatttgggtgaaaaatggacacttttatttcaattgcttcatctataaaattaggaggttgtattatatgatctctaaagcccttctctagctcctaacatttctattattctgcgttcaggattcatgtatcaagtttagttaaaaatggggcatacttatatttgaaataaatgttagcttgattgcactaatttcccactttggattaggatcatcattttgttataaaaacatgtaaatataggttttctggtttaagaacaggaatgggaggtgtttgtagcatctaaacacacagattaggagctccatcccctcccccccagtctagcatatgtagttagagtattaaatgagatatggtatgtaggatttgatacaagataggtgctcagccgtataatttc

SEQ ID NO: 386069 - DNA, 424 bp, Homo sapiens
gtaaagagcctgaggaaattttcttcggccttcatcatgagaacctggtggggtttctggaagtaaaattcatgaaagtataaggggcccccaagacgggactccaacaagtttttaactctcaagctagtccacactcagccaccagtaaatttattgattaccattgaagtgttcctaccaattactggctctgtggcttctgctctcaggtaaactgattttctatagtcacccatctctctagtttttgaggaagtggtttccctgtgacctctattctcggagagatctaagaaaagttgttgattttcagtttgattatctttttttccgttgtgaagatgggagtgatgacttccaagttctctacatgttggagtgggaactggaagacctaattaacttcttaagaacggaaaaa

SEQ ID NO: 386070 - DNA, 202 bp, Homo sapiens
gaaactaaaatggtcaataaacttctgaaaaagtgctaaatctcattggaattaagaaattgaaaatgaaaatcatgaggatacaatttaacatctaccataatggcaaaataatcatctgattttcaactattagaaagtatggagagcaattaaaaactcaaacaataattgtgagaatgtaaattggaataaacaattt

SEQ ID NO: 386071 - DNA, 313 bp, Homo sapiens
gggcaaaactcagttctgatgcccatgcactcaaggttgactgaattttggcctggttctgccctcatcacacagtggagccctgagcaagtcagtctccctgatggggttcagtctcctcactgaggaaatgagtgggtggccagggtgacctctcaggtcttctagatttgacattctgagaaccaggggccacccaagccctggcccaggtgggagtgtgtaaaggaacttccaggaggatgccaggcaacttccagactgtagttaaagtcagagcacaaaggaaaccagtgctttctctgggggcttc

SEQ ID NO: 386072 - DNA, 1760 bp, Homo sapiens
tcagctcggactctgtgcgcattaggtcgattccatgtctttggtattgtgaatagtgctgcagtgaacatatgtgtgcatgtgtctttatggcagaatgatttatattatgcataaccaaaactgtacttattaaacaataacctcccaaccccttctgcccacaacctctgcctcctgggttcaagtaattctcatgcctcagcctcctgagtagctggaattacaggcgcaggccaccatgcttggctaacttttgtatttttaccagagacaaggtttcaccatgttggcaaggctggtcttgaactctggacctcaagtgatacacccgtcttagcctcccaaagttctgggattacaggcatgagccattgtgcctggccagtatcttgtcttctcattctgtaaacggtgtctttttttcattatgggaaagctttattgacacatttgtttttatttttaaaaattatggtaaaatacacagaacataaacgttaccatctgatatggtttggctgtgtccacacctaaatctcgaattgtagttcccataatccccacacatatgtaccacattttctttatccagtctttcgttgatagacatttaggtcgattccatgtctttggtattgtgaatagtgctgcagtgaacatatgtgtgcatgtgtctttatggcagaatgatttatattatgcataaccaaaactgtacttattaaacaataacctcccaaccccttctgcccacaacctctggcgactgccatgctactttctgtctctgaatttgaataccctgatagtcatataatatttatctttttgtgactggcttatttcactttgcataatgtattcaagcttaatctgtgttgtagcctgcgtcagaatttcttttctttttaatgctgagtattattctattgtgtgtatataccacattttatttatccattcatccactgatggacatgtgcattgttcccaccttttggctattgtgaaaaatgctgttatgaatatgggtatggagatctctccccttattttgagacaggatctcactgtcacccaggctggggtgcagtggtgtgctcataggtcactgtagcttcgacctcctgggctcaagcgaacctcccacctccgcctcttgagtagctgggaccacaggcatgtgccaccatggctgttaaatttattaatttgtttttctatggatcatgctttttgtgttacatcagaggagtctttgcttaacatgagatgacaaaggttttctcccatgtttcctcctaaaagttttatagttttaggttttacatttaggtctatgatccattttgagtcaatttttgtatatggtacaaggtatgaatctatgctttttaaaaaaatatggttacccaatttttctagcagtatgtgctaaaactttgctaaagtcacttagttctagtagctttttttgcagatttaaccagactttctacatagacaatcatatcttctgtgaataaacatggttttatttcttcatgttctaaaaaaaaaagaaacatagcaatgaaaactaaatagacccccgggccatttttgtggggggggggcgaaaacaagggggtttttggcaagggggcctggtgtcctaggtgttttcctcgcaccccattttttttctccccaagggggagaaactggcgggcccccctaaaaggagcgataaatttcgaaaacccggttaccgtaat

SEQ ID NO: 386073 - DNA, 1542 bp, Homo sapiens
tcagctcggactctgtgcgcattaggtcgattccatgtctttggtattgtgaatagtgctgcagtgaacatatgtgtgcatgtgtctttatggcagaatgatttatattatgcataaccaaaactgtacttattaaacaataacctcccaaccccttctgcccacaacctctgcctcctgggttcaagtaattctcatgcctcagcctcctgagtagctggaattacaggcgcaggccaccatgcttggctaacttttgtatttttaccagagacaaggtttcaccatgttggcaaggctggtcttgaactctggacctcaagtgatacacccgtcttagcctcccaaagttctgggattacaggcatgagccattgtgcctggccagtatcttgtcttctcattctgtaaacggtgtctttttttcattatgggaaagctttattgacacatttgtttttatttttaaaaattatggtaaaatacacagaacataaacgttaccatctgatatggtttggctgtgtccacacctaaatctcgaattgtagttcccataatccccacacatatgtaccacattttctttatccagtctttcgttgatagacatttaggtcgattccatgtctttggtattgtgaatagtgctgcagtgaacatatgtgtgcatgtgtctttatggcagaatgatttatattatgcataaccaaaactgtacttattaaacaataacctcccaaccccttctgcccacaacctctggcgactgccatgctactttctgtctctgaatttgaataccctgatagtcatataatatttatctttttgtgactggcttatttcactttgcataatgtattcaagcttaatctgtgttgtagcctgcgtcagaatttcttttctttttaatgctgagtattattctattgtgtgtatataccacattttatttatccattcatccactgatggacatgtgcattgttcccaccttttggctattgtgaaaaatgctgttatgaatatgggtatggagatctctccccttattttgagacaggatctcactgtcacccaggctggggtgcagtggtgtgctcataggtcactgtagcttcgacctcctgggctcaagcgaactcccagctacttgggaggctgaggcaggagaatctcttgaacccaggaggcagaggttgcagtgagccgagatcacaccattgcactctagcctgggcaacaagagcgaaactccatctcaaaaaaaaaaaaaaagaatggtgagcacaggcatccctgtcttgtttctgactttgggggagagtattctttctgcctttaaccattaagtatgttagatttttgtattgccctttactagtatgaggtgctaagggtttgttttaggaatggatgttagattttcttaaatgtttttatgcatctattgaaatgattacatggtttttcttttgtggtttgtttttaatgtagttttaataaattatattgattgattttcttatgataaaccaa

SEQ ID NO: 386074 - DNA, 417 bp, Homo sapiens
tttttttttttgaaacagagtcctcacccaggttggagtgtagtggtgcaatctcggctcactgcaacctctgcctcctgggttcaagtaattctcatgcctcagcctcctgagtagctggaattacaggcgcaggccaccatgcttggctaacttttgtatttttaccagagacaaggtttcaccatgttggcaaggctggtcttgaactctggacctcaagtgatacacccgtcttagcctcccaaagttctgggattacaggcatgagccattgtgcctggccagtatcttgtcttctcattctgtaaacggtgtctttttttcattatgggaaagctttattgacacatttgtttttatttttaaaaattatggtaaaatacacagaacataaacgttaccatctgatatggt

SEQ ID NO: 386075 - DNA, 313 bp, Homo sapiens
ccaggcgttggtctaggccctgggaatatggacataatgaggctcagtctctttcctcttcatgagtagaaaagataagaatagatttgcaatactatatacaggaagtgatcccatagatgagagattcttttgaggataccttagtggcacacctagccctgactggctgaatcaagaatgacatttcagaggaagtgatgcttatgctggatccttcccagtaggatgcaatactggcttatgctggatccttcccaatagatgcaatagtgtgtaattgctctccctgcttttaaaccacacccttagt

SEQ ID NO: 386076 - DNA, 401 bp, Homo sapiens
ctagaggatccccgttactggcatttcctcaagaaaaaaaatggggaacatataactaaaaggaatacttagaccttgcttaacaatacagaatttcagatgactgaattaggaggtggaggggaaaagtaagaagtgcagagacattcatatccgaaatctagcaaagtaaggggtcctcatctaatacaacgcacctataaatcacgagcaagaaactaatctgcatgtacaacctacacaatcacaaaagcagccaacgaagaacctaaaaacgcacgactgtatcaggaagaagcggaagcagggtagtttaagtgaactaaatcccctctctaggcaagaagtctaaaactgataaaaatgcacctgcatatccgctaaagaaacagaggtattac

SEQ ID NO: 386077 - DNA, 632 bp, Homo sapiens
ttggtctaatggattctatcctggagttctttcagaaacattacccagtctctattatgaactccagaatggtgtcacagcctgttaaatgcttatggttttttcaggaaataggttagggccagaacaagcccaacaatcttacctctgtgcctttgtgcaccttcagaggaaaccatagtcttaaacagctgctagaattttctagggaagcctttttgaaaattctgatttaatttggattccataatgcagcttagaaatgccacacgttctctgaaacacagtcttgactcaaattcctgagtactcctaaatcaccctgagataattatgatcagccagtttgtactatgcaatctacagtgattgctttgcagtaagccacatgaattctcctgtgacgaaaaaaaataaaggtttttctccccaccccccacccctctcttcctcttcttttccccttaactgtatagaagatcctaaaaacctctgtattcaagccaggcatgggggcatgtacctttagtcctagctactcaggaggctgaggcagaaagatcactttagccccggaatttgaggctgcagtgagctctgatcttgtcactgcactccagcctaggtgacag

SEQ ID NO: 386078 - DNA, 636 bp, Homo sapiens
agggtgacagcaaatatgttaccaggttttcatactatggggagaaaaaaaactttcttttaagagattatttgaaattcttttggtggaggacagaaggaaagcagtggctatggagatgttttctgctttttgcctactagcttaaagtgtttttatgacaggattccctatgacacagtctgagatattttgtcctcatttctcatttcatatttagccttctctcttctagagactggttccccattcatttagctacggtgtggaaacaatgcaaattaaactatgaacaaacatggaaaatgtgttttgcgtctaggttacttctgttttagaagagagtaccttgtcctaactccttatttcatttaatcatttctaaaaaaataattggtattatttgctaggtatttgcctccaaattaatactagaaggtgctattttaacactgtaaagactcctctgtgtttatccagaagaagcaattttaaaaaagagcaactaggctgggcatggtggctcacacctgtaatcccagcactttgggaggccgaggcaggtggatcacctgaggtcaagagtttgagaccagcctgaccaacatggtgaaactccatctctactaaaaaaaa

SEQ ID NO: 386079 - DNA, 204 bp, Homo sapiens
ggtctagaacctttttatatccagagcctggagcaggaccctcaggacagctgtcagaaatgatggcagaagggccgggtgcggtggctcatgcctgttatcccagcactttgggaggccgaggcgggtggatcatgaggtcaggagattgagaccatcctggataacacggtgaaaccccacatctactaaaaatacaaaaaa

SEQ ID NO: 386080 - DNA, 361 bp, Homo sapiens
ttaggagaacatgaaaatggctatagcaggcactacacaaagcagtaaaatgcctcttataaagagtacctatagctgtccaagcgcggtggctcacacctgtaatcccagcactttgggaggctgaggcgggcggatcatgaggtcaggagatcgagaccatcccggctaacatggtgaaaccctgtctctactaaaaatgcaaaaatttagccaggcgtgatggcgggcaccggtagtcccagctactcgggaggctgaggcaggaaaatggtgtgaacccgggagccggagcttgcagggaaccgagatcacaccactgcactccagcctgggcaacagagcgagattccatctcaaa

SEQ ID NO: 386081 - DNA, 307 bp, Homo sapiens
aaagccccttttacagatgggatagtaggtccagagaaatgtgttggttttcagttccagagtaatttcacctgctcccaccctccacactcacaaagagcaggctgggtgggatgtcgatttttttttcttctggagaatggaccatctccctatgcctctcctcctccttggctactaacccctgacttttccctcccccttctctggccactcctgttcctgaacaaagccagggaagatctgggctggctcagcccctgggtgtcagtcaagactcagagggagactttgctcaaaaagccag

SEQ ID NO: 386082 - DNA, 402 bp, Homo sapiens
aaactctaagcctcctaaccaattgagtggaccccgtcttgccaagggcactccagagtaaatctgaaaaactagttcaggccatgatgggaaatgaggtttggacatgcctcattataccctcctctctttggaattcagggacaactgaccagcattaacatcaaaacagagatcttaagactgaccaaacagactctctgtagtaataaaatacatcactaaatgacagatagcaggccctgacagaaataaaaatattttaccctgaaatatatttctttgatgtattttaaaatggccctgcagagatgtctcttgtgggggaaatctacatactgtagagaatgtcctcccctttctaggtcttttcctgatcctagagagataaagagtctggta

SEQ ID NO: 386083 - DNA, 327 bp, Homo sapiens
agtatgactgcacagctggtaaagccggctccatggacaggacttccccagcaagagaagcaggtagctcagtattgctgatgagagtggctgttccaagcatcagtaggcctggaatctcttctctctgctaaagagtctcactgatgcaccagcattcttgggtggacttccttgagcagaagcttagaggaaggaaataatacagattctggttttgcattttccttccattcagatccttgacttataacatcagtaatgacttccagaagtattttggcaatcccatcttctattgagggaccaagatgtctattactatca

SEQ ID NO: 386084 - DNA, 330 bp, Homo sapiens
cagcccactcagaaaagtcaagttccaagtttccaactcagatgaaatgtttcacagttctacttcttctcatagttggcaagtgacaatatagcaaacggaggaagcttccctgattattagactttctggacctcttttgtcttgcaaaacaatattttgaatgacacccaagtgattcagaagtaaagactcaactgacttaccaatactgacaacgtggcatgcatcatgtgttatgaatttttcctcctttctaagaagacatcttttagtctttgctgacttggaatgtgatgcaactaatgggttttgttttcatggggtacc

SEQ ID NO: 386085 - DNA, 437 bp, Homo sapiens
aaaacatttgaggtttcagtgaaatttttaggctcaaacttagaggcatatacagcaatattttgcatgtgttttcatggcattcaggaccctgtatcctattcatgaactgcagctcaagaatgcctggtctatttaaagagcctttagtggcaagaggcattcgacttccccttgcctttgctgtgcctgggtaaggacagatcacccttagcacttctcttttggattaaaattcctgcccagttatcttaagaacaggccctttcctgcttagaggaggcagcccaagagaccccatttatatggcagtaataacagcaaacgtctcctaaaaggctctgccatgcagctggatatggatagaaacagaacagttatttgaagactgagcgttcagaataaaggtcactttggctctcagttaatctttgagg

SEQ ID NO: 386086 - DNA, 253 bp, Homo sapiens
cgccaacaggacaaagaggccactctgtcagcctctgctggacccctgagctcccctctcatgggcctctccgtttgggtggctccgagaggccaactccagccccaactgcaggctcccaggactgcaggggcagggactctggaggtccgtgtgcttcgtgagagaggggaccctgtcctcctagcaggggtccagcggcaccacagcaagacttctgtggccaagtacacgccatgctcagctctgcccc

SEQ ID NO: 386087 - DNA, 358 bp, Homo sapiens
aaacagcagttaccagcttggggggtggggtcaggctgccattgagatgttttcttccccacccccgggaaaagaatctactctaaaaatgaaactctcactctgccacacactctgccatctgctggggcaaggggatgcttcgttggtctcccaagccttccagctgtggcagctgctctggatctgggggtagtttttgtctcctactgccagctgcagtccatgtagacggaggaaccagcgcaggccccagaacggcaggcgcttctccactcccctctggatgctctcgccccgctgggccccaggaaagcctgtggcaacctctcgagcaagggtattggggtcagaatgg

SEQ ID NO: 386088 - DNA, 144 bp, Homo sapiens
agttggattggagaaatctagaagaattcaggacctagcctagtctacaggcaaataactagaacttgaagctaatgcacagagctaccatttatagtttttatagtgtattatagcactccagcctgggtgagagtgagactc

SEQ ID NO: 386089 - DNA, 709 bp, Homo sapiens
gagatatgatgctttggggcttgtatgccaactccacagagtcctcagagatctaggctccttctagtcacaactatcttctttagggcatgatatgtgtccttatattaaaaaatggcttgtagagctccagctctcatatccatattccatggagcagaacggaggaaagaaaagaacaggcaaggggtatatacatcagctgtcttttaagatgctttcccagaaggcacaaaaaacatttccacttaatttcatcagccaggaattagtcatatggtcacatgtaattgggaaggtgaggctgagaaatatagttgtttagctgggtacattttgttgcctcaaataaaactagaggtcctaaaactgaggaggagggggagaatgaatattggctataggcttctagcaatttgccctaattgggttacttgagtcatgaagccacacagaccctgccaaatagctgacagacttgctttccccagcttcactgacagaccatggtggcttctaactgcggtctggaaatagccctaaatattgcctagctattttttctttctttgagatagggtctcactctgtcaccgaggctggagtacagtggtgcaatcacagctcaccaaggctcaggtgatctcccaggctcaggtgatcctcccacctcagcctcctgagtagctgggactacaggcacacacca

SEQ ID NO: 386090 - DNA, 384 bp, Homo sapiens
attcagagaaaaacttgatgaaggggcatatagggatggaagacatcttcgactgatgaccagcagctttgaactctgcttctggctcttgatacaaatttgatgtgttgggtggtacaaaatcactacactgtctaggcctaaatgccttcacctgtaaagtgtgggactcctttcaaatctaaagttctgattttgtgtcttgtttggctggcttactcggttagaacataggtttaataaggttaacattagagattcagttttcatataaatcagatggcctgatataatactttgcacatagtacttaataaatatttgctcaatgaataaatgtcttggaatagagaaaaactctatttcatagtcaaggattctaat

SEQ ID NO: 386091 - DNA, 330 bp, Homo sapiens
tggtccagagggtagaagtctgtctgcagtgactacgcacggttaaaaccttcccttaaaacagggtgcacagactgtccagacctggcgtggacctcacagagggctgtgcgtggggaaggcccagaggaaagggagtggggaagaagggagatggatggtggtaatggctgcatgcaatgtcaccaaattgtacactcaatgtaaataaaaaactctatgttgggattacagtcatgagccaccgaggcaggtggatcacctaaggtcaggagttcaagaccagcctggccaacatggcaaaacctcatctctattaaaaatacaaaa

SEQ ID NO: 386092 - DNA, 347 bp, Homo sapiens
ttaacatctatgctgcatcttccctcactctcttcaactccagtaaccttctcgtctatagcggcctccacccatgaccatggaaaggagcttcccagaccctggaccagctccatgactgaaatcctagctcccaggcttcaactctctgacctataaccttagcccctctcaacttttcttccttactccaatttcctctgttatttcatcttcagaggcaagatcctattattctttttaaaatatatatttttttttattgagatggcatcttgccatgttacctacgctagtctcaaacccctgggctcaagcaatcctgctgcctctttctcccaaagtgt

SEQ ID NO: 386093 - DNA, 1594 bp, Homo sapiens
gctaatgtttctcccagaaactaaacaacatagtttaggggatattaggcctacattctaatcacattgtaaggaagtgattttctaattttgaagcttcccaggagcagccccctccaggaacaattttccctgtgaactttcactgagaaactattatatgccatggaggagtcaaagatgaattaaatccaatgctatcctccaggagtgagctttgtagttggagagaaaagccaaccttatagatacaacctgtacatatataacctatgctgcatttaggcagatgataagccctaggaatggaaagagggaaaagctcccttttgccaggaatgatgaaggaaagctttatggaaacacaggctgtatgtgaaagatgggtgaatctttgcaggtagggaagaagtagggggcatgtctggctgagaaccggcctgatcatagagtggaaaaatgaaaggcagaggtgaaggaagaatactaaatgtgaaaggctgaaatacacagggaagtgttgccagtgtgcaacagaatctcatctcgtgcaaaattgaattagacttccttactccttccttactctgggtaggtccatgtgcagcctttcctcagagcatctagcctgacatacttggctcatctgctgtgcttctaagccaaataaaaatcatcaaacacatcgaagatatttttgggagtcaccaggttaaagcaaagcctcagtcactgaaagcaaaaactgaattggccaggtctccactgacaaaacagagtaaatgatagtatgacagataatttcaagttttccaagactccaatttctgaaaaatgtctcatgactccaaaaaatcacgtacttcctaaaatgttgccagtggaggaccgaatcaaggttattgctgacctcattttttcaaccttttcagttatttgacctgaataggcaatcccccaggatttctgattgaattctacctgaaagtttagattttaaaagacaacctgtaggaagctaagtctcaggcaacaaaatttaaaaccatcagaacttgtttctccaaacatcaacctgctcctgtcaagtcctttttcatctctcccttttgtccctttacatactgttttgtaagttccttttgatatcatttattgcaggcagtatttttacatccatcttcaagaaacttgggagacatttagacatttagtatgtgtacttttagttgtcttgcctctttatttcagataatgcctgtgattagtgaatggcggcattattcctgaagacaaatgaaggaagatagggagcaagattgactgtcatttgaatgatggaagagaagtagaattactgtgaggttacaaaaatcgtaagttagcagacattgagaaaggaaaacttcctacttgggcttttcaggcttatgtgacattatctggatgtgttttctagtctttcctaaaggagaaatttttattcctgggttgctgaaaagctttctggactaaaaggatataagcagctcaattagcagcatagaggattagattaatggaacagcactgcatacaggaaagctacatctcc

SEQ ID NO: 386094 - DNA, 4564 bp, Homo sapiens
ggcgagctaagccggaggatgtgcagctgcggcggcggcgccggctacgaagaggacggggacaggcgccgtgcgaaccgagcccagccagccggaggacgcgggcagggcgggacgggagcccggactcgtctgccgccgccgtcgtcgccgtcgtgccggccccgcgtccccgcgcgcgagcgggaggagccgccgccacctcgcgcccgagccgccgctagcgcgcgccgggcatggtcccctcttaaaggcgcaggccgcggcggcgggggcgggcgtgcggaacaaagcgccggcgcggggcctgcgggcggctcgggggccgcgatgggcgcggcgggcccgcggcggcggcggcgctgcccgggccgggcctcgcggcgctagggcgggctggcctccgcgggcgggggcagcgggctgagggcgcgcggggcctgcggcggcggcggcggcggcggcggcggcccggcgggcggagcggcgcgggcatggccgcgcgcggccggcgcgcctggctcagcgtgctgctcgggctcgtcctgggcttcgtgctggcctcgcggctcgtcctgccccgggcttccgagctgaagcgagcgggcccacggcgccgcgccagccccgagggctgccggtccgggcaggcggcggcttcccaggccggcggggcgcgcggcgatgcgcgcggggcgcagctctggccgcccggctcggacccagatggcggcccgcgcgacaggaactttctcttcgtgggagtcatgaccgcccagaaatacctgcagactcgggccgtggccgcctacagaacatggtccaagacaattcctgggaaagttcagttcttctcaagtgagggttctgacacatctgtaccaattccagtagtgccactacggggtgtggacgactcctacccgccccagaagaagtccttcatgatgctcaagtacatgcacgaccactacttggacaagtatgaatggtttatgagagcagatgatgacgtgtacatcaaaggagaccgtctggagaacttcctgaggagtttgaacagcagcgagcccctctttcttgggcagacaggcctgggcaccacggaagaaatgggaaaactggccctggagcctggtgagaacttctgcatgggggggcctggcgtgatcatgagccgggaggtgcttcggagaatggtgccgcacattggcaagtgtctccgggagatgtacaccacccatgaggacgtggaggtgggaaggtgtgtccggaggtttgcaggggtgcagtgtgtctggtcttatgagatgcagcagcttttttatgagaattacgagcagaacaaaaaggggtacattagagatctccataacagtaaaattcaccaagctatcacattacaccccaacaaaaacccaccctaccagtacaggctccacagctacatgctgagccgcaagatatccgagctccgccatcgcacaatacagctgcaccgcgaaattgtcctgatgagcaaatacagcaacacagaaattcataaagaggacctccagctgggaatccctccctccttcatgaggtttcagccccgccagcgagaggagattctggaatgggagtttctgactggaaaatacttgtattcggcagttgacggccagccccctcgaagaggaatggactccgcccagagggaagccttggacgacattgtcatgcaggtcatggagatgatcaatgccaacgccaagaccagagggcgcatcattgacttcaaagagatccagtacggctaccgccgggtgaaccccatgtatggggctgagtacatcctggacctgctgcttctgtacaaaaagcacaaagggaagaaaatgacggtccctgtgaggaggcacgcgtatttacagcagactttcagcaaaatccagtttgtggagcatgaggagctggatgcacaagagttggccaagagaatcaatcaggaatctggatccttgtcctttctctcaaactccctgaagaagctcgtcccctttcagctccctgggtcgaagagtgagcacaaagaacccaaagataaaaagataaacatactgattcctttgtctgggcgtttcgacatgtttgtgagatttatgggaaactttgagaagacgtgtcttatccccaatcagaacgtcaagctcgtggttctgcttttcaattctgactccaaccctgacaaggccaaacaagttgaactgatgagagattaccgcattaagtaccctaaagccgacatgcagattttgcctgtgtctggagagttttcaagagccctggccctggaagtaggatcctcccagtttaacaatgaatctttgctcttcttctgcgacgtcgacctcgtctttactacagaattccttcagcgatgtcgagcaaatacagttctgggccaacaaatatattttccaatcatcttcagccagtatgacccaaagattgtttatagtgggaaagttcccagtgacaaccattttgcctttactcagaaaactggcttctggagaaactatgggtttggcatcacgtgtatttataagggagatcttgtccgagtgggtggctttgatgtttccatccaaggctgggggctggaggatgtggaccttttcaacaaggttgtccaggcaggtttgaagacgtttaggagccaggaagtaggagtagtccacgtccaccatcctgtcttttgtgatcccaatcttgaccccaaacagtacaaaatgtgcttggggtccaaagcatcgacctatgggtccacacagcagctggctgagatgtggctggaaaaaaatgatccaagttacagtaaaagcagcaataataatggctcagtgaggacagcctaatgtccagctttgctggaaaagacgtttttaattatctaatttatttttcaaaaattttttgtatgatcagtttttgaagtccgtatacaaggatatattttacaagtggttttcttacataggactcctttaagattgagctttctgaacaagaaggtgatcagtgtttgcctttgaacacatcttcttgctgaacattatgtagcagacctgcttaactttgacttgaaatgtacctgatgaacaaaacttttttaaaaaaatgttttcttttgagaccctttgctccagtcctatggcagaaaacgtgaacattcctgcaaagtattattgtaacaaaacactgtaactctggtaaatgttctgttgtgattgttaacattccacagattctaccttttgtgttttgtttttttttttttacaattgttttaaagccatttcatgttccagttgtaagataaggaaatgtgataatagctgtttcatcattgtcttcaggagagctttccagagttgatcatttcccctcatggtactctgctcagcatggccacgtaggttttttgttgttttgttttgttctttttttgagacggagtctcactctgttacccaggctggaatgcagtggcgcaatcttggctcactttaacctccacttccctggttcaagcaattcccctgcctttgcctcccgagtagctgggattacaggcacacaccaccacgcccagctagtttttttgtatttttagtagagacggggtttcaccatgcaagcccagctggccacgtaggttttaaagcaaggggcgtgaagaaggcacagtgaggtatgtggctgttctcgtggtagttcattcggcctaaatagacctggcattaaatttcaagaaggatttggcattttctcttcttgacccttctctttaaagggtaaaatattaatgtttagaatgacaaagatgaattattacaataaatctgatgtacacagactgaaacacacacacatacaccctaatcaaaacgttggggaaaaatgtatttggttttgttcctttcatcctgtctgtgttatgtgggtggagatggttttcattctttcattactgttttgttttatcctttgtatctgaaatacctttaatttatttaatatctgttgttcagagctctgccatttcttgagtacctgttagttagtattatttatgtgtatcgggagtgtgtttagtctgttttatttgcagtaaaccgatctccaaagatttccttttggaaacgctttttcccctccttaatttttatattccttactgttttactaaatattaagtgttctttgacaattttggtgctcatgtgttttggggacaaaagtgaaatgaatctgtcattataccagaaagttaaattctcagatcaaatgtgccttaataaatttgttttcatttagatttcaaacagtgatagacttgccattttaatacacgtcattggagggctgcgtatttgtaaatagcctgatgctcatttggaaaaataaaccagtgaacaatatttttctattgtacttttcgaaccattttgtctcattattcctgttttagctgaagaattgtattacatttggagagtaaaaaacttaaacacga

SEQ ID NO: 386095 - DNA, 793 bp, Homo sapiens
ttctcttaaagggtaaaatattcatcttgtcattctaaacattaatattttaccctttaaagagaagggtcaagaagagaaaatgtttagaatgacaaagatgaattattacaataaatctgatgtacacagactgaaacacacacacatacaccctaatcaaaacgttggggaaaaatgtatttggttttgttcctttcatcctgtctgtgttatgtgggtggagatggttttcattctttcattactgttttgttttatcctttgtatctgaaatacctttaatttatttaatatctgttgttcagagctctgccatttcttgagtacctgttagttagtattatttatgtgtatcgggagtgtgtttagtctgttttatttgcagtaaaccgatctccaaagatttccttttggaaacgctttttcccctccttaatttttatattccttactgttttactaaatattaagtgttctttgacaattttggtgctcatgtgttttggggacaaaagtgaaatgaatctgtcattataccagaaagttaaattctcagatcaaatgtgccttaataaatttgttttcatttagatttcaaacagtgatagacttgccattttaatacacgtcattggagggctgcgtatttgtaaatagcctgatgctcatttggaaaaataaaccagtgaacaatatttttctattgtacttttcgaaccattttgtctcattattcctgttttagctgaagaattgtattacatttggagagtaaaaaacttaaacacga

SEQ ID NO: 386096 - DNA, 4637 bp, Homo sapiens
ggcgagctaagccggaggatgtgcagctgcggcggcggcgccggctacgaagaggacggggacaggcgccgtgcgaaccgagcccagccagccggaggacgcgggcagggcgggacgggagcccggactcgtctgccgccgccgtcgtcgccgtcgtgccggccccgcgtccccgcgcgcgagcgggaggagccgccgccacctcgcgcccgagccgccgctagcgcgcgccgggcatggtcccctcttaaaggcgcaggccgcggcggcgggggcgggcgtgcggaacaaagcgccggcgcggggcctgcgggcggctcgggggccgcgatgggcgcggcgggcccgcggcggcggcggcgctgcccgggccgggcctcgcggcgctagggcgggctggcctccgcgggcgggggcagcgggctgagggcgcgcggggcctgcggcggcggcggcggcggcggcggcggcccggcgggcggagcggcgcgggcatggccgcgcgcggccggcgcgcctggctcagcgtgctgctcgggctcgtcctgggcttcgtgctggcctcgcggctcgtcctgccccgggcttccgagctgaagcgagcgggcccacggcgccgcgccagccccgagggctgccggtccgggcaggcggcggcttcccaggccggcggggcgcgcggcgatgcgcgcggggcgcagctctggccgcccggctcggacccagatggcggcccgcgcgacaggaactttctcttcgtgggagtcatgaccgcccagaaatacctgcagactcgggccgtggccgcctacagaacatggtccaagacaattcctgggaaagttcagttcttctcaagtgagggttctgacacatctgtaccaattccagtagtgccactacggggtgtggacgactcctacccgccccagaagaagtccttcatgatgctcaagtacatgcacgaccactacttggacaagtatgaatggtttatgagagcagatgatgacgtgtacatcaaaggagaccgtctggagaacttcctgaggagtttgaacagcagcgagcccctctttcttgggcagacaggcctgggcaccacggaagaaatgggaaaactggccctggagcctggtgagaacttctgcatgggggggcctggcgtgatcatgagccgggaggtgcttcggagaatggtgccgcacattggcaagtgtctccgggagatgtacaccacccatgaggacgtggaggtgggaaggtgtgtccggaggtttgcaggggtgcagtgtgtctggtcttatgagatgcagcagcttttttatgagaattacgagcagaacaaaaaggggtacattagagatctccataacagtaaaattcaccaagctatcacattacaccccaacaaaaacccaccctaccagtacaggctccacagctacatgctgagccgcaagatatccgagctccgccatcgcacaatacagctgcaccgcgaaattgtcctgatgagcaaatacagcaacacagaaattcataaagaggacctccagctgggaatccctccctccttcatgaggtttcagccccgccagcgagaggagattctggaatgggagtttctgactggaaaatacttgtattcggcagttgacggccagccccctcgaagaggaatggactccgcccagagggaagccttggacgacattgtcatgcaggtcatggagatgatcaatgccaacgccaagaccagagggcgcatcattgacttcaaagagatccagtacggctaccgccgggtgaaccccatgtatggggctgagtacatcctggacctgctgcttctgtacaaaaagcacaaagggaagaaaatgacggtccctgtgaggaggcacgcgtatttacagcagactttcagcaaaatccagtttgtggagcatgaggagctggatgcacaagagttggccaagagaatcaatcaggaatctggatccttgtcctttctctcaaactccctgaagaagctcgtcccctttcagctccctgggtcgaagagtgagcacaaagaacccaaagataaaaagataaacatactgattcctttgtctgggcgtttcgacatgtttgtgagatttatgggaaactttgagaagacgtgtcttatccccaatcagaacgtcaagctcgtggttctgcttttcaattctgactccaaccctgacaaggccaaacaagttgaactgatgagagattaccgcattaagtaccctaaagccgacatgcagattttgcctgtgtctggagagttttcaagagccctggccctggaagtaggatcctcccagtttaacaatgaatctttgctcttcttctgcgacgtcgacctcgtctttactacagaattccttcagcgatgtcgagcaaatacagttctgggccaacaaatatattttccaatcatcttcagccagtatgacccaaagattgtttatagtgggaaagttcccagtgacaaccattttgcctttactcagaaaactggcttctggagaaactatgggtttggcatcacgtgtatttataagggagatcttgtccgagtgggtggctttgatgtttccatccaaggctgggggctggaggatgtggaccttttcaacaaggttgtccaggcaggtttgaagacgtttaggagccaggaagtaggagtagtccacgtccaccatcctgtcttttgtgatcccaatcttgaccccaaacagtacaaaatgtgcttggggtccaaagcatcgacctatgggtccacacagcagctggctgagatgtggctggaaaaaaatgatccaagttacagtaaaagcagcaataataatggctcagtgaggacagcctaatgtccagctttgctggaaaagacgtttttaattatctaatttatttttcaaaaattttttgtatgatcagtttttgaagtccgtatacaaggatatattttacaagtggttttcttacataggactcctttaagattgagctttctgaacaagaaggtgatcagtgtttgcctttgaacacatcttcttgctgaacattatgtagcagacctgcttaactttgacttgaaatgtacctgatgaacaaaacttttttaaaaaaatgttttcttttgagaccctttgctccagtcctatggcagaaaacgtgaacattcctgcaaagtattattgtaacaaaacactgtaactctggtaaatgttctgttgtgattgttaacattccacagattctaccttttgtgttttgtttttttttttttacaattgttttaaagccatttcatgttccagttgtaagataaggaaatgtgataatagctgtttcatcattgtcttcaggagagctttccagagttgatcatttcccctcatggtactctgctcagcatggccacgtaggttttttgttgttttgttttgttctttttttgagacggagtctcactctgttacccaggctggaatgcagtggcgcaatcttggctcactttaacctccacttccctggttcaagcaattcccctgcctttgcctcccgagtagctgggattacaggcacacaccaccacgcccagctagtttttttgtatttttagtagagacggggtttcaccatgcaagcccagctggccacgtaggttttaaagcaaggggcgtgaagaaggcacagtgaggtatgtggctgttctcgtggtagttcattcggcctaaatagacctggcattaaatttcaagaaggatttggcattttctcttcttgacccttctctttaaagggtaaaatattaatgtttagaatgacaaagatgaattattacaataaatctgatgtacacagactgaaacacacacacatacaccctaatcaaaacgttggggaaaaatgtatttggttttgttcctttcatcctgtctgtgttatgtgggtggagatggttttcattctttcattactgttttgttttatcctttgtatctgaaatacctttaatttatttaatatctgttgttcagagctctgccatttcttgagtacctgttagttagtattatttatgtgtatcgggagtgtgtttagtctgttttatttgcagtaaaccgatctccaaagatttccttttggaaacgctttttcccctccttaatttttatattccttactgttttactaaatattaagtgttctttgacaattttggtgctcatgtgttttggggacaaaagtgaaatgaatctgtcattataccagaaagttaaattctcagatcaaatgtgccttaataaatttgttttcatttagatttcaaacagtgatagacttgccattttaatacacgtcattggagggctgcgtatttgtaaatagcctgatgctcatttggaaaaataaaccagtgaacaatatttttctattgtacttttcgaaccattttgtctcattattcctgttttagctgaagaattgtattacatttggagagtaaaaaacttaaacacgaaacgaaacacagacaagtagaccaaacaacacatgcaccggccgcccagagcaccacggcaagctttccaacc

SEQ ID NO: 386097 - DNA, 3737 bp, Homo sapiens
agagtggtgccctccgtgtactctcttggaggatgaacttggactgctgctccatcacactgtacttcctaacatggtccaagacaattcctgggaaagttcagttcttctcaagtgagggttctgacacatctgtaccaattccagtagtgccactacggggtgtggacgactcctacccgccccagaagaagtccttcatgatgctcaagtacatgcacgaccactacttggacaagtatgaatggtttatgagagcagatgatgacgtgtacatcaaaggagaccgtctggagaacttcctgaggagtttgaacagcagcgagcccctctttcttgggcagacaggcctgggcaccacggaagaaatgggaaaactggccctggagcctggtgagaacttctgcatgggggggcctggcgtgatcatgagccgggaggtgcttcggagaatggtgccgcacattggcaagtgtctccgggagatgtacaccacccatgaggacgtggaggtgggaaggtgtgtccggaggtttgcaggggtgcagtgtgtctggtcttatgagatgcagcagcttttttatgagaattacgagcagaacaaaaaggggtacattagagatctccataacagtaaaattcaccaagctatcacattacaccccaacaaaaacccaccctaccagtacaggctccacagctacatgctgagccgcaagatatccgagctccgccatcgcacaatacagctgcaccgcgaaattgtcctgatgagcaaatacagcaacacagaaattcataaagaggacctccagctgggaatccctccctccttcatgaggtttcagccccgccagcgagaggagattctggaatgggagtttctgactggaaaatacttgtattcggcagttgacggccagccccctcgaagaggaatggactccgcccagagggaagccttggacgacattgtcatgcaggtcatggagatgatcaatgccaacgccaagaccagagggcgcatcattgacttcaaagagatccagtacggctaccgccgggtgaaccccatgtatggggctgagtacatcctggacctgctgcttctgtacaaaaagcacaaagggaagaaaatgacggtccctgtgaggaggcacgcgtatttacagcagactttcagcaaaatccagtttgtggagcatgaggagctggatgcacaagagttggccaagagaatcaatcaggaatctggatccttgtcctttctctcaaactccctgaagaagctcgtcccctttcagctccctgggtcgaagagtgagcacaaagaacccaaagataaaaagataaacatactgattcctttgtctgggcgtttcgacatgtttgtgagatttatgggaaactttgagaagacgtgtcttatccccaatcagaacgtcaagctcgtggttctgcttttcaattctgactccaaccctgacaaggccaaacaagttgaactgatgagagattaccgcattaagtaccctaaagccgacatgcagattttgcctgtgtctggagagttttcaagagccctggccctggaagtaggatcctcccagtttaacaatgaatctttgctcttcttctgcgacgtcgacctcgtctttactacagaattccttcagcgatgtcgagcaaatacagttctgggccaacaaatatattttccaatcatcttcagccagtatgacccaaagattgtttatagtgggaaagttcccagtgacaaccattttgcctttactcagaaaactggcttctggagaaactatgggtttggcatcacgtgtatttataagggagatcttgtccgagtgggtggctttgatgtttccatccaaggctgggggctggaggatgtggaccttttcaacaaggttgtccaggcaggtttgaagacgtttaggagccaggaagtaggagtagtccacgtccaccatcctgtcttttgtgatcccaatcttgaccccaaacagtacaaaatgtgcttggggtccaaagcatcgacctatgggtccacacagcagctggctgagatgtggctggaaaaaaatgatccaagttacagtaaaagcagcaataataatggctcagtgaggacagcctaatgtccagctttgctggaaaagacgtttttaattatctaatttatttttcaaaaattttttgtatgatcagtttttgaagtccgtatacaaggatatattttacaagtggttttcttacataggactcctttaagattgagctttctgaacaagaaggtgatcagtgtttgcctttgaacacatcttcttgctgaacattatgtagcagacctgcttaactttgacttgaaatgtacctgatgaacaaaacttttttaaaaaaatgttttcttttgagaccctttgctccagtcctatggcagaaaacgtgaacattcctgcaaagtattattgtaacaaaacactgtaactctggtaaatgttctgttgtgattgttaacattccacagattctaccttttgtgttttgtttttttttttttacaattgttttaaagccatttcatgttccagttgtaagataaggaaatgtgataatagctgtttcatcattgtcttcaggagagctttccagagttgatcatttcccctcatggtactctgctcagcatggccacgtaggttttttgttgttttgttttgttctttttttgagacggagtctcactctgttacccaggctggaatgcagtggcgcaatcttggctcactttaacctccacttccctggttcaagcaattcccctgcctttgcctcccgagtagctgggattacaggcacacaccaccacgcccagctagtttttttgtatttttagtagagacggggtttcaccatgcaagcccagctggccacgtaggttttaaagcaaggggcgtgaagaaggcacagtgaggtatgtggctgttctcgtggtagttcattcggcctaaatagacctggcattaaatttcaagaaggatttggcattttctcttcttgacccttctctttaaagggtaaaatattaatgtttagaatgacaaagatgaattattacaataaatctgatgtacacagactgaaacacacacacatacaccctaatcaaaacgttggggaaaaatgtatttggttttgttcctttcatcctgtctgtgttatgtgggtggagatggttttcattctttcattactgttttgttttatcctttgtatctgaaatacctttaatttatttaatatctgttgttcagagctctgccatttcttgagtacctgttagttagtattatttatgtgtatcgggagtgtgtttagtctgttttatttgcagtaaaccgatctccaaagatttccttttggaaacgctttttcccctccttaatttttatattccttactgttttactaaatattaagtgttctttgacaattttggtgctcatgtgttttggggacaaaagtgaaatgaatctgtcattataccagaaagttaaattctcagatcaaatgtgccttaataaatttgttttcatttagatttcaaacagtgatagacttgccattttaatacacgtcattggagggctgcgtatttgtaaatagcctgatgctcatttggaaaaataaaccagtgaacaatatttttctattgt

SEQ ID NO: 386098 - DNA, 4019 bp, Homo sapiens
ggcgagctaagccggaggatgtgcagctgcggcggcggcgccggctacgaagaggacggggacaggcgccgtgcgaaccgagcccagccagccggaggacgcgggcagggcgggacgggagcccggactcgtctgccgccgccgtcgtcgccgtcgtgccggccccgcgtccccgcgcgcgagcgggaggagccgccgccacctcgcgcccgagccgccgctagcgcgcgccgggcatggtcccctcttaaaggcgcaggccgcggcggcgggggcgggcgtgcggaacaaagcgccggcgcggggcctgcgggcggctcgggggccgcgatgggcgcggcgggcccgcggcggcggcggcgctgcccgggccgggcctcgcggcgctagggcgggctggcctccgcgggcgggggcagcgggctgagggcgcgcggggcctgcggcggcggcggcggcggcggcggcggcccggcgggcggagcggcgcgggcatggccgcgcgcggccggcgcgcctggctcagcgtgctgctcgggctcgtcctgggcttcgtgctggcctcgcggctcgtcctgccccgggcttccgagctgaagcgagcgggcccacggcgccgcgccagccccgagggctgccggtccgggcaggcggcggcttcccaggccggcggggcgcgcggcgatgcgcgcggggcgcagctctggccgcccggctcggacccagatggcggcccgcgcgacaggaactttctcttcgtgggagtcatgaccgcccagaaatacctgcagactcgggccgtggccgcctacagaacatggtccaagacaattcctgggaaagttcagttcttctcaagtgagggttctgacacatctgtaccaattccagtagtgccactacggggtgtggacgactcctacccgccccagaagaagtccttcatgatgctcaagtacatgcacgaccactacttggacaagtatgaatggtttatgagagcagatgatgacgtgtacatcaaaggagaccgtctggagaacttcctgaggagtttgaacagcagcgagcccctctttcttgggcagacaggcctgggcaccacggaagaaatgggaaaactggccctggagcctggtgagaacttctgcatgggggggcctggcgtgatcatgagccgggaggtgcttcggagaatggtgccgcacattggcaagtgtctccgggagatgtacaccacccatgaggacgtggaggtgggaaggtgtgtccggaggtttgcaggggtgcagtgtgtctggtcttatgagatgcagcagcttttttatgagaattacgagcagaacaaaaaggggtacattagagatctccataacagtaaaattcaccaagctatcacattacaccccaacaaaaacccaccctaccagtacaggctccacagctacatgctgagccgcaagatatccgagctccgccatcgcacaatacagctgcaccgcgaaattgtcctgatgagcaaatacagcaacacagaaattcataaagaggacctccagctgggaatccctccctccttcatgaggtttcagccccgccagcgagaggagattctggaatgggagtttctgactggaaaatacttgtattcggcagttgacggccagccccctcgaagaggaatggactccgcccagagggaagccttggacgacattgtcatgcaggtcatggagatgatcaatgccaacgccaagaccagagggcgcatcattgacttcaaagagatccagtacggctaccgccgggtgaaccccatgtatggggctgagtacatcctggacctgctgcttctgtacaaaaagcacaaagggaagaaaatgacggtccctgtgaggaggcacgcgtatttacagcagactttcagcaaaatccagtttgtggagcatgaggagctggatgcacaagagttggccaagagaatcaatcaggaatctggatccttgtcctttctctcaaactccctgaagaagctcgtcccctttcagctccctgggtcgaagagtgagcacaaagaacccaaagataaaaagataaacatactgattcctttgtctgggcgtttcgacatgtttgtgagatttatgggaaactttgagaagacgtgtcttatccccaatcagaacgtcaagctcgtggttctgcttttcaattctgactccaaccctgacaaggccaaacaagttgaactgatgagagattaccgcattaagtaccctaaagccgacatgcagattttgcctgtgtctggagagttttcaagagccctggccctggaagtaggatcctcccagtttaacaatgaatctttgctcttcttctgcgacgtcgacctcgtctttactacagaattccttcagcgatgtcgagcaaatacagttctgggccaacaaatatattttccaatcatcttcagccagtatgacccaaagattgtttatagtgggaaagttcccagtgacaaccattttgcctttactcagaaaactggcttctggagaaactatgggtttggcatcacgtgtatttataagggagatcttgtccgagtgggtggctttgatgtttccatccaaggctgggggctggaggatgtggaccttttcaacaaggttgtccaggcaggtttgaagacgtttaggagccaggaagtaggagtagtccacgtccaccatcctgtcttttgtgatcccaatcttgaccccaaacagtacaaaatgtgcttggggtccaaagcatcgacctatgggtccacacagcagctggctgagatgtggctggaaaaaaatgatccaagttacagtaaaagcagcaataataatggctcagtgaggacagcctaatgtccagctttgctggaaaagacgtttttaattatctaatttatttttcaaaaattttttgtatgatcagtttttgaagtccgtatacaaggatatattttacaagtggttttcttacataggactcctttaagattgagctttctgaacaagaaggtgatcagtgtttgcctttgaacacatcttcttgctgaacattatgtagcagacctgcttaactttgacttgaaatgtacctgatgaacaaaacttttttaaaaaaatgttttcttttgagaccctttgctccagtcctatggcagaaaacgtgaacattcctgcaaagtattattgtaacaaaacactgtaactctggtaaatgttctgttgtgattgttaacattccacagattctaccttttgtgttttgtttttttttttttacaattgttttaaagccatttcatgttccagttgtaagataaggaaatgtgataatagctgtttcatcattgtcttcaggagagctttccagagttgatcatttcccctcatggtactctgctcagcatggccacgtaggttttttgttgttttgttttgttctttttttgagacggagtctcactctgttacccaggctggaatgcagtggcgcaatcttggctcactttaacctccacttccctggttcaagcaattcccctgcctttgcctcccgagtagctgggattacaggcacacaccaccacgcccagctagtttttttgtatttttagtagagacggggtttcaccatgcaagcccagctggccacgtaggttttaaagcaaggggcgtgaagaaggcacagtgaggtatgtggctgttctcgtggtagttcattcggcctaaatagacctggcattaaatttcaagaaggatttggcattttctcttcttgacccttctctttaaagggtaaaatattaatgtttagaatgacaaagatgaattattacaataaatctgatgtacacagactgaaacacacacacatacaccctaatcaaaacgttggggaaaaatgtatttggttttgttcctttcatcctgtctgtgttatgtggatgaaaggggatctggtaccgagctcga

SEQ ID NO: 386099 - DNA, 3503 bp, Homo sapiens
  misc_feature (3485)..(3485): n is a, c, g, or t
ggcgagctaagccggaggatgtgcagctgcggcggcggcgccggctacgaagaggacggggacaggcgccgtgcgaaccgagcccagccagccggaggacgcgggcagggcgggacgggagcccggactcgtctgccgccgccgtcgtcgccgtcgtgccggccccgcgtccccgcgcgcgagcgggaggagccgccgccacctcgcgcccgagccgccgctagcgcgcgccgggcatggtcccctcttaaaggcgcaggccgcggcggcgggggcgggcgtgcggaacaaagcgccggcgcggggcctgcgggcggctcgggggccgcgatgggcgcggcgggcccgcggcggcggcggcgctgcccgggccgggcctcgcggcgctagggcgggctggcctccgcgggcgggggcagcgggctgagggcgcgcggggcctgcggcggcggcggcggcggcggcggcggcccggcgggcggagcggcgcgggcatggccgcgcgcggccggcgcgcctggctcagcgtgctgctcgggctcgtcctgggcttcgtgctggcctcgcggctcgtcctgccccgggcttccgagctgaagcgagcgggcccacggcgccgcgccagccccgagggctgccggtccgggcaggcggcggcttcccaggccggcggggcgcgcggcgatgcgcgcggggcgcagctctggccgcccggctcggacccagatggcggcccgcgcgacaggaactttctcttcgtgggagtcatgaccgcccagaaatacctgcagactcgggccgtggccgcctacagaacatggtccaagacaattcctgggaaagttcagttcttctcaagtgagggttctgacacatctgtaccaattccagtagtgccactacggggtgtggacgactcctacccgccccagaagaagtccttcatgatgctcaagtacatgcacgaccactacttggacaagtatgaatggtttatgagagcagatgatgacgtgtacatcaaaggagaccgtctggagaacttcctgaggagtttgaacagcagcgagcccctctttcttgggcagacaggcctgggcaccacggaagaaatgggaaaactggccctggagcctggtgagaacttctgcatgggggggcctggcgtgatcatgagccgggaggtgcttcggagaatggtgccgcacattggcaagtgtctccgggagatgtacaccacccatgaggacgtggaggtgggaaggtgtgtccggaggtttgcaggggtgcagtgtgtctggtcttatgagatgcagcagcttttttatgagaattacgagcagaacaaaaaggggtacattagagatctccataacagtaaaattcaccaagctatcacattacaccccaacaaaaacccaccctaccagtacaggctccacagctacatgctgagccgcaagatatccgagctccgccatcgcacaatacagctgcaccgcgaaattgtcctgatgagcaaatacagcaacacagaaattcataaagaggacctccagctgggaatccctccctccttcatgaggtttcagccccgccagcgagaggagattctggaatgggagtttctgactggaaaatacttgtattcggcagttgacggccagccccctcgaagaggaatggactccgcccagagggaagccttggacgacattgtcatgcaggtcatggagatgatcaatgccaacgccaagaccagagggcgcatcattgacttcaaagagatccagtacggctaccgccgggtgaaccccatgtatggggctgagtacatcctggacctgctgcttctgtacaaaaagcacaaagggaagaaaatgacggtccctgtgaggaggcacgcgtatttacagcagactttcagcaaaatccagtttgtggagcatgaggagctggatgcacaagagttggccaagagaatcaatcaggaatctggatccttgtcctttctctcaaactccctgaagaagctcgtcccctttcagctccctgggtcgaagagtgagcacaaagaacccaaagataaaaagataaacatactgattcctttgtctgggcgtttcgacatgtttgtgagatttatgggaaactttgagaagacgtgtcttatccccaatcagaacgtcaagctcgtggttctgcttttcaattctgactccaaccctgacaaggccaaacaagttgaactgatgagagattaccgcattaagtaccctaaagccgacatgcagattttgcctgtgtctggagagttttcaagagccctggccctggaagtaggatcctcccagtttaacaatgaatctttgctcttcttctgcgacgtcgacctcgtctttactacagaattccttcagcgatgtcgagcaaatacagttctgggccaacaaatatattttccaatcatcttcagccagtatgacccaaagattgtttatagtgggaaagttcccagtgacaaccattttgcctttactcagaaaactggcttctggagaaactatgggtttggcatcacgtgtatttataagggagatcttgtccgagtgggtggctttgatgtttccatccaaggctgggggctggaggatgtggaccttttcaacaaggttgtccaggcaggtttgaagacgtttaggagccaggaagtaggagtagtccacgtccaccatcctgtcttttgtgatcccaatcttgaccccaaacagtacaaaatgtgcttggggtccaaagcatcgacctatgggtccacacagcagctggctgagatgtggctggaaaaaaatgatccaagttacagtaaaagcagcaataataatggctcagtgaggacagcctaatgtccagctttgctggaaaagacgtttttaattatctaatttatttttcaaaaattttttgtatgatcagtttttgaagtccgtatacaaggatatattttacaagtggttttcttacataggactcctttaagattgagctttctgaacaagaaggtgatcagtgtttgcctttgaacacatcttcttgctgaacattatgtagcagacctgcttaactttgacttgaaatgtacctgatgaacaaaacttttttaaaaaaatgttttcttttgagaccctttgctccagtcctatggcagaaaacgtgaacattcctgcaaagtattattgtaacaaaacactgtaactctggtaaatgttctgttgtgattgttaacattccacagattctaccttttgtgttttgtttttttttttttacaattgttttaaagccatttcatgttccagttgtaagataaggaaatgtgataatagctgtttcatcattgtcttcaggagagctttccagagttgatcatttcccctcatggtactctgctcaaaaaaaaattaaataaattattataccctttcagnaatgctgtgtgcattttc

SEQ ID NO: 386100 - DNA, 351 bp, Homo sapiens
gcggccgcctactactactactgctcgaattcaagcttctaacgatgtacggggtcatgtgttttggggacaaaagtgaaatgaatctgtcattataccagaaagttaaattctcagatcaaatgtgccttaataaatttgttttcatttagatttcaaacagtgatagacttgccattttaatacacgtcattggagggctgcgtatttgtaaatagcctgatgctcatttggaaaaataaaccagtgaacaatatttttctattgtacttttcgaaccattttgtctcattattcctgttttagctgaagaattgtattacatttggagagtaaaaaacttaaacacga

SEQ ID NO: 386101 - DNA, 4481 bp, Homo sapiens
ggcgagctaagccggaggatgtgcagctgcggcggcggcgccggctacgaagaggacggggacaggcgccgtgcgaaccgagcccagccagccggaggacgcgggcagggcgggacgggagcccggactcgtctgccgccgccgtcgtcgccgtcgtgccggccccgcgtccccgcgcgcgagcgggaggagccgccgccacctcgcgcccgagccgccgctagcgcgcgccgggcatggtcccctcttaaaggcgcaggccgcggcggcgggggcgggcgtgcggaacaaagcgccggcgcggggcctgcgggcggctcgggggccgcgatgggcgcggcgggcccgcggcggcggcggcgctgcccgggccgggcctcgcggcgctagggcgggctggcctccgcgggcgggggcagcgggctgagggcgcgcggggcctgcggcggcggcggcggcggcggcggcggcccggcgggcggagcggcgcgggcatggccgcgcgcggccggcgcgcctggctcagcgtgctgctcgggctcgtcctgggcttcgtgctggcctcgcggctcgtcctgccccgggcttccgagctgaagcgagcgggcccacggcgccgcgccagccccgagggctgccggtccgggcaggcggcggcttcccaggccggcggggcgcgcggcgatgcgcgcggggcgcagctctggccgcccggctcggacccagatggcggcccgcgcgacaggaactttctcttcgtgggagtcatgaccgcccagaaatacctgcagactcgggccgtggccgcctacagaacatggtccaagacaattcctgggaaagttcagttcttctcaagtgagggttctgacacatctgtaccaattccagtagtgccactacggggtgtggacgactcctacccgccccagaagaagtccttcatgatgctcaagtacatgcacgaccactacttggacaagtatgaatggtttatgagagcagatgatgacgtgtacatcaaaggagaccgtctggagaacttcctgaggagtttgaacagcagcgagcccctctttcttgggcagacaggcctgggcaccacggaagaaatgggaaaactggccctggagcctggtgagaacttctgcatgggggggcctggcgtgatcatgagccgggaggtgcttcggagaatggtgccgcacattggcaagtgtctccgggagatgtacaccacccatgaggacgtggaggtgggaaggtgtgtccggaggtttgcaggggtgcagtgtgtctggtcttatgagatgcagcagcttttttatgagaattacgagcagaacaaaaaggggtacattagagatctccataacagtaaaattcaccaagctatcacattacaccccaacaaaaacccaccctaccagtacaggctccacagctacatgctgagccgcaagatatccgagctccgccatcgcacaatacagctgcaccgcgaaattgtcctgatgagcaaatacagcaacacagaaattcataaagaggacctccagctgggaatccctccctccttcatgaggtttcagccccgccagcgagaggagattctggaatgggagtttctgactggaaaatacttgtattcggcagttgacggccagccccctcgaagaggaatggactccgcccagagggaagccttggacgacattgtcatgcaggtcatggagatgatcaatgccaacgccaagaccagagggcgcatcattgacttcaaagagatccagtacggctaccgccgggtgaaccccatgtatggggctgagtacatcctggacctgctgcttctgtacaaaaagcacaaagggaagaaaatgacggtccctgtgaggaggcacgcgtatttacagcagactttcagcaaaatccagtttgtggagcatgaggagctggatgcacaagagttggccaagagaatcaatcaggaatctggatccttgtcctttctctcaaactccctgaagaagctcgtcccctttcagctccctgggtcgaagagtgagcacaaagaacccaaagataaaaagataaacatactgattcctttgtctgggcgtttcgacatgtttgtgagatttatgggaaactttgagaagacgtgtcttatccccaatcagaacgtcaagctcgtggttctgcttttcaattctgactccaaccctgacaaggccaaacaagttgaactgatgagagattaccgcattaagtaccctaaagccgacatgcagattttgcctgtgtctggagagttttcaagagccctggccctggaagtaggatcctcccagtttaacaatgaatctttgctcttcttctgcgacgtcgacctcgtctttactacagaattccttcagcgatgtcgagcaaatacagttctgggccaacaaatatattttccaatcatcttcagccagtatgacccaaagattgtttatagtgggaaagttcccagtgacaaccattttgcctttactcagaaaactggcttctggagaaactatgggtttggcatcacgtgtatttataagggagatcttgtccgagtgggtggctttgatgtttccatccaaggctgggggctggaggatgtggaccttttcaacaaggttgtccaggcaggtttgaagacgtttaggagccaggaagtaggagtagtccacgtccaccatcctgtcttttgtgatcccaatcttgaccccaaacagtacaaaatgtgcttggggtccaaagcatcgacctatgggtccacacagcagctggctgagatgtggctggaaaaaaatgatccaagttacagtaaaagcagcaataataatggctcagtgaggacagcctaatgtccagctttgctggaaaagacgtttttaattatctaatttatttttcaaaaattttttgtatgatcagtttttgaagtccgtatacaaggatatattttacaagtggttttcttacataggactcctttaagattgagctttctgaacaagaaggtgatcagtgtttgcctttgaacacatcttcttgctgaacattatgtagcagacctgcttaactttgacttgaaatgtacctgatgaacaaaacttttttaaaaaaatgttttcttttgagaccctttgctccagtcctatggcagaaaacgtgaacattcctgcaaagtattattgtaacaaaacactgtaactctggtaaatgttctgttgtgattgttaacattccacagattctaccttttgtgttttgtttttttttttttacaattgttttaaagccatttcatgttccagttgtaagataaggaaatgtgataatagctgtttcatcattgtcttcaggagagctttccagagttgatcatttcccctcatggtactctgctcagcatggccacgtaggttttttgttgttttgttttgttctttttttgagacggagtctcactctgttacccaggctggaatgcagtggcgcaatcttggctcactttaacctccacttccctggttcaagcaattcccctgcctttgcctcccgagtagctgggattacaggcacacaccaccacgcccagctagtttttttgtatttttagtagagacggggtttcaccatgcaagcccagctggccacgtaggttttaaagcaaggggcgtgaagaaggcacagtgaggtatgtggctgttctcgtggtagttcattcggcctaaatagacctggcattaaatttcaagaaggatttggcattttctcttcttgacccttctctttaaagggtaaaatattaatgtttagaatgacaaagatgaattattacaataaatctgatgtacacagactgaaacacacacacatacaccctaatcaaaacgttggggaaaaatgtatttggttttgttcctttcatcctgtctgtgttatgtgggtggagatggttttcattctttcattactgttttgttttatcctttgtatctgaaatacctttaatttatttaatatctgttgttcagagctctgccatttcttgagtacctgttagttagtattatttatgtgtatcgggagtgtgtttagtctgttttatttgcagtaaaccgatctccaaagatttccttttggaaacgctttttcccctccttaatttttatattccttactgttttactaaatattaagtgttctttgacaattttggtgctcatgtgttttggggacaaaagtgaaatgaatctgtcattataccagaaagttaaattctcagatcaaatgtgccttaataaatttgttttcatttagatttcaaacagtgatagacttgccattttaatacacgtcattggagggctgcgtatttgtaaatagcctgatgctcatttggaaaaataaaccagtgaacaatatttttctattgt

SEQ ID NO: 386102 - DNA, 4484 bp, Homo sapiens
  misc_feature (4444)..(4444): n is a, c, g, or t
ggcgagctaagccggaggatgtgcagctgcggcggcggcgccggctacgaagaggacggggacaggcgccgtgcgaaccgagcccagccagccggaggacgcgggcagggcgggacgggagcccggactcgtctgccgccgccgtcgtcgccgtcgtgccggccccgcgtccccgcgcgcgagcgggaggagccgccgccacctcgcgcccgagccgccgctagcgcgcgccgggcatggtcccctcttaaaggcgcaggccgcggcggcgggggcgggcgtgcggaacaaagcgccggcgcggggcctgcgggcggctcgggggccgcgatgggcgcggcgggcccgcggcggcggcggcgctgcccgggccgggcctcgcggcgctagggcgggctggcctccgcgggcgggggcagcgggctgagggcgcgcggggcctgcggcggcggcggcggcggcggcggcggcccggcgggcggagcggcgcgggcatggccgcgcgcggccggcgcgcctggctcagcgtgctgctcgggctcgtcctgggcttcgtgctggcctcgcggctcgtcctgccccgggcttccgagctgaagcgagcgggcccacggcgccgcgccagccccgagggctgccggtccgggcaggcggcggcttcccaggccggcggggcgcgcggcgatgcgcgcggggcgcagctctggccgcccggctcggacccagatggcggcccgcgcgacaggaactttctcttcgtgggagtcatgaccgcccagaaatacctgcagactcgggccgtggccgcctacagaacatggtccaagacaattcctgggaaagttcagttcttctcaagtgagggttctgacacatctgtaccaattccagtagtgccactacggggtgtggacgactcctacccgccccagaagaagtccttcatgatgctcaagtacatgcacgaccactacttggacaagtatgaatggtttatgagagcagatgatgacgtgtacatcaaaggagaccgtctggagaacttcctgaggagtttgaacagcagcgagcccctctttcttgggcagacaggcctgggcaccacggaagaaatgggaaaactggccctggagcctggtgagaacttctgcatgggggggcctggcgtgatcatgagccgggaggtgcttcggagaatggtgccgcacattggcaagtgtctccgggagatgtacaccacccatgaggacgtggaggtgggaaggtgtgtccggaggtttgcaggggtgcagtgtgtctggtcttatgagatgcagcagcttttttatgagaattacgagcagaacaaaaaggggtacattagagatctccataacagtaaaattcaccaagctatcacattacaccccaacaaaaacccaccctaccagtacaggctccacagctacatgctgagccgcaagatatccgagctccgccatcgcacaatacagctgcaccgcgaaattgtcctgatgagcaaatacagcaacacagaaattcataaagaggacctccagctgggaatccctccctccttcatgaggtttcagccccgccagcgagaggagattctggaatgggagtttctgactggaaaatacttgtattcggcagttgacggccagccccctcgaagaggaatggactccgcccagagggaagccttggacgacattgtcatgcaggtcatggagatgatcaatgccaacgccaagaccagagggcgcatcattgacttcaaagagatccagtacggctaccgccgggtgaaccccatgtatggggctgagtacatcctggacctgctgcttctgtacaaaaagcacaaagggaagaaaatgacggtccctgtgaggaggcacgcgtatttacagcagactttcagcaaaatccagtttgtggagcatgaggagctggatgcacaagagttggccaagagaatcaatcaggaatctggatccttgtcctttctctcaaactccctgaagaagctcgtcccctttcagctccctgggtcgaagagtgagcacaaagaacccaaagataaaaagataaacatactgattcctttgtctgggcgtttcgacatgtttgtgagatttatgggaaactttgagaagacgtgtcttatccccaatcagaacgtcaagctcgtggttctgcttttcaattctgactccaaccctgacaaggccaaacaagttgaactgatgagagattaccgcattaagtaccctaaagccgacatgcagattttgcctgtgtctggagagttttcaagagccctggccctggaagtaggatcctcccagtttaacaatgaatctttgctcttcttctgcgacgtcgacctcgtctttactacagaattccttcagcgatgtcgagcaaatacagttctgggccaacaaatatattttccaatcatcttcagccagtatgacccaaagattgtttatagtgggaaagttcccagtgacaaccattttgcctttactcagaaaactggcttctggagaaactatgggtttggcatcacgtgtatttataagggagatcttgtccgagtgggtggctttgatgtttccatccaaggctgggggctggaggatgtggaccttttcaacaaggttgtccaggcaggtttgaagacgtttaggagccaggaagtaggagtagtccacgtccaccatcctgtcttttgtgatcccaatcttgaccccaaacagtacaaaatgtgcttggggtccaaagcatcgacctatgggtccacacagcagctggctgagatgtggctggaaaaaaatgatccaagttacagtaaaagcagcaataataatggctcagtgaggacagcctaatgtccagctttgctggaaaagacgtttttaattatctaatttatttttcaaaaattttttgtatgatcagtttttgaagtccgtatacaaggatatattttacaagtggttttcttacataggactcctttaagattgagctttctgaacaagaaggtgatcagtgtttgcctttgaacacatcttcttgctgaacattatgtagcagacctgcttaactttgacttgaaatgtacctgatgaacaaaacttttttaaaaaaatgttttcttttgagaccctttgctccagtcctatggcagaaaacgtgaacattcctgcaaagtattattgtaacaaaacactgtaactctggtaaatgttctgttgtgattgttaacattccacagattctaccttttgtgttttgtttttttttttttacaattgttttaaagccatttcatgttccagttgtaagataaggaaatgtgataatagctgtttcatcattgtcttcaggagagctttccagagttgatcatttcccctcatggtactctgctcagcatggccacgtaggttttttgttgttttgttttgttctttttttgagacggagtctcactctgttacccaggctggaatgcagtggcgcaatcttggctcactttaacctccacttccctggttcaagcaattcccctgcctttgcctcccgagtagctgggattacaggcacacaccaccacgcccagctagtttttttgtatttttagtagagacggggtttcaccatgcaagcccagctggccacgtaggttttaaagcaaggggcgtgaagaaggcacagtgaggtatgtggctgttctcgtggtagttcattcggcctaaatagacctggcattaaatttcaagaaggatttggcattttctcttcttgacccttctctttaaagggtaaaatattaatgtttagaatgacaaagatgaattattacaataaatctgatgtacacagactgaaacacacacacatacaccctaatcaaaacgttggggaaaaatgtatttggttttgttcctttcatcctgtctgtgttatgtgggtggagatggttttcattctttcattactgttttgttttatcctttgtatctgaaatacctttaatttatttaatatctgttgttcagagctctgccatttcttgagtacctgttagttagtattatttatgtgtatcgggagtgtgtttagtctgttttatttgcagtaaaccgatctccaaagatttccttttggaaacgctttttcccctccttaatttttatattccttactgttttactaaatattaagtgttctttgacaattttggtgctcatgtgttttggggacaaaagtgaaatgaatctgtcattataccagaaagttaaattctcagatcaaatgtgccttaataaatttgttttcatttagatttcaaacagtgatagacttgccattttaatacacgtcattggagggctgcgtatttgtaaatagcctgaagcaacanaaaaaataataattattttatatattatatttttataaat

SEQ ID NO: 386103 - DNA, 2714 bp, Homo sapiens
agagtggtgccctccgtgtactctcttggaggatgaacttggactgctgctccatcacactgtacttcctaacatggtccaagacaattcctgggaaagttcagttcttctcaagtgagggttctgacacatctgtaccaattccagtagtgccactacggggtgtggacgactcctacccgccccagaagaagtccttcatgatgctcaagtacatgcacgaccactacttggacaagtatgaatggtttatgagagcagatgatgacgtgtacatcaaaggagaccgtctggagaacttcctgaggagtttgaacagcagcgagcccctctttcttgggcagacaggcctgggcaccacggaagaaatgggaaaactggccctggagcctggtgagaacttctgcatgggggggcctggcgtgatcatgagccgggaggtgcttcggagaatggtgccgcacattggcaagtgtctccgggagatgtacaccacccatgaggacgtggaggtgggaaggtgtgtccggaggtttgcaggggtgcagtgtgtctggtcttatgagatgcagcagcttttttatgagaattacgagcagaacaaaaaggggtacattagagatctccataacagtaaaattcaccaagctatcacattacaccccaacaaaaacccaccctaccagtacaggctccacagctacatgctgagccgcaagatatccgagctccgccatcgcacaatacagctgcaccgcgaaattgtcctgatgagcaaatacagcaacacagaaattcataaagaggacctccagctgggaatccctccctccttcatgaggtttcagccccgccagcgagaggagattctggaatgggagtttctgactggaaaatacttgtattcggcagttgacggccagccccctcgaagaggaatggactccgcccagagggaagccttggacgacattgtcatgcaggtcatggagatgatcaatgccaacgccaagaccagagggcgcatcattgacttcaaagagatccaacagcagctggctgagatgtggctggaaaaaaatgatccaagttacagtaaaagcagcaataataatggctcagtgaggacagcctaatgtccagctttgctggaaaagacgtttttaattatctaatttatttttcaaaaattttttgtatgatcagtttttgaagtccgtatacaaggatatattttacaagtggttttcttacataggactcctttaagattgagctttctgaacaagaaggtgatcagtgtttgcctttgaacacatcttcttgctgaacattatgtagcagacctgcttaactttgacttgaaatgtacctgatgaacaaaacttttttaaaaaaatgttttcttttgagaccctttgctccagtcctatggcagaaaacgtgaacattcctgcaaagtattattgtaacaaaacactgtaactctggtaaatgttctgttgtgattgttaacattccacagattctaccttttgtgttttgtttttttttttttacaattgttttaaagccatttcatgttccagttgtaagataaggaaatgtgataatagctgtttcatcattgtcttcaggagagctttccagagttgatcatttcccctcatggtactctgctcagcatggccacgtaggttttttgttgttttgttttgttctttttttgagacggagtctcactctgttacccaggctggaatgcagtggcgcaatcttggctcactttaacctccacttccctggttcaagcaattcccctgcctttgcctcccgagtagctgggattacaggcacacaccaccacgcccagctagtttttttgtatttttagtagagacggggtttcaccatgcaagcccagctggccacgtaggttttaaagcaaggggcgtgaagaaggcacagtgaggtatgtggctgttctcgtggtagttcattcggcctaaatagacctggcattaaatttcaagaaggatttggcattttctcttcttgacccttctctttaaagggtaaaatattaatgtttagaatgacaaagatgaattattacaataaatctgatgtacacagactgaaacacacacacatacaccctaatcaaaacgttggggaaaaatgtatttggttttgttcctttcatcctgtctgtgttatgtgggtggagatggttttcattctttcattactgttttgttttatcctttgtatctgaaatacctttaatttatttaatatctgttgttcagagctctgccatttcttgagtacctgttagttagtattatttatgtgtatcgggagtgtgtttagtctgttttatttgcagtaaaccgatctccaaagatttccttttggaaacgctttttcccctccttaatttttatattccttactgttttactaaatattaagtgttctttgacaattttggtgctcatgtgttttggggacaaaagtgaaatgaatctgtcattataccagaaagttaaattctcagatcaaatgtgccttaataaatttgttttcatttagatttcaaacagtgatagacttgccattttaatacacgtcattggagggctgcgtatttgtaaatagcctgatgctcatttggaaaaataaaccagtgaacaatatttttctattgt

SEQ ID NO: 386104 - DNA, 288 bp, Homo sapiens
caggcctgggcaccacggaagaaatgggaaaactggccctggagcctggtgagaacttctgcatgggggggcctggcgtgatcatgagccgggaggtgcttcggagaatggtgccgcacattggcaagtgtctccgggagatgtacaccacccatgaggacgtggaggtgggaaggtgtgtccggaggtttgcaggggtgcagtgtgtctggtcttatgaggtaagaacagaattctttaccatgggaaaaacttaattttgtcaattttgtcattagttctgagcgt

SEQ ID NO: 386105 - DNA, 412 bp, Homo sapiens
gtttggtactttactcctagtttaagtcatctctttcggcccatacaggttgcctggggcagggcggtggtgagtgtgttgagtcggccctataccctgttccacaatgcctggtgtccttggcacgtagcttgcagggctgcttccatggatggctgcctcatcccccacccctccttcatggcaccctcttttctccaactccttttcctctgctgagtcctaccttttcttgccagaccagggatttgccaattattctggatgggcacagggaaggggccctcagatcctgcagagggagcatctgaaagacaatgagaccctgtacacaaccaagctgagcctcctgtaagcacatcctctgggtgtcactatgcgaaaagactctttgtctgtttacattgcacaa

SEQ ID NO: 386106 - DNA, 516 bp, Homo sapiens
taaagatattgaattttgtgccattaattgttcagcatacctttttcataagtgaaatattttattcctgcttttgctcgacttaaaaataaatgactgggttccattttgtctttccctcccaaatttcctttaggcatataccaagtatgtgtggaaatgtcgactcaaatagaatattttggaaataagttatctacaattgtacaaagcaggccagagtagcattctcttcctatacttactgatgatgttactattgcaatagtatcaataatctccattaaggagatttaaacaaaccaaaaattctcttctgaaaaatttcacttgatttcttcaattctgtacagtccacgaattcactcgtacaagaaaacatcaccaaagccaatgggtttgtaaaatccacttgttgaaactatgtgtgtgtcagcagaaggagggttgggaaggggttgcttttcttagaaaacaataaattaatcaaataatacataatcatttcactaagta

SEQ ID NO: 386107 - DNA, 2231 bp, Homo sapiens
  misc_feature (728)..(728): n is a, c, g, or t
  misc_feature (847)..(847): n is a, c, g, or t
  misc_feature (862)..(862): n is a, c, g, or t
  misc_feature (1622)..(1622): n is a, c, g, or t
  misc_feature (1707)..(1707): n is a, c, g, or t
  misc_feature (1746)..(1746): n is a, c, g, or t
  misc_feature (1773)..(1773): n is a, c, g, or t
  misc_feature (1776)..(1776): n is a, c, g, or t
  misc_feature (1789)..(1789): n is a, c, g, or t
  misc_feature (1795)..(1795): n is a, c, g, or t
  misc_feature (1803)..(1804): n is a, c, g, or t
  misc_feature (1819)..(1819): n is a, c, g, or t
gccttggctggccatgtgcacctcattccatgccattccaacagttgctgtgctcccaggcttatataagaagaaccagttttcccacttcatgattttgcagcttaatgggatggatatggaagagaataacttagcttctagacaggcacaatcgcagacgtacacagaggctggaagacggtgcacaccattgagatacgtgtctcatccagcccgccacatgcagccggaaccaggccaccgcctgggtgtcccttgtgtcctgtcctcctacctcttctctctggtccccacattccttccagagtttctcatacatggattgctcccaggctcccttccattgggggccagaggttctcacagagcacagagaaggggaccattcgcccctgggaccatcaggggaatgatctagaagtcaagcaaatgttctagcccttcagggtcttcaagggagattacgggggaagaaggctgaggtagagagcagggcctctatacatttaagctcatagagatacagagcatatgaagatatgggaattcagaagagttccgtccaacagaaatgtaatattgtaaagtaacagcagcagcagcagcagcagcagcagcagcacttgaatatgataccaacaaacaggaagtgtcaggaagacgccttgcagaactgtcagcctgtggagttgtttccccaagagagtttggagttagaaagagantgtcctcttcctgtcacatgtgacactgggactactcactctcatcaagagaaacatgacacttctcacaggggtgtagactagccccccacgataatcatgcaatagccctaacatcnattcatgcactgggntgttcgtgaattaatattaaataatattacagaatggacagcaagggaattcaattccttcttatatcaccctgagagtggagcctacaaatcctcctgagtctttgaggttctctattcctgttatccttgaacaagaaaatgtgcacatgtacacacacacacacacacacacacacacaccactaatttccctgaaaacacaagaatgagcaataatagatatgcacagacaaaatgaagtgatggggattttatttaccttctaccctgaaacaatcaaaacacagacaaaatatgtgatataatgttttcaagtcactggacatcaaacaatgaagggcagtgaaccctctgagatagcaaatgaacaataatgaggcctccaattgctcagtctgtcttccttgatagtgtttccaggctcctgttcagagaagggggaacccaggcagagctcagtggagtccctgagttggagagacacaactgagagtatagagaaatcccagaggcaggagctcacaggacagaattccagcaaggagagtactgcacaggaagaatgaccaggaggcatacagagggtgcagagggtcaccactgagggttccagtgagtacttatgatcacatgaaaacctcccaagtttggggaaggaactactcaaaaagactggaagtaactggagctgaccaaggcctgagaacagtgcctgtttctattagccagactgaagaacttcatgattcacaggacntttggtttgaatacacagagagccttcccttaatcagtggggaataagtagaaatagactcagcattgttatggtcctacctagnaaatcttaaaagccagactcaaaaggatcaatctatttncagtaacttaattgcatcccagaatanagntcaataatattgnaaggantacagcanntttcagcacccaacnccaggcattcagggaagcagaagaatataaccctcaatggagagatccaataagcacagagaaccttaagtataggaagatgtgaagaaaattacacgaaagcacatactaaccaaattggctaaaaccaatgactaagagaacatcttaaaagcagtcatacaaaaaagacaaaaggaaaagacagacaaaataaagaggagggaagataagggtgacagcagatttctcagaagaaacaatgcaagtgagaagccattggagctgcattttaaaagtactgaaagaaaaaaattgccaatcttgaattctgttcccagtgaaaatatttttcaaaaacaaagatgaataaagacttttttcagattggaaaagcaattccatcaagtgaatatattataatttttctatt

SEQ ID NO: 386108 - DNA, 362 bp, Homo sapiens
atacaagtggaagtaaaaaggtggagatagattaatagcctaaataacgagagaaccttatgccttttttaaaacaaaacaaaaccattgagacattttacttagtcctaaaatctagcctggatttatgctataatgatatctatttttcatgttaaattgtacattactcagaaattataaatattattactttataatttgaaattgtgtttgctagccaccttgatgtattttcttccaaactcccattaagatactattgaaaaaatagaaatagtcaaatatttgcaaggtataattgttaggcaacatattatagcatgtgttaagtttctgctaggcctatggaaatttttttt

SEQ ID NO: 386109 - DNA, 1174 bp, Homo sapiens
gcacagagttgggagtgactccagagcctcctgcaagatgctgttgattctgctgtcagtggccttgctggccctgagctcagctcagaacttaaatgaagatgtcagccaggaagaatctccctccctaatagcaggaaatccacaaggaccatccccacaaggaggcaacaagccccaaggccccccacctcctccaggaaagccacaaggaccacccccacaaggaggcaacaaacctcaaggtcccccacctccaggaaagccacaaggaccacccccacaaggggacaagtcccgaagtccccgatctcctccaggaaaaccacaaggaccacccccacaaggaggtaaccagccccaaggtcccccacctcctccaggaaagccacaaggaccacccccacaaggaggcaacaaacctcagggtcccccacctccaggaaagccacaaggaccacccccacaaggagacaagtcccaaagtccccgatctcctccaggaaagccacaaggaccacccccacaaggaggtaaccagccccaaggtcccccacctcctccaggaaagccacaaggaccaccccaacaaggaggcaacagacctcaaggtcccccacctccaggaaagccacaaggaccacccccacaaggagacaagtcccgaagtccccaatctcctccaggaaagccacaaggaccacccccacaaggaggcaaccagcctcaaggtcccccacctcctccaggaaagccacaaggaccacccccacaaggaggcaacaaacctcaaggtcccccacctccaggaaagccacaaggaccacccgcacaaggaggcagcaagtcccaaagtgcccgagctcctccaggaaagccacaaggaccaccccaacaagaaggcaacaatcctcaaggtcccccacctccagcaggaggcaatccccagcagcctcaggcacctcctgctggacagccccagggaccaccacgccctcctcaagggggcagaccttccagacctccccagtgacagcctccccagtcatctaggattcaatgacaggaagtgaataagaagatgagagtgattcaaatgattcaaattccatgacattggaaaaaggtcatcatagctctaacttcaatataccaataaaataatcagcttgca

SEQ ID NO: 386110 - DNA, 775 bp, Homo sapiens
gcacagagttgggagtgactccagagcctcctgcaagatgctgttgattctgctgtcagtggccttgctggccctgagctcagctcagaacttaaatgaagatgtcagccaggaagaatctccctccctaatagcaggaaatccacaaggaccatccccacaaggaggcaacaagccccaaggccccccacctcctccaggaaagccacaaggaccacccccacaaggaggcaacaaacctcaaggtcccccacctccaggaaagccacaaggaccacccccacaaggggacaagtcccgaagtccccgatctcctccaggaaaaccacaaggaccacccccacaaggaggaaagccacaaggaccacccccacaaggaggcaacaaacctcaaggtcccccacctccaggaaagccacaaggaccacccgcacaaggaggcagcaagtcccaaagtgcccgagctcctccaggaaagccacaaggaccaccccaacaagaaggcaacaatcctcaaggtcccccacctccagcaggaggcaatccccagcagcctcaggcacctcctgctggacagccccagggaccaccacgccctcctcaagggggcagaccttccagacctccccagtgacagcctccccagtcatctaggattcaatgacaggaagtgaataagaagatgagagtgattcaaatgattcaaattccatgacattggaaaaaggtcatcatagctctaacttcaatataccaataaaataatcagcttgca

SEQ ID NO: 386111 - DNA, 715 bp, Homo sapiens
gcacagagttgggagtgactccagagcctcctgcaagatgctgttgattctgctgtcagtggccttgctggccctgagctcagctcagaacttaaatgaagatgtcagccaggaagaatctccctccctaatagcaggaaatccacaaggaccatccccacaaggaggcaacaagccccaaggccccccacctcctccaggaaagccacaaggaccacccccacaaggaggcaacaaacctcaaggtcccccacctccaggaaagccacaaggaccacccccacaaggggacaagtcccgaagtccccgatctcctccaggaaaaccacaaggaccacccccacaaggaggaaagccacaaggaccacccgcacaaggaggcagcaagtcccaaagtgcccgagctcctccaggaaagccacaaggaccaccccaacaagaaggcaacaatcctcaaggtcccccacctccagcaggaggcaatccccagcagcctcaggcacctcctgctggacagccccagggaccaccacgccctcctcaagggggcagaccttccagacctccccagtgacagcctccccagtcatctaggattcaatgacaggaagtgaataagaagatgagagtgattcaaatgattcaaattccatgacattggaaaaaggtcatcatagctctaacttcaatataccaataaaataatcagcttgca

SEQ ID NO: 386112 - DNA, 359 bp, Homo sapiens
gtgcttcacatgtgtcagacactattgggtatcaacaaattcatgaccaaatagataatttcttaatttaattttttcagagacagggtcttactatgttgccctggctggagtgcggtggcgcggtcatagctcattgcagcctccaacacctgggctgaagcgatcctcttgcctcaggctcccgagtacctgagactgcaggtgcatcccaccacgcctggctaccaaatagatattgaatgccttgttaatacaaggtattagcattgtggagggtagagagaagtgtcagatgtagagcttaaaacctttttgggaaggtgggctgggcacagtggctcacacttgtaatccca

SEQ ID NO: 386113 - DNA, 2942 bp, Homo sapiens
  misc_feature (262)..(262): n is a, c, g, or t
agccagtggcgctgcgctgactgcaactgcgcgcgcccgccgggtgagccagcgatctgagccaggcgggggcggcccgacctttcccgcccagcctgggtcagaggaagccgaaagcggcctcagcaaggtgaggcgcccgaggctgcagaagaccgagcagaactttgcagagttcgggatgtgctgggctaggtcgctgaggacttgactggcttcctccctccttccctccacctaccttctccctccccctccaccntccagtgggttcgttccgggcctccagctatcagctcccgatctcgtgtttgagggtagcgaccccgatttctgtttgcatgcacagccagcagccctagcgccagatcctaaagctggatatcttttaactgggctaccagcccgggcctcaaagttttgagtgagggccgccaggctcaggccccagcgaagccccgagcgccatggccgacccgcaggctggctccgcggccggggactgggagatcgatgtcgagagcctggagctggaagaggacgtctgcggggcgccgcggtccacgccccccgggcccagcccgccgccggcggacggggactgcgaggacgacgaagatgacgacggggtggacgaagacgcggaagaagagggcgacggcgaggaggcaggcgcgtcccccgggatgcccggccagccggagcagcgggggggaccgcagccgaggccgccgctcgcgcctcaggcctcacccgccggcaccggtccccgagagcgctgcactcccgcgggcggcggcgcggagccgcgcaagctgagccgcacgcccaagtgcgcgcgctgccgcaaccacggcgtggtgtcctgcctgaagggccacaagcgcttctgtcgctggcgcgactgccagtgcgccaactgcctgctggtggtggagcggcagcgcgtcatggccgcccaggtggcgctccggaggcagcaggccaccgaggacaagaaggggctttccgggaaacagaataatttcgagcgcaaagctgtgtaccagaggcaagtcagagcccccagtttgctggccaaaagcattttagaagttctccttggattattctacagctattatgtgtacataatgaaccatctttagaaaataaaagtgacatcagctctaggtatagatatattttttaataatgaaaaaagatgacatggataataataaaacattgattgatacaagataaatagtcttgtctcttaatgcgtagggggcctgggaagaatattaaaattttaatcaataaagtatgtctgttgaagcaagcaagcaaacaaatccataacaaccacaacaagcaacaagaacaagaacaacaacaagaagaagttgcagtatggatatctttcaccctcccaggaaactctttcaaacctaatctgtacttttgcatctgtataaaaatatcagtgagatggaactgtaaataattgttctgctgatctgtagtgttgctgttaccttctgggtttccacatttttattccgtagatgttaatctctttcatgtgcaatctttgcttcttgtaggctatcgccccattccagcggagacttatgtaggagggaccttccctctacctcccccagttagtgacaggatgaggaaaagaagagcctttgctgataaagagttggagaacattatgctggagagagaatataaagaaagggagatgttggaaacttctcaagctgctgctctgtttctgcccaaccgcatggtgcctggacctgactacaattcctacaaaagtgcctacagccccagcccagtggaaccaccaagcaaggacttctgtaattttttgcccacctgccttgatttaaccatgcagtattcagggtctgggaatatggaactaatttcttctaatgtcagcgtggccacaacttatagacagtatcccttgtcctcaagatttttagtttggcccaagtgtggccccattagcgacaccctcctctaccagcaatgcctgctaaatgccaccacctcagttcaagccctgaagcctggggccagctgggacttgaagggagcacgagtccaggatggactcagtgcagagcaggacatgatgccatcgaaattggaaggttccctggtgctgcctcacactcctgagatccagaccacgagaagtgaccttcagggtcatcaggctgtcccagagaggtccgcgttctccccaccccgacggaatttctctcccattgttgacacggactccctggcagctcaagggcatgtcttaacgaagatcagcaaagaaaacaccaggcaccctctgccacttagacataatccattccactcattattccagcaaacacttactgacaaatcgggtcctgagttgaaaacaccatttgtcaaagaggcctttgaagagacccctaagaaacacagagagtgtttagttaaggacaaccagaagtacacatttacaatagatagatgtgcaaaagacctttttgtagccaaacaagttggaacaaaactctcggtgaatgaaccactgtcattttctgttgagtctattcttaagaggccttcatctgccatcactcgtgtctctcagtgaaaggctgcttaaacagaaagctggattttctgcagtcttagagcattatagccatttgctactttttttaaaagttaagatgtttgtgtaaagaaatttctaatgtaaagatgatgattttgaaaaattttatatattcctaatatgcatgtactttttcttatcacatatatttaaacttacagatggaaattgcccaatgtgcaaattgttaagtaccacactttacacagcatttcaaaaagcaataaaattgacactgtcttctcaaagacccaataaatgccgaagcaaa

SEQ ID NO: 386114 - DNA, 2526 bp, Homo sapiens
  misc_feature (262)..(262): n is a, c, g, or t
agccagtggcgctgcgctgactgcaactgcgcgcgcccgccgggtgagccagcgatctgagccaggcgggggcggcccgacctttcccgcccagcctgggtcagaggaagccgaaagcggcctcagcaaggtgaggcgcccgaggctgcagaagaccgagcagaactttgcagagttcgggatgtgctgggctaggtcgctgaggacttgactggcttcctccctccttccctccacctaccttctccctccccctccaccntccagtgggttcgttccgggcctccagctatcagctcccgatctcgtgtttgagggtagcgaccccgatttctgtttgcatgcacagccagcagccctagcgccagatcctaaagctggatatcttttaactgggctaccagcccgggcctcaaagttttgagtgagggccgccaggctcaggccccagcgaagccccgagcgccatggccgacccgcaggctggctccgcggccggggactgggagatcgatgtcgagagcctggagctggaagaggacgtctgcggggcgccgcggtccacgccccccgggcccagcccgccgccggcggacggggactgcgaggacgacgaagatgacgacggggtggacgaagacgcggaagaagagggcgacggcgaggaggcaggcgcgtcccccgggatgcccggccagccggagcagcgggggggaccgcagccgaggccgccgctcgcgcctcaggcctcacccgccggcaccggtccccgagagcgctgcactcccgcgggcggcggcgcggagccgcgcaagctgagccgcacgcccaagtgcgcgcgctgccgcaaccacggcgtggtgtcctgcctgaagggccacaagcgcttctgtcgctggcgcgactgccagtgcgccaactgcctgctggtggtggagcggcagcgcgtcatggccgcccaggtggcgctccggaggcagcaggccaccgaggacaagaaggggctttccgggaaacagaataatttcgagcgcaaagctgtgtaccagaggcaagtcagagcccccagtttgctggccaaaagcattttagaagttctccttggattattctacagctattatgtgtacataatgaaccatctttagaaaataaaagtgacatcagctctaggctatcgccccattccagcggagacttatgtaggagggaccttccctctacctcccccagttagtgacaggatgaggaaaagaagagcctttgctgataaagagttggagaacattatgctggagagagaatataaagaaagggagatgttggaaacttctcaagctgctgctctgtttctgcccaaccgcatggtgcctggacctgactacaattcctacaaaagtgcctacagccccagcccagtggaaccaccaagcaaggacttctgtaattttttgcccacctgccttgatttaaccatgcagtattcagggtctgggaatatggaactaatttcttctaatgtcagcgtggccacaacttatagacagtatcccttgtcctcaagatttttagtttggcccaagtgtggccccattagcgacaccctcctctaccagcaatgcctgctaaatgccaccacctcagttcaagccctgaagcctggggccagctgggacttgaagggagcacgagtccaggatggactcagtgcagagcaggacatgatgccatcgaaattggaaggttccctggtgctgcctcacactcctgagatccagaccacgagaagtgaccttcagggtcatcaggctgtcccagagaggtccgcgttctccccaccccgacggaatttctctcccattgttgacacggactccctggcagctcaagggcatgtcttaacgaagatcagcaaagaaaacaccaggcaccctctgccacttagacataatccattccactcattattccagcaaacacttactgacaaatcgggtcctgagttgaaaacaccatttgtcaaagaggcctttgaagagacccctaagaaacacagagagtgtttagttaaggacaaccagaagtacacatttacaatagatagatgtgcaaaagacctttttgtagccaaacaagttggaacaaaactctcggtgaatgaaccactgtcattttctgttgagtctattcttaagaggccttcatctgccatcactcgtgtctctcagtgaaaggctgcttaaacagaaagctggattttctgcagtcttagagcattatagccatttgctactttttttaaaagttaagatgtttgtgtaaagaaatttctaatgtaaagatgatgattttgaaaaattttatatattcctaatatgcatgtactttttcttatcacatatatttaaacttacagatggaaattgcccaatgtgcaaattgttaagtaccacactttacacagcatttcaaaaagcaataaaattgacactgtcttctcaaagacccaataaatgccgaagcaaa

SEQ ID NO: 386115 - DNA, 1258 bp, Homo sapiens
  misc_feature (262)..(262): n is a, c, g, or t
agccagtggcgctgcgctgactgcaactgcgcgcgcccgccgggtgagccagcgatctgagccaggcgggggcggcccgacctttcccgcccagcctgggtcagaggaagccgaaagcggcctcagcaaggtgaggcgcccgaggctgcagaagaccgagcagaactttgcagagttcgggatgtgctgggctaggtcgctgaggacttgactggcttcctccctccttccctccacctaccttctccctccccctccaccntccagtgggttcgttccgggcctccagctatcagctcccgatctcgtgtttgagggtagcgaccccgatttctgtttgcatgcacagccagcagccctagcgccagatcctaaagctggatatcttttaactgggctaccagcccgggcctcaaagttttgagtgagggccgccaggctcaggccccagcgaagccccgagcgccatggccgacccgcaggctggctccgcggccggggactgggagatcgatgtcgagagcctggagctggaagaggacgtctgcggggcgccgcggtccacgccccccgggcccagcccgccgccggcggacggggactgcgaggacgacgaagatgacgacggggtggacgaagacgcggaagaagagggcgacggcgaggaggcaggcgcgtcccccgggatgcccggccagccggagcagcgggggggaccgcagccgaggccgccgctcgcgcctcaggcctcacccgccggcaccggtccccgagagcgctgcactcccgcgggcggcggcgcggagccgcgcaagctgagccgcacgcccaagtgcgcgcgctgccgcaaccacggcgtggtgtcctgcctgaagggccacaagcgcttctgtcgctggcgcgactgccagtgcgccaactgcctgctggtggtggagcggcagcgcgtcatggccgcccaggtggcgctccggaggcagcaggccaccgaggacaagaaggggctttccgggaaacagaataatttcgagcgcaaagctgtgtaccagaggcaagtcagagcccccagtttgctggccaaaagcattttagaagttctccttggattattctacagctattatgtgtacataatgaaccatctttagaaaataaaagtgacatcagctctaggtatagatatattttttaataatgaaaaaagatgacatggataataataaaacattgattgatcccgaattccgccgatactgac

SEQ ID NO: 386116 - DNA, 2805 bp, Homo sapiens
agccagtggcgctgcgctgactgcaactgcgcgcgcccgccgggtgagccagcgatctgagccaggcgggggcggcccgacctttcccgcccagcctgggtcagaggaagccgaaagcggcctcagcaagtgggttcgttccgggcctccagctatcagctcccgatctcgtgtttgagggtagcgaccccgatttctgtttgcatgcacagccagcagccctagcgccagatcctaaagctggatatcttttaactgggctaccagcccgggcctcaaagttttgagtgagggccgccaggctcaggccccagcgaagccccgagcgccatggccgacccgcaggctggctccgcggccggggactgggagatcgatgtcgagagcctggagctggaagaggacgtctgcggggcgccgcggtccacgccccccgggcccagcccgccgccggcggacggggactgcgaggacgacgaagatgacgacggggtggacgaagacgcggaagaagagggcgacggcgaggaggcaggcgcgtcccccgggatgcccggccagccggagcagcgggggggaccgcagccgaggccgccgctcgcgcctcaggcctcacccgccggcaccggtccccgagagcgctgcactcccgcgggcggcggcgcggagccgcgcaagctgagccgcacgcccaagtgcgcgcgctgccgcaaccacggcgtggtgtcctgcctgaagggccacaagcgcttctgtcgctggcgcgactgccagtgcgccaactgcctgctggtggtggagcggcagcgcgtcatggccgcccaggtggcgctccggaggcagcaggccaccgaggacaagaaggggctttccgggaaacagaataatttcgagcgcaaagctgtgtaccagaggcaagtcagagcccccagtttgctggccaaaagcattttagaagttctccttggattattctacagctattatgtgtacataatgaaccatctttagaaaataaaagtgacatcagctctaggtatagatatattttttaataatgaaaaaagatgacatggataataataaaacattgattgatacaagataaatagtcttgtctcttaatgcgtagggggcctgggaagaatattaaaattttaatcaataaagtatgtctgttgaagcaagcaagcaaacaaatccataacaaccacaacaagcaacaagaacaagaacaacaacaagaagaagttgcagtatggatatctttcaccctcccaggaaactctttcaaacctaatctgtacttttgcatctgtataaaaatatcagtgagatggaactgtaaataattgttctgctgatctgtagtgttgctgttaccttctgggtttccacatttttattccgtagatgttaatctctttcatgtgcaatctttgcttcttgtaggctatcgccccattccagcggagacttatgtaggagggaccttccctctacctcccccagttagtgacaggatgaggaaaagaagagcctttgctgataaagagttggagaacattatgctggagagagaatataaagaaagggagatgttggaaacttctcaagctgctgctctgtttctgcccaaccgcatggtgcctggacctgactacaattcctacaaaagtgcctacagccccagcccagtggaaccaccaagcaaggacttctgtaattttttgcccacctgccttgatttaaccatgcagtattcagggtctgggaatatggaactaatttcttctaatgtcagcgtggccacaacttatagacagtatcccttgtcctcaagatttttagtttggcccaagtgtggccccattagcgacaccctcctctaccagcaatgcctgctaaatgccaccacctcagttcaagccctgaagcctggggccagctgggacttgaagggagcacgagtccaggatggactcagtgcagagcaggacatgatgccatcgaaattggaaggttccctggtgctgcctcacactcctgagatccagaccacgagaagtgaccttcagggtcatcaggctgtcccagagaggtccgcgttctccccaccccgacggaatttctctcccattgttgacacggactccctggcagctcaagggcatgtcttaacgaagatcagcaaagaaaacaccaggcaccctctgccacttagacataatccattccactcattattccagcaaacacttactgacaaatcgggtcctgagttgaaaacaccatttgtcaaagaggcctttgaagagacccctaagaaacacagagagtgtttagttaaggacaaccagaagtacacatttacaatagatagatgtgcaaaagacctttttgtagccaaacaagttggaacaaaactctcggtgaatgaaccactgtcattttctgttgagtctattcttaagaggccttcatctgccatcactcgtgtctctcagtgaaaggctgcttaaacagaaagctggattttctgcagtcttagagcattatagccatttgctactttttttaaaagttaagatgtttgtgtaaagaaatttctaatgtaaagatgatgattttgaaaaattttatatattcctaatatgcatgtactttttcttatcacatatatttaaacttacagatggaaattgcccaatgtgcaaattgttaagtaccacactttacacagcatttcaaaaagcaataaaattgacactgtcttctcaaagacccaataaatgccgaagcaaa

SEQ ID NO: 386117 - DNA, 2448 bp, Homo sapiens
  misc_feature (262)..(262): n is a, c, g, or t
agccagtggcgctgcgctgactgcaactgcgcgcgcccgccgggtgagccagcgatctgagccaggcgggggcggcccgacctttcccgcccagcctgggtcagaggaagccgaaagcggcctcagcaaggtgaggcgcccgaggctgcagaagaccgagcagaactttgcagagttcgggatgtgctgggctaggtcgctgaggacttgactggcttcctccctccttccctccacctaccttctccctccccctccaccntccagtgggttcgttccgggcctccagctatcagctcccgatctcgtgtttgagggtagcgaccccgatttctgtttgcatgcacagccagcagccctagcgccagatcctaaagctggatatcttttaactgggctaccagcccgggcctcaaagttttgagtgagggccgccaggctcaggccccagcgaagccccgagcgccatggccgacccgcaggctggctccgcggccggggactgggagatcgatgtcgagagcctggagctggaagaggacgtctgcggggcgccgcggtccacgccccccgggcccagcccgccgccggcggacggggactgcgaggacgacgaagatgacgacggggtggacgaagacgcggaagaagagggcgacggcgaggaggcaggcgcgtcccccgggatgcccggccagccggagcagcgggggggaccgcagccgaggccgccgctcgcgcctcaggcctcacccgccggcaccggtccccgagagcgctgcactcccgcgggcggcggcgcggagccgcgcaagctgagccgcacgcccaagtgcgcgcgctgccgcaaccacggcgtggtgtcctgcctgaagggccacaagcgcttctgtcgctggcgcgactgccagtgcgccaactgcctgctggtggtggagcggcagcgcgtcatggccgcccaggtggcgctccggaggcagcaggccaccgaggacaagaaggggctttccgggaaacagaataatttcgagcgcaaagctgtgtaccagaggcaagtcagagcccccagtttgctggccaaaagcattttagaaggctatcgccccattccagcggagacttatgtaggagggaccttccctctacctcccccagttagtgacaggatgaggaaaagaagagcctttgctgataaagagttggagaacattatgctggagagagaatataaagaaagggagatgttggaaacttctcaagctgctgctctgtttctgcccaaccgcatggtgcctggacctgactacaattcctacaaaagtgcctacagccccagcccagtggaaccaccaagcaaggacttctgtaattttttgcccacctgccttgatttaaccatgcagtattcagggtctgggaatatggaactaatttcttctaatgtcagcgtggccacaacttatagacagtatcccttgtcctcaagatttttagtttggcccaagtgtggccccattagcgacaccctcctctaccagcaatgcctgctaaatgccaccacctcagttcaagccctgaagcctggggccagctgggacttgaagggagcacgagtccaggatggactcagtgcagagcaggacatgatgccatcgaaattggaaggttccctggtgctgcctcacactcctgagatccagaccacgagaagtgaccttcagggtcatcaggctgtcccagagaggtccgcgttctccccaccccgacggaatttctctcccattgttgacacggactccctggcagctcaagggcatgtcttaacgaagatcagcaaagaaaacaccaggcaccctctgccacttagacataatccattccactcattattccagcaaacacttactgacaaatcgggtcctgagttgaaaacaccatttgtcaaagaggcctttgaagagacccctaagaaacacagagagtgtttagttaaggacaaccagaagtacacatttacaatagatagatgtgcaaaagacctttttgtagccaaacaagttggaacaaaactctcggtgaatgaaccactgtcattttctgttgagtctattcttaagaggccttcatctgccatcactcgtgtctctcagtgaaaggctgcttaaacagaaagctggattttctgcagtcttagagcattatagccatttgctactttttttaaaagttaagatgtttgtgtaaagaaatttctaatgtaaagatgatgattttgaaaaattttatatattcctaatatgcatgtactttttcttatcacatatatttaaacttacagatggaaattgcccaatgtgcaaattgttaagtaccacactttacacagcatttcaaaaagcaataaaattgacactgtcttctcaaagacccaataaatgccgaagcaaa

SEQ ID NO: 386118 - DNA, 381 bp, Homo sapiens
cttctcaactccttttcctttctccttgttggtaagtatgtaccctaaacacagattccattactgtcaacgtaatgtgttttcaggagagagtggaggtaagctaaaggtcatctactctgtataatcagaactgaataatatgattgtggtaaatgaaaaataaagagatggtaaaaggcttcagattgtcataatgattctattttgcatgtcagctctgaggttcagtcgaaatacttggtgtgtataatgtctgcagaagcgtagcagtaactcatacttggtgttctttggttggtggcagatcatgctgcaatcagttggactgaaagttaaatttggaaaagttatttaaactcttctgttgcaatgcaggtt

SEQ ID NO: 386119 - DNA, 136 bp, Homo sapiens
tattcctgaaaatgtgttgtagccttcaaagttaggaatatatagtctgcaatcgtaccatgaaaacctcccaaaatgtaaggtcttaagtgtacaaagcaaatataaattcttttaaaaataaaactattttatt

SEQ ID NO: 386120 - DNA, 251 bp, Homo sapiens
tccctaaatagatcagaattatttatgtagaaggtcttatgaaaaatatttaggaaattcaggtttggaatttctgcattctatgaatttctacatatgaaatcagaaacttaatttttctgaaatacagacactaattccatataggcaaggtttgtatgtttgtaaaaaataagagaaatcacatcacgtttgaaaattgccttggccacctgaaaaagagcaggcttggccgggcacgatggctcaga

SEQ ID NO: 386121 - DNA, 598 bp, Homo sapiens
aaggaatgcatgaagtccacccagcacccactccagttgtgtccctccatcctcccagactcccccctgcccctgcactcccagccatgccccctgtgtgggcctctggtcctctcaccctctacctttgctggagaacatacaggactcacgtcttttcctcccacgggacagaaactcctttcgcgcttcctatcaggccctgcctacagcaggtatacactgcggggtttctcagtgaacagagcataccaatttgcacccgccacaggacagtggcttgttccctgcagacaacttactctttcagcctccaggcgtttgctcctccagcccagagggatggggcagcaatgagcatttgagccgccctagaagcaggaggcaggaggcaggaagatatctggatagttcaggaaagagatgaggaaaaaggaaaaaggcataggaaaaagatttgggagctagggttgagccagcccctttctctgggcagcagcagactatggctgtcctgagtgggcacacgcaaggctctggggctcaccccgtaccctcttcacctatacccctcccctgatccatctgtagccaccca

SEQ ID NO: 386122 - DNA, 309 bp, Homo sapiens
gagcgggggggcgggccgcagctgtcagagccgcggcggcgaacgaggcgcagcgagctgagcggtggcagcgccgcagccggggccggagcgcaggagccgacggggcccgaccaggatggtgcagtggcggctccgcggcgcacgcacgcgctgagcgggcccagcctgggccccgagccccccgtgccccccgccgccccgatccgggccggcatgatgtgcctggaatgcgcctcggcggcggcgggcggcgcggaggaggaggaggcggacgcggagcggcggcgccggcgccaggggggcgca

SEQ ID NO: 386123 - DNA, 2904 bp, Homo sapiens
tcttttttaacttaaattttattacttatacagaattcttatttatactttaattataggtgtgacgaagagaaagagagtagggaaatacacaggcagtggttttaagtgtagatgatggctccttaacccagtgtcattagataatcaaacctaaagtcttcccatattaggcaagcgcaattctctattttggacccttcccattcttcccttaccttctgcttttcgtactgaggaatttcgtgtgattttagataaagtgataatgagatattgagcaaataagaaaatagaggtaatgctataaaaaactaagctatgtacactttcaaaatgcatgtttcttgcatgctttttactacttaattgcattctttgctaatttcctttccttgctgtctgttcttttctaacagctgaagaatgttctgctgactctgacctcaactttcttattcctgttgcagtgggtgtggccttgggcttccttataattgttgtctttatctcttatatgattggaagaaggaaaagtcgtactggttatcagtctgtgtaatcagttaaatctagtgtttgtttgtttttttcaattagaagttacgtttccattggctaaaagccaggacatgctgtgcaatagattgtttaagatatgcagactaacttcagtgagttcctagctaacttgggcatgagtacacttatttaagacaaaatatattaggaccaatttttttctgttttttttcttcctttgttaaagtataattaaaagaaaaattgtggcttagaattttttaagtaaataatgattttaagcccctggatccaattatgaaagcatttttgctgatgtgtaattttatatgttacagttacttatattttactactttgatgttatttgcaaaatcaaaggtgttaaagaatttaacttgcttcaggaaataaattcaagaacatagtggattcattttcattggtggcagacacgaaatttggttcatgataagacttcctttccccacctcctgatcagcattatttaaatctgtatttttctgttagttaagaaagaaatggcttcatgatattgtatttaatagcaaaagtttggctgtcttcttcattactgttaatagctactatattttaacaaggagatttctttttttgttgttgttgttctagagtttggaatatactgattatctcagacttgacatttatactgaaggatgaagtaagacctccagctttttttaaaaaaggtgttgatttggaacacctgtatgggttatggtttattaaggttatggtttagaaagtttttttccctcagagccttaacttgttaagaaggttcatttatcctgcactgaaaacaaaaactctatatactttgtttgtgtgcctcctgcactctcccattccctatgtgaatatgctctagttgatatttttaatatattgatttcttttttctcacagcaacaagtgcttactctagaggttagtgggccctgatatgtcatcagtcagatgcctgcctagccaaagctggactaagattattctgtacatttgttgatcttgatatagacttatatccctgtagggactgctaatggctccggcttctggagtaaggtactggagaccactcatccctgtgtctgcttgattggttcagctgttgaattgcccttttatttggaagcagtgttgaagttgtctagggttcaaatggctgctttgtacacctgtcattagtataaggcagatgtttattttatcaagctattttatctctacatttaactaaaaacaaaagttcccaaagatctgccttcacttcagaaattttttttggattaaaaaaattaagcctgaaccttaaataaagtgagttggttattcattccaaggattaagtcccaatctacctctcagcacaatgcagaagctcaccactgtattgctgccattaactcatgccagaaccctttgccaataactggaattacaaatttttgttaaagaaaatttatcaagatctttctttactgccttctctatatgtacatctcaaaaacatgtacatctcaaaaactggagtagaaagttagattgctcaactacaactcctctagaactctatagctctgacatacagattcacactctcctctatttgctaagtatgtaaagaatgttttcttttaaaatgttctcttttgagaacaactgcttatttgttataaaagcatttggttaaaatgatgtcatcataaagaacagtggctttgtttcaatacatatttttgagatgattatctagaagccagattaataaaatcagcttgtgaccttgctaagcatataaactggaaattcagatacattcaaaattatgggttcatttaaaagtgttctaccttttgggtatgagactaatatcactaattcctcaatagttatcatggctctatcttaattaattagaaaatatgtgtgtttaattctttgagaattaaaatagagaatattaacagagggttaaaaactgcttcaactccaataagataaaggaagctcaaaatctatgagctgagtgttcaattagctttgcctactgagttcaattttatgtcaatacaacagtggatcagacagtacgactttgaactggtgaatgtaaacaattgtttttcacctaagctgctttggaagaactgatgcttgctgctaactaaagttttggatgtatcgatttagagaaccaattaatacctgcaaaataaagcatactgtggtacttctgtttgatctagtatgtgtgattttagattgatggattaaaaattaataaagatcatacattccataaaaaaaaaa

SEQ ID NO: 386124 - DNA, 2850 bp, Homo sapiens
tcttttttaacttaaattttattacttatacagaattcttatttatactttaattataggtgtgacgaagagaaagagagtagggaaatacacaggcagtggttttaagtgtagatgatggctccttaacccagtgtcattagataatcaaacctaaagtcttcccatattaggcaagcgcaattctctattttggacccttcccattcttcccttaccttctgcttttcgtactgaggaatttcgtgtgattttagataaagtgataatgagatattgagcaaataagaaaatagaggtaatgctataaaaaactaagctatgtacactttcaaaatgcatgtttcttgcatgctttttactacttaattgcattctttgctaatttcctttccttgctgtctgttcttttctaacagctgaagaatgttctgctgactctgacctcaactttcttattcctgttgcagtgggtgtggccttgggcttccttataattgttgtctttatctcttatatgattggaagaaggaaaagtcgtactggttatcagtctgtgtaatcagttaaatctagtgtttgtttgtttttttcaattagaagttacgtttccattggctaaaagccaggacatgctgtgcaatagattgtttaagatatgcagactaacttcagtgagttcctagctaacttgggcatgagtacacttatttaagacaaaatatattaggaccaatttttttctgttttttttcttcctttgttaaagtataattaaaagaaaaattgtggcttagaattttttaagtaaataatgattttaagcccctggatccaattatgaaagcatttttgctgatgtgtaattttatatgttacagttacttatattttactactttgatgttatttgcaaaatcaaaggtgttaaagaatttaacttgcttcaggaaataaattcaagaacatagtggattcattttcattggtggcagacacgaaatttggttcatgataagacttcctttccccacctcctgatcagcattatttaaatctgtatttttctgttagttaagaaagaaatggcttcatgatattgtatttaatagcaaaagtttggctgtcttcttcattactgttaatagctactatattttaacaaggagatttctttttttgttgttgttgttctagagtttggaatatactgattatctcagacttgacatttatactgaaggatgaagtaagacctccagctttttttaaaaaaggtgttgatttggaacacctgtatgggttatggtttattaaggttatggtttagaaagtttttttccctcagagccttaacttgttaagaaggttcatttatcctgcactgtatgtgaatatgctctagttgatatttttaatatattgatttcttttttctcacagcaacaagtgcttactctagaggttagtgggccctgatatgtcatcagtcagatgcctgcctagccaaagctggactaagattattctgtacatttgttgatcttgatatagacttatatccctgtagggactgctaatggctccggcttctggagtaaggtactggagaccactcatccctgtgtctgcttgattggttcagctgttgaattgcccttttatttggaagcagtgttgaagttgtctagggttcaaatggctgctttgtacacctgtcattagtataaggcagatgtttattttatcaagctattttatctctacatttaactaaaaacaaaagttcccaaagatctgccttcacttcagaaattttttttggattaaaaaaattaagcctgaaccttaaataaagtgagttggttattcattccaaggattaagtcccaatctacctctcagcacaatgcagaagctcaccactgtattgctgccattaactcatgccagaaccctttgccaataactggaattacaaatttttgttaaagaaaatttatcaagatctttctttactgccttctctatatgtacatctcaaaaacatgtacatctcaaaaactggagtagaaagttagattgctcaactacaactcctctagaactctatagctctgacatacagattcacactctcctctatttgctaagtatgtaaagaatgttttcttttaaaatgttctcttttgagaacaactgcttatttgttataaaagcatttggttaaaatgatgtcatcataaagaacagtggctttgtttcaatacatatttttgagatgattatctagaagccagattaataaaatcagcttgtgaccttgctaagcatataaactggaaattcagatacattcaaaattatgggttcatttaaaagtgttctaccttttgggtatgagactaatatcactaattcctcaatagttatcatggctctatcttaattaattagaaaatatgtgtgtttaattctttgagaattaaaatagagaatattaacagagggttaaaaactgcttcaactccaataagataaaggaagctcaaaatctatgagctgagtgttcaattagctttgcctactgagttcaattttatgtcaatacaacagtggatcagacagtacgactttgaactggtgaatgtaaacaattgtttttcacctaagctgctttggaagaactgatgcttgctgctaactaaagttttggatgtatcgatttagagaaccaattaatacctgcaaaataaagcatactgtggtacttctgtttgatctagtatgtgtgattttagattgatggattaaaaattaataaagatcatacattccataaaaaaaaaa

SEQ ID NO: 386125 - DNA, 363 bp, Homo sapiens
aggactggaatgctattgcctgcatggctaactccctctctttcttcaagtcttcattctgatgttactttttccatgaagcctgtgctgaccaccctatttaaaatgtcaattttccttcttttccaaatagtcacttcctgtcccccttgccttgctttgttttttctggggcaccgatcacttactgtataatttagttattcattgatcagttagtcttagtctacattagaatataagctctttaaggacaggaattttttgctgttttattcacttctgtatcccaagcacctataatagcacgtggtaggtagtcaggaaattatttttaaatttataaataactgtctaatctat

SEQ ID NO: 386126 - DNA, 298 bp, Homo sapiens
atcgcggccgcgtcgacgccagctgtattaggagaactctacgattgaatagtttgcaaatattttctcccattctataggttgtctcttcactaggttgtttgtttcttttgctctgcagaaggtatttttgttgttgttgttgtttagttaaatataatcccatttgtctttttgtttttcttgcctatgcttttgaggtcttaaccataaaatctttgcatagacctttcctgtaattataatgctggctctttcctcccaggctctcatagcaatgttcccacagatatccaat

SEQ ID NO: 386127 - DNA, 225 bp, Homo sapiens
ctgtatcatctttattttgatcctttcgtcataggccattgaaaacttaatcataaaatggtacatgtatatctgaatttttaagactgactgaccaaggggactacagaatacccagtagaatcaaagtaattgtcatgttcctctgtattaatctagtctactttgggaccttgagttctcacctctcattcttttgctaacttcctctttaccctttagtta

SEQ ID NO: 386128 - DNA, 817 bp, Homo sapiens
gagggaaactactcatataaaagaagaggttatgtaactctccagaggaattggaagaaaaacagagagttctgttttgaatgggcatttttcttaagcaaatggaatttttttctctctcaatgtaaatgaattaaaacccaaacccactggtcacaaaaggctaattgaatataatcagccattttatctattggatagaaacaagcatatcctgaattatgttggaaatctctgctttagggtggaattttgtctgttctaactattccttgtagtgttaaaattccccttgagaagcaagtttaacatgtgtttgaagattgactctaagaggttgccatggttttctacaaatgttttacaaccagctaaaggcaaacgtaccctttgagcttttcaatcttttcttgaaatcactcagtcattacttcctagagcaaatgctgcttcaggacccagcccagtctaatagggagtggacttcagtgctagctctaagaaatattcagctactgcatctagctataggagcaatttaatagttcttccttctggggctcttttaaaactaatattcaagatcttgagactagcagaacattatatagctggaggttttcaccttttagaggagacttcaagggatttgctcactcttattctgccagcacttttagaaaagtatgatacttcatttcctgggcatcaagtagggtagctgtcaaaactgaaatcatctgccagggccagccatctctggatgagcatggcagattgtgctgctcatacagggcacggatttgatgtggcgtgg

SEQ ID NO: 386129 - DNA, 273 bp, Homo sapiens
gaaaacattcactcactcatttactcactcactcatctaacaaatacgtattgggtgcctgctgtgtacatagcactgaattttaatgtcagccaccatttcagatgtttagaaatgttttaatcacctgtctgaattttacactgcgcaccccacctccagtcctgaagtattgccacagaaggttgccaggaaattattattcattattctctaaacttacagaggctccaagcctgaaatttctcacacaccatgatggaaagatggcct

SEQ ID NO: 386130 - DNA, 636 bp, Homo sapiens
gcctgacgtattatacggctgaggaaagatcaagaatgtgagggaaacccatgcccttaacaaaaacttctcttctgaaagacaagagctcaccccaagaaaaaaaggactgggattgaacagagcaggaacacttggggtaaaggagaaaagctttagatacaagaaagaggtggccaatcccagaaagtacaggagcaaggactacacagaccgaccacagcaggggaaaggcctctccagctgtggagttcagaaagctactctgacccacaactgcccgtacgtagaacatcctgctgaaagaacaggaaaagatgctgatcacaccctgtacaaagatattgcggggagaaagtgaaccagataacctcccacagataatgaaagcacaccagaaaaacattcctccaggcagatgaaaactgtgtcctgatgtttctgagtgatctcaaaggaattagaaaaacgacagaaactactaaagaatggtataaattaaaaatgtttaaaaagctcaggttaaaagtgactagtcaacagaaaaatatgaagagagttgacaggactcaggaggaaataagaaaaaaaaaaccagatatttctgaaatgaaaatcaggaacacaagaatgaaa

SEQ ID NO: 386131 - DNA, 232 bp, Homo sapiens
aaactccaaagtcaaccattgtaagggaacatctgtatagggaagaaagggtatataagtgccgtaaagggggcactttttaaggcatttatacccttttctgggccccatctagggctagatttgactttgactctgggggaagccactgaagaccccatctaggggctgggtgcagtggctcacgactgtaattccagcagtttgggaggccaacgcaggcagattgctt

SEQ ID NO: 386132 - DNA, 751 bp, Homo sapiens
gttgtttgaagcagtcacaagcctgccagattgaagggtccatagacccttacctctcaatagaagagcatcgagaactgtggaaccatgttttacagctgcaacaatggtcacacggaaccccaggagacttgcaatcagaagcaccaaaggccagggtgtggcacagccaccctgcagaaggcaggagagttactccttggagacactgacccaggaggctctgaacttggagattccagtcggagttgaggacacagaacctagatggagagcaggtgaattaagtgaaaacctgctttctgaatagtcagatccctcccactcagccctccactcagttttgggaatgttgccaccaggattatgcccgttacccagaatgtcaaaggattcttctttggtgaaactgagaaaccaaagaaaaatgacctattaattggcataagaccaccaggtacccatctgataaacctacagtgaagtgatcctatgacaacctctggtcatccacactgagcttccagccagccgactggggccttaattagtgaaagagatggccctagacacctgagcagctggggaaagcctctgttgggaagacacaagcacgcaaacaaacaaaacagcaacaaacagaaaaaaggaactcagggaaagaagtacaatgcattagaaaaacaaagacaactcaaagaaaatgcaaaaaaacaaagaaatagccaatggtgagatgttaaaaagataa

SEQ ID NO: 386133 - DNA, 499 bp, Homo sapiens
tctctgatatttacactaagatgttcagtggggggaaaaatcagtcttaacgctcagagataaataaccacattcatgacaatgagattatgtaattgttttttattcacaaatattttctggcacacacattaattcacagaaagaaagaacagtagtcacgtgggcacaatatttaaccctttcagatactgaggtttatcaccgcttgatttcttagttggaaatgttgcagtttggtttcaggcaggatttccaggctatcacagcctgctccgatggcatgattattaggagctcatctgcatcactggtgaatttctttggtcacttctggacagtttttaaacataagtccatgcccttctttgttctgctgatgaggcacgtcataaaataaatgtccagcaatgtcttcccgtcttgttctcaggcctcaggctctcggactccttcccccaaccctgcccccatgttaactttctattgctgctgtaaa

SEQ ID NO: 386134 - DNA, 630 bp, Homo sapiens
ccgtcttcaacctatgcttccattttcaagaacaagacatcttttggctagatacacttctgtggccaggatcatggttgtcttcccatctaagtttggccagtgcatacacaggcctgtactggccaggatgataaatgtgaagattggactgcatttcatggctaggttctccacttggttattttctgtcctcccgtggttattttttctgttcttgtagaaaagagaacaaagcccgtttaacaactgcaaagcacacagtctgcagagaccttaaagattactggcaacaaaacatatttatgtctttaataaggaattgaaatttaccactcactaaaattttccttctcttttctttctctgttttctctttggaacttgttggtgttaggaggatcagtctggtctccaggatgttattttgatgtcttttgttttctgaggaagtattttacagtattttctgacagtgataaaattttgaggtaattctaaattcttgtgtacgtgctcaattttgaattacgtattacaatattttgtatggcttccaagtatctcaagtctgaaagagtatgtggcatataataaatgaaagtgagtgtgagagtttattgaaagggc

SEQ ID NO: 386135 - DNA, 709 bp, Homo sapiens
gtcactcggacttggaggatggtgaatgtggggattttattgagtaatggaggtgtctctcagagggatggatggggagctggaaaggagatggactggaagattatcttccccctggagtccagctgtccctcggccagtctcctctctgaccatccccagccgaacccctcccaacattcagacgcaccttctcttctctccttctctgcctcaccgccctgccgttcttctactcttctttttttctgctcatggagcttggggtttatatggacacacgataggggtgtggtgagccagagtgaccttggagaaggcaacatttgggcatgaaaacaggaaagcttgttcccatttagggccgtgggtttccaggcttgggggcggggcctttgctggggaaacgcccttctgcttcctgtccgtatcagcatgcatgtgatgtaatcatgtgcacagtttcagggagggaacccttttcctctactctcttaggttttgtattgagggcctgaaaattaaactgaaaaaaaaagacaacatagcgagagaaaaaaaccctcagatttaattacatatgtatgtgtgggagttcacaaagaagtgtgacccaaggaagcagttagaatttggggcttatgtatcatcttaacaggggaagggacacctctgggagaaatgacttcttagacgaaggggagaaggg

SEQ ID NO: 386136 - DNA, 306 bp, Homo sapiens
tttctatcttcttgcaaagattcagattcaccagcaattggtatagacattgaagtggagggaggcctgtaaataaacatttacgaactggagttgtgggggagcctcaaagtttacaatagttattgattggtgagcttagtaagccttagcatagactgcttggtaatgttacccctttgagagtgaaagtaacaaagatcagcaaataacgtataagcatcttttcaaaacttgaataaaattcataaaagaaaagggtttttttttttttttttaacataacaagaaaagggcattgtctcc

SEQ ID NO: 386137 - DNA, 947 bp, Homo sapiens
taaatttaatttttatttataattagcacacggtattgtacatattcatagggtacaatatgatggttcaatgcatgtatagatagtgtaatggaatccagccattctattactgggtatatccaaaggaaatgaaattggtaggtctagcagacatctgcacacccatgtttattgcagcacaattcacaataacccatatattgtataaacctaaatgcccatctaatgatgaatggattaagaaaatatcatacatatacacaatgaaatacgattcatctacaaaatagattgaaatcctgtcatttgcagcaacatgggtaaatctggaggacacgaaataagccaggcacaagaagacgaacactgtatcatctcactcatatgttgaatataacctgttacttcttaggcaataaataaatggagattttttttttttacttacagctttgatagagcatcgatgttgagccattgaaaaatctgatggagcagaaagtttaatactaaatctaacctctggcagatatttaggacaaaacacccagggttctcgagctactttggtctcatagtggaattatagagattattctacgttcttgaaaaagggatttcagatgtcattcttcctttctttgtctgacatagaaagttataagccaggtatggtggctcatgcctgtaatcccagcactttgggaggcagaggtcggcggatcacgaggtcaagagattgaggctatcctggccaacacggtgaaactccgtctccactaaaaatacaaaaattagctgggcgtggtggctagtgcctgtagtcccagctactcaggaggctgagacaggagaatctcttgaacctgggaggcagaggttgtagtgagctgaggtcaggccattgcactccgacctggtgacagagagagactccatctaaa

SEQ ID NO: 386138 - DNA, 278 bp, Homo sapiens
gagctggtaccgtcacgcccacagactcctgtgttggaaatgtggaaacgatggaatggctgggccctcataccaccatcttgctcagtcattggacagggacacccaaagaaaatcataaacttggtccaaaagctgagtagaccctgtaggagccaacagtggtaggctgccagctgagcacagccttgaagcagggcagtttttttttgtttgtttgtttgtttgagaccaagtctcgctctgtctcccaagctggagtgcagtggcacgatctc

SEQ ID NO: 386139 - DNA, 615 bp, Homo sapiens
cagcacattgggaggccaaggcaggcagatcacgaggttaggagttcgagaccagcctggccaacatggtgaaaccctgtctctactgaaaatacaaaaattagctgggcgtggtggtgggtacctgtaatccctgctacttgggatgctgaggcaggagaattgcttgaacccaggaggcagaggttgcagtgagccgagatcatgccattgcactccgactctgggcaacagagcaagactctgtctcgggggaaacaaaaaaaaagtgtgctttgtcaagagaagcaccagcagacctctaagaactgctctctaaggctgcggtagcaaattatctactattgcaggtgccttattggtagagggctctgaagagccaaaactgtatatgcaacacttgtaagataaaagggactttaataatcaagattttcttgaagatttgttagaaataatgtcttatttctggtaacctttccctttttgtatttataactctactaaccaaattacctatcaataaaccattactataatattttaaaacaacctatgtttatcaagcttactctctgagtgacagaatatactaaataaagaattttttaatga

SEQ ID NO: 386140 - DNA, 668 bp, Homo sapiens
cagcacattgggaggccaaggcaggcagatcacgaggttaggagttcgagaccagcctggccaacatggtgaaaccctgtctctactgaaaatacaaaaattagctgggcgtggtggtgggtacctgtaatccctgctacttgggatgctgaggcaggagaattgcttgaacccaggaggcagaggttgcagtgagccgagatcatgccattgcactccgactctgggcaacagagcaagactctgtctcgggggaaacaaaaaaaaagtgtgctttgtcaagagaagcaccagcagacctctaagaactgctctctaaggctgcggtagcaaattatctactattgcaggtgccttattggtagagggctctgaagagccaaaactgtatatgcaacacttgtaagataaaagggactttaataatcaagattttcttgaagatttgttagaaataatgtcttatttctggtaacctttccctttttgtatttataactctactaaccaaattacctatcaataaaccattactataatattttaaaacaacctatgtttatcaagcttactctctgagtgacagaatatactaaataaagaattttttaatgactttggctggaagcaaggttaatcctttaaaggaggaggacaggagaacttaa

SEQ ID NO: 386141 - DNA, 1253 bp, Homo sapiens
  misc_feature (820)..(821): n is a, c, g, or t
  misc_feature (835)..(835): n is a, c, g, or t
  misc_feature (855)..(855): n is a, c, g, or t
  misc_feature (903)..(903): n is a, c, g, or t
  misc_feature (1126)..(1126): n is a, c, g, or t
ggcacgagccacgttgtcttctttccttcaccaccacccaggagctcagagatctaagctgctttccatcttttctcccagccccaggacactgactctgtacaggatggggccgtcctcttgcctccttctcatcctaatcccccttctccagctgatcaacccggggagtactcagtgttccttagactccgttatggataagaagatcaaggatgttctcaacagtctagagtacagtccctctcctataagcaagaagctctcgtgtgctagtgtcaaaagccaaggcagaccgtcctcctgccctgctgggatggctgtcactggctgtgcttgtggctatggctgtggttcgtgggatgttcagctggaaaccacctgccactgccagtgcagtgtggtggactggaccactgcccgctgctgccacctgacctgacagggaggaggctgagaactcagttttgtgaccatgacagtaatgaaaccagggtcccaaccaagaaatctaactcaaacgtcccacttcatttgttccattcctgattcttgggtaataaagacaaactttgtacctctctgtgcttatgtcatctctgttattgtccccagcttggggctcccctatccagaaaatgttgtcagtgtcccagtggtgacatctcagtttgggaagtgggatgggaagttaggaaagatatgggaagaatgggaaaaacaaactgacactccaaacccccacttccctcatttttatttatttatttatttatttttttcttttttttcattttttttttttttattatactctaanntttagggtacatgngcacattgtgcaggttagtnacatatgtatacatgtgccatgctggtgcgctgcacccactaacgtgncatctagcattaggtatatctcccaatgctatccctcccccatcccccgaccccaccacagtccccagagtgtgatattccccttcctgtgtccacgtgatctcattgttcaattcccacctatgagtgagaatatgcggtgtttggttttttgttcttgcgatagtttactgagaatgatggtttccaatttcatccatgtccctacaaaggacatgaactnatcatttttatggctgcatagtattccatggtgtatatgtgccacattttcttaatccagtctatcattgttggacatttgggttggttccaagtctttgctattgtgaatagtgccgcaataaaca

SEQ ID NO: 386142 - DNA, 581 bp, Homo sapiens
ggcacgagccacgttgtcttctttccttcaccaccacccaggagctcagagatctaagctgctttccatcttttctcccagccccaggacactgactctgtacaggatggggccgtcctcttgcctccttctcatcctaatcccccttctccagctgatcaacccggggagtactcagtgttccttagactccgttatggataagaagatcaaggatgttctcaacagtctagagtacagtccctctcctataagcaagaagctctcgtgtgctagtgtcaaaagccaaggcagaccgtcctcctgccctgctgggatggctgtcactggctgtgcttgtggctatggctgtggttcgtgggatgttcagctggaaaccacctgccactgccagtgcagtgtggtggactggaccactgcccgctgctgccacctgacctgacagggaggaggctgagaactcagttttgtgaccatgacagtaatgaaaccagggtcccaaccaagaaatctaactcaaacgtcccacttcatttgttccattcctgattcttgggtaataaagacaaactttgtacctc

SEQ ID NO: 386143 - DNA, 829 bp, Homo sapiens
agcccaggcgcagcgggaatccaatcaacttcgagagcgtaggccccacctatcgtgggtcgagttgcttggcggtcgtggttccggaggttcctcgggatgtcggtggccttcgtaccggactggctgaggggcaaggcggaagtcaatcaagagactatccagcggctccttgaggagaatgaccagctgatccgctgtattgtggagtatcagaacaagggccgcgggaacgagtgcgtgcagtaccagcatgtgttacatagaaatctcatttatttggctaccattgcagatgccagtccaaccagcacttcaaaagcaatggaataatctttcaaaagcaatagaataatcttccatttggctgtcgtgaggagtaattgaatgtaatccatctcttacaaaatggagacagggtctttaccaactcaactggttaaaacatgaatgaaacctctgtggctctttcaaaacgtgaaaatgtgaagaaagctactaacttagctgtattctcatgtaaatattttttaaataattaagcaaatccctcaataagttgagcccaggtgtcctctttcctgaacttggagcatgtttggataacaaagacatcactgggatgttcaagtctactttttagtttcaacctgaagaggaaactcagtaggtgttgggcaggaattggtgagattcctgacttgataccttgctaaatggacatgtaactgtgtgctccttcctatcagtttgtaaatgtggtccccctgactgctgttttcagattgctttgaaataaagcttatttttctataaaataaaaaaaaga

SEQ ID NO: 386144 - DNA, 775 bp, Homo sapiens
agcccaggcgcagcgggaatccaatcaacttcgagagcgtaggccccacctatcgtgggtcgagttgcttggcggtcgtggttccggaggttcctcgggatgtcggtggccttcgtaccggactggctgaggggcaaggcggaagtcaatcaagagactatccagcggctccttgaggagaatgaccagctgatccgctgtattgtggagtatcagaacaagggccgcgggaacgagtgcgtgcagtaccagcatgtgttacatagaaatctcatttatttggctaccattgcagatgccagtccaaccagcacttcaaaagcaatggaataatctttcaaaagcaatagaataatcttccatttggctgtcgtgaggagtaattgaatgtaatccatctcttacaaaatggagacagggtctttaccaactcaactggttaaaacatgaatgaaacctctgtggctctttcaaaacgtgaaaattaagcaaatccctcaataagttgagcccaggtgtcctctttcctgaacttggagcatgtttggataacaaagacatcactgggatgttcaagtctactttttagtttcaacctgaagaggaaactcagtaggtgttgggcaggaattggtgagattcctgacttgataccttgctaaatggacatgtaactgtgtgctccttcctatcagtttgtaaatgtggtccccctgactgctgttttcagattgctttgaaataaagcttatttttctataaaataaaaaaaaga

SEQ ID NO: 386145 - DNA, 542 bp, Homo sapiens
tctctatgacctctctatgcaatggtgtggcactgccttttcaagagaaaagtaaaagctgtacatggcagtgaccagttctccttgcatttggaatgtaggtcaggatccatctgattgaccttgtgttcagaagcgcgtcagcaaatcctgtttctaggccctccactggtgtcttccctgctgcaaagagagggcttctcaaagctggggggcttgaggcaagaggtcatgtgtttgagcctgagatgtcagcaggcaagagaaggaaaggcagccttgctccttcaattatgcaaggtccatattccttctccatgtctttaccccagtgcacggccacagaagagcccagctgctgagctgatacaaggcatcctctgttgagccttcatctgacctcacttggcagacgtcagcagcagtaaacatggcttgaacatgttgtcactgagctgcatgatgattgttagagacgtaaaagagtttctgtcataaacagtgtacttgggtgatgaatagactctcaaaagaaaaaaaga

SEQ ID NO: 386146 - DNA, 457 bp, Homo sapiens
cctaatcaagcaaaactaaccaacacaatattttgtttaggagtatatactactaaaaaaggaggaggatataaacacaaaattcaggatggcagctacttcagggcaggaggcaaaattacagtctgggaaaataacatgatatggaaaacagcagtagaggtttctgccaccaatttggcaacacattggctgcctcccagatctaccaccctgaaatgaaaagaagcctttcgagatgcttattatctctgagtcaaacggaaaagaatcttatggacgccacctcagattttagaccagcagatatggggggacatcaatcacatagaggcacacctcattttaccgcactcaactcacagatgggtagttttgttttgtttttaacaaattaaaggttttgtggcaaccctgcatcaagcaagggtatcagtgccatttttccaacagcaaa

SEQ ID NO: 386147 - DNA, 720 bp, Homo sapiens
ctatttgatcaacctggagcaaggaaatatttgtctaatgctagtattaatatttttcaatagataggatacggagacttatctaggggtcacttttttacttgggtgctattctagtcccagatctatggttgaaaatgtttgtatgtacaattctagctcaatttagtaaaatagtgctttgtaggcctccatgcaacaaacctcagctctattgagaaggtattttcccctactcaccggctggttctctcactccgaagcaatggagtacataaaatagaaactacaggcctcagtgtacactgctgctaactcttaccattagcaacaacctacaacactttatttgtgtatattacatctcccaggatgtaacgtacttctgttagtgcttttactacttcttcctacccattttctaggtttctgccaccaatttggcaacacattggctgcctcccagatctaccaccctgaaatgaaaagaagcctttcgagatgcttattatctctgagtcaaacggaaaagaatcttatggacgccacctcagattttagaccagcagatatggggggacatcaatcacatagaggcacacctcattttaccgcactcaactcacagatgggtagttttgttttgtttttaacaaattaaaggttttgtggcaaccctgcatcaagcaagggtatcagtgccatttttccaacagcaaa

SEQ ID NO: 386148 - DNA, 388 bp, Homo sapiens
attgttggtaaatttaattcctagagaaaacatatggtgttaaatagaaaataatattgacatatatggtccctgtttcttttctcctggtgaggagaaaagatttctgtttgtactatttgcacattgcataattgtaaattttaccttgtaaagaattctgttcttcaggactgagaggggatctagaaatggaaatcatttggtactttgagaaacttttcttctagcttcttgataacataatttaccttcttcattttcacattattttagcacatttgattgttaatgaactattaatgactgtcttctttgctcttcctaccctcttaaaaggaactagttgggcagaagataaaagtgtcagcttgcatctctgggtatt

SEQ ID NO: 386149 - DNA, 847 bp, Homo sapiens
  misc_feature (702)..(702): n is a, c, g, or t
  misc_feature (755)..(755): n is a, c, g, or t
  misc_feature (803)..(803): n is a, c, g, or t
  misc_feature (822)..(822): n is a, c, g, or t
atcgcttctcggccttttggctaagatcaagtgtagtatctgttcttatcagtttaatatctgatacgtcctctatccgaggacaatatattaaatggatttttggaaataggagatggaataggagcttgctccgtccactccacgcatcgacctggtattgcagtacttccaggaacggtgcaccccaaagtacagtacgggtggctggcaagatggccgaataggaagagctccagtctacagctcccgcagagatcaacgcagaaggtgggtgatttctgcatttccagctgaggtatctggctcatctcatcgggactggttagacagggggtgcagcccatagagggcaagccaaggcagggtggggcattgtttcaccagggaagtgccagggattggggaactccctcccctagccaggggaagccaagaggaactgtgccctgaggaatggtgcactctagcctagatacgatgcttttcccatggtcttcacaacccacagacccggagatttcctcaggtgcctaccccaccagggccctgggtttcaagcacaaaacaggaagccatttgtgcagacaccaagttagctgcaggagtttttttcataccccagtggtgcctggaatgccagtggacagatctgtcattcccctggaaagggggctgaagccagggagcccagtggtctanctcaacggatcccaccactacagagcccagtaagctaacattcattggcttgnaattcttgctgctacatacagtctgaaatcgccctgggacccctaacntggtagggggaaggcgtcnccattctgagcttgaatactggttt

SEQ ID NO: 386150 - DNA, 472 bp, Homo sapiens
atcgcttctcggccttttggctaagatcaagtgtagtatctgttcttatcagtttaatatctgatacgtcctctatccgaggacaatatattaaatggatttttggaaataggagatggaataggagcttgctccgtccactccacgcatcgacctggtattgcagtacttccaggaacggtgcactctcccttcggggagagaacaaccgttgtttaatggaagatttcgatcagttagggtacaagctaaatagttatgttcttgttgtttgagttggattaggtgtttttatcgctagtgtgttgaatgacgcgtgtttgagtgtcttgttgagagaaggttttgttttataactgagcacggagcgtagtatctccatgtggtcttcagcaatcttcatacttcagcctctggggtagttggaactattgagcgcttgccaccacccccggctaatgttttccatttt

SEQ ID NO: 386151 - DNA, 442 bp, Homo sapiens
tattgacagagaaactagcttttttcatttctgcaagtatcagaacatttaaggtcatttagcaaacaaacaactgatacatgctgggaaccactttaatatttaggaatcaacgaccaccaaaccagaaatgccaaagaatcatggccgccaaaaactcagtagactacttcctgccatatggatggttgtgaccgcagtgtgtactcccaggctgaaatctaccacttctagtctattagacacagggacagctcttgaagttctactcagcatagtggatagcaaagttctgaaacaaaaactatctcaagatgtgataaaataaatacacataggggaagattctggcaagatgctgaaataggaagctccaggaatctgtttacccatccagacaacaactgcactggcagaatctgcctgatgtaactattttgga

SEQ ID NO: 386152 - DNA, 498 bp, Homo sapiens
aatttttatatttttagtagatacagagtttctccatgttggccagccaggctggtatcgaactcctgacctcaggtgatccacctacctcggcctcccaaagtgaccactgcgcccggcgcctttggttcttacatgagcctcctggagctgctgtgacaatgcaccacaaaccagggggcagggggaggcttgaaatttattctctcacaagtctggaggccagaagcccaacatgaagatgtggtggggccgtggtgcttctgaaggctctggcgggaggatcttctctgtctcttccagcttctgggggtggcctgccatagttggtgtcccttggcttggggccacatcactccaagctctgcctgcatcatcatgtggccttcttccctgtgtctctttctccttttttgtttttatttttattttttgagatggggtctcggtctgtcacctggctggagtgcagtggcaagatctcggctcactgcagtc

SEQ ID NO: 386153 - DNA, 582 bp, Homo sapiens
tggttcaagctattctcttgcctcagcctcccgagtagctgggactacaggtgtgcaccaccatgcctggctaatttttgtatttttagtagagagggggtttcaacatgttcgccaggatggtctcttaacacctgacctcaggtgatccacctgtctcagcctcctaaagtgctgggattagaggcgtgagccactgggcctggccggattttactttcttttctcctaagagagaacacccttgtgagctaggcagggcaagtggagcaatcgcaatttgcagatgagttaattgatgctcaagcaatgagatgacttctcagggcccttggcctgatcattaagggcagggtgggatgagatgacaggtgggcctctcttcttggacagctctctgctgacagctgccccagagctacatttgaggcctggtgtcttgctgtgttcaggcttcatatctgatgagagtacctccaagtatagccgggaaaactgcagctctgccttccctcttcatgcagctaccgtttcaggaagcgggaggctagggtggggttgaggctacattgtgctaccatg

SEQ ID NO: 386154 - DNA, 218 bp, Homo sapiens
tatgggcattttcaaatgtaaacaaaagtagaagccgacagtataatgaatacccatgaccctaccatcaagcttcaacagttagcaaacattcgccattctgcaaagagccatcctttggtatttgtgggggactggttccagggcccctctcagataccaaaatccatggatactcaagtatcttatataaaatggtatagcaggccgggtgcagt

SEQ ID NO: 386155 - DNA, 251 bp, Homo sapiens
ttttaattcacttcagtttaataaattactcgtatgtttggcagttttttagatgcacaggagataaaagtactagtttctgcttctaagaagcttacaaactatgagagaaatagacacaaggtttttgtttgtttgtttgttttccttcgttttattgtgaacatcaagaaagttgaaataattgtagagtgaacacccataaatctaccaccaagtttctatgacttctaatagcttgttgtatttgc

SEQ ID NO: 386156 - DNA, 456 bp, Homo sapiens
attcctctgagccccagtttcctcatctgtaacgtggatttcataaaaatcacttcttgtattgtaagcgttgaaagcatgaatatacatataatgtaaataatttctcattggataaatcacatgaaaagtactcaataaataaaacattattgtttgttaattcttgatttagagccatctgagtcttttctgtacccttgtagataccttggtcagctccatggagcagagctgagttgacagttttggtggtagtgaactgctaaggaatagaatgtttgatgaactaatatcccctattccatgagtcaacatatccattcctgcaatgttactgagggaaggccctgggctgtcatcactgtgacaatgctggtgcaataattcaatgaattctttctgcttgttgcacagacaaaacaaattcactgagatggtgacactgcagtaaaa

SEQ ID NO: 386157 - DNA, 563 bp, Homo sapiens
atttcatagtaggcaaaaattgaatataacccaaggtctaacaatagaaaattatgaaacatgttgtaggacaaatgccattcagccatgaaaatacatatttataaatactctttaataatataaaagtgtgagattgtatatgccatatgataccagttttacatgaatatacataaatgtgtttataaaaatgtgtatgtaggtccacaatttcagatcccaatcctttaggccagattcattttggaattcagagtttttcagatttttggaaaggtaacatgatgcatacactacgtattgtgtaaataacccagtggggcctggggttacaccattattccattatattaacatttctgcagcaaaacataagattattcactctaggataaacaagaagaataaattcatggttctgtcattgcctttcaccctccttctgggaattcctttgtctttctcctatcttattttgtttgctgaattcggtgtatttctcttttttggtttactttcatgttttggtagagcccattttctagtggcatcttcagaaa

SEQ ID NO: 386158 - DNA, 2905 bp, Homo sapiens
  misc_feature (28)..(28): n is a, c, g, or t
  misc_feature (33)..(35): n is a, c, g, or t
acaggcttgctggggatgaggtgacaangcgtnnncgaggtggcaattggggaaggggttctgggctgccgcaggcacacaggccagagcttcgtggatacctgcagggcccaaaggtccctccctgttttgaagagtgagtgatggctatgaggtagcggccaggctgatcacccctgcgttggctggaggcagaattctgtaaatcctcgccaagtctttctccaggccactggttagctcatctcagcctcctctgggagcatcaacaccaacatggcacaggggactgcagtggtgtgctttggacctgtgtacccacccaaggctaaaggcagagccagatggagaaggaaaggcaagtgacttgtccagagccactctgtcaaaaggggacttgagtcctcagggctgttgactccaaagctgacaagcaggagccaagttacaccctgtttaaccctgccttcaaagggacgactctgtaagattctctgctacttattcaagttgacacgatgcccttcacactccacctgaggtcccgccttccctctgccataaggagtttgattctacaaaagaaaccaaacatcagaaatacatccagcatggctggagagctccgaccagccagcctggtggtcctgcccaggtcccttgctccagcttttgaaagattctgccaggtcaacactggtcctctacccctgctgggccagagtgagccagaaaagtggatgctgccccctcaaggtgctatctcagagaccaggatgggccatccccagttctggaaatacgagttcggtgcctgcaccggcagcctggcttcgctggagcagtactcggagcagctgaaggacatggtggccttcttcctgggctgcagcttctccctggaggaggccttggagaaagcggggctccccagaagagacccagcaggtcacagccaggcgggtgctacaagacaacagtgccttgtgttacccatgctggcttctgctgccctctggtggtcacgatgaggcccattcccaaggacaagctggaagggctggtgcgggcctgctgctccctcggaggtgagcaggggcaacctgttcacatgggcgacccagaactgttgggaatcaaagagctttccaaacctgcctacggggatgccatggtgtgtcccccaggggaggttccagtgttctggccttctccgctgaccagtctcggagctgtcagcagctgtgagaccccactggcttttgccagcatcccaggctgcacagttatgactgacctgaaggatgcaaaggctccacctggttgtctcaccccagagagaattccagaggtccatcacatttcccaagatcctctgcactacagcatcgcgtcagtctctgcttctcagaagatcagagaactagagtctatgatcggcatagacccagggaaccgggggattgggcacctgctctgtaaagatgagctgctgaaggcctctctctcgctgtcccatgcccgctcagtgctcatcaccactgggttccccacacatttcaatcatgagcctccagaagagacagatggcccaccaggagctgttgctctggttgccttcctgcaggccttggagaaggaggtcgccataatcgttgaccagagagcctggaacttgcaccagaagattgttgaagatgctgttgagcaaggtgttctgaagacgcagatcccgatattaacttaccaaggtggatcagtggaagctgctcaggcattcctgtgcaaaaatggggacccgcagacacctagatttgaccacctggtggccatagagcgtgccggaagagctgctgatggcaattactacaatgcaaggaagatgaacatcaagcacttggttgaccccattgacgatctttttcttgctgcgaagaagattcctggaatctcatcaactggagtcggtgatggaggcaacgagcttgggatgggtaaagtcaaggaggctgtgaggaggcacatacggcacggggatgtcatcgcctgcgacgtggaggctgactttgccgtcattgctggtgtttctaactggggaggctatgccctggcctgcgcactctacatcctgtactcatgtgctgtccacagtcagtacctgaggaaagcagtcggaccctccagggcacctggagatcaggcctggactcaggccctcccgtcggtcattaaggaagaaaaaatgctgggcatcttggtgcagcacaaagtccggagtggcgtctcgggcatcgtgggcatggaggtggatgggctgcccttccacaacacccacgccgagatgatccagaagctggtggacgtcaccacggcacaggtgtaaccgtccatgttccgtgtgagcagagtccctaccaacgggcaggtctgcatccggggagaatgcagctgcttctggcgacaatcctgctagtaaacactggtcttcggtgagcaacgaacactcgcctggcctgggaaactgcatgcccactttctgggaggggttagtgcaggtgccgtggacaaaggacaacatttctctggggctttttaacttttattcctaagactctaaaggcgttgatttcaaccctccttcactctggcttcttcaggcaacccacgtggtctcctgtgagaatcttctcgacagttacttatggggacacttgtgaacaattaactgccaggcagagcatgagaacaaacattcccaggccatgtaggataggatactccagactccagtcatcctcccccatccatggtttctgttactcatggtttcagttactcatagccaactgcagaccgaaaatactaaatgaaaaatttcagaaataaacaactcttaagttttaaa

SEQ ID NO: 386159 - DNA, 993 bp, Homo sapiens
acgtgagctcaggctgtgggagcggatggagctgctacagtcagcgcttggggctggcctcagcttgtagacccgagccctgcagaacaaccccccgtggcgcaggagagcagaagaaagggggcctttatgcccttttgagggaagcacacattctgcaaggccgtggaaacaaagggaggaactgtttgtagccctcgtccagacgccccaaacaaacaatggagaaggaaaggcaagtgacttgtccagagccactctgtcaaaaggggacttgagtcctcagggctgttgactccaaagctgacaagcaggtggcattcttcttcagagcagggcaagtgtaattctggaccaatgtgtgattctgagaccagaccaaccaactgaaggagccaagttacaccctgtttaaccctgccttcaaagggacgactctgtaagattctctgctacttattcaagttgacacgatgcccttcacactccacctgaggtcccgccttccctctgccataaggagtttgattctacaaaagaaaccaaacatcagaaatacatccagcatggctggagagctccgaccagccagcctggtggtcctgcccaggtcccttgctccagcttttgaaagattctgccaggtcaacactggtcctctacccctgctgggccagagtgagccagaaaagtggatgctgccccctcaaggtgctatctcagagaccagcctcagggaccttcacagtgcctggcacagaacctcactcatgactgttgctcaggaacgagctgccctccccactgttctgactccttcccctatcacctggcgcctgtcctggctgagatctttgagatcatggagaaagtccagccctggagaaatcccactggctctgccatctgtccactccatcgcccaagccagaaacccgcctgtacaggattaagaagaaaataaaaaacacttgcattaccaacacccagaga

SEQ ID NO: 386160 - DNA, 2934 bp, Homo sapiens
acgtgagctcaggctgtgggagcggatggagctgctacagtcagcgcttggggctggcctcagcttgtagacccgagccctgcagaacaaccccccgtggcgcaggagagcagaagaaagggggcctttatgcccttttgagggaagcacacattctgcaaggccgtggaaacaaagggaggaactgtttgtagccctcgtccagacgccccaaacaaacagtaagtcagaagggaacagagcacagcacagtccctccctccgccccaggcagtatccaccttgccccgccccacctaaggagcccaagggtattctgggagcccaccccaggacaatggcagggcaaaaccagtgagcaaggcagaaaattcctgaaattctccactgaggcccagctgttcctctccttgaaaagtcaaggcttggttcaagccagatagcacctgaggacagaacatatcaggagccaagttacaccctgtttaaccctgccttcaaagggacgactctgtaagattctctgctacttattcaagttgacacgatgcccttcacactccacctgaggtcccgccttccctctgccataaggagtttgattctacaaaagaaaccaaacatcagaaatacatccagcatggctggagagctccgaccagccagcctggtggtcctgcccaggtcccttgctccagcttttgaaagattctgccaggtcaacactggtcctctacccctgctgggccagagtgagccagaaaagtggatgctgccccctcaaggtgctatctcagagaccaggatgggccatccccagttctggaaatacgagttcggtgcctgcaccggcagcctggcttcgctggagcagtactcggagcagctgaaggacatggtggccttcttcctgggctgcagcttctccctggaggaggccttggagaaagcggggctccccagaagagacccagcaggtcacagccaggcgggtgctacaagacaacagtgccttgtgttacccatgctggcttctgctgccctctggtggtcacgatgaggcccattcccaaggacaagctggaagggctggtgcgggcctgctgctccctcggaggtgagcaggggcaacctgttcacatgggcgacccagaactgttgggaatcaaagagctttccaaacctgcctacggggatgccatggtgtgtcccccaggggaggttccagtgttctggccttctccgctgaccagtctcggagctgtcagcagctgtgagaccccactggcttttgccagcatcccaggctgcacagttatgactgacctgaaggatgcaaaggctccacctggttgtctcaccccagagagaattccagaggtccatcacatttcccaagatcctctgcactacagcatcgcgtcagtctctgcttctcagaagatcagagaactagagtctatgatcggcatagacccagggaaccgggggattgggcacctgctctgtaaagatgagctgctgaaggcctctctctcgctgtcccatgcccgctcagtgctcatcaccactgggttccccacacatttcaatcatgagcctccagaagagacagatggcccaccaggagctgttgctctggttgccttcctgcaggccttggagaaggaggtcgccataatcgttgaccagagagcctggaacttgcaccagaagattgttgaagatgctgttgagcaaggtgttctgaagacgcagatcccgatattaacttaccaaggtggatcagtggaagctgctcaggcattcctgtgcaaaaatggggacccgcagacacctagatttgaccacctggtggccatagagcgtgccggaagagctgctgatggcaattactacaatgcaaggaagatgaacatcaagcacttggttgaccccattgacgatctttttcttgctgcgaagaagattcctggaatctcatcaactggagtcggtgatggaggcaacgagcttgggatgggtaaagtcaaggaggctgtgaggaggcacatacggcacggggatgtcatcgcctgcgacgtggaggctgactttgccgtcattgctggtgtttctaactggggaggctatgccctggcctgcgcactctacatcctgtactcatgtgctgtccacagtcagtacctgaggaaagcagtcggaccctccagggcacctggagatcaggcctggactcaggccctcccgtcggtcattaaggaagaaaaaatgctgggcatcttggtgcagcacaaagtccggagtggcgtctcgggcatcgtgggcatggaggtggatgggctgcccttccacaacacccacgccgagatgatccagaagctggtggacgtcaccacggcacaggtgtaaccgtccatgttccgtgtgagcagagtccctaccaacgggcaggtctgcatccggggagaatgcagctgcttctggcgacaatcctgctagtaaacactggtcttcggtgagcaacgaacactcgcctggcctgggaaactgcatgcccactttctgggaggggttagtgcaggtgccgtggacaaaggacaacatttctctggggctttttaacttttattcctaagactctaaaggcgttgatttcaaccctccttcactctggcttcttcaggcaacccacgtggtctcctgtgagaatcttctcgacagttacttatggggacacttgtgaacaattaactgccaggcagagcatgagaacaaacattcccaggccatgtaggataggatactccagactccagtcatcctcccccatccatggtttctgttactcatggtttcagttactcatagccaactgcagaccgaaaatactaaatgaaaaatttcagaaataaacaactcttaagttttaaa

SEQ ID NO: 386161 - DNA, 2689 bp, Homo sapiens
acgtgagctcaggctgtgggagcggatggagctgctacagtcagcgcttggggctggcctcagcttgtagacccgagccctgcagaacaaccccccgtggcgcaggagagcagaagaaagggggcctttatgcccttttgagggaagcacacattctgcaaggccgtggaaacaaagggaggaactgtttgtagccctcgtccagacgccccaaacaaacagagccaagttacaccctgtttaaccctgccttcaaagggacgactctgtaagattctctgctacttattcaagttgacacgatgcccttcacactccacctgaggtcccgccttccctctgccataaggagtttgattctacaaaagaaaccaaacatcagaaatacatccagcatggctggagagctccgaccagccagcctggtggtcctgcccaggtcccttgctccagcttttgaaagattctgccaggtcaacactggtcctctacccctgctgggccagagtgagccagaaaagtggatgctgccccctcaaggtgctatctcagagaccaggatgggccatccccagttctggaaatacgagttcggtgcctgcaccggcagcctggcttcgctggagcagtactcggagcagctgaaggacatggtggccttcttcctgggctgcagcttctccctggaggaggccttggagaaagcggggctccccagaagagacccagcaggtcacagccaggcgggtgctacaagacaacagtgccttgtgttacccatgctggcttctgctgccctctggtggtcacgatgaggcccattcccaaggacaagctggaagggctggtgcgggcctgctgctccctcggaggtgagcaggggcaacctgttcacatgggcgacccagaactgttgggaatcaaagagctttccaaacctgcctacggggatgccatggtgtgtcccccaggggaggttccagtgttctggccttctccgctgaccagtctcggagctgtcagcagctgtgagaccccactggcttttgccagcatcccaggctgcacagttatgactgacctgaaggatgcaaaggctccacctggttgtctcaccccagagagaattccagaggtccatcacatttcccaagatcctctgcactacagcatcgcgtcagtctctgcttctcagaagatcagagaactagagtctatgatcggcatagacccagggaaccgggggattgggcacctgctctgtaaagatgagctgctgaaggcctctctctcgctgtcccatgcccgctcagtgctcatcaccactgggttccccacacatttcaatcatgagcctccagaagagacagatggcccaccaggagctgttgctctggttgccttcctgcaggccttggagaaggaggtcgccataatcgttgaccagagagcctggaacttgcaccagaagattgttgaagatgctgttgagcaaggtgttctgaagacgcagatcccgatattaacttaccaaggtggatcagtggaagctgctcaggcattcctgtgcaaaaatggggacccgcagacacctagatttgaccacctggtggccatagagcgtgccggaagagctgctgatggcaattactacaatgcaaggaagatgaacatcaagcacttggttgaccccattgacgatctttttcttgctgcgaagaagattcctggaatctcatcaactggagtcggtgatggaggcaacgagcttgggatgggtaaagtcaaggaggctgtgaggaggcacatacggcacggggatgtcatcgcctgcgacgtggaggctgactttgccgtcattgctggtgtttctaactggggaggctatgccctggcctgcgcactctacatcctgtactcatgtgctgtccacagtcagtacctgaggaaagcagtcggaccctccagggcacctggagatcaggcctggactcaggccctcccgtcggtcattaaggaagaaaaaatgctgggcatcttggtgcagcacaaagtccggagtggcgtctcgggcatcgtgggcatggaggtggatgggctgcccttccacaacacccacgccgagatgatccagaagctggtggacgtcaccacggcacaggtgtaaccgtccatgttccgtgtgagcagagtccctaccaacgggcaggtctgcatccggggagaatgcagctgcttctggcgacaatcctgctagtaaacactggtcttcggtgagcaacgaacactcgcctggcctgggaaactgcatgcccactttctgggaggggttagtgcaggtgccgtggacaaaggacaacatttctctggggctttttaacttttattcctaagactctaaaggcgttgatttcaaccctccttcactctggcttcttcaggcaacccacgtggtctcctgtgagaatcttctcgacagttacttatggggacacttgtgaacaattaactgccaggcagagcatgagaacaaacattcccaggccatgtaggataggatactccagactccagtcatcctcccccatccatggtttctgttactcatggtttcagttactcatagccaactgcagaccgaaaatactaaatgaaaaatttcagaaataaacaactcttaagttttaaa

SEQ ID NO: 386162 - DNA, 2653 bp, Homo sapiens
acgtgagctcaggctgtgggagcggatggagctgctacagtcagcgcttggggctggcctcagcttgtagacccgagccctgcagaacaaccccccgtggcgcaggagagcagaagaaagggggcctttatgcccttttgagggaagcacacattctgcaaggccgtggaaacaaagggaggaactgtttgtagccctcgtccagacgccccaaacaaacagagccaagttacaccctgtttaaccctgccttcaaagggacgactctgtaagattctctgctacttattcaagttgacacgatgcccttcacactccacctgaggtcccgccttccctctgccataaggagtttgattctacaaaagaaaccaaacatcagaaatacatccagcatggctggagagctccgaccagccagcctggtggtcctgcccaggtcccttgctccagcttttgaaagattctgccaggtcaacactggtcctctacccctgctgggccagagtgagccagaaaagtggatgctgccccctcaaggtgctatctcagagaccaggatgggccatccccagttctggaaatacgagttcggtgcctgcaccggcagcctggcttcgctggagcagtactcggagcagctgaaggacatggtggccttcttcctgggctgcagcttctccctggaggaggccttggagaaagcggggctccccagaagagacccagcaggtcacagccaggcgggtgctacaagacaacagtgccttgtgttacccatgctggcttctgctgccctctggtggtcacgatgaggcccattcccaaggacaagctggaagggctggtgcgggcctgctgctccctcggagaactgttgggaatcaaagagctttccaaacctgcctacggggatgccatggtgtgtcccccaggggaggttccagtgttctggccttctccgctgaccagtctcggagctgtcagcagctgtgagaccccactggcttttgccagcatcccaggctgcacagttatgactgacctgaaggatgcaaaggctccacctggttgtctcaccccagagagaattccagaggtccatcacatttcccaagatcctctgcactacagcatcgcgtcagtctctgcttctcagaagatcagagaactagagtctatgatcggcatagacccagggaaccgggggattgggcacctgctctgtaaagatgagctgctgaaggcctctctctcgctgtcccatgcccgctcagtgctcatcaccactgggttccccacacatttcaatcatgagcctccagaagagacagatggcccaccaggagctgttgctctggttgccttcctgcaggccttggagaaggaggtcgccataatcgttgaccagagagcctggaacttgcaccagaagattgttgaagatgctgttgagcaaggtgttctgaagacgcagatcccgatattaacttaccaaggtggatcagtggaagctgctcaggcattcctgtgcaaaaatggggacccgcagacacctagatttgaccacctggtggccatagagcgtgccggaagagctgctgatggcaattactacaatgcaaggaagatgaacatcaagcacttggttgaccccattgacgatctttttcttgctgcgaagaagattcctggaatctcatcaactggagtcggtgatggaggcaacgagcttgggatgggtaaagtcaaggaggctgtgaggaggcacatacggcacggggatgtcatcgcctgcgacgtggaggctgactttgccgtcattgctggtgtttctaactggggaggctatgccctggcctgcgcactctacatcctgtactcatgtgctgtccacagtcagtacctgaggaaagcagtcggaccctccagggcacctggagatcaggcctggactcaggccctcccgtcggtcattaaggaagaaaaaatgctgggcatcttggtgcagcacaaagtccggagtggcgtctcgggcatcgtgggcatggaggtggatgggctgcccttccacaacacccacgccgagatgatccagaagctggtggacgtcaccacggcacaggtgtaaccgtccatgttccgtgtgagcagagtccctaccaacgggcaggtctgcatccggggagaatgcagctgcttctggcgacaatcctgctagtaaacactggtcttcggtgagcaacgaacactcgcctggcctgggaaactgcatgcccactttctgggaggggttagtgcaggtgccgtggacaaaggacaacatttctctggggctttttaacttttattcctaagactctaaaggcgttgatttcaaccctccttcactctggcttcttcaggcaacccacgtggtctcctgtgagaatcttctcgacagttacttatggggacacttgtgaacaattaactgccaggcagagcatgagaacaaacattcccaggccatgtaggataggatactccagactccagtcatcctcccccatccatggtttctgttactcatggtttcagttactcatagccaactgcagaccgaaaatactaaatgaaaaatttcagaaataaacaactcttaagttttaaa

SEQ ID NO: 386163 - DNA, 2741 bp, Homo sapiens
ggtgcctcctggccaaggagcccagcaccagccttttggagaagactctgcagctcccgaggaatggaaagctgttagggaagggaagggggacgttccaggccaagggaggggcacagggaagtttgcgttaggaatttctcatcagaaaaggagatgtgacgggggagaatggattccaaacaatgcccaccacaaggcaggcccaggaacagggccaggaaagggtaggatgtgatgtggtatgtgaagctatgtgaggctgaatctgctgccttcagggggccacactttctaatttgttccctttccttccctcacccagattctctgctacttattcaagttgacacgatgcccttcacactccacctgaggtcccgccttccctctgccataaggagtttgattctacaaaagaaaccaaacatcagaaatacatccagcatggctggagagctccgaccagccagcctggtggtcctgcccaggtcccttgctccagcttttgaaagattctgccaggtcaacactggtcctctacccctgctgggccagagtgagccagaaaagtggatgctgccccctcaaggtgctatctcagagaccaggatgggccatccccagttctggaaatacgagttcggtgcctgcaccggcagcctggcttcgctggagcagtactcggagcagctgaaggacatggtggccttcttcctgggctgcagcttctccctggaggaggccttggagaaagcggggctccccagaagagacccagcaggtcacagccaggcgggtgctacaagacaacagtgccttgtgttacccatgctggcttctgctgccctctggtggtcacgatgaggcccattcccaaggacaagctggaagggctggtgcgggcctgctgctccctcggaggtgagcaggggcaacctgttcacatgggcgacccagaactgttgggaatcaaagagctttccaaacctgcctacggggatgccatggtgtgtcccccaggggaggttccagtgttctggccttctccgctgaccagtctcggagctgtcagcagctgtgagaccccactggcttttgccagcatcccaggctgcacagttatgactgacctgaaggatgcaaaggctccacctggttgtctcaccccagagagaattccagaggtccatcacatttcccaagatcctctgcactacagcatcgcgtcagtctctgcttctcagaagatcagagaactagagtctatgatcggcatagacccagggaaccgggggattgggcacctgctctgtaaagatgagctgctgaaggcctctctctcgctgtcccatgcccgctcagtgctcatcaccactgggttccccacacatttcaatcatgagcctccagaagagacagatggcccaccaggagctgttgctctggttgccttcctgcaggccttggagaaggaggtcgccataatcgttgaccagagagcctggaacttgcaccagaagattgttgaagatgctgttgagcaaggtgttctgaagacgcagatcccgatattaacttaccaaggtggatcagtggaagctgctcaggcattcctgtgcaaaaatggggacccgcagacacctagatttgaccacctggtggccatagagcgtgccggaagagctgctgatggcaattactacaatgcaaggaagatgaacatcaagcacttggttgaccccattgacgatctttttcttgctgcgaagaagattcctggaatctcatcaactggagtcggtgatggaggcaacgagcttgggatgggtaaagtcaaggaggctgtgaggaggcacatacggcacggggatgtcatcgcctgcgacgtggaggctgactttgccgtcattgctggtgtttctaactggggaggctatgccctggcctgcgcactctacatcctgtactcatgtgctgtccacagtcagtacctgaggaaagcagtcggaccctccagggcacctggagatcaggcctggactcaggccctcccgtcggtcattaaggaagaaaaaatgctgggcatcttggtgcagcacaaagtccggagtggcgtctcgggcatcgtgggcatggaggtggatgggctgcccttccacaacacccacgccgagatgatccagaagctggtggacgtcaccacggcacaggtgtaaccgtccatgttccgtgtgagcagagtccctaccaacgggcaggtctgcatccggggagaatgcagctgcttctggcgacaatcctgctagtaaacactggtcttcggtgagcaacgaacactcgcctggcctgggaaactgcatgcccactttctgggaggggttagtgcaggtgccgtggacaaaggacaacatttctctggggctttttaacttttattcctaagactctaaaggcgttgatttcaaccctccttcactctggcttcttcaggcaacccacgtggtctcctgtgagaatcttctcgacagttacttatggggacacttgtgaacaattaactgccaggcagagcatgagaacaaacattcccaggccatgtaggataggatactccagactccagtcatcctcccccatccatggtttctgttactcatggtttcagttactcatagccaactgcagaccgaaaatactaaatgaaaaatttcagaaataaacaactcttaagttttaaa

SEQ ID NO: 386164 - DNA, 2637 bp, Homo sapiens
acgtgagctcaggctgtgggagcggatggagctgctacagtcagcgcttggggctggcctcagcttgtagacccgagccctgcagaacaaccccccgtggcgcaggagagcagaagaaagggggcctttatgcccttttgagggaagcacacattctgcaaggccgtggaaacaaagggaggaactgtttgtagccctcgtccagacgccccaaacaaacaattctctgctacttattcaagttgacacgatgcccttcacactccacctgaggtcccgccttccctctgccataaggagtttgattctacaaaagaaaccaaacatcagaaatacatccagcatggctggagagctccgaccagccagcctggtggtcctgcccaggtcccttgctccagcttttgaaagattctgccaggtcaacactggtcctctacccctgctgggccagagtgagccagaaaagtggatgctgccccctcaaggtgctatctcagagaccaggatgggccatccccagttctggaaatacgagttcggtgcctgcaccggcagcctggcttcgctggagcagtactcggagcagctgaaggacatggtggccttcttcctgggctgcagcttctccctggaggaggccttggagaaagcggggctccccagaagagacccagcaggtcacagccaggcgggtgctacaagacaacagtgccttgtgttacccatgctggcttctgctgccctctggtggtcacgatgaggcccattcccaaggacaagctggaagggctggtgcgggcctgctgctccctcggaggtgagcaggggcaacctgttcacatgggcgacccagaactgttgggaatcaaagagctttccaaacctgcctacggggatgccatggtgtgtcccccaggggaggttccagtgttctggccttctccgctgaccagtctcggagctgtcagcagctgtgagaccccactggcttttgccagcatcccaggctgcacagttatgactgacctgaaggatgcaaaggctccacctggttgtctcaccccagagagaattccagaggtccatcacatttcccaagatcctctgcactacagcatcgcgtcagtctctgcttctcagaagatcagagaactagagtctatgatcggcatagacccagggaaccgggggattgggcacctgctctgtaaagatgagctgctgaaggcctctctctcgctgtcccatgcccgctcagtgctcatcaccactgggttccccacacatttcaatcatgagcctccagaagagacagatggcccaccaggagctgttgctctggttgccttcctgcaggccttggagaaggaggtcgccataatcgttgaccagagagcctggaacttgcaccagaagattgttgaagatgctgttgagcaaggtgttctgaagacgcagatcccgatattaacttaccaaggtggatcagtggaagctgctcaggcattcctgtgcaaaaatggggacccgcagacacctagatttgaccacctggtggccatagagcgtgccggaagagctgctgatggcaattactacaatgcaaggaagatgaacatcaagcacttggttgaccccattgacgatctttttcttgctgcgaagaagattcctggaatctcatcaactggagtcggtgatggaggcaacgagcttgggatgggtaaagtcaaggaggctgtgaggaggcacatacggcacggggatgtcatcgcctgcgacgtggaggctgactttgccgtcattgctggtgtttctaactggggaggctatgccctggcctgcgcactctacatcctgtactcatgtgctgtccacagtcagtacctgaggaaagcagtcggaccctccagggcacctggagatcaggcctggactcaggccctcccgtcggtcattaaggaagaaaaaatgctgggcatcttggtgcagcacaaagtccggagtggcgtctcgggcatcgtgggcatggaggtggatgggctgcccttccacaacacccacgccgagatgatccagaagctggtggacgtcaccacggcacaggtgtaaccgtccatgttccgtgtgagcagagtccctaccaacgggcaggtctgcatccggggagaatgcagctgcttctggcgacaatcctgctagtaaacactggtcttcggtgagcaacgaacactcgcctggcctgggaaactgcatgcccactttctgggaggggttagtgcaggtgccgtggacaaaggacaacatttctctggggctttttaacttttattcctaagactctaaaggcgttgatttcaaccctccttcactctggcttcttcaggcaacccacgtggtctcctgtgagaatcttctcgacagttacttatggggacacttgtgaacaattaactgccaggcagagcatgagaacaaacattcccaggccatgtaggataggatactccagactccagtcatcctcccccatccatggtttctgttactcatggtttcagttactcatagccaactgcagaccgaaaatactaaatgaaaaatttcagaaataaacaactcttaagttttaaa

SEQ ID NO: 386165 - DNA, 3012 bp, Homo sapiens
acgtgagctcaggctgtgggagcggatggagctgctacagtcagcgcttggggctggcctcagcttgtagacccgagccctgcagaacaaccccccgtggcgcaggagagcagaagaaagggggcctttatgcccttttgagggaagcacacattctgcaaggccgtggaaacaaagggaggaactgtttgtagccctcgtccagacgccccaaacaaacagtaagtcagaagggaacagagcacagcacagtccctccctccgccccaggcagtatccaccttgccccgccccacctaaggagcccaagggtattctgggagcccaccccaggacaatggcagggcaaaaccagtgagcaaggcagaaaattcctgaaattctccactgaggcccagctgttcctctccttgaaaagtcaaggcttggttcaagccagatagcacctgaggacagaacatatcaggtggcattcttcttcagagcagggcaagtgtaattctggaccaatgtgtgattctgagaccagaccaaccaactgaaggagccaagttacaccctgtttaaccctgccttcaaagggacgactctgtaagattctctgctacttattcaagttgacacgatgcccttcacactccacctgaggtcccgccttccctctgccataaggagtttgattctacaaaagaaaccaaacatcagaaatacatccagcatggctggagagctccgaccagccagcctggtggtcctgcccaggtcccttgctccagcttttgaaagattctgccaggtcaacactggtcctctacccctgctgggccagagtgagccagaaaagtggatgctgccccctcaaggtgctatctcagagaccaggatgggccatccccagttctggaaatacgagttcggtgcctgcaccggcagcctggcttcgctggagcagtactcggagcagctgaaggacatggtggccttcttcctgggctgcagcttctccctggaggaggccttggagaaagcggggctccccagaagagacccagcaggtcacagccaggcgggtgctacaagacaacagtgccttgtgttacccatgctggcttctgctgccctctggtggtcacgatgaggcccattcccaaggacaagctggaagggctggtgcgggcctgctgctccctcggaggtgagcaggggcaacctgttcacatgggcgacccagaactgttgggaatcaaagagctttccaaacctgcctacggggatgccatggtgtgtcccccaggggaggttccagtgttctggccttctccgctgaccagtctcggagctgtcagcagctgtgagaccccactggcttttgccagcatcccaggctgcacagttatgactgacctgaaggatgcaaaggctccacctggttgtctcaccccagagagaattccagaggtccatcacatttcccaagatcctctgcactacagcatcgcgtcagtctctgcttctcagaagatcagagaactagagtctatgatcggcatagacccagggaaccgggggattgggcacctgctctgtaaagatgagctgctgaaggcctctctctcgctgtcccatgcccgctcagtgctcatcaccactgggttccccacacatttcaatcatgagcctccagaagagacagatggcccaccaggagctgttgctctggttgccttcctgcaggccttggagaaggaggtcgccataatcgttgaccagagagcctggaacttgcaccagaagattgttgaagatgctgttgagcaaggtgttctgaagacgcagatcccgatattaacttaccaaggtggatcagtggaagctgctcaggcattcctgtgcaaaaatggggacccgcagacacctagatttgaccacctggtggccatagagcgtgccggaagagctgctgatggcaattactacaatgcaaggaagatgaacatcaagcacttggttgaccccattgacgatctttttcttgctgcgaagaagattcctggaatctcatcaactggagtcggtgatggaggcaacgagcttgggatgggtaaagtcaaggaggctgtgaggaggcacatacggcacggggatgtcatcgcctgcgacgtggaggctgactttgccgtcattgctggtgtttctaactggggaggctatgccctggcctgcgcactctacatcctgtactcatgtgctgtccacagtcagtacctgaggaaagcagtcggaccctccagggcacctggagatcaggcctggactcaggccctcccgtcggtcattaaggaagaaaaaatgctgggcatcttggtgcagcacaaagtccggagtggcgtctcgggcatcgtgggcatggaggtggatgggctgcccttccacaacacccacgccgagatgatccagaagctggtggacgtcaccacggcacaggtgtaaccgtccatgttccgtgtgagcagagtccctaccaacgggcaggtctgcatccggggagaatgcagctgcttctggcgacaatcctgctagtaaacactggtcttcggtgagcaacgaacactcgcctggcctgggaaactgcatgcccactttctgggaggggttagtgcaggtgccgtggacaaaggacaacatttctctggggctttttaacttttattcctaagactctaaaggcgttgatttcaaccctccttcactctggcttcttcaggcaacccacgtggtctcctgtgagaatcttctcgacagttacttatggggacacttgtgaacaattaactgccaggcagagcatgagaacaaacattcccaggccatgtaggataggatactccagactccagtcatcctcccccatccatggtttctgttactcatggtttcagttactcatagccaactgcagaccgaaaatactaaatgaaaaatttcagaaataaacaactcttaagttttaaa

SEQ ID NO: 386166 - DNA, 2611 bp, Homo sapiens
acgtgagctcaggctgtgggagcggatggagctgctacagtcagcgcttggggctggcctcagcttgtagacccgagccctgcagaacaaccccccgtggcgcaggagagcagaagaaagggggcctttatgcccttttgagggaagcacacattctgcaaggccgtggaaacaaagggaggaactgtttgtagccctcgtccagacgccccaaacaaacagagccaagttacaccctgtttaaccctgccttcaaagggacgactctgtaagattctctgctacttattcaagttgacacgatgcccttcacactccacctgaggtcccgccttccctctgccataaggagtttgattctacaaaagaaaccaaacatcagaaatacatccagcatggctggagagctccgaccagccagcctggtggtcctgcccaggtcccttgctccagcttttgaaagattctgccaggtcaacactggtcctctacccctgctgggccagagtgagccagaaaagtggatgctgccccctcaaggtgctatctcagagaccaggatgggccatccccagttctggaaatacgagttcggtgcctgcaccggcagcctggcttcgctggagcagtactcggagcagctgaaggacatggtggccttcttcctgggctgcagcttctccctggaggaggccttggagaaagcggggctccccagaagagacccagcaggtcacagccaggcgggtgctacaagacaacagtgccttgtgttacccatgctggcttctgctgccctctggtggtcacgatgaggcccattcccaaggacaagctggaagggctggtgcgggcctgctgctccctcggaggtgagcaggggcaacctgttcacatgggcgacccagaactgttgggaatcaaagagctttccaaacctgcctacggggatgccatggtgtgtcccccaggggaggttccagtgttctggccttctccgctgaccagtctcggagctgtcagcagctgtgagaccccactggcttttgccagcatcccaggctgcacagttatgactgacctgaaggatgcaaaggctccacctggttgtctcaccccagagagaattccagaggtccatcacatttcccaagatcctctgcactacagcatcgcgtcagtctctgcttctcagaagatcagagaactagagtctatgatcggcatagacccagtgctcatcaccactgggttccccacacatttcaatcatgagcctccagaagagacagatggcccaccaggagctgttgctctggttgccttcctgcaggccttggagaaggaggtcgccataatcgttgaccagagagcctggaacttgcaccagaagattgttgaagatgctgttgagcaaggtgttctgaagacgcagatcccgatattaacttaccaaggtggatcagtggaagctgctcaggcattcctgtgcaaaaatggggacccgcagacacctagatttgaccacctggtggccatagagcgtgccggaagagctgctgatggcaattactacaatgcaaggaagatgaacatcaagcacttggttgaccccattgacgatctttttcttgctgcgaagaagattcctggaatctcatcaactggagtcggtgatggaggcaacgagcttgggatgggtaaagtcaaggaggctgtgaggaggcacatacggcacggggatgtcatcgcctgcgacgtggaggctgactttgccgtcattgctggtgtttctaactggggaggctatgccctggcctgcgcactctacatcctgtactcatgtgctgtccacagtcagtacctgaggaaagcagtcggaccctccagggcacctggagatcaggcctggactcaggccctcccgtcggtcattaaggaagaaaaaatgctgggcatcttggtgcagcacaaagtccggagtggcgtctcgggcatcgtgggcatggaggtggatgggctgcccttccacaacacccacgccgagatgatccagaagctggtggacgtcaccacggcacaggtgtaaccgtccatgttccgtgtgagcagagtccctaccaacgggcaggtctgcatccggggagaatgcagctgcttctggcgacaatcctgctagtaaacactggtcttcggtgagcaacgaacactcgcctggcctgggaaactgcatgcccactttctgggaggggttagtgcaggtgccgtggacaaaggacaacatttctctggggctttttaacttttattcctaagactctaaaggcgttgatttcaaccctccttcactctggcttcttcaggcaacccacgtggtctcctgtgagaatcttctcgacagttacttatggggacacttgtgaacaattaactgccaggcagagcatgagaacaaacattcccaggccatgtaggataggatactccagactccagtcatcctcccccatccatggtttctgttactcatggtttcagttactcatagccaactgcagaccgaaaatactaaatgaaaaatttcagaaataaacaactcttaagttttaaa

SEQ ID NO: 386167 - DNA, 2926 bp, Homo sapiens
acgtgagctcaggctgtgggagcggatggagctgctacagtcagcgcttggggctggcctcagcttgtagacccgagccctgcagaacaaccccccgtggcgcaggagagcagaagaaagggggcctttatgcccttttgagggaagcacacattctgcaaggccgtggaaacaaagggaggaactgtttgtagccctcgtccagacgccccaaacaaacagagccaagttacaccctgtttaaccctgccttcaaagggacgactctgtaagattctctgctacttattcaagttgacacgatgcccttcacactccacctgaggtcccgccttccctctgccataaggagtttgattctacaaaagaaaccaaacatcagaaatacatccagcatggctggagagctccgaccagccagcctggtggtcctgcccaggtcccttgctccagcttttgaaagattctgccaggtcaacactggtcctctacccctgctgggccagagtgagccagaaaagtggatgctgccccctcaaggtgctatctcagagaccaggatgggccatccccagttctggaaatacgagttcggtgcctgcaccggcagcctggcttcgctggagcagtactcggagcagctgaaggacatggtggccttcttcctgggctgcagcttctccctggaggaggccttggagaaagcggggctccccagaagagacccagcaggtcacagccaggcgggtgctacaagacaacagtgccttgtgttacccatgctggcttctgctgccctctggtggtcacgatgaggcccattcccaaggacaagctggaagggctggtgcgggcctgctgctccctcggaggtgagcaggggcaacctgttcacatgggcgacccagaactgttgggaatcaaagagctttccaaacctgcctacggggatgccatggtgtgtcccccaggggaggttccagtgttctggccttctccgctgaccagtctcggagctgtcagcagctgtgagaccccactggcttttgccagcatcccaggctgcacagttatgactgacctgaaggatgcaaaggctccacctggttgtctcaccccagagagaattccagaggtccatcacatttcccaagatcctctgcactacagcatcgcgtcagtctctgcttctcagaagatcagagaactagagtctatgatcggcatagacccagggaaccgggggattgggcacctgctctgtaaagatgagctgctgaaggcctctctctcgctgtcccatgcccgctcagtgctcatcaccactgggttccccacacatttcaatcatgagcctccagaagagacagatggcccaccaggagctgttgctctggttgccttcctgcaggccttggagaaggaggtcgccataatcgttgaccagagagcctggaacttgcaccagaagattgttgaagatgctgttgagcaaggtgttctgaagacgcagatcccgatattaacttaccaaggtggatcagtggaagctgctcaggcattcctgtgcaaaaatggggacccgcagacacctagatttgaccacctggtggccatagagcgtgccggaagagctgctgatggcaattactacaatgcaaggaagatgaacatcaagcacttggttgaccccattgacgatctttttcttgctgcgaagaagattcctggaatctcatcaactggagtcggtgatggaggcaacgagcttgggatgggtaaagtcaaggaggctgtgaggaggcacatacggcacggggatgtcatcgcctgcgacgtggaggctgactttgccgtcattgctggtgtttctaactggggaggctatgccctggcctgcgcactctacatcctgtactcatgtgctgtccacagtcagtacctgaggaaagcagtcggaccctccagggcacctggagatcaggcctggactcaggccctcccgtcggtcattaaggtaacaaaccccagccagccgctcgcctggaagcagcttttaccctggatgagcagcaggcctgaggtcccaagccgtaagccgagggctggcaccctgctgcccctcaaaagccagaggcagagccagccttgaagcagaggtctcctggattgggtgccctttaagctactcgcagttctgaatcgtgtggcaggcctgatccaagtgaccattttccttctagtttgactttgggaagaaaaaatgctgggcatcttggtgcagcacaaagtccggagtggcgtctcgggcatcgtgggcatggaggtggatgggctgcccttccacaacacccacgccgagatgatccagaagctggtggacgtcaccacggcacaggtgtaaccgtccatgttccgtgtgagcagagtccctaccaacgggcaggtctgcatccggggagaatgcagctgcttctggcgacaatcctgctagtaaacactggtcttcggtgagcaacgaacactcgcctggcctgggaaactgcatgcccactttctgggaggggttagtgcaggtgccgtggacaaaggacaacatttctctggggctttttaacttttattcctaagactctaaaggcgttgatttcaaccctccttcactctggcttcttcaggcaacccacgtggtctcctgtgagaatcttctcgacagttacttatggggacacttgtgaacaattaactgccaggcagagcatgagaacaaacattcccaggccatgtaggataggatactccagactccagtcatcctcccccatccatggtttctgttactcatggtttcagttactcatagccaactgcagaccgaaaatactaaatgaaaaatttcagaaataaacaactcttaagttttaaa

SEQ ID NO: 386168 - DNA, 2809 bp, Homo sapiens
acgtgagctcaggctgtgggagcggatggagctgctacagtcagcgcttggggctggcctcagcttgtagacccgagccctgcagaacaaccccccgtggcgcaggagagcagaagaaagggggcctttatgcccttttgagggaagcacacattctgcaaggccgtggaaacaaagggaggaactgtttgtagccctcgtccagacgccccaaacaaacagagccaagttacaccctgtttaaccctgccttcaaagggacgactctgtaagattctctgctacttattcaagttgacacgatgcccttcacactccacctgaggtcccgccttccctctgccataaggagtttgattctacaaaagaaaccaaacatcagaaatacatccagcatggctggagagctccgaccagccagcctggtggtcctgcccaggtcccttgctccagcttttgaaagattctgccaggtcaacactggtcctctacccctgctgggccagagtgagccagaaaagtggatgctgccccctcaaggtgctatctcagagaccaggatgggccatccccagttctggaaatacgagttcggtgcctgcaccggcagcctggcttcgctggagcagtactcggagcagctgaaggacatggtggccttcttcctgggctgcagcttctccctggaggaggccttggagaaagcggggctccccagaagagacccagcaggtcacagccaggcgggtgctacaagacaacagtgccttgtgttacccatgctggcttctgctgccctctggtggtcacgatgaggcccattcccaaggacaagctggaagggctggtgcgggcctgctgctccctcggaggtgagcaggggcaacctgttcacatgggcgacccagaactgttgggaatcaaagagctttccaaacctgcctacggggatgccatggtgtgtcccccaggggaggttccagtgttctggccttctccgctgaccagtctcggagctgtcagcagctgtgagaccccactggcttttgccagcatcccaggctgcacagttatgactgacctgaaggatgcaaaggctccacctggttgtctcaccccagagagaattccagaggtccatcacatttcccaagatcctctgcactacagcatcgcgtcagtctctgcttctcagaagatcagagaactagagtctatgatcggcatagacccagggaaccgggggattgggcacctgctctgtaaagatgagctgctgaaggcctctctctcgctgtcccatgcccgctcagtgctcatcaccactgggttccccacacatttcaatcatgagcctccagaagagacagatggcccaccaggagctgttgctctggttgccttcctgcaggccttggagaaggaggtcgccataatcgttgaccagagagcctggaacttgcaccagaagattgttgaagatgctgttgagcaaggtgttctgaagacgcagatcccgatattaacttaccaaggtggatcagtggaagctgctcaggcattcctgtgcaaaaatggggacccgcagacacctagatttgaccacctggtggccatagagcgtgccggaagagctgctgatggcaattactacaatgcaaggaagatgaacatcaagcacttggttgaccccattgacgatctttttcttgctgcgaagaagattcctggaatctcatcaactggagtcggtgatggaggcaacgagcttgggatgggtaaagtcaaggaggctgtgaggaggcacatacggcacggggatgtcatcgcctgcgacgtggaggctgactttgccgtcattgctggtgtttctaactggggaggctatgccctggcctgcgcactctacatcctgtactcatgtgctgtccacagtcagtacctgaggaaagcagtcggaccctccagggcacctggagatcaggcctggactcaggccctcccgtcggtcattaagcaggagagcaaagggagaaagctctaggctaaaggccagaagacctagccctgccaataaaatcaacctcattttgtgaatgcctgttgtgtgccaaggaccctgctaagtgctttgcttgaagaaaaaatgctgggcatcttggtgcagcacaaagtccggagtggcgtctcgggcatcgtgggcatggaggtggatgggctgcccttccacaacacccacgccgagatgatccagaagctggtggacgtcaccacggcacaggtgtaaccgtccatgttccgtgtgagcagagtccctaccaacgggcaggtctgcatccggggagaatgcagctgcttctggcgacaatcctgctagtaaacactggtcttcggtgagcaacgaacactcgcctggcctgggaaactgcatgcccactttctgggaggggttagtgcaggtgccgtggacaaaggacaacatttctctggggctttttaacttttattcctaagactctaaaggcgttgatttcaaccctccttcactctggcttcttcaggcaacccacgtggtctcctgtgagaatcttctcgacagttacttatggggacacttgtgaacaattaactgccaggcagagcatgagaacaaacattcccaggccatgtaggataggatactccagactccagtcatcctcccccatccatggtttctgttactcatggtttcagttactcatagccaactgcagaccgaaaatactaaatgaaaaatttcagaaataaacaactcttaagttttaaa

SEQ ID NO: 386169 - DNA, 3429 bp, Homo sapiens
acgtgagctcaggctgtgggagcggatggagctgctacagtcagcgcttggggctggcctcagcttgtagacccgagccctgcagaacaaccccccgtggcgcaggagagcagaagaaagggggcctttatgcccttttgagggaagcacacattctgcaaggccgtggaaacaaagggaggaactgtttgtagccctcgtccagacgccccaaacaaacagagccaagttacaccctgtttaaccctgccttcaaagggacgactctgtaagattctctgctacttattcaagttgacacgatgcccttcacactccacctgaggtcccgccttccctctgccataaggagtttgattctacaaaagaaaccaaacatcagaaatacatccagcatggctggagagctccgaccagccagcctggtggtcctgcccaggtcccttgctccagcttttgaaagattctgccaggtcaacactggtcctctacccctgctgggccagagtgagccagaaaagtggatgctgccccctcaaggtgctatctcagagaccaggatgggccatccccagttctggaaatacgagttcggtgcctgcaccggcagcctggcttcgctggagcagtactcggagcagctgaaggacatggtggccttcttcctgggctgcagcttctccctggaggaggccttggagaaagcggggctccccagaagagacccagcaggtcacagccaggcgggtgctacaagacaacagtgccttgtgttacccatgctggcttctgctgccctctggtggtcacgatgaggcccattcccaaggacaagctggaagggctggtgcgggcctgctgctccctcggaggtgagcaggggcaacctgttcacatgggcgacccagaactgttgggaatcaaagagctttccaaacctgcctacggggatgccatggtgtgtcccccaggggaggttccagtgttctggccttctccgctgaccagtctcggagctgtcagcagctgtgagaccccactggcttttgccagcatcccaggctgcacagttatgactgacctgaaggatgcaaaggctccacctggttgtctcaccccagagagaattccagaggtccatcacatttcccaagatcctctgcactacagcatcgcgtcagtctctgcttctcagaagatcagagaactagagtctatgatcggcatagacccagtgctcatcaccactgggttccccacacatttcaatcatgagcctccagaagagacagatggcccaccaggagctgttgctctggttgccttcctgcaggccttggagaaggaggtcgccataatcgttgaccagagagcctggaacttgcaccagaagattgttgaagatgctgttgagcaaggtgttctgaagacgcagatcccgatattaacttaccaaggtggatcagtggaagctgctcaggcattcctgtgcaaaaatggggacccgcagacacctagatttgaccacctggtggccatagagcgtgccggaagagctgctgatggcaattactacaatgcaaggaagatgaacatcaagcacttggttgaccccattgacgatctttttcttgctgcgaagaagattcctggaatctcatcaactggagtcggtgatggaggcaacgagcttgggatgggtaaagtcaaggaggctgtgaggaggcacatacggcacggggatgtcatcgcctgcgacgtggaggctgactttgccgtcattgctggtgagcactcggatggccgcccagtccggccggctacccagggtgtttctaactggggaggctatgccctggcctgcgcactctacatcctgtactcatgtgctgtccacagtcagtacctgaggaaagcagtcggaccctccagggcacctggagatcaggcctggactcaggccctcccgtcggtcattaaggtaacaaaccccagccagccgctcgcctggaagcagcttttaccctggatgagcagcaggcctgaggtcccaagccgtaagccgagggctggcaccctgctgcccctcaaaagccagaggcagagccagccttgaagcagaggtctcctggattgggtgccctttaagctactcgcagttctgaatcgtgtggcaggcctgatccaagtgaccattttccttctagtttgactttgggaagaaaaaatgctgggcatcttggtgcagcacaaagtccggagtggcgtctcgggcatcgtgggcatggaggtggatgggctgcccttccacaacacccacgccgagatgatccagaagctggtggacgtcaccacggcacaggtgtaaccgtccatgttccgtgtgagcagagtccctaccaacgggcaggtctgcatccggggagaatgcagctgcttctggcgacaatcctgctagtaaacactggtcttcggtgagcaacgaacactcgcctggcctgggaaactgcatgcccactttctgggaggggttagtgcaggtgccgtggacaaaggacaacatttctctggggctttttaacttttattcctaagactctaaaggcgttgatttcaaccctccttcactctggcttcttcaggcaacccacgtggtctcctgtgagaatcttctcgacagttacttatggggacacttgtgaacaattaactgccaggcagagcatgagaacaaacattcccaggccatgtaggataggatactccagactccagtcatcctcccccatccatggtttctgttactcatggtttcagttactcatagccaactgcagaccgaaaatactaaatgaaaaatttcagaaataaacaactcttaagttttaaaaaaaaaaaaaaaaaaacctttggaggaaagtcaaatcttggtattattaaaattgttttaaaaaggagtaaattttccagttgataaatgaaaatcactggcctatgtttaataagtttttctttaattactgtggaataacgtgccagctatcatcaacacaatgattttgtacatagggtagggaagcagtgatgctctcaatgggaagatgtgcaacacaaattaaggggaactccatgtattttacctacttcagcaatggaactgcaacttggggctttgtgaataaaatttagctgccttgtatagtcgtttgaaagaatatgtgatctgtgagagaattatagtttttttttagaagaaaaatctgcaaaagatctttccaaagacaatgtgccacagatcttttgttctctgtaatgaggattaattgctgtttaaacaaaaatgtaattgttcatctttaaattctttccttttcataagaggatcaagctgtaaaaaaacaaaaaaattaataaaaatttcgagaaatc

SEQ ID NO: 386170 - DNA, 2198 bp, Homo sapiens
aagctgggttgggtgcccctgctctgtgctgtgacatcctgtactatgactacctgattactcatctagactgtgaaccccatgggggcaggaaccatgtcacattcaccactgtatccctggttcagggcctgacacatacttagcaggtgttcaataaacctttgatcaatggtgggatgaatgagcaaatgcctgagcagggagagagccttcttatagccgccctaatgtcctattctagattccttaggtcccctcctctcacctcctgcctttgttgtggaggaggaagaagacagggagaaggaagaggaggaggaggaagaagaagaagagggaaggatgtgtttgagttgctttatgccttcacttaaggctcactgtccttaggggaacctgagctgttcactagggacagacacattagtggcttgggcaagtggtgctttgggattttatttttggaaggaggggggatggaggaggatcaaaccactttttttttttttaaccagcaggagagcaaagggagaaagctctaggctaaaggccagaagacctagccctgccaataaaatcaacctcattttgtgaatgcctgttgtgtgccaaggaccctgctaagtgctttgcttgtacgtaatcctcagaacaaccctctaaaggaggcatgatgagtacttttatcatcaccctccccattttacagataagcacactaaggcacagaacagttaaaattcctgccaggaaagactcaagtcagacctttctgatccccaaaccactctgcctgctaggccccgggctgcggcttcaggatgggggcttgtattctctgtgactctgctacacctagatgctcccactcccacagtcaccctggtcatttctagaaggcaacagcagcaggatttgacacatgccccacattaggctaagaggtctcaggagaaatgggggcctttggcacaaagactattggcagataatccagggctgggaggaacttattggcaggaaatagcctgcactgcacctgcaggaggagtgaatcttcagtgttggttaaggaaatgcaggctggccgggcacagtgatgtgcacctatagtcccagctagtcaggagactgagacagaagaatcacttgaggccaggagttcaataccagtctgggcaacatagcaagaccccatctctaaaaacggacaatcaaactaagaaactatgtttccattaaagcatattatttagttacataacagtaactaccaaaagaagcagcccaaactattcccgtgattgtttctggggagtagatttgggggccaatgagctgtgatggaggacacttacttttcatgacttttccaatggtattagtactttaaaccaaaattttacttttttaaaaagcaagtatgtcaaggcaaaggatccttctcacttataaatgtgtataaaagaaatttctttttcctccccctccactccttctatttctgccctatttttttccaggaagaaaaaatgctgggcatcttggtgcagcacaaagtccggagtggcgtctcgggcatcgtgggcatggaggtggatgggctgcccttccacaacacccacgccgagatgatccagaagctggtggacgtcaccacggcacaggtgtaaccgtccatgttccgtgtgagcagagtccctaccaacgggcaggtctgcatccggggagaatgcagctgcttctggcgacaatcctgctagtaaacactggtcttcggtgagcaacgaacactcgcctggcctgggaaactgcatgcccactttctgggaggggttagtgcaggtgccgtggacaaaggacaacatttctctggggctttttaacttttattcctaagactctaaaggcgttgatttcaaccctccttcactctggcttcttcaggcaacccacgtggtctcctgtgagaatcttctcgacagttacttatggggacacttgtgaacaattaactgccaggcagagcatgagaacaaacattcccaggccatgtaggataggatactccagactccagtcatcctcccccatccatggtttctgttactcatggtttcagttactcatagccaactgcagaccgaaaatactaaatgaaaaatttcagaaataaacaactcttaagttttaaa

SEQ ID NO: 386171 - DNA, 877 bp, Homo sapiens
atggcggcttattctcttttgctggtctttgacacgttgggcggtctttgctggtgtttctaactggggaggctatgccctggcctgcgcactctacatcctgtactcatgtgctgtccacagtcagtacctgaggaaagcagtcggaccctccagggcacctggagatcaggcctggactcaggccctcccgtcggtcattaaggaagaaaaaatgctgggcatcttggtgcagcacaaagtccggagtggcgtctcgggcatcgtgggcatggaggtggatgggctgcccttccacaacacccacgccgagatgatccagaagctggtggacgtcaccacggcacaggtgtaaccgtccatgttccgtgtgagcagagtccctaccaacgggcaggtctgcatccggggagaatgcagctgcttctggcgacaatcctgctagtaaacactggtcttcggtgagcaacgaacactcgcctggcctgggaaactgcatgcccactttctgggaggggttagtgcaggtgccgtggacaaaggacaacatttctctggggctttttaacttttattcctaagactctaaaggcgttgatttcaaccctccttcactctggcttcttcaggcaacccacgtggtctcctgtgagaatcttctcgacagttacttatggggacacttgtgaacaattaactgccaggcagagcatgagaacaaacattcccaggccatgtaggataggatactccagactccagtcatcctcccccatccatggtttctgttactcatggtttcagttactcatagccaactgcagaccgaaaatactaaatgaaaaatttcagaaataaacaactcttaagttttaaa

SEQ ID NO: 386172 - DNA, 1310 bp, Homo sapiens
aagctgggttgggtgcccctgctctgtgctgtgacatcctgtactatgactacctgattactcatctagactgtgaaccccatgggggcaggaaccatgtcacattcaccactgtatccctggttcagggcctgacacatacttagcaggtgttcaataaacctttgatcaatggtgggatgaatgagcaaatgcctgagcagggagagagccttcttatagccgccctaatgtcctattctagattccttaggtcccctcctctcacctcctgcctttgttgtggaggaggaagaagacagggagaaggaagaggaggaggaggaagaagaagaagagggaaggatgtgtttgagttgctttatgccttcacttaaggctcactgtccttaggggaacctgagctgttcactagggacagacacattagtggcttgggcaagtggtgctttgggattttatttttggaaggaggggggatggaggaggatcaaaccactttttttttttttaaccagcaggagagcaaagggagaaagctctaggctaaaggccagaagacctagccctgccaataaaatcaacctcattttgtgaatgcctgttgtgtgccaaggaccctgctaagtgctttgcttgaagaaaaaatgctgggcatcttggtgcagcacaaagtccggagtggcgtctcgggcatcgtgggcatggaggtggatgggctgcccttccacaacacccacgccgagatgatccagaagctggtggacgtcaccacggcacaggtgtaaccgtccatgttccgtgtgagcagagtccctaccaacgggcaggtctgcatccggggagaatgcagctgcttctggcgacaatcctgctagtaaacactggtcttcggtgagcaacgaacactcgcctggcctgggaaactgcatgcccactttctgggaggggttagtgcaggtgccgtggacaaaggacaacatttctctggggctttttaacttttattcctaagactctaaaggcgttgatttcaaccctccttcactctggcttcttcaggcaacccacgtggtctcctgtgagaatcttctcgacagttacttatggggacacttgtgaacaattaactgccaggcagagcatgagaacaaacattcccaggccatgtaggataggatactccagactccagtcatcctcccccatccatggtttctgttactcatggtttcagttactcatagccaactgcagaccgaaaatactaaatgaaaaatttcagaaataaacaactcttaagttttaaa

SEQ ID NO: 386173 - DNA, 2617 bp, Homo sapiens
acgtgagctcaggctgtgggagcggatggagctgctacagtcagcgcttggggctggcctcagcttgtagacccgagccctgcagaacaaccccccgtggcgcaggagagcagaagaaagggggcctttatgcccttttgagggaagcacacattctgcaaggccgtggaaacaaagggaggaactgtttgtagccctcgtccagacgccccaaacaaacagagccaagttacaccctgtttaaccctgccttcaaagggacgactctgtaagattctctgctacttattcaagttgacacgatgcccttcacactccacctgaggtcccgccttccctctgccataaggagtttgattctacaaaagaaaccaaacatcagaaatacatccagcatggctggagagctccgaccagccagcctggtggtcctgcccaggtcccttgctccagcttttgaaagattctgccaggtcaacactggtcctctacccctgctgggccagagtgagccagaaaagtggatgctgccccctcaaggtgctatctcagagaccaggatgggccatccccagttctggaaatacgagttcggtgcctgcaccggcagcctggcttcgctggagcagtactcggagcagctgaaggacatggtggccttcttcctgggctgcagcttctccctggaggaggccttggagaaagcggggctccccagaagagacccagcaggtcacagccaggcgggtgctacaagacaacagtgccttgtgttacccatgctggcttctgctgccctctggtggtcacgatgaggcccattcccaaggacaagctggaagggctggtgcgggcctgctgctccctcggaggtgagcaggggcaacctgttcacatgggcgacccagaactgttgggaatcaaagagctttccaaacctgcctacggggatgccatggtgtgtcccccaggggaggttccagtgttctggccttctccgctgaccagtctcggagctgtcagcagctgtgagaccccactggcttttgccagcatcccaggctgcacagttatgactgacctgaaggatgcaaaggctccacctggttgtctcaccccagagagaattccagaggtccatcacatttcccaagatcctctgcactacagcatcgcgtcagtctctgcttctcagaagatcagagaactagagtctatgatcggcatagacccagggaaccgggggattgggcacctgctctgtaaagatgagctgctgaaggcctctctctcgctgtcccatgcccgctcagtgctcatcaccactgggttccccacacatttcaatcatgagcctccagaagagacagatggcccaccaggagctgttgctctggttgccttcctgcaggccttggagaaggaggtcgccataatcgttgaccagagagcctggaacttgcaccagaagattgttgaagatgctgttgagcaaggtgttctgaagacgcagatcccgatattaacttaccaaggtggatcagtggaagctgctcaggcattcctgtgcaaaaatggggacccgcagacacctagatttgaccacctggtggccatagagcgtgccggaagagctgctgatggcaattactacaatgcaaggaagatgaacatcaagcacttggttgaccccattgacgatctttttcttgctgcgaagaagattcctggaatctcatcaactggagtcggtgatggaggcaacgagcttgggatgggtaaagtcaaggaggctgtgaggaggcacatacggcacggggatgtcatcgcctgcgacgtggaggctgactttgccgtcattgctggtgtttctaactggggaggctatgccctggcctgcgcactctacatcctgtactcatgtgctgtccacagtcagtacctgaggaaagcagtcggaccctccagggcacctggagatcaggcctggactcaggccctcccgtcggtcattaaggaagaaaaaatgctgggcatcttggtgcagcacaaagtccggagtggcgtctcgggcatcgtgggcatggaggtggatgggctgcccttccacaacacccacgccgagatgatccagaagctggtggacgtcaccacggcacaggtgtaaccgtccatgttccgtgtgagcagagtccctaccaacgggcaggtctgcatccggggagaatgcagctgcttctggcgacaatcctgctagtaaacactggtcttcggtgagcaacgaacactcgcctggcctgggaaactgcatgcccactttctgggaggggttagtgcaggtgccgtggacaaaggacaacatttctctggggcactttatggagtgggcacacattatggaggatggggattattgctgtataccttacaaaaccaaatgtaattacattatcttggtaaattaattagaattatggaatttatgataaggctttctgtgagacaacacagaattaaaattcagaaagctgtttgaatcattagtgatgctttcttctaaatggacacccagcgaaagactcatgagaggtgtatcctctagagtcagccaagagat

SEQ ID NO: 386174 - DNA, 2298 bp, Homo sapiens
  misc_feature (2284)..(2284): n is a, c, g, or t
acgtgagctcaggctgtgggagcggatggagctgctacagtcagcgcttggggctggcctcagcttgtagacccgagccctgcagaacaaccccccgtggcgcaggagagcagaagaaagggggcctttatgcccttttgagggaagcacacattctgcaaggccgtggaaacaaagggaggaactgtttgtagccctcgtccagacgccccaaacaaacagagccaagttacaccctgtttaaccctgccttcaaagggacgactctgtaagattctctgctacttattcaagttgacacgatgcccttcacactccacctgaggtcccgccttccctctgccataaggagtttgattctacaaaagaaaccaaacatcagaaatacatccagcatggctggagagctccgaccagccagcctggtggtcctgcccaggtcccttgctccagcttttgaaagattctgccaggtcaacactggtcctctacccctgctgggccagagtgagccagaaaagtggatgctgccccctcaaggtgctatctcagagaccaggatgggccatccccagttctggaaatacgagttcggtgcctgcaccggcagcctggcttcgctggagcagtactcggagcagctgaaggacatggtggccttcttcctgggctgcagcttctccctggaggaggccttggagaaagcggggctccccagaagagacccagcaggtcacagccaggcgggtgctacaagacaacagtgccttgtgttacccatgctggcttctgctgccctctggtggtcacgatgaggcccattcccaaggacaagctggaagggctggtgcgggcctgctgctccctcggaggtgagcaggggcaacctgttcacatgggcgacccagaactgttgggaatcaaagagctttccaaacctgcctacggggatgccatggtgtgtcccccaggggaggttccagtgttctggccttctccgctgaccagtctcggagctgtcagcagctgtgagaccccactggcttttgccagcatcccaggctgcacagttatgactgacctgaaggatgcaaaggctccacctggttgtctcaccccagagagaattccagaggtccatcacatttcccaagatcctctgcactacagcatcgcgtcagtctctgcttctcagaagatcagagaactagagtctatgatcggcatagacccagggaaccgggggattgggcacctgctctgtaaagatgagctgctgaaggcctctctctcgctgtcccatgcccgctcagtgctcatcaccactgggttccccacacatttcaatcatgagcctccagaagagacagatggcccaccaggagctgttgctctggttgccttcctgcaggccttggagaaggaggtcgccataatcgttgaccagagagcctggaacttgcaccagaagattgttgaagatgctgttgagcaaggtgttctgaagacgcagatcccgatattaacttaccaaggtggatcagtggaagctgctcaggcattcctgtgcaaaaatggggacccgcagacacctagatttgaccacctggtggccatagagcgtgccggaagagctgctgatggcaattactacaatgcaaggaagatgaacatcaagcacttggttgaccccattgacgatctttttcttgctgcgaagaagattcctggaatctcatcaactggagtcggtgatggaggcaacgagcttgggatgggtaaagtcaaggaggctgtgaggaggcacatacggcacggggatgtcatcgcctgcgacgtggaggctgactttgccgtcattgctggtgtttctaactggggaggctatgccctggcctgcgcactctacatcctgtactcatgtgctgtccacagtcagtacctgaggaaagcagtcggaccctccagggcacctggagatcaggcctggactcaggccctcccgtcggtcattaaggaagaaaaaatgctgggcatcttggtgcagcacaaagtccggagtggcgtctcgggcatcgtgggcatggaggtggatgggctgcccttccacaacacccacgccgagatgatccagaagctggtggacgtcaccacggcacaggtgtaaccgtccatgttccgtgtgagcagagtccctaccaacgggcaggtctgcatccggggagaatgcagctgcttctggcgacaatcctgctagtaaacactggtcttcgggtcgttgagnatcctctagagtca

SEQ ID NO: 386175 - DNA, 2641 bp, Homo sapiens
acgtgagctcaggctgtgggagcggatggagctgctacagtcagcgcttggggctggcctcagcttgtagacccgagccctgcagaacaaccccccgtggcgcaggagagcagaagaaagggggcctttatgcccttttgagggaagcacacattctgcaaggccgtggaaacaaagggaggaactgtttgtagccctcgtccagacgccccaaacaaacagagccaagttacaccctgtttaaccctgccttcaaagggacgactctgtaagattctctgctacttattcaagttgacacgatgcccttcacactccacctgaggtcccgccttccctctgccataaggagtttgattctacaaaagaaaccaaacatcagaaatacatccagcatggctggagagctccgaccagccagcctggtggtcctgcccaggtcccttgctccagcttttgaaagattctgccaggtcaacactggtcctctacccctgctgggccagagtgagccagaaaagtggatgctgccccctcaaggtgctatctcagagaccaggatgggccatccccagttctggaaatacgagttcggtgcctgcaccggcagcctggcttcgctggagcagtactcggagcagctgaaggacatggtggccttcttcctgggctgcagcttctccctggaggaggccttggagaaagcggggctccccagaagagacccagcaggtcacagccaggcgggtgctacaagacaacagtgccttgtgttacccatgctggcttctgctgccctctggtggtcacgatgaggcccattcccaaggacaagctggaagggctggtgcgggcctgctgctccctcggaggtgagcaggggcaacctgttcacatgggcgacccagaactgttgggaatcaaagagctttccaaacctgcctacggggatgccatggtgtgtcccccaggggaggttccagtgttctggccttctccgctgaccagtctcggagctgtcagcagctgtgagaccccactggcttttgccagcatcccaggctgcacagttatgactgacctgaaggatgcaaaggctccacctggttgtctcaccccagagagaattccagaggtccatcacatttcccaagatcctctgcactacagcatcgcgtcagtctctgcttctcagaagatcagagaactagagtctatgatcggcatagacccagggaaccgggggattgggcacctgctctgtaaagatgagctgctgaaggcctctctctcgctgtcccatgcccgctcagtgctcatcaccactgggttccccacacatttcaatcatgagcctccagaagagacagatggcccaccaggagctgttgctctggttgccttcctgcaggccttggagaaggaggtcgccataatcgttgaccagagagcctggaacttgcaccagaagattgttgaagatgctgttgagcaaggtgttctgaagacgcagatcccgatattaacttaccaaggtggatcagtggaagctgctcaggcattcctgtgcaaaaatggggacccgcagacacctagatttgaccacctggtggccatagagcgtgccggaagagctgctgatggcaattactacaatgcaaggaagatgaacatcaagcacttggttgaccccattgacgatctttttcttgctgcgaagaagattcctggaatctcatcaactggagtcggtgatggaggcaacgagcttgggatgggtaaagtcaaggaggctgtgaggaggcacatacggcacggggatgtcatcgcctgcgacgtggaggctgactttgccgtcattgctggtgtttctaactggggaggctatgccctggcctgcgcactctacatcctgtactcatgtgctgtccacagtcagtacctgaggaaagcagtcggaccctccagggcacctggagatcaggcctggactcaggccctcccgtcggtcattaagcaggagagcaaagggagaaagctctaggctaaaggccagaagacctagccctgccaataaaatcaacctcattttgtgaatgcctgttgtgtgccaaggaccctgctaagtgctttgcttgaagaaaaaatgctgggcatcttggtgcagcacaaagtccggagtggcgtctcgggcatcgtgggcatggaggtggatgggctgcccttccacaacacccacgccgagatgatccagaagctggtggacgtcaccacggcacaggtgtaaccgtccatgttccgtgtgagcagagtccctaccaacgggcaggtctgcatccggggagaatgcagctgcttctggcgacaatcctgctagtaaacactggtcttcggcaacccacgtggtctcctgtgagaatcttctcgacagttacttatggggacacttgtgaacaattaactgccaggcagagcatgagaacaaacattcccaggccatgtaggataggatactccagactccagtcatcctcccccatccatggtttctgttactcatggtttcagttactcatagccaactgcagaccgaaaatactaaatgaaaaatttcagaaataaacaactcttaagttttaaa

SEQ ID NO: 386176 - DNA, 1183 bp, Homo sapiens
acgtgagctcaggctgtgggagcggatggagctgctacagtcagcgcttggggctggcctcagcttgtagacccgagccctgcagaacaaccccccgtggcgcaggagagcagaagaaagggggcctttatgcccttttgagggaagcacacattctgcaaggccgtggaaacaaagggaggaactgtttgtagccctcgtccagacgccccaaacaaacagtaagtcagaagggaacagagcacagcacagtccctccctccgccccaggcagtatccaccttgccccgccccacctaaggagcccaagggtattctgggagcccaccccaggacaatggcagggcaaaaccagtgagcaaggcagaaaattcctgaaattctccactgaggcccagctgttcctctccttgaaaagtcaaggcttggttcaagccagatagcacctgaggacagaacatatcagatggagaaggaaaggcaagtgacttgtccagagccactctgtcaaaaggggacttgagtcctcagggctgttgactccaaagctgacaagcaggtggcattcttcttcagagcagggcaagtgtaattctggaccaatgtgtgattctgagaccagaccaaccaactgaaggagccaagttacaccctgtttaaccctgccttcaaagggacgactctgtaagattctctgctacttattcaagttgacacgatgcccttcacactccacctgaggtcccgccttccctctgccataaggagtttgattctacaaaagaaaccaaacatcagaaatacatccagcatggctggagagctccgaccagccagcctggtggtcctgcccaggtcccttgctccagcttttgaaagattctgccaggtcaacactggtcctctacccctgctgggccagagtgagccagaaaagtggatgctgccccctcaaggtgctatctcagagaccaggaacgagctgccctccccactgttctgactccttcccctatcacctggcgcctgtcctggctgagatctttgagatcatggagaaagtccagccctggagaaatcccactggctctgccatctgtccactccatcgcccaagccagaaacccgcctgtacaggattaagaagaaaataaaaaacacttgcattaccaacacccagaga

SEQ ID NO: 386177 - DNA, 127 bp, Homo sapiens
gaccctctgacctctgacctttgcttcccggcagatttgaccacctggtggccatagagcgtgccggaagagctgctgatggcaattactacaatgcaaggaagatgaacatcaagcacttggttga

SEQ ID NO: 386178 - DNA, 297 bp, Homo sapiens
ggaccagtcctgcagatagttctgcttcctagaggcaggctgacagacacatgacttttccaactccatgatggaatcttgttttgctgttctaggtgtttctaactggggaggctatgccctggcctgcgcactctacatcctgtactcatgtgctgtccacagtcagtacctgaggaaagcagtcggaccctccagggcacctggagatcaggcctggactcaggccctcccgtcggtcattaaggtaacaaaccccagccagccgctcgcctggaagcagcttttaccctggat

SEQ ID NO: 386179 - DNA, 498 bp, Homo sapiens
aatcttctcgacagttacttatggggacacttgtgaacaattaactgccaggcagagcatgagaacaaacattcccaggccatgtaggataggatactccagactccagtcatcctcccccatccatggtttctgttactcatggtttcagttactcatagccaactgcagaccgaaaatactaaatgaaaaatttcagaaataaacaactcttaagttttaaattgtgtactcttcggaatatcgtgatgaaatctcacaccatcctgctccatcctacctaggacgtgaatcctccctttgtccagggtacccgtgctgtctacaccacccgcctgccagtcacccagcaggtgatcagatcgactgtcatggtattgcagtgcttatattcaagaacctcttatgtgactcagtaatgtcctcaaagtgcaagagcagagatgctggcaatttggatatgccaaaaagaggccataaagggcttcctttaagtga

SEQ ID NO: 386180 - DNA, 2704 bp, Homo sapiens
acgtgagctcaggctgtgggagcggatggagctgctacagtcagcgcttggggctggcctcagcttgtagacccgagccctgcagaacaaccccccgtggcgcaggagagcagaagaaagggggcctttatgcccttttgagggaagcacacattctgcaaggccgtggaaacaaagggaggaactgtttgtagccctcgtccagacgccccaaacaaacaatggagaaggaaaggcaagtgacttgtccagagccactctgtcaaaaggggacttgagtcctcagggctgttgactccaaagctgacaagcaggtggcattcttcttcagagcagggcaagtgtaattctggaccaatgtgtgattctgagaccagaccaaccaactgaaggagccaagttacaccctgtttaaccctgccttcaaagggacgactctgtaagattctctgctacttattcaagttgacacgatgcccttcacactccacctgaggtcccgccttccctctgccataaggagtttgattctacaaaagaaaccaaacatcagaaatacatccagcatggctggagagctccgaccagccagcctggtggtcctgcccaggtcccttgctccagcttttgaaagattctgccaggtcaacactggtcctctacccctgctgggccagagtgagccagaaaagtggatgctgccccctcaaggtgctatctcagagaccaggatgggccatccccagttctggaaatacgagttcggtgcctgcaccggcagcctggcttcgctggagcagtactcggagcagctgaaggacatggtggccttcttcctgggctgcagcttctccctggaggaggccttggagaaagcggggctccccagaagagacccagcaggtcacagccaggcgggtgctacaagacaacagtgccttgtgttacccatgctggcttctgctgccctctggtggtcacgatgaggcccattcccaaggacaagctggaagggctggtgcgggcctgctgctccctcggagaactgttgggaatcaaagagctttccaaacctgcctacggggatgccatggtgtgtcccccaggggaggttccagtgttctggccttctccgctgaccagtctcggagctgtcagcagctgtgagaccccactggcttttgccagcatcccaggctgcacagttatgactgacctgaaggatgcaaaggctccacctggttgtctcaccccagagagaattccagaggtccatcacatttcccaagatcctctgcactacagcatcgcgtcagtctctgcttctcagaagatcagagaactagagtctatgatcggcatagacccagggaaccgggggattgggcacctgctctgtaaagatgagctgctgaaggcctctctctcgctgtcccatgcccgctcagtgctcatcaccactgggttccccacacatttcaatcatgagcctccagaagagacagatggcccaccaggagctgttgctctggttgccttcctgcaggccttggagaaggaggtcgccataatcgttgaccagagagcctggaacttgcaccagaagattgttgaagatgctgttgagcaaggtgttctgaagacgcagatcccgatattaacttaccaaggtggatcagtggaagctgctcaggcattcctgtgcaaaaatggggacccgcagacacctagatttgaccacctggtggccatagagcgtgccggaagagctgctgatggcaattactacaatgcaaggaagatgaacatcaagcacttggttgaccccattgacgatctttttcttgctgcgaagaagattcctggaatctcatcaactggtgtttctaactggggaggctatgccctggcctgcgcactctacatcctgtactcatgtgctgtccacagtcagtacctgaggaaagcagtcggaccctccagggcacctggagatcaggcctggactcaggccctcccgtcggtcattaaggaagaaaaaatgctgggcatcttggtgcagcacaaagtccggagtggcgtctcgggcatcgtgggcatggaggtggatgggctgcccttccacaacacccacgccgagatgatccagaagctggtggacgtcaccacggcacaggtgtaaccgtccatgttccgtgtgagcagagtccctaccaacgggcaggtctgcatccggggagaatgcagctgcttctggcgacaatcctgctagtaaacactggtcttcggtgagcaacgaacactcgcctggcctgggaaactgcatgcccactttctgggaggggttagtgcaggtgccgtggacaaaggacaacatttctctggggctttttaacttttattcctaagactctaaaggcgttgatttcaaccctccttcactctggcttcttcaggcaacccacgtggtctcctgtgagaatcttctcgacagttacttatggggacacttgtgaacaattaactgccaggcagagcatgagaacaaacattcccaggccatgtaggataggatactccagactccagtcatcctcccccatccatggtttctgttactcatggtttcagttactcatagccaactgcagaccgaaaatactaaatgaaaaatttcagaaataaacaactcttaagttttaaa

SEQ ID NO: 386181 - DNA, 1017 bp, Homo sapiens
  misc_feature (28)..(28): n is a, c, g, or t
  misc_feature (33)..(35): n is a, c, g, or t
acaggcttgctggggatgaggtgacaangcgtnnncgaggtggcaattggggaaggggttctgggctgccgcaggcacacaggccagagcttcgtggatacctgcagggcccaaaggtccctccctgttttgaagagtgagtgatggctatgaggtagcggccaggctgatcacccctgcgttggctggaggcagaattctgtaaatcctcgccaagtctttctccaggccactggttagctcatctcagcctcctctgggagcatcaacaccaacatggcacaggggactgcagtggtgtgctttggacctgtgtacccacccaaggctaaaggcagagccaggagccaagttacaccctgtttaaccctgccttcaaagggacgactctgtaagaattctctggctactttaattcaaggttgacacgatgcccttccagcttgtcctttggggaaatgggatagcggaagagaaaggaggacgcccccgaggaaaaaaggtgacgagagaagagagcaggagaaaacaccatggatgaggagccgatggagaaaaaaaggcggacgaacaacgggagcgggataacacctggaacaacatataacagagtgagacagaatacaacaatatacaatacgcgcatagagaaaatgcgtgcaaccgagccaaagccaggagcggcgaacaaaccacacaacacgaaaccacggggaagcagggcagcaaccacaagcacaacagaaaggcagcaaggagaggcaaccacaagagacacggagcaatcaacgacagaaaggagcaggcgcacaaaaaaagaagcagtaaacccacaggaaatgaaaacacacacccaggagcgagagacagggtaccaacgagcaagcaggcaggagcacacgccagagaggagagaagaacaacacaagcaaaaagagagggagagagaggaaagacaaccagtaagagcaaagtagaccacaagagtgtggagagaagcggaagagacatcgcgag

SEQ ID NO: 386182 - DNA, 3105 bp, Homo sapiens
acgtgagctcaggctgtgggagcggatggagctgctacagtcagcgcttggggctggcctcagcttgtagacccgagccctgcagaacaaccccccgtggcgcaggagagcagaagaaagggggcctttatgcccttttgagggaagcacacattctgcaaggccgtggaaacaaagggaggaactgtttgtagccctcgtccagacgccccaaacaaacagtaagtcagaagggaacagagcacagcacagtccctccctccgccccaggcagtatccaccttgccccgccccacctaaggagcccaagggtattctgggagcccaccccaggacaatggcagggcaaaaccagtgagcaaggcagaaaattcctgaaattctccactgaggcccagctgttcctctccttgaaaagtcaaggcttggttcaagccagatagcacctgaggacagaacatatcagatggagaaggaaaggcaagtgacttgtccagagccactctgtcaaaaggggacttgagtcctcagggctgttgactccaaagctgacaagcaggtggcattcttcttcagagcagggcaagtgtaattctggaccaatgtgtgattctgagaccagaccaaccaactgaaggagccaagttacaccctgtttaaccctgccttcaaagggacgactctgtaagattctctgctacttattcaagttgacacgatgcccttcacactccacctgaggtcccgccttccctctgccataaggagtttgattctacaaaagaaaccaaacatcagaaatacatccagcatggctggagagctccgaccagccagcctggtggtcctgcccaggtcccttgctccagcttttgaaagattctgccaggtcaacactggtcctctacccctgctgggccagagtgagccagaaaagtggatgctgccccctcaaggtgctatctcagagaccaggatgggccatccccagttctggaaatacgagttcggtgcctgcaccggcagcctggcttcgctggagcagtactcggagcagctgaaggacatggtggccttcttcctgggctgcagcttctccctggaggaggccttggagaaagcggggctccccagaagagacccagcaggtcacagccaggcgggtgctacaagacaacagtgccttgtgttacccatgctggcttctgctgccctctggtggtcacgatgaggcccattcccaaggacaagctggaagggctggtgcgggcctgctgctccctcggaggtgagcaggggcaacctgttcacatgggcgacccagaactgttgggaatcaaagagctttccaaacctgcctacggggatgccatggtgtgtcccccaggggaggttccagtgttctggccttctccgctgaccagtctcggagctgtcagcagctgtgagaccccactggcttttgccagcatcccaggctgcacagttatgactgacctgaaggatgcaaaggctccacctggttgtctcaccccagagagaattccagaggtccatcacatttcccaagatcctctgcactacagcatcgcgtcagtctctgcttctcagaagatcagagaactagagtctatgatcggcatagacccagggaaccgggggattgggcacctgctctgtaaagatgagctgctgaaggcctctctctcgctgtcccatgcccgctcagtgctcatcaccactgggttccccacacatttcaatcatgagcctccagaagagacagatggcccaccaggagctgttgctctggttgccttcctgcaggccttggagaaggaggtcgccataatcgttgaccagagagcctggaacttgcaccagaagattgttgaagatgctgttgagcaaggtgttctgaagacgcagatcccgatattaacttaccaaggtggatcagtggaagctgctcaggcattcctgtgcaaaaatggggacccgcagacacctagatttgaccacctggtggccatagagcgtgccggaagagctgctgatggcaattactacaatgcaaggaagatgaacatcaagcacttggttgaccccattgacgatctttttcttgctgcgaagaagattcctggaatctcatcaactggagtcggtgatggaggcaacgagcttgggatgggtaaagtcaaggaggctgtgaggaggcacatacggcacggggatgtcatcgcctgcgacgtggaggctgactttgccgtcattgctggtgtttctaactggggaggctatgccctggcctgcgcactctacatcctgtactcatgtgctgtccacagtcagtacctgaggaaagcagtcggaccctccagggcacctggagatcaggcctggactcaggccctcccgtcggtcattaaggaagaaaaaatgctgggcatcttggtgcagcacaaagtccggagtggcgtctcgggcatcgtgggcatggaggtggatgggctgcccttccacaacacccacgccgagatgatccagaagctggtggacgtcaccacggcacaggtgtaaccgtccatgttccgtgtgagcagagtccctaccaacgggcaggtctgcatccggggagaatgcagctgcttctggcgacaatcctgctagtaaacactggtcttcggtgagcaacgaacactcgcctggcctgggaaactgcatgcccactttctgggaggggttagtgcaggtgccgtggacaaaggacaacatttctctggggctttttaacttttattcctaagactctaaaggcgttgatttcaaccctccttcactctggcttcttcaggcaacccacgtggtctcctgtgagaatcttctcgacagttacttatggggacacttgtgaacaattaactgccaggcagagcatgagaacaaacattcccaggccatgtaggataggatactccagactccagtcatcctcccccatccatggtttctgttactcatggtttcagttactcatagccaactgcagaccgaaaatactaaatgaaaaatttcagaaataaacaactcttaagttttaaa

SEQ ID NO: 386183 - DNA, 2850 bp, Homo sapiens
gtcgctcaccagtccgcagctcgtgcttgacagtgaggagctgctctcctccgtcgccgccgtccgcgctggtccccgcggcgccgccgctgctgccaccctcctcctccatcttctcctttttttccgatcccgcgggtcgctacgaggggaacccaggagacagcggacgcccgtcccctcgcagccgctgccgcggccccaggagtcggggtgcggcggctccagaactcggacgcaaagacgagtctctttcccgctctggccgcacggctcgctcctcgcctcctcccccttcggcgggcaccgctagtaccgcgcaaccaaaccgccccctgctccaccgccgcctcctcaggccgctccgcccacagccagcaaggagccaagttacaccctgtttaaccctgccttcaaagggacgactctgtaagattctctgctacttattcaagttgacacgatgcccttcacactccacctgaggtcccgccttccctctgccataaggagtttgattctacaaaagaaaccaaacatcagaaatacatccagcatggctggagagctccgaccagccagcctggtggtcctgcccaggtcccttgctccagcttttgaaagattctgccaggtcaacactggtcctctacccctgctgggccagagtgagccagaaaagtggatgctgccccctcaaggtgctatctcagagaccaggatgggccatccccagttctggaaatacgagttcggtgcctgcaccggcagcctggcttcgctggagcagtactcggagcagctgaaggacatggtggccttcttcctgggctgcagcttctccctggaggaggccttggagaaagcggggctccccagaagagacccagcaggtcacagccaggcgggtgctacaagacaacagtgccttgtgttacccatgctggcttctgctgccctctggtggtcacgatgaggcccattcccaaggacaagctggaagggctggtgcgggcctgctgctccctcggaggtgagcaggggcaacctgttcacatgggcgacccagaactgttgggaatcaaagagctttccaaacctgcctacggggatgccatggtgtgtcccccaggggaggttccagtgttctggccttctccgctgaccagtctcggagctgtcagcagctgtgagaccccactggcttttgccagcatcccaggctgcacagttatgactgacctgaaggatgcaaaggctccacctggttgtctcaccccagagagaattccagaggtccatcacatttcccaagatcctctgcactacagcatcgcgtcagtctctgcttctcagaagatcagagaactagagtctatgatcggcatagacccagggaaccgggggattgggcacctgctctgtaaagatgagctgctgaaggcctctctctcgctgtcccatgcccgctcagtgctcatcaccactgggttccccacacatttcaatcatgagcctccagaagagacagatggcccaccaggagctgttgctctggttgccttcctgcaggccttggagaaggaggtcgccataatcgttgaccagagagcctggaacttgcaccagaagattgttgaagatgctgttgagcaaggtgttctgaagacgcagatcccgatattaacttaccaaggtggatcagtggaagctgctcaggcattcctgtgcaaaaatggggacccgcagacacctagatttgaccacctggtggccatagagcgtgccggaagagctgctgatggcaattactacaatgcaaggaagatgaacatcaagcacttggttgaccccattgacgatctttttcttgctgcgaagaagattcctggaatctcatcaactggagtcggtgatggaggcaacgagcttgggatgggtaaagtcaaggaggctgtgaggaggcacatacggcacggggatgtcatcgcctgcgacgtggaggctgactttgccgtcattgctggtgtttctaactggggaggctatgccctggcctgcgcactctacatcctgtactcatgtgctgtccacagtcagtacctgaggaaagcagtcggaccctccagggcacctggagatcaggcctggactcaggccctcccgtcggtcattaaggaagaaaaaatgctgggcatcttggtgcagcacaaagtccggagtggcgtctcgggcatcgtgggcatggaggtggatgggctgcccttccacaacacccacgccgagatgatccagaagctggtggacgtcaccacggcacaggtgtaaccgtccatgttccgtgtgagcagagtccctaccaacgggcaggtctgcatccggggagaatgcagctgcttctggcgacaatcctgctagtaaacactggtcttcggtgagcaacgaacactcgcctggcctgggaaactgcatgcccactttctgggaggggttagtgcaggtgccgtggacaaaggacaacatttctctggggctttttaacttttattcctaagactctaaaggcgttgatttcaaccctccttcactctggcttcttcaggcaacccacgtggtctcctgtgagaatcttctcgacagttacttatggggacacttgtgaacaattaactgccaggcagagcatgagaacaaacattcccaggccatgtaggataggatactccagactccagtcatcctcccccatccatggtttctgttactcatggtttcagttactcatagccaactgcagaccgaaaatactaaatgaaaaatttcagaaataaacaactcttaagttttaaa

SEQ ID NO: 386184 - DNA, 2860 bp, Homo sapiens
acgtgagctcaggctgtgggagcggatggagctgctacagtcagcgcttggggctggcctcagcttgtagacccgagccctgcagaacaaccccccgtggcgcaggagagcagaagaaagggggcctttatgcccttttgagggaagcacacattctgcaaggccgtggaaacaaagggaggaactgtttgtagccctcgtccagacgccccaaacaaacaatggagaaggaaaggcaagtgacttgtccagagccactctgtcaaaaggggacttgagtcctcagggctgttgactccaaagctgacaagcaggtggcattcttcttcagagcagggcaagtgtaattctggaccaatgtgtgattctgagaccagaccaaccaactgaaggagccaagttacaccctgtttaaccctgccttcaaagggacgactctgtaagattctctgctacttattcaagttgacacgatgcccttcacactccacctgaggtcccgccttccctctgccataaggagtttgattctacaaaagaaaccaaacatcagaaatacatccagcatggctggagagctccgaccagccagcctggtggtcctgcccaggtcccttgctccagcttttgaaagattctgccaggtcaacactggtcctctacccctgctgggccagagtgagccagaaaagtggatgctgccccctcaaggtgctatctcagagaccaggatgggccatccccagttctggaaatacgagttcggtgcctgcaccggcagcctggcttcgctggagcagtactcggagcagctgaaggacatggtggccttcttcctgggctgcagcttctccctggaggaggccttggagaaagcggggctccccagaagagacccagcaggtcacagccaggcgggtgctacaagacaacagtgccttgtgttacccatgctggcttctgctgccctctggtggtcacgatgaggcccattcccaaggacaagctggaagggctggtgcgggcctgctgctccctcggaggtgagcaggggcaacctgttcacatgggcgacccagaactgttgggaatcaaagagctttccaaacctgcctacggggatgccatggtgtgtcccccaggggaggttccagtgttctggccttctccgctgaccagtctcggagctgtcagcagctgtgagaccccactggcttttgccagcatcccaggctgcacagttatgactgacctgaaggatgcaaaggctccacctggttgtctcaccccagagagaattccagaggtccatcacatttcccaagatcctctgcactacagcatcgcgtcagtctctgcttctcagaagatcagagaactagagtctatgatcggcatagacccagggaaccgggggattgggcacctgctctgtaaagatgagctgctgaaggcctctctctcgctgtcccatgcccgctcagtgctcatcaccactgggttccccacacatttcaatcatgagcctccagaagagacagatggcccaccaggagctgttgctctggttgccttcctgcaggccttggagaaggaggtcgccataatcgttgaccagagagcctggaacttgcaccagaagattgttgaagatgctgttgagcaaggtgttctgaagacgcagatcccgatattaacttaccaaggtggatcagtggaagctgctcaggcattcctgtgcaaaaatggggacccgcagacacctagatttgaccacctggtggccatagagcgtgccggaagagctgctgatggcaattactacaatgcaaggaagatgaacatcaagcacttggttgaccccattgacgatctttttcttgctgcgaagaagattcctggaatctcatcaactggagtcggtgatggaggcaacgagcttgggatgggtaaagtcaaggaggctgtgaggaggcacatacggcacggggatgtcatcgcctgcgacgtggaggctgactttgccgtcattgctggtgtttctaactggggaggctatgccctggcctgcgcactctacatcctgtactcatgtgctgtccacagtcagtacctgaggaaagcagtcggaccctccagggcacctggagatcaggcctggactcaggccctcccgtcggtcattaaggaagaaaaaatgctgggcatcttggtgcagcacaaagtccggagtggcgtctcgggcatcgtgggcatggaggtggatgggctgcccttccacaacacccacgccgagatgatccagaagctggtggacgtcaccacggcacaggtgtaaccgtccatgttccgtgtgagcagagtccctaccaacgggcaggtctgcatccggggagaatgcagctgcttctggcgacaatcctgctagtaaacactggtcttcggtgagcaacgaacactcgcctggcctgggaaactgcatgcccactttctgggaggggttagtgcaggtgccgtggacaaaggacaacatttctctggggctttttaacttttattcctaagactctaaaggcgttgatttcaaccctccttcactctggcttcttcaggcaacccacgtggtctcctgtgagaatcttctcgacagttacttatggggacacttgtgaacaattaactgccaggcagagcatgagaacaaacattcccaggccatgtaggataggatactccagactccagtcatcctcccccatccatggtttctgttactcatggtttcagttactcatagccaactgcagaccgaaaatactaaatgaaaaatttcagaaataaacaactcttaagttttaaa

SEQ ID NO: 386185 - DNA, 1966 bp, Homo sapiens
aattatggagtagcctgagttgtcaaagccttaatccctattctccttcacctcttcctcaaataccatttacaataatcctgcaatttgagtttctgttttagagaaagaaccataaactactcaaccagttctaattggatgctccctgctgaggaaattacattttccttttccatctgcagaactgttgggaatcaaagagctttccaaacctgcctacggggatgccatggtgtgtcccccaggggaggttccagtgttctggccttctccgctgaccagtctcggagctgtcagcagctgtgagaccccactggcttttgccagcatcccaggctgcacagttatgactgacctgaaggatgcaaaggctccacctggttgtctcaccccagagagaattccagaggtccatcacatttcccaagatcctctgcactacagcatcgcgtcagtctctgcttctcagaagatcagagaactagagtctatgatcggcatagacccagggaaccgggggattgggcacctgctctgtaaagatgagctgctgaaggcctctctctcgctgtcccatgcccgctcagtgctcatcaccactgggttccccacacatttcaatcatgagcctccagaagagacagatggcccaccaggagctgttgctctggttgccttcctgcaggccttggagaaggaggtcgccataatcgttgaccagagagcctggaacttgcaccagaagattgttgaagatgctgttgagcaaggtgttctgaagacgcagatcccgatattaacttaccaaggtggatcagtggaagctgctcaggcattcctgtgcaaaaatggggacccgcagacacctagatttgaccacctggtggccatagagcgtgccggaagagctgctgatggcaattactacaatgcaaggaagatgaacatcaagcacttggttgaccccattgacgatctttttcttgctgcgaagaagattcctggaatctcatcaactggagtcggtgatggaggcaacgagcttgggatgggtaaagtcaaggaggctgtgaggaggcacatacggcacggggatgtcatcgcctgcgacgtggaggctgactttgccgtcattgctggtgtttctaactggggaggctatgccctggcctgcgcactctacatcctgtactcatgtgctgtccacagtcagtacctgaggaaagcagtcggaccctccagggcacctggagatcaggcctggactcaggccctcccgtcggtcattaaggaagaaaaaatgctgggcatcttggtgcagcacaaagtccggagtggcgtctcgggcatcgtgggcatggaggtggatgggctgcccttccacaacacccacgccgagatgatccagaagctggtggacgtcaccacggcacaggtgtaaccgtccatgttccgtgtgagcagagtccctaccaacgggcaggtctgcatccggggagaatgcagctgcttctggcgacaatcctgctagtaaacactggtcttcggtgagcaacgaacactcgcctggcctgggaaactgcatgcccactttctgggaggggttagtgcaggtgccgtggacaaaggacaacatttctctggggctttttaacttttattcctaagactctaaaggcgttgatttcaaccctccttcactctggcttcttcaggcaacccacgtggtctcctgtgagaatcttctcgacagttacttatggggacacttgtgaacaattaactgccaggcagagcatgagaacaaacattcccaggccatgtaggataggatactccagactccagtcatcctcccccatccatggtttctgttactcatggtttcagttactcatagccaactgcagaccgaaaatactaaatgaaaaatttcagaaataaacaactcttaagttttaaa

SEQ ID NO: 386186 - DNA, 3697 bp, Homo sapiens
acgtgagctcaggctgtgggagcggatggagctgctacagtcagcgcttggggctggcctcagcttgtagacccgagccctgcagaacaaccccccgtggcgcaggagagcagaagaaagggggcctttatgcccttttgagggaagcacacattctgcaaggccgtggaaacaaagggaggaactgtttgtagccctcgtccagacgccccaaacaaacagagccaagttacaccctgtttaaccctgccttcaaagggacgactctgtaagattctctgctacttattcaagttgacacgatgcccttcacactccacctgaggtcccgccttccctctgccataaggagtttgattctacaaaagaaaccaaacatcagaaatacatccagcatggctggagagctccgaccagccagcctggtggtcctgcccaggtcccttgctccagcttttgaaagattctgccaggtcaacactggtcctctacccctgctgggccagagtgagccagaaaagtggatgctgccccctcaaggtgctatctcagagaccaggatgggccatccccagttctggaaatacgagttcggtgcctgcaccggcagcctggcttcgctggagcagtactcggagcagctgaaggacatggtggccttcttcctgggctgcagcttctccctggaggaggccttggagaaagcggggctccccagaagagacccagcaggtcacagccaggcgggtgctacaagacaacagtgccttgtgttacccatgctggcttctgctgccctctggtggtcacgatgaggcccattcccaaggacaagctggaagggctggtgcgggcctgctgctccctcggaggtgagcaggggcaacctgttcacatgggcgacccagaactgttgggaatcaaagagctttccaaacctgcctacggggatgccatggtgtgtcccccaggggaggttccagtgttctggccttctccgctgaccagtctcggagctgtcagcagctgtgagaccccactggcttttgccagcatcccaggctgcacagttatgactgacctgaaggatgcaaaggctccacctggttgtctcaccccagagagaattccagaggtccatcacatttcccaagatcctctgcactacagcatcgcgtcagtctctgcttctcagaagatcagagaactagagtctatgatcggcatagacccagggaaccgggggattgggcacctgctctgtaaagatgagctgctgaaggcctctctctcgctgtcccatgcccgctcagtgctcatcaccactgggttccccacacatttcaatcatgagcctccagaagagacagatggcccaccaggagctgttgctctggttgccttcctgcaggccttggagaaggaggtcgccataatcgttgaccagagagcctggaacttgcaccagaagattgttgaagatgctgttgagcaaggtgttctgaagacgcagatcccgatattaacttaccaaggtggatcagtggaagctgctcaggcattcctgtgcaaaaatggggacccgcagacacctagatttgaccacctggtggccatagagcgtgccggaagagctgctgatggcaattactacaatgcaaggaagatgaacatcaagcacttggttgaccccattgacgatctttttcttgctgcgaagaagattcctggaatctcatcaactggagtcggtgatggaggcaacgagcttgggatgggtaaagtcaaggaggctgtgaggaggcacatacggcacggggatgtcatcgcctgcgacgtggaggctgactttgccgtcattgctggtgtttctaactggggaggctatgccctggcctgcgcactctacatcctgtactcatgtgctgtccacagtcagtacctgaggaaagcagtcggaccctccagggcacctggagatcaggcctggactcaggccctcccgtcggtcattaagcaggagagcaaagggagaaagctctaggctaaaggccagaagacctagccctgccaataaaatcaacctcattttgtgaatgcctgttgtgtgccaaggaccctgctaagtgctttgcttgtacgtaatcctcagaacaaccctctaaaggaggcatgatgagtacttttatcatcaccctccccattttacagataagcacactaaggcacagaacagttaaaattcctgccaggaaagactcaagtcagacctttctgatccccaaaccactctgcctgctaggccccgggctgcggcttcaggatgggggcttgtattctctgtgactctgctacacctagatgctcccactcccacagtcaccctggtcatttctagaaggcaacagcagcaggatttgacacatgccccacattaggctaagaggtctcaggagaaatgggggcctttggcacaaagactattggcagataatccagggctgggaggaacttattggcaggaaatagcctgcactgcacctgcaggaggagtgaatcttcagtgttggttaaggaaatgcaggctggccgggcacagtgatgtgcacctatagtcccagctagtcaggagactgagacagaagaatcacttgaggccaggagttcaataccagtctgggcaacatagcaagaccccatctctaaaaacggacaatcaaactaagaaactatgtttccattaaagcatattatttagttacataacagtaactaccaaaagaagcagcccaaactattcccgtgattgtttctggggagtagatttgggggccaatgagctgtgatggaggacacttacttttcatgacttttccaatggtattagtactttaaaccaaaattttacttttttaaaaagcaagtatgtcaaggcaaaggatccttctcacttataaatgtgtataaaagaaatttctttttcctccccctccactccttctatttctgccctatttttttccaggaagaaaaaatgctgggcatcttggtgcagcacaaagtccggagtggcgtctcgggcatcgtgggcatggaggtggatgggctgcccttccacaacacccacgccgagatgatccagaagctggtggacgtcaccacggcacaggtgtaaccgtccatgttccgtgtgagcagagtccctaccaacgggcaggtctgcatccggggagaatgcagctgcttctggcgacaatcctgctagtaaacactggtcttcggtgagcaacgaacactcgcctggcctgggaaactgcatgcccactttctgggaggggttagtgcaggtgccgtggacaaaggacaacatttctctggggctttttaacttttattcctaagactctaaaggcgttgatttcaaccctccttcactctggcttcttcaggcaacccacgtggtctcctgtgagaatcttctcgacagttacttatggggacacttgtgaacaattaactgccaggcagagcatgagaacaaacattcccaggccatgtaggataggatactccagactccagtcatcctcccccatccatggtttctgttactcatggtttcagttactcatagccaactgcagaccgaaaatactaaatgaaaaatttcagaaataaacaactcttaagttttaaa

SEQ ID NO: 386187 - DNA, 3739 bp, Homo sapiens
acgtgagctcaggctgtgggagcggatggagctgctacagtcagcgcttggggctggcctcagcttgtagacccgagccctgcagaacaaccccccgtggcgcaggagagcagaagaaagggggcctttatgcccttttgagggaagcacacattctgcaaggccgtggaaacaaagggaggaactgtttgtagccctcgtccagacgccccaaacaaacagagccaagttacaccctgtttaaccctgccttcaaagggacgactctgtaagattctctgctacttattcaagttgacacgatgcccttcacactccacctgaggtcccgccttccctctgccataaggagtttgattctacaaaagaaaccaaacatcagaaatacatccagcatggctggagagctccgaccagccagcctggtggtcctgcccaggtcccttgctccagcttttgaaagattctgccaggtcaacactggtcctctacccctgctgggccagagtgagccagaaaagtggatgctgccccctcaaggtgctatctcagagaccaggatgggccatccccagttctggaaatacgagttcggtgcctgcaccggcagcctggcttcgctggagcagtactcggagcagctgaaggacatggtggccttcttcctgggctgcagcttctccctggaggaggccttggagaaagcggggctccccagaagagacccagcaggtcacagccaggcgggtgctacaagacaacagtgccttgtgttacccatgctggcttctgctgccctctggtggtcacgatgaggcccattcccaaggacaagctggaagggctggtgcgggcctgctgctccctcggaggtgagcaggggcaacctgttcacatgggcgacccagaactgttgggaatcaaagagctttccaaacctgcctacggggatgccatggtgtgtcccccaggggaggttccagtgttctggccttctccgctgaccagtctcggagctgtcagcagctgtgagaccccactggcttttgccagcatcccaggctgcacagttatgactgacctgaaggatgcaaaggctccacctggttgtctcaccccagagagaattccagaggtccatcacatttcccaagatcctctgcactacagcatcgcgtcagtctctgcttctcagaagatcagagaactagagtctatgatcggcatagacccagggaaccgggggattgggcacctgctctgtaaagatgagctgctgaaggcctctctctcgctgtcccatgcccgctcagtgctcatcaccactgggttccccacacatttcaatcatgagcctccagaagagacagatggcccaccaggagctgttgctctggttgccttcctgcaggccttggagaaggaggtcgccataatcgttgaccagagagcctggaacttgcaccagaagattgttgaagatgctgttgagcaaggtgttctgaagacgcagatcccgatattaacttaccaaggtggatcagtggaagctgctcaggcattcctgtgcaaaaatggggacccgcagacacctagatttgaccacctggtggccatagagcgtgccggaagagctgctgatggcaattactacaatgcaaggaagatgaacatcaagcacttggttgaccccattgacgatctttttcttgctgcgaagaagattcctggaatctcatcaactggagtcggtgatggaggcaacgagcttgggatgggtaaagtcaaggaggctgtgaggaggcacatacggcacggggatgtcatcgcctgcgacgtggaggctgactttgccgtcattgctggtgagcactcggatggccgcccagtccggccggctacccagggtgtttctaactggggaggctatgccctggcctgcgcactctacatcctgtactcatgtgctgtccacagtcagtacctgaggaaagcagtcggaccctccagggcacctggagatcaggcctggactcaggccctcccgtcggtcattaagcaggagagcaaagggagaaagctctaggctaaaggccagaagacctagccctgccaataaaatcaacctcattttgtgaatgcctgttgtgtgccaaggaccctgctaagtgctttgcttgtacgtaatcctcagaacaaccctctaaaggaggcatgatgagtacttttatcatcaccctccccattttacagataagcacactaaggcacagaacagttaaaattcctgccaggaaagactcaagtcagacctttctgatccccaaaccactctgcctgctaggccccgggctgcggcttcaggatgggggcttgtattctctgtgactctgctacacctagatgctcccactcccacagtcaccctggtcatttctagaaggcaacagcagcaggatttgacacatgccccacattaggctaagaggtctcaggagaaatgggggcctttggcacaaagactattggcagataatccagggctgggaggaacttattggcaggaaatagcctgcactgcacctgcaggaggagtgaatcttcagtgttggttaaggaaatgcaggctggccgggcacagtgatgtgcacctatagtcccagctagtcaggagactgagacagaagaatcacttgaggccaggagttcaataccagtctgggcaacatagcaagaccccatctctaaaaacggacaatcaaactaagaaactatgtttccattaaagcatattatttagttacataacagtaactaccaaaagaagcagcccaaactattcccgtgattgtttctggggagtagatttgggggccaatgagctgtgatggaggacacttacttttcatgacttttccaatggtattagtactttaaaccaaaattttacttttttaaaaagcaagtatgtcaaggcaaaggatccttctcacttataaatgtgtataaaagaaatttctttttcctccccctccactccttctatttctgccctatttttttccaggaagaaaaaatgctgggcatcttggtgcagcacaaagtccggagtggcgtctcgggcatcgtgggcatggaggtggatgggctgcccttccacaacacccacgccgagatgatccagaagctggtggacgtcaccacggcacaggtgtaaccgtccatgttccgtgtgagcagagtccctaccaacgggcaggtctgcatccggggagaatgcagctgcttctggcgacaatcctgctagtaaacactggtcttcggtgagcaacgaacactcgcctggcctgggaaactgcatgcccactttctgggaggggttagtgcaggtgccgtggacaaaggacaacatttctctggggctttttaacttttattcctaagactctaaaggcgttgatttcaaccctccttcactctggcttcttcaggcaacccacgtggtctcctgtgagaatcttctcgacagttacttatggggacacttgtgaacaattaactgccaggcagagcatgagaacaaacattcccaggccatgtaggataggatactccagactccagtcatcctcccccatccatggtttctgttactcatggtttcagttactcatagccaactgcagaccgaaaatactaaatgaaaaatttcagaaataaacaactcttaagttttaaa

SEQ ID NO: 386188 - DNA, 1194 bp, Homo sapiens
cctgcaaaagtgtaaatctgtgaagtgctaaaccaagcccatatacttccaagtggtaagtggactgtaggaccttgtgaaaaatgggcccgggacccctaatttgaccacctggtggccatagagcgtgccggaagagctgctgatggcaattactacaatgcaaggaagatgaacatcaagcacttggttgaccccattgacgatctttttcttgctgcgaagaagattcctggaatctcatcaactggagtcggtgatggaggcaacgagcttgggatgggtaaagtcaaggaggctgtgaggaggcacatacggcacggggatgtcatcgcctgcgacgtggaggctgactttgccgtcattgctggtgtttctaactggggaggctatgccctggcctgcgcactctacatcctgtactcatgtgctgtccacagtcagtacctgaggaaagcagtcggaccctccagggcacctggagatcaggcctggactcaggccctcccgtcggtcattaaggaagaaaaaatgctgggcatcttggtgcagcacaaagtccggagtggcgtctcgggcatcgtgggcatggaggtggatgggctgcccttccacaacacccacgccgagatgatccagaagctggtggacgtcaccacggcacaggtgtaaccgtccatgttccgtgtgagcagagtccctaccaacgggcaggtctgcatccggggagaatgcagctgcttctggcgacaatcctgctagtaaacactggtcttcggtgagcaacgaacactcgcctggcctgggaaactgcatgcccactttctgggaggggttagtgcaggtgccgtggacaaaggacaacatttctctggggctttttaacttttattcctaagactctaaaggcgttgatttcaaccctccttcactctggcttcttcaggcaacccacgtggtctcctgtgagaatcttctcgacagttacttatggggacacttgtgaacaattaactgccaggcagagcatgagaacaaacattcccaggccatgtaggataggatactccagactccagtcatcctcccccatccatggtttctgttactcatggtttcagttactcatagccaactgcagaccgaaaatactaaatgaaaaatttcagaaataaacaactcttaagttttaaa

SEQ ID NO: 386189 - DNA, 2485 bp, Homo sapiens
acgtgagctcaggctgtgggagcggatggagctgctacagtcagcgcttggggctggcctcagcttgtagacccgagccctgcagaacaaccccccgtggcgcaggagagcagaagaaagggggcctttatgcccttttgagggaagcacacattctgcaaggccgtggaaacaaagggaggaactgtttgtagccctcgtccagacgccccaaacaaacagagccaagttacaccctgtttaaccctgccttcaaagggacgactctgtaagattctctgctacttattcaagttgacacgatgcccttcacactccacctgaggtcccgccttccctctgccataaggagtttgattctacaaaagaaaccaaacatcagaaatacatccagcatggctggagagctccgaccagccagcctggtggtcctgcccaggtcccttgctccagcttttgaaagattctgccaggtcaacactggtcctctacccctgctgggccagagtgagccagaaaagtggatgctgccccctcaaggtgctatctcagagaccaggatgggccatccccagttctggaaatacgagttcggtgcctgcaccggcagcctggcttcgctggagcagtactcggagcagctgaaggacatggtggccttcttcctgggctgcagcttctccctggaggaggccttggagaaagcggggctccccagaagagacccagcaggtcacagccaggcgggtgctacaagacaacagtgccttgtgttacccatgctggcttctgctgccctctggtggtcacgatgaggcccattcccaaggacaagctggaagggctggtgcgggcctgctgctccctcggaggtgagcaggggcaacctgttcacatgggcgacccagaactgttgggaatcaaagagctttccaaacctgcctacggggatgccatggtgtgtcccccaggggaggttccagtgttctggccttctccgctgaccagtctcggagctgtcagcagctgtgagaccccactggcttttgccagcatcccaggctgcacagttatgactgacctgaaggatgcaaaggctccacctggttgtctcaccccagagagaattccagaggtccatcacatttcccaagatcctctgcactacagcatcgcgtcagtctctgcttctcagaagatcagagaactagagtctatgatcggcatagacccagggaaccgggggattgggcacctgctctgtaaagatgagctgctgaaggcctctctctcgctgtcccatgcccgctcagtgctcatcaccactgggttccccacacatttcaatcatgagcctccagaagagacagatggcccaccaggagctgttgctctggttgccttcctgcaggccttggagaaggaggtcgccataatcgttgaccagagagcctggaacttgcaccagaagattgttgaagatgctgttgagcaaggtgttctgaagacgcagatcccgatattaacttaccaaggtggatcagtggaagctgctcaggcattcctgtgcaaaaatggggacccgcagacacctagatttgaccacctggtggccatagagcgtgccggaagagctgctgatggcaattactacaatgcaaggaagatgaacatcaagcacttggttgaccccattgacgatctttttcttgctgcgaagaagattcctggaatctcatcaactggagtcggtgatggaggcaacgagcttgggatgggtaaagtcaaggaggctgtgaggaggcacatacggcacggggatgtcatcgcctgcgacgtggaggctgactttgccgtcattgctggtgtttctaactggggaggctatgccctggcctgcgcactctacatcctgtactcatgtgctgtccacagtcagtacctgaggaaagcagtcggaccctccagggcacctggagatcaggcctggactcaggccctcccgtcggtcattaaggaagaaaaaatgctgggcatcttggtgcagcacaaagtccggagtggcgtctcgggcatcgtgggcatggaggtggatgggctgcccttccacaacacccacgccgagatgatccagaagctggtggacaaaggacaacatttctctggggctttttaacttttattcctaagactctaaaggcgttgatttcaaccctccttcactctggcttcttcaggcaacccacgtggtctcctgtgagaatcttctcgacagttacttatggggacacttgtgaacaattaactgccaggcagagcatgagaacaaacattcccaggccatgtaggataggatactccagactccagtcatcctcccccatccatggtttctgttactcatggtttcagttactcatagccaactgcagaccgaaaatactaaatgaaaaatttcagaaataaacaactcttaagttttaaa

SEQ ID NO: 386190 - DNA, 2521 bp, Homo sapiens
acgtgagctcaggctgtgggagcggatggagctgctacagtcagcgcttggggctggcctcagcttgtagacccgagccctgcagaacaaccccccgtggcgcaggagagcagaagaaagggggcctttatgcccttttgagggaagcacacattctgcaaggccgtggaaacaaagggaggaactgtttgtagccctcgtccagacgccccaaacaaacagagccaagttacaccctgtttaaccctgccttcaaagggacgactctgtaagattctctgctacttattcaagttgacacgatgcccttcacactccacctgaggtcccgccttccctctgccataaggagtttgattctacaaaagaaaccaaacatcagaaatacatccagcatggctggagagctccgaccagccagcctggtggtcctgcccaggtcccttgctccagcttttgaaagattctgccaggtcaacactggtcctctacccctgctgggccagagtgagccagaaaagtggatgctgccccctcaaggtgctatctcagagaccaggatgggccatccccagttctggaaatacgagttcggtgcctgcaccggcagcctggcttcgctggagcagtactcggagcagctgaaggacatggtggccttcttcctgggctgcagcttctccctggaggaggccttggagaaagcggggctccccagaagagacccagcaggtcacagccaggcgggtgctacaagacaacagtgccttgtgttacccatgctggcttctgctgccctctggtggtcacgatgaggcccattcccaaggacaagctggaagggctggtgcgggcctgctgctccctcggaggtgagcaggggcaacctgttcacatgggcgacccagaactgttgggaatcaaagagctttccaaacctgcctacggggatgccatggtgtgtcccccaggggaggttccagtgttctggccttctccgctgaccagtctcggagctgtcagcagctgtgagaccccactggcttttgccagcatcccaggctgcacagttatgactgacctgaaggatgcaaaggctccacctggttgtctcaccccagagagaattccagaggtccatcacatttcccaagatcctctgcactacagcatcgcgtcagtctctgcttctcagaagatcagagaactagagtctatgatcggcatagacccagggaaccgggggattgggcacctgctctgtaaagatgagctgctgaaggcctctctctcgctgtcccatgcccgctcagtgctcatcaccactgggttccccacacatttcaatcatgagcctccagaagagacagatggcccaccaggagctgttgctctggttgccttcctgcaggccttggagaaggaggtcgccataatcgttgaccagagagcctggaacttgcaccagaagattgttgaagatgctgttgagcaaggtgttctgaagacgcagatcccgatattaacttaccaaggtggatcagtggaagctgctcaggcattcctgtgcaaaaatggggacccgcagacacctagatttgaccacctggtggccatagagcgtgccggaagagctgctgatggcaattactacaatgcaaggaagatgaacatcaagcacttggttgaccccattgacgatctttttcttgctgcgaagaagattcctggaatctcatcaactggagtcggtgatggaggcaacgagcttgggatgggtaaagtcaaggaggctgtgaggaggcacatacggcacggggatgtcatcgcctgcgacgtggaggctgactttgccgtcattgctggtgtttctaactggggaggctatgccctggcctgcgcactctacatcctgtactcatgtgctgtccacagtcagtacctgaggaaagcagtcggaccctccagggcacctggagatcaggcctggactcaggccctcccgtcggtcattaaggaagaaaaaatgctgggcatcttggtgcagcacaaagtccggagtggcgtctcgggcatcgtgggcatggaggtggatgggctgcccttccacaacacccacgccgagatgatccagaagctggtggacgtcaccacggcacaggtgtaaccgtccatgttccgtgtgagcagagtccctaccaacgggcaggtctgcatccggggagaatgcagctgcttctggcgacaatcctgctagtaaacactggtcttcggcaacccacgtggtctcctgtgagaatcttctcgacagttacttatggggacacttgtgaacaattaactgccaggcagagcatgagaacaaacattcccaggccatgtaggataggatactccagactccagtcatcctcccccatccatggtttctgttactcatggtttcagttactcatagccaactgcagaccgaaaatactaaatgaaaaatttcagaaataaacaactcttaagttttaaa

SEQ ID NO: 386191 - DNA, 1073 bp, Homo sapiens
gtcgctcaccagtccgcagctcgtgcttgacagtgaggagctgctctcctccgtcgccgccgtccgcgctggtccccgcggcgccgccgctgctgccaccctcctcctccatcttctcctttttttccgatcccgcgggtcgctacgaggggaacccaggagacagcggacgcccgtcccctcgcagccgctgccgcggccccaggagtcggggtgcggcggctccagaactcggacgcaaagacgagtctctttcccgctctggccgcacggctcgctcctcgcctcctcccccttcggcgggcaccgctagtaccgcgcaaccaaaccgccccctgctccaccgccgcctcctcaggccgctccgcccacagccagcaaggagccaagttacaccctgtttaaccctgccttcaaagggacgactctgtaagattctctgctacttattcaagttgacacgatgcccttcacactccacctgaggtcccgccttccctctgccataaggagtttgattctacaaaagaaaccaaacatcagaaatacatccagcatggctggagagctccgaccagccagcctggtggtcctgcccaggtcccttgctccagcttttgaaagattctgccaggtcaacactggtcctctacccctgctgggccagagtgagccagaaaagtggatgctgccccctcaaggtgctatctcagagaccaggtaaaaagcttgggttactgtgggttgaagcttgggagtgtccaggtgctgtagccaggtgtctctgtcatccgggacctctctgtccagcctcagggaccttcacagtgcctggcacagaacctcactcatgactgttgctcaggaacgagctgccctccccactgttctgactccttcccctatcacctggcgcctgtcctggctgagatctttgagatcatggagaaagtccagccctggagaaatcccactggctctgccatctgtccactccatcgcccaagccagaaacccgcctgtacaggattaagaagaaaataaaaaacacttgcattaccaacacccagaga

SEQ ID NO: 386192 - DNA, 431 bp, Homo sapiens
cagatgagttgggcaagatactatagaagtgaataaaacagaacttgttggcaattggatgtaggagttgaggaagaaatcaaagacagaagctcagtcacttaagttgatgttggcaaggattgaaataggaagggacactagtaaagcacctgcaagtagtctgcaatcaataaatatttgtctaattaatggaggtgattattggtttggatttggatgtgttaacttgtatgtggctatggaccatctagatggatgagagccattaaaaatacagaaagatttggggcatccttatggagggggatggtgaacctgtcagaaagttcagagtgtggtgagcagaataaaaggctaggatagagccttgtaaaagccagtatttgtggacttgagggagataggaggaggtagacaggatgctgaga

SEQ ID NO: 386193 - DNA, 349 bp, Homo sapiens
gggtctggtcagggagtgtgtcctcagcttgtctggaggaggcctgcatccctcctgagctcttggaggtgcccaggaaccctgcttctcctcacagggcctggccatatagccagctccaacccaaagccctgcacagtgcctcacccactcccttctcctggtctctcctcaaaagaattttacatgattttaaaataataatagctttcatttacatagtgcttacatttatatagcacttaactatgtgcgatgtactaatttaagtactttatattaactcatataataaatggacacaacacaaaactcaaaaggtacaaaagaataaaacagttaaaaacta

SEQ ID NO: 386194 - DNA, 419 bp, Homo sapiens
atcttgtatagactctgggttcctttataatactcttgtgaatgcatttacttttgttttagcaggcaatcaactcaggtaggctggattatacattgttttgccttttgcaggcagtgattcaaatcccaattcagttatcaaagcaaagcctttgctaaactggtttgggtttgtcctgtgcatgtgtgattcagaggttaaggtgagacccgtgtaggtgcatacataaaagtggagagctccttcacctgctgtttctgctccaggagtttgctctgactccctgtctttctttggctcctttccctgcttgctctgaccagaaagaaaacaattcctatcagagttttagccacctacgtgtgctgcttagtgactgaagctgtcccaccctcaaggaaaaacttgatgagaaa

SEQ ID NO: 386195 - DNA, 483 bp, Homo sapiens
tgcctgttaatgggacataagccaaccagtcataaggctcaaaatcttagcactgttttgactttcctctttgtctgtcctttgtatttaatcagatgtactatatttatattcttcctcaaaacccattacgttgcttcccacagttacctcaaatatcaattacagttcaattgtaactgcttccgatactctaggcattacttgcaataaaaaaaatcttctaaaagcacagctccttttatttcactcttctactttatttcagtggctccccattgcttagtaaagaccaaattcccccagtgaacatcttttcattatctagtcccaaacctacactcttatttgggttccccttcacaaacttgcccagtgattctccaaagaacccccttgggttttctaaaacactttcaggaagtctatgagatcaaaattaatttcataataaaactcagatgttatctatcttttcattct

SEQ ID NO: 386196 - DNA, 550 bp, Homo sapiens
  misc_feature (550)..(550): n is a, c, g, or t
gctcttgcttcttcttcctgggtttgttttgtttttcagagaaacagggaagggaggacattttctaatataattgtttatagggacaaattgttaaaatatgatgtgtgtgcattttgcaagtttgacttgtgtaaaatagattacctctcctgtcttctttccttcccacactgtataccatcctgcctcatgtcaacccaatgaaattgattccattatttttcctctttcttatttccaaacctcataggctatcttgcctatgaacagttgaaagttttgacttctttggactcaattgaattcactaaaacaatgaattttaataatttttttccaaattcttattcccattgcctttaaaagtcctttagaggcaggttgtataatcataatagcctcctctgaactgccttgagttgtttttcttttctgcttttctgtcacttatgtaaagagtacatgtatttacataaaccttctctgtcccggcctatttcaaaataaagtggaaataaaaatctttagctcaatcttaaaaaaaaan

SEQ ID NO: 386197 - DNA, 364 bp, Homo sapiens
tttggtaatacttgccttaatgagttgtcttgctatgtagatatgccaaattgcaacttttaatgtttttttccaccatatgggtagttcttagaataaggacaggcctcaaaaggttgagatttatttttttatgttatataaacttttccttttggattttcctatttatttttcacctctgtttctttttcactgtttctcatacacctcaatcacatcaaaataaatgctttcttgatatctaatactaaagagcttgctggatatttataaaatattctgagtaccatattacatgtttagaattatttttatgttatacaagcagataattaaagcaagtctttgatcccaccaaagc

SEQ ID NO: 386198 - DNA, 1278 bp, Homo sapiens
  misc_feature (5)..(5): n is a, c, g, or t
  misc_feature (8)..(8): n is a, c, g, or t
  misc_feature (11)..(11): n is a, c, g, or t
  misc_feature (15)..(16): n is a, c, g, or t
  misc_feature (18)..(18): n is a, c, g, or t
ccgcntcnccnaccnncnggacgcccctttcgccccaacggtctcttggacaaagccgtgagcaacgtgatcgcctccctcacctgcgggcgccgcttcgagtacgacgaccctcgcttcctcaggctgctggacctagctcaggagggactgaaggaggagtcgggctttctgcgcgaggtgctgaatgctgtccccgtcctcctgcatatcccagcgctggctggcaaggtcctacgcttccaaaaggctttcctgacccagctggatgagctgctaactgagcacaggatgacctgggacccagcccagcccccccgagacctgactgaggccttcctggcagagatggagaaggccaaggggaaccctgagagcagcttcaatgatgagaacctgcgcatagtggtggctgacctgttctctgccgggatggtgaccacctcgaccacgctggcctggggcctcctgctcatgatcctacatccggatgtgcagcgtgagcccagctggggcccaaggcagggactgagggaggaagggtacagctgggggcccctgggcttagctgggacacccggggcttccagcacaggcgtggccaggctcctgtaagcctaacttcctccaacacaggaggaaggagagtgtcccctgggtgctgacccattgtggggacgcatgtctgtccaggccgtgtccaacaggagatcgacgacgtgatagggcaggtgcggcgaccagagatgggtgaccaggctcacatgccctacaccactgccgtgattcatgaggtgcagcgctttggggacatcgtccccctgggtgtgacccatatgacatcccgtgacatcgaagtacagggcttccgcatccctaagggaacgacactcatcaccaacctgtcatcggtgctgaaggatgaggccgtctgggagaagcccttccgcttccaccccgaacacttcctggatgcccagggccactttgtgaagccggaggccttcctgcctttctcagcaggccgccgtgcatgcctcggggagcccctggcccgcatggagctcttcctcttcttcacctccctgctgcagcacttcagcttctcggtgcccactggacagccccggcccagccactcatggtgtcttcagctttcctggtgaccccatccccctatgagctttgtgctgtgccccgctagaatggggtacctagtccccagcctgctccctagccagaggctctaatgtacaataaagcaatgtggtagttcca

SEQ ID NO: 386199 - DNA, 2480 bp, Homo sapiens
  misc_feature (1607)..(1607): n is a, c, g, or t
gaattccttgggcagtatatacaggctctattactcttggtgtttcattcacaaatgttatggctcctgaagtgtgatataaaactttaacttctttggcttgctcccatggatgaggcatgttctctaacaattttaagatcgcgtgcggtaaatactttagggcgcctagaaaagcctttttatcagtattgtacattttggaggccatgtcactgtgagtattaataatctttcgcagatgttccggtggcatctcggctttaggagtatataaattgcttctctttgcctttttggtcattttttttgcatgcttccttgattttcgagtgacgaaagaagcttttcctatgtccagttttctctttccatgtaattctactttcttttctgctttattctctaattcatctagacctggagggggcggtggcggtggtaatgtgaagtccacaatttcttcagcgtttatttcgaagttgcttggaggaggtggtggaggcggaagaaatgtatcctcatttaccgatgatggcaccatcggattatccagttcttcgatctcgtatccaggcggtggtggtggtggtggtggaagtgctaagtcgctgtcctcttcaaaaccaggaggagcccatttggtagtgaggcaggtatggggctagaagcactggtgcccctggccgtgatagtggccatcttcctgctcctggtggacctgatgcaccggcgccaacgctgggctgcacgctacccaccaggccccctgccactgcccgggctgggcaacctgctgcatgtggacttccagaacacaccatactgcttcgaccaggtgagggaggaggtcctggagggcggcagaggtgctgaggatcccctaccagaagcaaacatgttgcggcgccgcttcggggacgtgttcagcctgcagctggcctggacgccggtggtcgtgctcaatgggctggcggccgtgcgcgaggcgctggtgacccacggcgaggacaccgccgaccgcccgcctgtgcccatcacccagatcctgggtttcgggccgcgttcccaaggggtgttcctggcgcgctatgggcccgcgtggcgcgagcagaggcgcttctccgtctccaccttgcgcaacttgggcctgggcaagaagtcgctggagcagtgggtgaccgaggaggccgcctgcctttgtgccgccttcgccaaccactccggacgcccctttcgccccaacggtctcttggacaaagccgtgagcaacgtgatcgcctccctcacctgcgggcgccgcttcgagtacgacgaccctcgcttcctcaggctgctggacctagctcaggagggactgaaggaggagtcgggctttctgcgcgaggtgctgaatgctgtccccgtcctcctgcatatcccagcgctggctggcaaggtcctacgcttccaaaaggctttcctgacccagctggatgagctgctaactgagcacaggatgacctgggacccagcccagcccccccgagacctgactgaggccttcctggcagagatggagaaggtgagagtggctgccaggtggggggcaagggtggtgggttgancgtcccaggaggaatgaggggaggctgggcaaaaggttggaccagtgcatcacccggcgagccgcatctgggctgacaggtgcagaattggaggtcatttgggggctaccccgttctgtcccgagtatgctctcggccctgctcaggccaaggggaaccctgagagcagcttcaatgatgagaacctgcgcatagtggtggctgacctgttctctgccgggatggtgaccacctcgaccacgctggcctggggcctcctgctcatgatcctacatccggatgtgcagcgccgtgtccaacaggagatcgacgacgtgatagggcaggtgcggcgaccagagatgggtgaccaggctcacatgccctacaccactgccgtgattcatgaggtgcagcgctttggggacatcgtccccctgggtgtgacccatatgacatcccgtgacatcgaagtacagggcttccgcatccctaagggaacgacactcatcaccaacctgtcatcggtgctgaaggatgaggccgtctgggagaagcccttccgcttccaccccgaacacttcctggatgcccagggccactttgtgaagccggaggccttcctgcctttctcagcaggccgccgtgcatgcctcggggagcccctggcccgcatggagctcttcctcttcttcacctccctgctgcagcacttcagcttctcggtgcccactggacagccccggcccagccactcatggtgtcttcagctttcctggtgaccccatccccctatgagctttgtgctgtgccccgctagaatggggtacctagtccccagcctgctccctagccagaggctctaatgtacaataaagcaatgtggtagttcca

SEQ ID NO: 386200 - DNA, 3283 bp, Homo sapiens
  misc_feature (1607)..(1607): n is a, c, g, or t
gaattccttgggcagtatatacaggctctattactcttggtgtttcattcacaaatgttatggctcctgaagtgtgatataaaactttaacttctttggcttgctcccatggatgaggcatgttctctaacaattttaagatcgcgtgcggtaaatactttagggcgcctagaaaagcctttttatcagtattgtacattttggaggccatgtcactgtgagtattaataatctttcgcagatgttccggtggcatctcggctttaggagtatataaattgcttctctttgcctttttggtcattttttttgcatgcttccttgattttcgagtgacgaaagaagcttttcctatgtccagttttctctttccatgtaattctactttcttttctgctttattctctaattcatctagacctggagggggcggtggcggtggtaatgtgaagtccacaatttcttcagcgtttatttcgaagttgcttggaggaggtggtggaggcggaagaaatgtatcctcatttaccgatgatggcaccatcggattatccagttcttcgatctcgtatccaggcggtggtggtggtggtggtggaagtgctaagtcgctgtcctcttcaaaaccaggaggagcccatttggtagtgaggcaggtatggggctagaagcactggtgcccctggccgtgatagtggccatcttcctgctcctggtggacctgatgcaccggcgccaacgctgggctgcacgctacccaccaggccccctgccactgcccgggctgggcaacctgctgcatgtggacttccagaacacaccatactgcttcgaccaggtgagggaggaggtcctggagggcggcagaggtgctgaggatcccctaccagaagcaaacatgttgcggcgccgcttcggggacgtgttcagcctgcagctggcctggacgccggtggtcgtgctcaatgggctggcggccgtgcgcgaggcgctggtgacccacggcgaggacaccgccgaccgcccgcctgtgcccatcacccagatcctgggtttcgggccgcgttcccaaggggtgttcctggcgcgctatgggcccgcgtggcgcgagcagaggcgcttctccgtctccaccttgcgcaacttgggcctgggcaagaagtcgctggagcagtgggtgaccgaggaggccgcctgcctttgtgccgccttcgccaaccactccggacgcccctttcgccccaacggtctcttggacaaagccgtgagcaacgtgatcgcctccctcacctgcgggcgccgcttcgagtacgacgaccctcgcttcctcaggctgctggacctagctcaggagggactgaaggaggagtcgggctttctgcgcgaggtgctgaatgctgtccccgtcctcctgcatatcccagcgctggctggcaaggtcctacgcttccaaaaggctttcctgacccagctggatgagctgctaactgagcacaggatgacctgggacccagcccagcccccccgagacctgactgaggccttcctggcagagatggagaaggtgagagtggctgccaggtggggggcaagggtggtgggttgancgtcccaggaggaatgaggggaggctgggcaaaaggttggaccagtgcatcacccggcgagccgcatctgggctgacaggtgcagaattggaggtcatttgggggctaccccgttctgtcccgagtatgctctcggccctgctcaggccaaggggaaccctgagagcagcttcaatgatgagaacctgcgcatagtggtggctgacctgttctctgccgggatggtgaccacctcgaccacgctggcctggggcctcctgctcatgatcctacatccggatgtgcagcgtgagcccagctggggcccaaggcagggactgagggaggaagggtacagctgggggcccctgggcttagctgggacacccggggcttccagcacaggcgtggccaggctcctgtaagcctaacttcctccaacacaggaggaaggagagtgtcccctgggtgctgacccattgtggggacgcatgtctgtccaggccgtgtccaacaggagatcgacgacgtgatagggcaggtgcggcgaccagagatgggtgaccaggctcacatgccctacaccactgccgtgattcatgaggtgcagcgctttggggacatcgtccccctgggtgtgacccatatgacatcccgtgacatcgaagtacagggcttccgcatccctaagggaacgacactcatcaccaacctgtcatcggtgctgaaggatgaggccgtctgggagaagcccttccgcttccaccccgaacacttcctggatgcccagggccactttgtgaagccggaggccttcctgcctttctcagcaggccgccgtgcatgcctcggggagcccctggcccgcatggagctcttcctcttcttcacctccctgctgcagcacttcagcttctcggtgcccactggacagccccggcccagccactcatggtgtcttcagctttcctggtgaccccatccccctatgagctttgtgctgtgccccgctagaatggggtacctagtccccagcctgctccctagccagaggctctaatgtacaataaagcaatgtggtagttccaacttgggtcccctgctcacgccctcgttgggatcatcctcctcagggcaaccccacccctgcctcattcctgcttaccccaccgcctggccgcatttgagacgggtacgttgaggctgagcagatgtcagttacccttgcccataatcccatgtcccccactgacccaactctgactgcccagattggtgacaaggactacattgtcctggcatgtggggaaggggccagaatgggctgactagaggtgtcagtcagccctggatgtggtggagagggcaggactcagcctggaggcccatatttcaggcctaactcagcccaccccacatcagggacagcagtcctgccagcaccatcacaacagtcacctcccttcatatatgacaccccaaaatggaagacaaatcatgtcagggagctatatgccagggctacctcccagggctcagtcggcaggtgccagaacattccctgggaaggccccaggaaaacccaggaccgagccaccgccctcagcctgtcaccttgtgtccaaaattggtgggttcttggtctcactgacttcaagaatgaagccgtggacctcacggtgagtgttacagttctt

SEQ ID NO: 386201 - DNA, 3119 bp, Homo sapiens
  misc_feature (2246)..(2246): n is a, c, g, or t
gaattccttgggcagtatatacaggctctattactcttggtgtttcattcacaaatgttatggctcctgaagtgtgatataaaactttaacttctttggcttgctcccatggatgaggcatgttctctaacaattttaagatcgcgtgcggtaaatactttagggcgcctagaaaagcctttttatcagtattgtacattttggaggccatgtcactgtgagtattaataatctttcgcagatgttccggtggcatctcggctttaggagtatataaattgcttctctttgcctttttggtcattttttttgcatgcttccttgattttcgagtgacgaaagaagcttttcctatgtccagttttctctttccatgtaattctactttcttttctgctttattctctaattcatctagacctggagggggcggtggcggtggtaatgtgaagtccacaatttcttcagcgtttatttcgaagttgcttggaggaggtggtggaggcggaagaaatgtatcctcatttaccgatgatggcaccatcggattatccagttcttcgatctcgtatccaggcggtggtggtggtggtggtggaagtgctaagtcgctgtcctcttcaaaaccaggaggagcccatttggtagtgaggcaggtatggggctagaagcactggtgcccctggccgtgatagtggccatcttcctgctcctggtggacctgatgcaccggcgccaacgctgggctgcacgctacccaccaggccccctgccactgcccgggctgggcaacctgctgcatgtggacttccagaacacaccatactgcttcgaccaggtgagggaggaggtcctggagggcggcagaggtgctgaggatcccctaccagaagcaaacatgggtggtgggttaaaccacaggctggatcagaagccaggctgagaaggggaagcaggtttgggggacgtcctggggaaggacatttatacatggcatgaaggactggattttccaaaggccaaggaagagtagggcaagggcctggaggtggagctggacttggcagtgggcatgcaagcccattgggcaacatatgttatggagtacaaagtcccttctgctgacaccagaaggaaaggccttgggaatggaagatgagttagtcctgagtgccgtttaaatcacgaaatcgaggatgaagggggtgcagtgacccggttcaaaccttttgcactgtgggtcctcgggcctcactgctcaccggcatggaccatcatctgggaatgggatgctaactggggcctctcggcaattttggtgactcttgcaaggtcatacctgggtgacgcatccaaactgagttcctccatcacagaaggtgtgacccccacccccgccccaggatcaggaggctgggtctcctccttccacctgctcactcctggtagccccgggggtcgtccaaggttcaaataggactaggacctgtagtctggggtgatcctggcttgacaagaggccctgaccctccctctgcagttgcggcgccgcttcggggacgtgttcagcctgcagctggcctggacgccggtggtcgtgctcaatgggctggcggccgtgcgcgaggcgctggtgacccacggcgaggacaccgccgaccgcccgcctgtgcccatcacccagatcctgggtttcgggccgcgttcccaaggggtgttcctggcgcgctatgggcccgcgtggcgcgagcagaggcgcttctccgtctccaccttgcgcaacttgggcctgggcaagaagtcgctggagcagtgggtgaccgaggaggccgcctgcctttgtgccgccttcgccaaccactccggacgcccctttcgccccaacggtctcttggacaaagccgtgagcaacgtgatcgcctccctcacctgcgggcgccgcttcgagtacgacgaccctcgcttcctcaggctgctggacctagctcaggagggactgaaggaggagtcgggctttctgcgcgaggtgctgaatgctgtccccgtcctcctgcatatcccagcgctggctggcaaggtcctacgcttccaaaaggctttcctgacccagctggatgagctgctaactgagcacaggatgacctgggacccagcccagcccccccgagacctgactgaggccttcctggcagagatggagaaggtgagagtggctgccaggtggggggcaagggtggtgggttgancgtcccaggaggaatgaggggaggctgggcaaaaggttggaccagtgcatcacccggcgagccgcatctgggctgacaggtgcagaattggaggtcatttgggggctaccccgttctgtcccgagtatgctctcggccctgctcaggccaaggggaaccctgagagcagcttcaatgatgagaacctgcgcatagtggtggctgacctgttctctgccgggatggtgaccacctcgaccacgctggcctggggcctcctgctcatgatcctacatccggatgtgcagcgccgtgtccaacaggagatcgacgacgtgatagggcaggtgcggcgaccagagatgggtgaccaggctcacatgccctacaccactgccgtgattcatgaggtgcagcgctttggggacatcgtccccctgggtgtgacccatatgacatcccgtgacatcgaagtacagggcttccgcatccctaagggaacgacactcatcaccaacctgtcatcggtgctgaaggatgaggccgtctgggagaagcccttccgcttccaccccgaacacttcctggatgcccagggccactttgtgaagccggaggccttcctgcctttctcagcaggccgccgtgcatgcctcggggagcccctggcccgcatggagctcttcctcttcttcacctccctgctgcagcacttcagcttctcggtgcccactggacagccccggcccagccactcatggtgtcttcagctttcctggtgaccccatccccctatgagctttgtgctgtgccccgctagaatggggtacctagtccccagcctgctccctagccagaggctctaatgtacaataaagcaatgtggtagttcca

SEQ ID NO: 386202 - DNA, 3680 bp, Homo sapiens
gaattccttgggcagtatatacaggctctattactcttggtgtttcattcacaaatgttatggctcctgaagtgtgatataaaactttaacttctttggcttgctcccatggatgaggcatgttctctaacaattttaagatcgcgtgcggtaaatactttagggcgcctagaaaagcctttttatcagtattgtacattttggaggccatgtcactgtgagtattaataatctttcgcagatgttccggtggcatctcggctttaggagtatataaattgcttctctttgcctttttggtcattttttttgcatgcttccttgattttcgagtgacgaaagaagcttttcctatgtccagttttctctttccatgtaattctactttcttttctgctttattctctaattcatctagacctggagggggcggtggcggtggtaatgtgaagtccacaatttcttcagcgtttatttcgaagttgcttggaggaggtggtggaggcggaagaaatgtatcctcatttaccgatgatggcaccatcggattatccagttcttcgatctcgtatccaggcggtggtggtggtggtggtggaagtgctaagtcgctgtcctcttcaaaaccaggaggagcccatttggtagtgaggcaggtatggggctagaagcactggtgcccctggccgtgatagtggccatcttcctgctcctggtggacctgatgcaccggcgccaacgctgggctgcacgctacccaccaggccccctgccactgcccgggctgggcaacctgctgcatgtggacttccagaacacaccatactgcttcgaccaggtgagggaggaggtcctggagggcggcagaggtgctgaggatcccctaccagaagcaaacatgggtggtgggttaaaccacaggctggatcagaagccaggctgagaaggggaagcaggtttgggggacgtcctggggaaggacatttatacatggcatgaaggactggattttccaaaggccaaggaagagtagggcaagggcctggaggtggagctggacttggcagtgggcatgcaagcccattgggcaacatatgttatggagtacaaagtcccttctgctgacaccagaaggaaaggccttgggaatggaagatgagttagtcctgagtgccgtttaaatcacgaaatcgaggatgaagggggtgcagtgacccggttcaaaccttttgcactgtgggtcctcgggcctcactgctcaccggcatggaccatcatctgggaatgggatgctaactggggcctctcggcaattttggtgactcttgcaaggtcatacctgggtgacgcatccaaactgagttcctccatcacagaaggtgtgacccccacccccgccccaggatcaggaggctgggtctcctccttccacctgctcactcctggtagccccgggggtcgtccaaggttcaaataggactaggacctgtagtctggggtgatcctggcttgacaagaggccctgaccctccctctgcagttgcggcgccgcttcggggacgtgttcagcctgcagctggcctggacgccggtggtcgtgctcaatgggctggcggccgtgcgcgaggcgctggtgacccacggcgaggacaccgccgaccgcccgcctgtgcccatcacccagatcctgggtttcgggccgcgttcccaaggggtgttcctggcgcgctatgggcccgcgtggcgcgagcagaggcgcttctccgtctccaccttgcgcaacttgggcctgggcaagaagtcgctggagcagtgggtgaccgaggaggccgcctgcctttgtgccgccttcgccaaccactccggacgcccctttcgccccaacggtctcttggacaaagccgtgagcaacgtgatcgcctccctcacctgcgggcgccgcttcgagtacgacgaccctcgcttcctcaggctgctggacctagctcaggagggactgaaggaggagtcgggctttctgcgcgaggtgctgaatgctgtccccgtcctcctgcatatcccagcgctggctggcaaggtcctacgcttcctgggacccagcccagcccccccgagacctgactgaggccttcctggcagagatggagaaggccaaggggaaccctgagagcagcttcaatgatgagaacctgcgcatagtggtggctgacctgttctctgccgggatggtgaccacctcgaccacgctggcctggggcctcctgctcatgatcctacatccggatgtgcagcgtgagcccagctggggcccaaggcagggactgagggaggaagggtacagctgggggcccctgggcttagctgggacacccggggcttccagcacaggcgtggccaggctcctgtaagcctaacttcctccaacacaggaggaaggagagtgtcccctgggtgctgacccattgtggggacgcatgtctgtccaggccgtgtccaacaggagatcgacgacgtgatagggcaggtgcggcgaccagagatgggtgaccaggctcacatgccctacaccactgccgtgattcatgaggtgcagcgctttggggacatcgtccccctgggtgtgacccatatgacatcccgtgacatcgaagtacagggcttccgcatccctaagggaacgacactcatcaccaacctgtcatcggtgctgaaggatgaggccgtctgggagaagcccttccgcttccaccccgaacacttcctggatgcccagggccactttgtgaagccggaggccttcctgcctttctcagcaggccgccgtgcatgcctcggggagcccctggcccgcatggagctcttcctcttcttcacctccctgctgcagcacttcagcttctcggtgcccactggacagccccggcccagccactcatggtgtcttcagctttcctggtgaccccatccccctatgagctttgtgctgtgccccgctagaatggggtacctagtccccagcctgctccctagccagaggctctaatgtacaataaagcaatgtggtagttccaacttgggtcccctgctcacgccctcgttgggatcatcctcctcagggcaaccccacccctgcctcattcctgcttaccccaccgcctggccgcatttgagacgggtacgttgaggctgagcagatgtcagttacccttgcccataatcccatgtcccccactgacccaactctgactgcccagattggtgacaaggactacattgtcctggcatgtggggaaggggccagaatgggctgactagaggtgtcagtcagccctggatgtggtggagagggcaggactcagcctggaggcccatatttcaggcctaactcagcccaccccacatcagggacagcagtcctgccagcaccatcacaacagtcacctcccttcatatatgacaccccaaaatggaagacaaatcatgtcagggagctatatgccagggctacctcccagggctcagtcggcaggtgccagaacattccctgggaaggccccaggaaaacccaggaccgagccaccgccctcagcctgtcaccttgtgtccaaaattggtgggttcttggtctcactgacttcaagaatgaagccgtggacctcacggtgagtgttacagttctt

SEQ ID NO: 386203 - DNA, 2877 bp, Homo sapiens
gaattccttgggcagtatatacaggctctattactcttggtgtttcattcacaaatgttatggctcctgaagtgtgatataaaactttaacttctttggcttgctcccatggatgaggcatgttctctaacaattttaagatcgcgtgcggtaaatactttagggcgcctagaaaagcctttttatcagtattgtacattttggaggccatgtcactgtgagtattaataatctttcgcagatgttccggtggcatctcggctttaggagtatataaattgcttctctttgcctttttggtcattttttttgcatgcttccttgattttcgagtgacgaaagaagcttttcctatgtccagttttctctttccatgtaattctactttcttttctgctttattctctaattcatctagacctggagggggcggtggcggtggtaatgtgaagtccacaatttcttcagcgtttatttcgaagttgcttggaggaggtggtggaggcggaagaaatgtatcctcatttaccgatgatggcaccatcggattatccagttcttcgatctcgtatccaggcggtggtggtggtggtggtggaagtgctaagtcgctgtcctcttcaaaaccaggaggagcccatttggtagtgaggcaggtatggggctagaagcactggtgcccctggccgtgatagtggccatcttcctgctcctggtggacctgatgcaccggcgccaacgctgggctgcacgctacccaccaggccccctgccactgcccgggctgggcaacctgctgcatgtggacttccagaacacaccatactgcttcgaccaggtgagggaggaggtcctggagggcggcagaggtgctgaggatcccctaccagaagcaaacatgggtggtgggttaaaccacaggctggatcagaagccaggctgagaaggggaagcaggtttgggggacgtcctggggaaggacatttatacatggcatgaaggactggattttccaaaggccaaggaagagtagggcaagggcctggaggtggagctggacttggcagtgggcatgcaagcccattgggcaacatatgttatggagtacaaagtcccttctgctgacaccagaaggaaaggccttgggaatggaagatgagttagtcctgagtgccgtttaaatcacgaaatcgaggatgaagggggtgcagtgacccggttcaaaccttttgcactgtgggtcctcgggcctcactgctcaccggcatggaccatcatctgggaatgggatgctaactggggcctctcggcaattttggtgactcttgcaaggtcatacctgggtgacgcatccaaactgagttcctccatcacagaaggtgtgacccccacccccgccccaggatcaggaggctgggtctcctccttccacctgctcactcctggtagccccgggggtcgtccaaggttcaaataggactaggacctgtagtctggggtgatcctggcttgacaagaggccctgaccctccctctgcagttgcggcgccgcttcggggacgtgttcagcctgcagctggcctggacgccggtggtcgtgctcaatgggctggcggccgtgcgcgaggcgctggtgacccacggcgaggacaccgccgaccgcccgcctgtgcccatcacccagatcctgggtttcgggccgcgttcccaaggggtgttcctggcgcgctatgggcccgcgtggcgcgagcagaggcgcttctccgtctccaccttgcgcaacttgggcctgggcaagaagtcgctggagcagtgggtgaccgaggaggccgcctgcctttgtgccgccttcgccaaccactccggacgcccctttcgccccaacggtctcttggacaaagccgtgagcaacgtgatcgcctccctcacctgcgggcgccgcttcgagtacgacgaccctcgcttcctcaggctgctggacctagctcaggagggactgaaggaggagtcgggctttctgcgcgaggtgctgaatgctgtccccgtcctcctgcatatcccagcgctggctggcaaggtcctacgcttcctgggacccagcccagcccccccgagacctgactgaggccttcctggcagagatggagaaggccaaggggaaccctgagagcagcttcaatgatgagaacctgcgcatagtggtggctgacctgttctctgccgggatggtgaccacctcgaccacgctggcctggggcctcctgctcatgatcctacatccggatgtgcagcgccgtgtccaacaggagatcgacgacgtgatagggcaggtgcggcgaccagagatgggtgaccaggctcacatgccctacaccactgccgtgattcatgaggtgcagcgctttggggacatcgtccccctgggtgtgacccatatgacatcccgtgacatcgaagtacagggcttccgcatccctaagggaacgacactcatcaccaacctgtcatcggtgctgaaggatgaggccgtctgggagaagcccttccgcttccaccccgaacacttcctggatgcccagggccactttgtgaagccggaggccttcctgcctttctcagcaggccgccgtgcatgcctcggggagcccctggcccgcatggagctcttcctcttcttcacctccctgctgcagcacttcagcttctcggtgcccactggacagccccggcccagccactcatggtgtcttcagctttcctggtgaccccatccccctatgagctttgtgctgtgccccgctagaatggggtacctagtccccagcctgctccctagccagaggctctaatgtacaataaagcaatgtggtagttcca

SEQ ID NO: 386204 - DNA, 226 bp, Homo sapiens
ggggagggacttggtgaggtcagtggtaaggacaggcaggccctgggtcttcctggagatggctggggcctgagactggtccaggtgaacgcagagcacaggagggattgagaccccgttctgtctggtgtaggtgctgaatgctgtccccgtcctcctgcatatcccagcgctggctggcaaggtcctacgcttccaaaaggctttcctgacccagctggatgag

SEQ ID NO: 386205 - DNA, 653 bp, Homo sapiens
agaatgttggaggacccagcgcctgcagggagagggggcagtgtgggtgcctctgagaggtgtgactgcgccctgctgtggggtcggagagggtactgtggagcttctcgggcgcaggactagttgacagagtccagctgtgtgccaggcagtgtgtgtcccccgtgtgtttggtggcaggggtcccagcatcctagagtccagtccccactctcaccctgcatctcctgcccagggaacgacactcatcaccaacctgtcatcggtgctgaaggatgaggccgtctgggagaagcccttccgcttccaccccgaacacttcctggatgcccagggccactttgtgaagccggaggccttcctgcctttctcagcaggtgcctgtggggagcccggctccctgtccccttccgtggagtcttgcaggggtatcacccaggagccaggctcactgacgcccctcccctccccacaggccgccgtgcatgcctcggggagcccctggcccgcatggagctcttcctcttcttcacctccctgctgcagcacttcagcttctcggtgcccactggacagccccggcccagccactcatggtgtcttcagctttcctggtgaccccatccccctatgagctttgtgctgtgccccgc

SEQ ID NO: 386206 - DNA, 1658 bp, Homo sapiens
  misc_feature (3)..(3): n is a, c, g, or t
gcngagagtgtcctgcctggtcctctgtgcctggtggggtgggggtgccaggtgtgtccagaggagcccatttggtagtgaggcaggtatggggctagaagcactggtgcccctggccgtgatagtggccatcttcctgctcctggtggacctgatgcaccggcgccaacgctgggctgcacgctacccaccaggccccctgccactgcccgggctgggcaacctgctgcatgtggacttccagaacacaccatactgcttcgaccagttgcggcgccgcttcggggacgtgttcagcctgcagctggcctggacgccggtggtcgtgctcaatgggctggcggccgtgcgcgaggcgctggtgacccacggcgaggacaccgccgaccgcccgcctgtgcccatcacccagatcctgggtttcgggccgcgttcccaaggggtgttcctggcgcgctatgggcccgcgtggcgcgagcagaggcgcttctccgtctccaccttgcgcaacttgggcctgggcaagaagtcgctggagcagtgggtgaccgaggaggccgcctgcctttgtgccgccttcgccaaccactccggacgcccctttcgccccaacggtctcttggacaaagccgtgagcaacgtgatcgcctccctcacctgcgggcgccgcttcgagtacgacgaccctcgcttcctcaggctgctggacctagctcaggagggactgaaggaggagtcgggctttctgcgcgaggtgctgaatgctgtccccgtcctcctgcatatcccagcgctggctggcaaggtcctacgcttccaaaaggctttcctgacccagctggatgagctgctaactgagcacaggatgacctgggacccagcccagcccccccgagacctgactgaggccttcctggcagagatggagaaggccaaggggaaccctgagagcagcttcaatgatgagaacctgcgcatagtggtggctgacctgttctctgccgggatggtgaccacctcgaccacgctggcctggggcctcctgctcatgatcctacatccggatgtgcagcgccgtgtccaacaggagatcgacgacgtgatagggcaggtgcggcgaccagagatgggtgaccaggctcacatgccctacaccactgccgtgattcatgaggtgcagcgctttggggacatcgtccccctgggtgtgacccatatgacatcccgtgacatcgaagtacagggcttccgcatccctaagggaacgacactcatcaccaacctgtcatcggtgctgaaggatgaggccgtctgggagaagcccttccgcttccaccccgaacacttcctggatgcccagggccactttgtgaagccggaggccttcctgcctttctcagcaggccgccgtgcatgcctcggggagcccctggcccgcatggagctcttcctcttcttcacctccctgctgcagcacttcagcttctcggtgcccactggacagccccggcccagccactcatggtgtcttcagctttcctggtgaccccatccccctatgagctttgtgctgtgccccgctagaatggggtacctagtccccagcctgctccctagccagaggctctaatgtacaataaagcaatgtggtagttcca

SEQ ID NO: 386207 - DNA, 2900 bp, Homo sapiens
gaattccttgggcagtatatacaggctctattactcttggtgtttcattcacaaatgttatggctcctgaagtgtgatataaaactttaacttctttggcttgctcccatggatgaggcatgttctctaacaattttaagatcgcgtgcggtaaatactttagggcgcctagaaaagcctttttatcagtattgtacattttggaggccatgtcactgtgagtattaataatctttcgcagatgttccggtggcatctcggctttaggagtatataaattgcttctctttgcctttttggtcattttttttgcatgcttccttgattttcgagtgacgaaagaagcttttcctatgtccagttttctctttccatgtaattctactttcttttctgctttattctctaattcatctagacctggagggggcggtggcggtggtaatgtgaagtccacaatttcttcagcgtttatttcgaagttgcttggaggaggtggtggaggcggaagaaatgtatcctcatttaccgatgatggcaccatcggattatccagttcttcgatctcgtatccaggcggtggtggtggtggtggtggaagtgctaagtcgctgtcctcttcaaaaccaggaggagcccatttggtagtgaggcaggtatggggctagaagcactggtgcccctggccgtgatagtggccatcttcctgctcctggtggacctgatgcaccggcgccaacgctgggctgcacgctacccaccaggccccctgccactgcccgggctgggcaacctgctgcatgtggacttccagaacacaccatactgcttcgaccaggtgagggaggaggtcctggagggcggcagaggtgctgaggatcccctaccagaagcaaacatgttgcggcgccgcttcggggacgtgttcagcctgcagctggcctggacgccggtggtcgtgctcaatgggctggcggccgtgcgcgaggcgctggtgacccacggcgaggacaccgccgaccgcccgcctgtgcccatcacccagatcctgggtttcgggccgcgttcccaaggggtgttcctggcgcgctatgggcccgcgtggcgcgagcagaggcgcttctccgtctccaccttgcgcaacttgggcctgggcaagaagtcgctggagcagtgggtgaccgaggaggccgcctgcctttgtgccgccttcgccaaccactccggacgcccctttcgccccaacggtctcttggacaaagccgtgagcaacgtgatcgcctccctcacctgcgggcgccgcttcgagtacgacgaccctcgcttcctcaggctgctggacctagctcaggagggactgaaggaggagtcgggctttctgcgcgaggtgctgaatgctgtccccgtcctcctgcatatcccagcgctggctggcaaggtcctacgcttccaaaaggctttcctgacccagctggatgagctgctaactgagcacaggatgacctgggacccagcccagcccccccgagacctgactgaggccttcctggcagagatggagaaggccaaggggaaccctgagagcagcttcaatgatgagaacctgcgcatagtggtggctgacctgttctctgccgggatggtgaccacctcgaccacgctggcctggggcctcctgctcatgatcctacatccggatgtgcagcgccgtgtccaacaggagatcgacgacgtgatagggcaggtgcggcgaccagagatgggtgaccaggctcacatgccctacaccactgccgtgattcatgaggtgcagcgctttggggacatcgtccccctgggtgtgacccatatgacatcccgtgacatcgaagtacagggcttccgcatccctaagggaacgacactcatcaccaacctgtcatcggtgctgaaggatgaggccgtctgggagaagcccttccgcttccaccccgaacacttcctggatgcccagggccactttgtgaagccggaggccttcctgcctttctcagcaggccgccgtgcatgcctcggggagcccctggcccgcatggagctcttcctcttcttcacctccctgctgcagcacttcagcttctcggtgcccactggacagccccggcccagccactcatggtgtcttcagctttcctggtgaccccatccccctatgagctttgtgctgtgccccgctagaatggggtacctagtccccagcctgctccctagccagaggctctaatgtacaataaagcaatgtggtagttccaacttgggtcccctgctcacgccctcgttgggatcatcctcctcagggcaaccccacccctgcctcattcctgcttaccccaccgcctggccgcatttgagacgggtacgttgaggctgagcagatgtcagttacccttgcccataatcccatgtcccccactgacccaactctgactgcccagattggtgacaaggactacattgtcctggcatgtggggaaggggccagaatgggctgactagaggtgtcagtcagccctggatgtggtggagagggcaggactcagcctggaggcccatatttcaggcctaactcagcccaccccacatcagggacagcagtcctgccagcaccatcacaacagtcacctcccttcatatatgacaccccaaaatggaagacaaatcatgtcagggagctatatgccagggctacctcccagggctcagtcggcaggtgccagaacattccctgggaaggccccaggaaaacccaggaccgagccaccgccctcagcctgtcaccttgtgtccaaaattggtgggttcttggtctcactgacttcaagaatgaagccgtggacctcacggtgagtgttacagttctt

SEQ ID NO: 386208 - DNA, 2200 bp, Homo sapiens
gaattccttgggcagtatatacaggctctattactcttggtgtttcattcacaaatgttatggctcctgaagtgtgatataaaactttaacttctttggcttgctcccatggatgaggcatgttctctaacaattttaagatcgcgtgcggtaaatactttagggcgcctagaaaagcctttttatcagtattgtacattttggaggccatgtcactgtgagtattaataatctttcgcagatgttccggtggcatctcggctttaggagtatataaattgcttctctttgcctttttggtcattttttttgcatgcttccttgattttcgagtgacgaaagaagcttttcctatgtccagttttctctttccatgtaattctactttcttttctgctttattctctaattcatctagacctggagggggcggtggcggtggtaatgtgaagtccacaatttcttcagcgtttatttcgaagttgcttggaggaggtggtggaggcggaagaaatgtatcctcatttaccgatgatggcaccatcggattatccagttcttcgatctcgtatccaggcggtggtggtggtggtggtggaagtgctaagtcgctgtcctcttcaaaaccaggaggagcccatttggtagtgaggcaggtatggggctagaagcactggtgcccctggccgtgatagtggccatcttcctgctcctggtggacctgatgcaccggcgccaacgctgggctgcacgctacccaccaggccccctgccactgcccgggctgggcaacctgctgcatgtggacttccagaacacaccatactgcttcgaccaggtgagggaggaggtcctggagggcggcagaggtgctgaggatcccctaccagaagcaaacatgttgcggcgccgcttcggggacgtgttcagcctgcagctggcctggacgccggtggtcgtgctcaatgggctggcggccgtgcgcgaggcgctggtgacccacggcgaggacaccgccgaccgcccgcctgtgcccatcacccagatcctgggtttcgggccgcgttcccaaggggtgttcctggcgcgctatgggcccgcgtggcgcgagcagaggcgcttctccgtctccaccttgcgcaacttgggcctgggcaagaagtcgctggagcagtgggtgaccgaggaggccgcctgcctttgtgccgccttcgccaaccactccggacgcccctttcgccccaacggtctcttggacaaagccgtgagcaacgtgatcgcctccctcacctgcgggcgccgcttcgagtacgacgaccctcgcttcctcaggctgctggacctagctcaggagggactgaaggaggagtcgggctttctgcgcgaggtgctgaatgctgtccccgtcctcctgcatatcccagcgctggctggcaaggtcctacgcttccaaaaggctttcctgacccagctggatgagctgctaactgagcacaggatgacctgggacccagcccagcccccccgagacctgactgaggccttcctggcagagatggagaaggccaaggggaaccctgagagcagcttcaatgatgagaacctgcgcatagtggccgtgtccaacaggagatcgacgacgtgatagggcaggtgcggcgaccagagatgggtgaccaggctcacatgccctacaccactgccgtgattcatgaggtgcagcgctttggggacatcgtccccctgggtgtgacccatatgacatcccgtgacatcgaagtacagggcttccgcatccctaagggaacgacactcatcaccaacctgtcatcggtgctgaaggatgaggccgtctgggagaagcccttccgcttccaccccgaacacttcctggatgcccagggccactttgtgaagccggaggccttcctgcctttctcagcaggccgccgtgcatgcctcggggagcccctggcccgcatggagctcttcctcttcttcacctccctgctgcagcacttcagcttctcggtgcccactggacagccccggcccagccactcatggtgtcttcagctttcctggtgaccccatccccctatgagctttgtgctgtgccccgctagaatggggtacctagtccccagcctgctccctagccagaggctctaatgtacaataaagcaatgtggtagttcca

SEQ ID NO: 386209 - DNA, 3747 bp, Homo sapiens
gaattccttgggcagtatatacaggctctattactcttggtgtttcattcacaaatgttatggctcctgaagtgtgatataaaactttaacttctttggcttgctcccatggatgaggcatgttctctaacaattttaagatcgcgtgcggtaaatactttagggcgcctagaaaagcctttttatcagtattgtacattttggaggccatgtcactgtgagtattaataatctttcgcagatgttccggtggcatctcggctttaggagtatataaattgcttctctttgcctttttggtcattttttttgcatgcttccttgattttcgagtgacgaaagaagcttttcctatgtccagttttctctttccatgtaattctactttcttttctgctttattctctaattcatctagacctggagggggcggtggcggtggtaatgtgaagtccacaatttcttcagcgtttatttcgaagttgcttggaggaggtggtggaggcggaagaaatgtatcctcatttaccgatgatggcaccatcggattatccagttcttcgatctcgtatccaggcggtggtggtggtggtggtggaagtgctaagtcgctgtcctcttcaaaaccaggaggagcccatttggtagtgaggcaggtatggggctagaagcactggtgcccctggccgtgatagtggccatcttcctgctcctggtggacctgatgcaccggcgccaacgctgggctgcacgctacccaccaggccccctgccactgcccgggctgggcaacctgctgcatgtggacttccagaacacaccatactgcttcgaccaggtgagggaggaggtcctggagggcggcagaggtgctgaggatcccctaccagaagcaaacatgggtggtgggttaaaccacaggctggatcagaagccaggctgagaaggggaagcaggtttgggggacgtcctggggaaggacatttatacatggcatgaaggactggattttccaaaggccaaggaagagtagggcaagggcctggaggtggagctggacttggcagtgggcatgcaagcccattgggcaacatatgttatggagtacaaagtcccttctgctgacaccagaaggaaaggccttgggaatggaagatgagttagtcctgagtgccgtttaaatcacgaaatcgaggatgaagggggtgcagtgacccggttcaaaccttttgcactgtgggtcctcgggcctcactgctcaccggcatggaccatcatctgggaatgggatgctaactggggcctctcggcaattttggtgactcttgcaaggtcatacctgggtgacgcatccaaactgagttcctccatcacagaaggtgtgacccccacccccgccccaggatcaggaggctgggtctcctccttccacctgctcactcctggtagccccgggggtcgtccaaggttcaaataggactaggacctgtagtctggggtgatcctggcttgacaagaggccctgaccctccctctgcagttgcggcgccgcttcggggacgtgttcagcctgcagctggcctggacgccggtggtcgtgctcaatgggctggcggccgtgcgcgaggcgctggtgacccacggcgaggacaccgccgaccgcccgcctgtgcccatcacccagatcctgggtttcgggccgcgttcccaaggggtgttcctggcgcgctatgggcccgcgtggcgcgagcagaggcgcttctccgtctccaccttgcgcaacttgggcctgggcaagaagtcgctggagcagtgggtgaccgaggaggccgcctgcctttgtgccgccttcgccaaccactccggacgcccctttcgccccaacggtctcttggacaaagccgtgagcaacgtgatcgcctccctcacctgcgggcgccgcttcgagtacgacgaccctcgcttcctcaggctgctggacctagctcaggagggactgaaggaggagtcgggctttctgcgcgaggtgctgaatgctgtccccgtcctcctgcatatcccagcgctggctggcaaggtcctacgcttcctgggacccagcccagcccccccgagacctgactgaggccttcctggcagagatggagaaggtgcagaattggaggtcatttgggggctaccccgttctgtcccgagtatgctctcggccctgctcaggccaaggggaaccctgagagcagcttcaatgatgagaacctgcgcatagtggtggctgacctgttctctgccgggatggtgaccacctcgaccacgctggcctggggcctcctgctcatgatcctacatccggatgtgcagcgtgagcccagctggggcccaaggcagggactgagggaggaagggtacagctgggggcccctgggcttagctgggacacccggggcttccagcacaggcgtggccaggctcctgtaagcctaacttcctccaacacaggaggaaggagagtgtcccctgggtgctgacccattgtggggacgcatgtctgtccaggccgtgtccaacaggagatcgacgacgtgatagggcaggtgcggcgaccagagatgggtgaccaggctcacatgccctacaccactgccgtgattcatgaggtgcagcgctttggggacatcgtccccctgggtgtgacccatatgacatcccgtgacatcgaagtacagggcttccgcatccctaagggaacgacactcatcaccaacctgtcatcggtgctgaaggatgaggccgtctgggagaagcccttccgcttccaccccgaacacttcctggatgcccagggccactttgtgaagccggaggccttcctgcctttctcagcaggccgccgtgcatgcctcggggagcccctggcccgcatggagctcttcctcttcttcacctccctgctgcagcacttcagcttctcggtgcccactggacagccccggcccagccactcatggtgtcttcagctttcctggtgaccccatccccctatgagctttgtgctgtgccccgctagaatggggtacctagtccccagcctgctccctagccagaggctctaatgtacaataaagcaatgtggtagttccaacttgggtcccctgctcacgccctcgttgggatcatcctcctcagggcaaccccacccctgcctcattcctgcttaccccaccgcctggccgcatttgagacgggtacgttgaggctgagcagatgtcagttacccttgcccataatcccatgtcccccactgacccaactctgactgcccagattggtgacaaggactacattgtcctggcatgtggggaaggggccagaatgggctgactagaggtgtcagtcagccctggatgtggtggagagggcaggactcagcctggaggcccatatttcaggcctaactcagcccaccccacatcagggacagcagtcctgccagcaccatcacaacagtcacctcccttcatatatgacaccccaaaatggaagacaaatcatgtcagggagctatatgccagggctacctcccagggctcagtcggcaggtgccagaacattccctgggaaggccccaggaaaacccaggaccgagccaccgccctcagcctgtcaccttgtgtccaaaattggtgggttcttggtctcactgacttcaagaatgaagccgtggacctcacggtgagtgttacagttctt

SEQ ID NO: 386210 - DNA, 309 bp, Homo sapiens
gcattcttttgatacccacctaataaagacaatctctaaaaccaaataataggctatgaaatgtattgtgagttcttatttcattcaagacagagcttacctttaagtctccagctgagacagttggttttatctttctgaaagcagtttggtcaagtgtttcaagtaaatcaaaagatcggttaatcaattccttagcgaattggattagacactctcatttcaaatggcagttttatgcttactcattgtcttgaataatcttaaatactttatgctatcttcctgctccattatttatgtaatcac

SEQ ID NO: 386211 - DNA, 898 bp, Homo sapiens
ctggctgcaggagttcagtcagcgtggtgggaaatattattaaaattatagaaagaagcacaccttcttggaaggccgggaggttttgcaaaagcttcaggaaaggatttggctgaaggcagctgaattctctcagagtaggttacaaggaagtgtaagggaattgatctagataagttagtttacttaggcctcagaactggcctttaatcatccacatgtaggactgttctggcagcgggggttgggggggaaccgtgttaattactcacacgatgtgctgactcaaagcctttgtcattaaacctgtactaaataaatgcctgaagcaccagcttgtcagggccatggctgctacaactctttctttgagcagcctggtcccctagcccactctttcactggatacctatgtctaagtactttcatctgtcacttggccagggtctatggttcagacccagcacctggcgacagagggagacagcatctcaaaaaaaaaaaaaaaaaaaaaaaaagtatgtttagattgtgggatcagtgattaaagattataaagttcctagaagcagcacaaaataaaaggtagctattactgtttttattatttataataatgtaattgaacttaacagtaagtggcccctgtcagctgccacatggatgggcaggtggcctgaattcttagggatgttggcatcagctccatactccagcaagagagccacagcatctggatttcctccacttgcggcttcaagtaagatggaagaagaatcagaggcctgaccatgagcattagctcctaagaggagaaagactcttgttaatgcaaaaattattttccactgtatttcttgagcaatcttaaaaatatatccccatcaccaaaaaaaaa

SEQ ID NO: 386212 - DNA, 284 bp, Homo sapiens
ctggctgcaggagttcagtcagcgtggtgggaaatattattaaaattatagaaagaagcacaccttcttggaaggccgggaggttttgcaaaagcttcaggaaaggatttggctgaaggcagctgaattctctcagagtaggttacaaggaagtgtaagggaattgatctagataagttagtttacttaggcctcagaactggcctttaatcatccacatgtaggactgttctggcagcgggggttggagtggatggagcagacataagagggtggggatcatg

SEQ ID NO: 386213 - DNA, 528 bp, Homo sapiens
  misc_feature (21)..(21): n is a, c, g, or t
aaaatcttagcaagtgagggnctcaaccctgttcaggagctagaagcctggcctcccagactcaagctatcctcccacctcagcctctccagtagctgagactacaaagaaacaatttagttatgcataggtgacctgagatattagtgccattggttttggtgacaatattttcgaattcaaatagtgtcgtttgtaagttagtttgtatttaaggagataatcgatgaggccaagtatttaaaattggctgggctggtggttcatgcctgtaataccagcactttggaaggctgaggtgggcagatcaccaggtcaagagatcgaaaccatcctggatagcatggtgaaaccccgcctctactaaacgtaaaaaaattacccgggcgtggtggtttgcgcctgtagtcccagccacttgggaggctgaggcaggagaattgcttgaacccgggagacggaggatgcagtaagcagagatggtaccacttcactccagcctggtgacagagtgagactgcgtctcca

SEQ ID NO: 386214 - DNA, 472 bp, Homo sapiens
ttattttaggccaaatagttgcatcacatgtatctaatccgaaagtctcatgcttctggtagctcctcagtgaccagctcctgctcactgccctcagaaagcccaaccctcaggcaatggcggccttgttcctgtctgccccaccccaggtgagtgtctgtcctcctgggaggagtgaagtttttacccagggctttccttggcaaacactgccaggtgtctctggtttgggatgctgacatgatggtaggggtggccctgagacccccatgcagccaccccttgggatgtattagctggctcggtggcagatgggtcaggccacccactgtgctgctgcctttagcatgcttctgctgcctccccgcccctaccagcccactctggaccacacctgggctgcagcagtccctgtcattccaggccgaggtgaccttcgaggacgtggctgtgtacctctcccgggaggaat

SEQ ID NO: 386215 - DNA, 317 bp, Homo sapiens
ctgccggcccaggcgcgatgaggcggctgcccgctgggtggcgccgatttcccggggaggtcccttctgggcccccggcggaggtgggagagagtcaggcaggagccgaggccggggagccctcttcgtcagctggtgctcactgcgccgcgccagcgccagccgggactcacccgcagctccatgcttgtgcccggttcgactcgtccatcctccaagaagaggcagctcccctggaatgggcatgagaacatcccccagatggacccccgtaaagcagaggaaaggagagctgattgggctaaggtcgaggcagg

SEQ ID NO: 386216 - DNA, 2843 bp, Homo sapiens
ctgccggcccaggcgcgatgaggcggctgcccgctgggtggcgccgatttcccggggaggtcccttctgggcccccggcggaggtgggagagagtcaggcaggagccgaggccggggagccctcttcgtcagctggtgctcactgcgccgcgccagcgccagccgggactcacccgcagctccatgcttgtgcccggttcgactcgtccatcctccaagaagaggcagcccatgaggctcccagtccccactgagtgccaccctgaaggatgtcccagctctcctccaccctgaagcgctacacagaatcggcccgctacacagatgcccactatgccaagtcgggctatggtgcctacaccccatcctcctatggggccaatctggctgcctccttactggagaaggagaaacttggtttcaagccggtccccaccagcagcttcctcacccgtccccgtacctatggcccctcctccctcctggactatgaccggggccgccccctgctgagacccgacatcactgggggtggtaagcgggcagagagccagacccggggtactgagcggcctttaggcagtggcctcagcgggggcagcggattcccttatggagtgaccaacaactgcctcagctacctgcccatcaatgcctatgaccagggggtgaccctaacccagaagctggacagccaatcagacctggcccgggatttctccagcctccggacctcagatagctaccggatagaccccaggaacctgggccgcagccccatgctggcccggacgcgcaaggagctctgcaccctgcaggggctctaccagacagccagctgccctgaatacctggtcgactacctggagaactatggtcgcaagggcagtgcatctcaggtgccctcccaggcccctccctcacgagtccctgaaatcatcagcccaacctaccgacccattggccgctacacgctgtgggagacgggaaagggtcaggcccctgggcccagccgctccagctccccgggaagagacggcatgaattctaagagtgcccagggtctggctggtcttcgaaaccttgggaacacgtgcttcatgaactcaattctgcagtgcctgagcaacactcgggagttgagagattactgcctccagaggctctacatgcgggacctgcaccacggcagcaatgcacacacagccctcgtggaagagtttgcaaaactaattcagaccatatggacttcatcccccaatgatgtggtgagcccatctgagttcaagacccagatccagagatatgcaccgcgctttgttggctataatcagcaggatgctcaggagttccttcgctttcttctggatgggctccataacgaggtgaaccgagtgacactgagacctaagtccaaccctgagaacctcgatcatcttcctgatgacgagaaaggccgacagatgtggagaaaatatctagaacgggaagacagtaggatcggggatctctttgttgggcagctaaagagctcgctgacgtgtacagattgtggttactgttctacggtcttcgaccccttctgggacctctcactgcccattgctaagcgaggttatcctgaggtgacattaatggactgcatgaggctcttcaccaaagaggatgtgcttgatggagatgaaaagccaacatgctgtcgctgccgaggcagaaaacggtgtataaagaagttctccatccagaggttcccaaagatcttggtgctccatctgaagcggttctcagaatccaggatccgaaccagcaagctcacaacatttgtgaacttccccctaagagacctggacttaagagaatttgcctcagaaaacaccaaccatgctgtttacaacctgtacgctgtgtccaatcactccggaaccaccatgggtggccactatacagcctactgtcgcagtccagggacaggagaatggcacactttcaacgactccagcgtcactcccatgtcctccagccaagtgcgcaccagcgacgcctacctgctcttctacgaactggccagcccgccctcccgaatgtagcgccaggagccacgtcccttctcccttccccgtggtggccccgctccctaaattttttaaaaagacaaaaacaaaacaacaacaacaacacacaaacctgacaagagaaaaacaaacctgaagctgccgagcaggagtggatgcagcctgatcagggtctggagcaaggagccgggctttcctgagctgtggcccggcagggaagatcgcctggacgtggagccagcatcgccccgtgccctcggcgtttgcatttgtaaacttgtggtcttcctatgtgtcagaaacaactgtgtcttgggggggaagaccctcgctgcgccgcttcccgccgcagcgcccgcgcctccgaggggacagcgccctctggagctcgctgggagcatcaccgcctggacgcccgcgccgcggaggagccggcgcccatctccacccgcacggctcgccggtccagagccatgagccaagagccctcttcacgctgctaactccaggggacagacgaagggacatctttggaaaacgctggttttggtttttaaaaagcccaactttttttttttaatttccataactaaagtgttcagactggagtgctctccttcaggcctcttcataaaaaaaacttcaacctacatccacctgataccacacaaacacaggggggggggccaaaaaatttcccccgagggggccagttttgctcccccctttttttgaaaaggggggcccccaaaggggaggccctattataag

SEQ ID NO: 386217 - DNA, 2801 bp, Homo sapiens
ctgccggcccaggcgcgatgaggcggctgcccgctgggtggcgccgatttcccggggaggtcccttctgggcccccggcggaggtgggagagagtcaggcaggagccgaggccggggagccctcttcgtcagctggtgctcactgcgccgcgccagcgccagccgggactcacccgcagctccatgcttgtgcccggttcgactcgtccatcctccaagaagaggcagcccatgaggctcccagtccccactgagtgccaccctgaaggatgtcccagctctcctccaccctgaagcgctacacagaatcggcccgctacacagatgcccactatgccaagtcgggctatggtgcctacaccccatcctcctatggggccaatctggctgcctccttactggagaaggagaaacttggtttcaagccggtccccaccagcagcttcctcacccgtccccgtacctatggcccctcctccctcctggactatgaccggggccgccccctgctgagacccgacatcactgggggtggtaagcgggcagagagccagacccggggtactgagcggcctttaggcagtggcctcagcgggggcagcggattcccttatggagtgaccaacaactgcctcagctacctgcccatcaatgcctatgaccagggggtgaccctaacccagaagctggacagccaatcagacctggcccgggatttctccagcctccggacctcagatagctaccggatagaccccaggaacctgggccgcagccccatgctggcccggacgcgcaaggagctctgcaccctgcaggggctctaccagacagccagctgccctgaatacctggtcgactacctggagaactatggtcgcaagggcagtgcatctcaggtgccctcccaggcccctccctcacgagtccctgaaatcatcagcccaacctaccgacccattggccgctacacgctgtgggagacgggaaagggtcaggcccctgggcccagccgctccagctccccgggaagagacggcatgaattctaagagtgcccagggtctggctggtcttcgaaaccttgggaacacgtgcttcatgaactcaattctgcagtgcctgagcaacactcgggagttgagagattactgcctccagaggctctacatgcgggacctgcaccacggcagcaatgcacacacagccctcgtggaagagtttgcaaaactaattcagaccatatggacttcatcccccaatgatgtggtgagcccatctgagttcaagacccagatccagagatatgcaccgcgctttgttggctataagtaagggccttgcagacatgtcctctcaggtgggtggcagtaggagcaggttcttaggacaagaggtgttgctcaccctccttcctttgggttcagtcagcaggatgctcaggagttccttcgctttcttctggatgggctccataacgaggtgaaccgagtgacactgagacctaagtccaaccctgagaacctcgatcatcttcctgatgacgagaaaggccgacagatgtggagaaaatatctagaacgggaagacagtaggatcggggatctctttgttgggcagctaaagagctcgctgacgtgtacagattgtggttactgttctacggtcttcgaccccttctgggacctctcactgcccattgctaagcgaggttatcctgaggtgacattaatggactgcatgaggctcttcaccaaagaggatgtgcttgatggagatgaaaagccaacatgctgtcgctgccgaggcagaaaacggtgtataaagaagttctccatccagaggttcccaaagatcttggtgctccatctgaagcggttctcagaatccaggatccgaaccagcaagctcacaacatttgtgaacttccccctaagagacctggacttaagagaatttgcctcagaaaacaccaaccatgctgtttacaacctgtacgctgtgtccaatcactccggaaccaccatgggtggccactatacagcctactgtcgcagtccagggacaggagaatggcacactttcaacgactccagcgtcactcccatgtcctccagccaagtgcgcaccagcgacgcctacctgctcttctacgaactggccagcccgccctcccgaatgtagcgccaggagccacgtcccttctcccttccccgtggtggccccgctccctaaattttttaaaaagacaaaaacaaaacaacaacaacaacacacaaacctgacaagagaaaaacaaacctgaagctgccgagcaggagtggatgcagcctgatcagggtctggagcaaggagccgggctttcctgagctgtggcccggcagggaagatcgcctggacgtggagccagcatcgccccgtgccctcggcgtttgcatttgtaaacttgtggtcttcctatgtgtcagaaacaactgtgtcttgggggggaagaccctcgctgcgccgcttcccgccgcagcgcccgcgcctccgaggggacagcgccctctggagctcgctgggagcatcaccgcctggacgcccgcgccgcggaggagccggcgcccatctccacccgcacggctcgccggtccagagccatgagccaagagccctcttcacgctgctaactccaggggacagacgaagggacatctttggaaaacgctggttttggtttttaaaaagcccaactttttttttttaatttccataactaaagtgttcagactggagtgctctccttcaggcctcttcata

SEQ ID NO: 386218 - DNA, 2871 bp, Homo sapiens
ctgccggcccaggcgcgatgaggcggctgcccgctgggtggcgccgatttcccggggaggtcccttctgggcccccggcggaggtgggagagagtcaggcaggagccgaggccggggagccctcttcgtcagctggtgctcactgcgccgcgccagcgccagccgggactcacccgcagctccatgcttgtgcccggttcgactcgtccatcctccaagaagaggcagcccatgaggctcccagtccccactgagtgccaccctgaaggatgtcccagctctcctccaccctgaagcgctacacagaatcggcccgctacacagatgcccactatgccaagtcgggctatggtgcctacaccccatcctcctatggggccaatctggctgcctccttactggagaaggagaaacttggtttcaagccggtccccaccagcagcttcctcacccgtccccgtacctatggcccctcctccctcctggactatgaccggggccgccccctgctgagacccgacatcactgggggtggtaagcgggcagagagccagacccggggtactgagcggcctttaggcagtggcctcagcgggggcagcggattcccttatggagtgaccaacaactgcctcagctacctgcccatcaatgcctatgaccagggggtgaccctaacccagaagctggacagccaatcagacctggcccgggatttctccagcctccggacctcagatagctaccggatagaccccaggaacctgggccgcagccccatgctggcccggacgcgcaaggagctctgcaccctgcaggggctctaccagacagccagctgccctgaatacctggtcgactacctggagaactatggtcgcaagggcagtgcatctcaggtgccctcccaggcccctccctcacgagtccctgaaatcatcagcccaacctaccgacccattggccgctacacgctgtgggagacgggaaagggtcaggcccctgggcccagccgctccagctccccgggaagagacggcatgaattctaagagtgcccagggtctggctggtcttcgaaaccttgggaacacgtgcttcatgaactcaattctgcagtgcctgagcaacactcgggagttgagagattactgcctccagaggctctacatgcgggacctgcaccacggcagcaatgcacacacagccctcgtggaagagtttgcaaaactaattcagaccatatggacttcatcccccaatgatgtggtgagcccatctgagttcaagacccagatccagagatatgcaccgcgctttgttggctataatcagcaggatgctcaggagttccttcgctttcttctggatgggctccataacgaggtgaaccgagtgacactgagacctaagtccaaccctgagaacctcgatcatcttcctgatgacgagaaaggccgacagatgtggagaaaatatctagaacgggaagacagtaggatcggggatctctttgttgggcagctaaagagctcgctgacgtgtacagattgtggttactgttctacggtcttcgaccccttctgggacctctcactgcccattgctaagcgaggttatcctgaggtgacattaatggactgcatgaggctcttcaccaaagaggatgtgcttgatggagatgaaaagccaacatgctgtcgctgccgaggcagaaaacggtgtataaagaagttctccatccagaggttcccaaagatcttggtgctccgtatccttaagatccatcagggctgggacatgactttcaagggtgactgatgacaaggggcccataggtgaggggaacagtcggaagaaacggaccttgtaggctttccttttgttgtctgcccttctgcattggtttgactatccttgactcacgtcaatgccagatctgaagcggttctcagaatccaggatccgaaccagcaagctcacaacatttgtgaacttccccctaagagacctggacttaagagaatttgcctcagaaaacaccaaccatgctgtttacaacctgtacgctgtgtccaatcactccggaaccaccatgggtggccactatacagcctactgtcgcagtccagggacaggagaatggcacactttcaacgactccagcgtcactcccatgtcctccagccaagtgcgcaccagcgacgcctacctgctcttctacgaactggccagcccgccctcccgaatgtagcgccaggagccacgtcccttctcccttccccgtggtggccccgctccctaaattttttaaaaagacaaaaacaaaacaacaacaacaacacacaaacctgacaagagaaaaacaaacctgaagctgccgagcaggagtggatgcagcctgatcagggtctggagcaaggagccgggctttcctgagctgtggcccggcagggaagatcgcctggacgtggagccagcatcgccccgtgccctcggcgtttgcatttgtaaacttgtggtcttcctatgtgtcagaaacaactgtgtcttgggggggaagaccctcgctgcgccgcttcccgccgcagcgcccgcgcctccgaggggacagcgccctctggagctcgctgggagcatcaccgcctggacgcccgcgccgcggaggagccggcgcccatctccacccgcacggctcgccggtccagagccatgagccaagagccctcttcacgctgctaactccaggggacagacgaagggacatctttggaaaacgctggttttggtttttaaaaagcccaactttttttttttaatttccataactaaagtgttcagactggagtgctctccttcaggcctcttcata

SEQ ID NO: 386219 - DNA, 1235 bp, Homo sapiens
  misc_feature (107)..(107): n is a, c, g, or t
gtacactatctataatggcacgacagatcgatcagagttcacttgcttgcgtgcctgcttagctctgtcacttgttctgcatgttcttacttggaaaacccttcggncccttctgggacctctcactgcccattgctaagcgaggttatcctgaggtgacattaatggactgcatgaggctcttcaccaaagaggatgtgcttgatggagatgaaaagccaacatgctgtcgctgccgaggcagaaaacggtgtataaagaagttctccatccagaggttcccaaagatcttggtgctccatctgaagcggttctcagaatccaggatccgaaccagcaagctcacaacatttgtgaacttccccctaagagacctggacttaagagaatttgcctcagaaaacaccaaccatgctgtttacaacctgtacgctgtgtccaatcactccggaaccaccatgggtggccactatacagcctactgtcgcagtccagggacaggagaatggcacactttcaacgactccagcgtcactcccatgtcctccagccaagtgcgcaccagcgacgcctacctgctcttctacgaactggccagcccgccctcccgaatgtagcgccaggagccacgtcccttctcccttccccgtggtggccccgctccctaaattttttaaaaagacaaaaacaaaacaacaacaacaacacacaaacctgacaagagaaaaacaaacctgaagctgccgagcaggagtggatgcagcctgatcagggtctggagcaaggagccgggctttcctgagctgtggcccggcagggaagatcgcctggacgtggagccagcatcgccccgtgccctcggcgtttgcatttgtaaacttgtggtcttcctatgtgtcagaaacaactgtgtcttgggggggaagaccctcgctgcgccgcttcccgccgcagcgcccgcgcctccgaggggacagcgccctctggagctcgctgggagcatcaccgcctggacgcccgcgccgcggaggagccggcgcccatctccacccgcacggctcgccggtccagagccatgagccaagagccctcttcacgctgctaactccaggggacagacgaagggacatctttggaaaacgctggttttggtttttaaaaagcccaactttttttttttaatttccataactaaagtgttcagactggagtgctctccttcaggcctcttcata

SEQ ID NO: 386220 - DNA, 327 bp, Homo sapiens
agccgctccagctccccgggaagagacggcatggtgagtttacccttggggaccggggataggctggggaggcagccactgatggagaacagccaggctgagggctcgactcccaacctgactgatgactgacaggctgctcctggtggagacaaacaagagaagtcatcctggcacatctggtgcccctggggctccgtgccgaggggaggggccttcccactctgcctagaaagcccactcagggcccgcgcactcgaggatagtccagtagtgttctcaggaatgctctgctgcgcccaatgaaccactcttctcaccttctcc

SEQ ID NO: 386221 - DNA, 396 bp, Homo sapiens
ggggttaatgatttgggaataatctgatttacttttgaagatgaaggatcaaaattgacagacccttaaacttaagttttgagctttgacccaattgttgtctctctctggttcccagtgatgacgagaaaggccgacagatgtggagaaaatatctagaacgggaagacagtaggatcgggggtaagcgcatgaaagggaagatgcctgttttcactgttgcctgctcttgcctgagtggagcatgaaaagccctaagaatcactctcccggggaagcctgtttctgcctggtgttcaacaaagcaaagcaggaacagcaagaaagaagatgctgtgcaggccgggcatgggtggctcatgcctgtaaacccaacactttgggaggccaaggcgg

SEQ ID NO: 386222 - DNA, 976 bp, Homo sapiens
gcggccgcgctcccctctctccccgtccctgctgctctccaccttcgtggggctcctgctcaacaaagccaagaattctaagagtgcccagggtctggctggtcttcgaaaccttgggaacacgtgcttcatgaactcaattctgcagtgcctgagcaacactcgggagttgagagattactgcctccagaggctctacatgcgggacctgcaccacggcagcaatgcacacacagccctcgtggaagagtttgcaaaactaattcagaccatatggacttcatcccccaatgatgtggtgagcccatctgagttcaagacccagatccagagatatgcaccgcgctttgttggctataatcagcaggatgctcaggagttccttcgctttcttctggatgggctccataacgaggtgaaccgagtgacactgagacctaagtccaaccctgagaacctcgatcatcttcctgatgacgagaaaggccgacagatgtggagaaaatatctagaacgggaagacagtaggatcgggggtaagcgcatgaaagggaagatgcctgttttcactgttgcctgctcttgcctgagtggagcatgaaaagccctaagaatcactctcccggggaagcctgtttctgcctggtgttcaacaaagcaaagcaggaacagcaagaaagaagatgctgtgcaggccgggcatgggtggctcatgcctgtaaacccaacactttgggaggccaaggcgggtagatcacctgaggtcaggagttcaagaccagcctggccaacatggcaaaaccccatctctactaaaaatgcaaaaattagccaggcatggtggtgggcacctgtaatcccagctacttgggaggctgaggcaggagaatcactgaacccaggaggcagaggttgttgtgagctgagattgcaccactgcacttcagcctgggggacagagcaaaactccatctca

SEQ ID NO: 386223 - DNA, 2705 bp, Homo sapiens
ctgccggcccaggcgcgatgaggcggctgcccgctgggtggcgccgatttcccggggaggtcccttctgggcccccggcggaggtgggagagagtcaggcaggagccgaggccggggagccctcttcgtcagctggtgctcactgcgccgcgccagcgccagccgggactcacccgcagctccatgcttgtgcccggttcgactcgtccatcctccaagaagaggcagcccatgaggctcccagtccccactgagtgccaccctgaaggatgtcccagctctcctccaccctgaagcgctacacagaatcggcccgctacacagatgcccactatgccaagtcgggctatggtgcctacaccccatcctcctatggggccaatctggctgcctccttactggagaaggagaaacttggtttcaagccggtccccaccagcagcttcctcacccgtccccgtacctatggcccctcctccctcctggactatgaccggggccgccccctgctgagacccgacatcactgggggtggtaagcgggcagagagccagacccggggtactgagcggcctttaggcagtggcctcagcgggggcagcggattcccttatggagtgaccaacaactgcctcagctacctgcccatcaatgcctatgaccagggggtgaccctaacccagaagctggacagccaatcagacctggcccgggatttctccagcctccggacctcagatagctaccggatagaccccaggaacctgggccgcagccccatgctggcccggacgcgcaaggagctctgcaccctgcaggggctctaccagacagccagctgccctgaatacctggtcgactacctggagaactatggtcgcaagggcagtgcatctcaggtgccctcccaggcccctccctcacgagtccctgaaatcatcagcccaacctaccgacccattggccgctacacgctgtgggagacgggaaagggtcaggcccctgggcccagccgctccagctccccgggaagagacggcatgaattctaagagtgcccagggtctggctggtcttcgaaaccttgggaacacgtgcttcatgaactcaattctgcagtgcctgagcaacactcgggagttgagagattactgcctccagaggctctacatgcgggacctgcaccacggcagcaatgcacacacagccctcgtggaagagtttgcaaaactaattcagaccatatggacttcatcccccaatgatgtggtgagcccatctgagttcaagacccagatccagagatatgcaccgcgctttgttggctataatcagcaggatgctcaggagttccttcgctttcttctggatgggctccataacgaggtgaaccgagtgacactgagacctaagtccaaccctgagaacctcgatcatcttcctgatgacgagaaaggccgacagatgtggagaaaatatctagaacgggaagacagtaggatcggggatctctttgttgggcagctaaagagctcgctgacgtgtacagattgtggttactgttctacggtcttcgaccccttctgggacctctcactgcccattgctaagcgaggttatcctgaggtgacattaatggactgcatgaggctcttcaccaaagaggatgtgcttgatggagatgaaaagccaacatgctgtcgctgccgaggcagaaaacggtgtataaagaagttctccatccagaggttcccaaagatcttggtgctccatctgaagcggttctcagaatccaggatccgaaccagcaagctcacaacatttgtgaacttccccctaagagacctggacttaagagaatttgcctcagaaaacaccaaccatgctgtttacaacctgtacgctgtgtccaatcactccggaaccaccatgggtggccactatacagcctactgtcgcagtccagggacaggagaatggcacactttcaacgactccagcgtcactcccatgtcctccagccaagtgcgcaccagcgacgcctacctgctcttctacgaactggccagcccgccctcccgaatgtagcgccaggagccacgtcccttctcccttccccgtggtggccccgctccctaaattttttaaaaagacaaaaacaaaacaacaacaacaacacacaaacctgacaagagaaaaacaaacctgaagctgccgagcaggagtggatgcagcctgatcagggtctggagcaaggagccgggctttcctgagctgtggcccggcagggaagatcgcctggacgtggagccagcatcgccccgtgccctcggcgtttgcatttgtaaacttgtggtcttcctatgtgtcagaaacaactgtgtcttgggggggaagaccctcgctgcgccgcttcccgccgcagcgcccgcgcctccgaggggacagcgccctctggagctcgctgggagcatcaccgcctggacgcccgcgccgcggaggagccggcgcccatctccacccgcacggctcgccggtccagagccatgagccaagagccctcttcacgctgctaactccaggggacagacgaagggacatctttggaaaacgctggttttggtttttaaaaagcccaactttttttttttaatttccataactaaagtgttcagactggagtgctctccttcaggcctcttcata

SEQ ID NO: 386224 - DNA, 1735 bp, Homo sapiens
gcggccgcgctcccctctctccccgtccctgctgctctccaccttcgtggggctcctgctcaacaaagccaagaattctaagagtgcccagggtctggctggtcttcgaaaccttgggaacacgtgcttcatgaactcaattctgcagtgcctgagcaacactcgggagttgagagattactgcctccagaggctctacatgcgggacctgcaccacggcagcaatgcacacacagccctcgtggaagagtttgcaaaactaattcagaccatatggacttcatcccccaatgatgtggtgagcccatctgagttcaagacccagatccagagatatgcaccgcgctttgttggctataatcagcaggatgctcaggagttccttcgctttcttctggatgggctccataacgaggtgaaccgagtgacactgagacctaagtccaaccctgagaacctcgatcatcttcctgatgacgagaaaggccgacagatgtggagaaaatatctagaacgggaagacagtaggatcggggatctctttgttgggcagctaaagagctcgctgacgtgtacagattgtggttactgttctacggtcttcgaccccttctgggacctctcactgcccattgctaagcgaggttatcctgaggtgacattaatggactgcatgaggctcttcaccaaagaggatgtgcttgatggagatgaaaagccaacatgctgtcgctgccgaggcagaaaacggtgtataaagaagttctccatccagaggttcccaaagatcttggtgctccatctgaagcggttctcagaatccaggatccgaaccagcaagctcacaacatttgtgaacttccccctaagagacctggacttaagagaatttgcctcagaaaacaccaaccatgctgtttacaacctgtacgctgtgtccaatcactccggaaccaccatgggtggccactatacagcctactgtcgcagtccagggacaggagaatggcacactttcaacgactccagcgtcactcccatgtcctccagccaagtgcgcaccagcgacgcctacctgctcttctacgaactggccagcccgccctcccgaatgtagcgccaggagccacgtcccttctcccttccccgtggtggccccgctccctaaattttttaaaaagacaaaaacaaaacaacaacaacaacacacaaacctgacaagagaaaaacaaacctgaagctgccgagcaggagtggatgcagcctgatcagggtctggagcaaggagccgggctttcctgagctgtggcccggcagggaagatcgcctggacgtggagccagcatcgccccgtgccctcggcgtttgcatttgtaaacttgtggtcttcctatgtgtcagaaacaactgtgtcttgggggggaagaccctcgctgcgccgcttcccgccgcagcgcccgcgcctccgaggggacagcgccctctggagctcgctgggagcatcaccgcctggacgcccgcgccgcggaggagccggcgcccatctccacccgcacggctcgccggtccagagccatgagccaagagccctcttcacgctgctaactccaggggacagacgaagggacatctttggaaaacgctggttttggtttttaaaaagcccaactttttttttttaatttccataactaaagtgttcagactggagtgctctccttcaggcctcttcata

SEQ ID NO: 386225 - DNA, 1946 bp, Homo sapiens
ctgccggcccaggcgcgatgaggcggctgcccgctgggtggcgccgatttcccggggaggtcccttctgggcccccggcggaggtgggagagagtcaggcaggagccgaggccggggagccctcttcgtcagctggtgctcactgcgccgcgccagcgccagccgggactcacccgcagctccatgcttgtgcccggttcgactcgtccatcctccaagaagaggcagcccatgaggctcccagtccccactgagtgccaccctgaaggatgtcccagctctcctccaccctgaagcgctacacagaatcggcccgctacacagatgcccactatgccaagtcgggctatggtgcctacaccccatcctcctatggggccaatctggctgcctccttactggagaaggagaaacttggtttcaagccggtccccaccagcagcttcctcacccgtccccgtacctatggcccctcctccctcctggactatgaccggggccgccccctgctgagacccgacatcactgggggtggtaagcgggcagagagccagacccggggtactgagcggcctttaggcagtggcctcagcgggggcagcggattcccttatggagtgaccaacaactgcctcagctacctgcccatcaatgcctatgaccagggggtgaccctaacccagaagctggacagccaatcagacctggcccgggatttctccagcctccggacctcagatagctaccggatagaccccaggaacctgggccgcagccccatgctggcccggacgcgcaaggagctctgcaccctgcaggggctctaccagacagccagctgccctgaatacctggtcgactacctggagaactatggtcgcaagggcagtgcatctcaggtgccctcccaggcccctccctcacgagtccctgaaatcatcagcccaacctaccgacccattggccgctacacgctgtgggagacgggaaagggtcaggcccctgggcccagccgctccagctccccgggaagagacggcatgaattctaagagtgcccagggtctggctggtcttcgaaaccttgggaacacgtgcttcatgaactcaattctgcagtgcctgagcaacactcgggagttgagagattactgcctccagaggctctacatgcgggacctgcaccacggcagcaatgcacacacagccctcgtggaagagtttgcaaaactaattcagaccatatggacttcatcccccaatgatgtggtgagcccatctgagttcaagacccagatccagagatatgcaccgcgctttgttggctataatcagcaggatgctcaggagttccttcgctttcttctggatgggctccataacgaggtgaaccgagtgacactgagacctaagtccaaccctgagaacctcgatcatcttcctgatgacgagaaaggccgacagatgtggagaaaatatctagaacgggaagacagtaggatcgggggtaagcgcatgaaagggaagatgcctgttttcactgttgcctgctcttgcctgagtggagcatgaaaagccctaagaatcactctcccggggaagcctgtttctgcctggtgttcaacaaagcaaagcaggaacagcaagaaagaagatgctgtgcaggccgggcatgggtggctcatgcctgtaaacccaacactttgggaggccaaggcgggtagatcacctgaggtcaggagttcaagaccagcctggccaacatggcaaaaccccatctctactaaaaatgcaaaaattagccaggcatggtggtgggcacctgtaatcccagctacttgggaggctgaggcaggagaatcactgaacccaggaggcagaggttgttgtgagctgagattgcaccactgcacttcagcctgggggacagagcaaaactccatctca

SEQ ID NO: 386226 - DNA, 324 bp, Homo sapiens
tcccaccccccgcacggcttacaccgagaatggatggcaaagtttaaggccacgaagccgctgcccgtggggaggctccctgaaaggcaggccggccggcctcgggggcacagaaagaagccggcggggggtctcccggtcctgcccgctccgggctgactccccgctctctccgcagcgtcactcccatgtcctccagccaagtgcgcaccagcgacgcctacctgctcttctacgaactggccagcccgccctcccgaatgtagcgccaggagccacgtcccttctcccttccccgtggtggccccgctccctaaatttttt

SEQ ID NO: 386227 - DNA, 564 bp, Homo sapiens
gcgaattcactagtgattatccccggttcctgggtaacagagcaagaccccatctctaaaaaaataaaacaaaatacccattacaatagatcttatccacaagcctcattcctcctttcctccctccataaggaaatgaggtaggatgaggtcgccagaagagactcaagccagccttctctgggactctgctgaaaatgctccttggaagcttttggaagttttaatgtcaggtgaccagcttcctggaatttctgtgctgcaagggtggattcatgctgattgggtgcatggatggcaagaacaggcctggaaaacatcgcgtagctcaaactggcatcgattgaggctcattgcctcaaaggaatgaacatcagtaggattcttatgatttcagatttcatgtgctaagtgcacctttactaatacatttaggttcacaactgcttgactcaaataagccaagtatattgtataatatgtgacctcacggtaccctgaagcaaacagatttggggacattgattaaaggcatgttcctcatgtggccttctacttgaccct

SEQ ID NO: 386228 - DNA, 446 bp, Homo sapiens
tgcattcaccatccctcaagttcatgtgaactgatttttcctggacaccagacaaggacccaactacgaagggggcagggtataaaaggctgtcaccctgactctccactaagctggttaacaccttagcagtccacagacagcaactgctaaaagagcattaatggtaacacacccctagatgctgccatggggccagagcccaaaagcgcttgccctggccccagcacctgctcacctatgtactccctcccatgaagggttgagcccagtgggtttgagtgagtgaaatccatccctgctggcaccaaagtggccacttggaccctgagccagtgcactccagttccgcctgcaaaaaggtcaagggaactctctcatctcactaggatttctgtgcattatgatttgggggagcaaaggaattctctgtatcctttggtcat

SEQ ID NO: 386229 - DNA, 350 bp, Homo sapiens
caaaggctacctggtacaaccgtgtgacgggtagacgacagacatgtcacgcgcacacacctgcttatcaaggaaattacaaatctggaaggacatgagcaaaatactaatatttatgagctcacctgtaatccacccacagccaatacacacagtaaatccaagctagacagagcctcggcgatttatttcccctacatcagcaagcttgtccctcttctttattatccatcagaatctcctagatgatttgcgtctttcctttggcttcaagaaggagagttaagacagggacaaatggaagcctcccctcctaatgtatgtcaggggtcagactcagcacaagattc

SEQ ID NO: 386230 - DNA, 446 bp, Homo sapiens
ctttaagacctagccattgcactcagaggacacggactatctagagtactatgtgagagacagtgcagagcatgctgaatgtacagtgtcagggggcattgagtacctaatgacagacatccaacccaaacttacttcaggtaacaatgcaggtggcaaggggatttattggcccaaacaagtaagaatgtcagaataaccttcaggcgtagcttgatccagggacccaacatcagtgccactagtctgtccccatctcttgtctctgctgtcctcgggagtggcttccttctcaggcagtctccttatgtggtggcttccagcaggtctccaattacatcctccaaacttcaggttcagcaggaaaaacaccttatctttttcagtggtcaaaataaacagccactccttgagtcttatgggtctgcctgtgggcatgtgtatta

SEQ ID NO: 386231 - DNA, 202 bp, Homo sapiens
cccaaagtgctgggactacaggcgtgaaccaccacgtccagcctgttcagcctctttctaacattatggtaacaacaattttttttaaaagcatttacaaaaacaatacggtttcttcttcaagagttttacattttgctaataatgtctccctcctatacctgctatcttgtttacttttggataaattttttcttttttt

SEQ ID NO: 386232 - DNA, 291 bp, Homo sapiens
gctaagcaaggggttcacttctgattttggatcaactgggaagaaaactcggttacatatctaaggctcccaaacaaaaagacaaggtttaagacacctgctgctgcttccacaaaataaacataggttataatgcacttaagtcaacacccccaagtaaatttggtacattaatccatattacaaggcagtaaaggccagaaatgctcccaagtttaaacaacatataatcctatttactgtcattcaactgattggactaggtctgattaaaagaaatagaaaactatt

SEQ ID NO: 386233 - DNA, 185 bp, Homo sapiens
aaataaatacacctattatgtacacataaaaattaaaaattaaacaaaacagaaagaaagggaaacttccaccatcagccacaggccctgacactctccttgtcctaaactcttggagctaagaggagctgatgatggactctctgatccccttcctggggtggcacactcttcctttcagaagt

SEQ ID NO: 386234 - DNA, 450 bp, Homo sapiens
aagaaattacatataaaatggtttatactttatgaaaattcggctcgcatcgtcgtttaatggaagtgggtttaacctgattacaacactaacaccagtatcactgatctgatatttacaaaaatttgtatttttcaataaattaaagtcaatgcaacacccatgcaagctagagtgctagctgtttggtgaacaaggacgtgacatcagaacaagaagtctataagtcccaaactttacaagtgtgatcattttcaaactgcatccattcctcgcattgaagatgtgaaacccaaacccattcctctttgtgtgtgggtttgtgatcttgccatttcatactgagcatctaaatttcgaaatacttcttcctgctgcttcagagtcttgtaactttcttcatcaactgagctacatccagcttcatcttcactctaaaaatcagacata

SEQ ID NO: 386235 - DNA, 493 bp, Homo sapiens
cacagctgacctttatccattcctctccctgtattattttatcctgacatttaccatgcacctgctgtgtgttaagcactgtgcttttctatagattcgttcactttacaagaagcagaaatttcagattatccatgggctagaagggttggaagatggtcttaggaaagtctctggcctgtcccagatctgctaaatgtatgggtgtgctacataatctctcagggttcttccagcccaaatttgctaaaattctatgcagctctgagatctagtttctccttctaacagaagccccagtggagcttccaagcctctcttaaccttgagtttctccccagaaagccaagcttgagacaagggcttgagtacagcttttttgaagcgactccaggaaatagaagtggggaaagagcaggaaagaaggaagaaaggaaagaagggagggaagcagagacagagcatgaggaagacaggaagggaggagagcttg

SEQ ID NO: 386236 - DNA, 308 bp, Homo sapiens
tttttggtcctcatttttttctttcccttttggcctctgagactcaacagccctctctgaactcagggacagatgtttctgtggactttctggccacaaataactgtgcaaccccagaacagttatgtgactcctcgatgttcatgtctgtggggaccatgtctgtgggcccccgacacaatcccaataacccccacaggcccttcacaagtactttttaaacactcttaagaaaatgctaaagaagccaggtgcggtggctcatgcatacaaccccagcactttgggaggccaaggtgggaggattg

SEQ ID NO: 386237 - DNA, 434 bp, Homo sapiens
ctttttgccttgaggcctgacggaggtctgactgaagcccccagagctacccaggatatagtcttactaaggctaaagactcctttctctccactacccccagaagatgcagggaaggcatctcttcctcttcagcacttgagaataatagatagcatctaaactcctgaaactggctgacctatttgttagggagctatgtggtcaaaattacgttgaaatgagatgccaatatcagtgtgctgtaaagagtctaaaccacaattattgttgtggctcttagttttggtgattaataataaaccaactccttatgccatggaagagataaagatgcctcacaaaccacaaactagtttgtttgtttatttattgagacagagtctctctctgtcacccaggctggaatgcagtggcataatctcggctcactg

SEQ ID NO: 386238 - DNA, 762 bp, Homo sapiens
attgcttgaacccgggatacagaagttacagtgagccaagatggtgccattgtactccagcctgggcgacgagtgaaactccctctcaaaaaaaaaaaaaaaaagaaagaaaagaaaaatatgaaacaaaaatataaaggggaagaaaaatgctcctcttttattattttctgcctctgatgcttagcctttgttgaggcactgctggttggactagataactacctttcattgttatcttatcaaaagagatttatttactgctcactattttcctctttagaaagatgagctctactttaaagttaaataatgcagaacatggttaggaaaaaaaaagtttgccaatctttttttttttttttttttagaacacattgtattgacttgctgaaattatcatggtggctgctgttgtaaaccaaggaaccatgtaaaaagactggcctctaagccacatttacaaacattgtaaaatttagtgttaactgtttgatcagaaaatagtgctatttttataattcttggaacttatacaaagagagatttagaaacttatcattttaattaatttgtgcacatcttaaatatatatattttgatatcatagatctagatggctgacataataatacagagataatttaaactccctttagtcacttgagaattttaatgcattcattagaaatgtgatgtgagagactattttattaaaaatacatcagataaaaaagtcattgtcttttcaaagcatcaatt

SEQ ID NO: 386239 - DNA, 431 bp, Homo sapiens
ttattatcttgacttcagttacaggatttaccaagaatttgaagtaactgtacctgattctatcacttcttgggtggctactggttttgtgatctctgaggacctgggtcttggactaacaactactccagtggagctccaagccttccaaccatttttcatttttttgaatcttccctactctgttatcagaggtgaagaatttgctttggaaataactatattcaattatttgaaagatgccactgaggttaaggtaatcattgagaaaagtgacaaatttgatattctaatgacttcaaatgaaataaatgccacaggccaccagcagacccttctggttcccagtgaggatggggcaactgttctttttcccatcaggccaacacatctgggagaaattcctatcacagtcacagctctttcaccca

SEQ ID NO: 386240 - DNA, 556 bp, Homo sapiens
gagtgaacaaaaagagacacagtctctaacttcatggagtttatatcctgttcaaaacagagagttaatcaaatacagacacaattgagtatgtatttagaaatctaaattagtgcccctaatgaaacaagttgtagcagaatgcttaacaagggatctgactaaattggtgtattggaagaggcttccctaaagaagggatgctgaagcttcaggtccaattagacaggtgagtgcggagtagggagggcagcatgtgcaaaggttctgtggcaggaatgatggtgtatggtgactgcccatcttggtctaccccaggtagtccctattgtcttggcttattgattaatagcattctcttcctttctccaaagtggcctggtttggaaggtaaattatatggttgactaactgaataaaaagaagctggctggccacagtgtctcacggctctaatcccagcactttgagagacggaggtgggtggatcacaaggtcaggagtttgagaccagactgaccaacatggtgaaactccgtgtctactaaaaaaaaaa

SEQ ID NO: 386241 - DNA, 787 bp, Homo sapiens
cgttaccataagtaacttttttatattgaaaacctgtattttccaaaactgaaaagtggtgagaaaagtaacattgtttcaacttctgcaaatctctttaatatctgccttaacagaatgaagctagatttttcaggtctgcttctgtattcaaacagctgcaatatcatactctggaaaactccacaatatattcatgagagattgagagtgaataagacaaataacatttagtattattaagaaattggttttgacctcatagatccactgaaggattgccagaccacatttaagattttcttggccaggtgtggtagctcacgcctgtaatcctagcactttgggaggctgagacgggcagatcacctgaggccaggagttcgagaccagcctggctaacatggtgaaaccccatttctactaaaaatacaaaaaattagccaggcgtggtggcgcacacctataatcccagctactcaggaggctgaggcagaatgacttgaacccaggaggcggaggttgcagtgaatcaagattgcgccattgcactctaccttgggcaacaaaagcaaaactccgtctcaaaaaaaaaaaaaaattattttccagtggttaaattcctggaaacaagcaacctcccaagattgaactaggaagaaattaaatcctggaatattaaaataacttagagtgtaatttggattgcttgtaactcaaagaataaatgcttgaggggatggatatcccattccccatgatgtatttatttcacattgcatgcctg

SEQ ID NO: 386242 - DNA, 308 bp, Homo sapiens
ttcagtatctaggacagttggcacctggcaacactcatagaatgttagttgaactgctgtgggccctcttcctgaatttctaacttagtttgcaactctatctgtgacttaattgaaccagtatactcccgataacttcactgtcatccttagagatctctgatgtcttcaggaaatgatgatagcattcataaatgctagcattgttgcatatttgttctgtgtcaggcactgtgctactctcttagtttgcatgtcctttataatgttcctgatgactccatgaaatggacactgctgttagtccg

SEQ ID NO: 386243 - DNA, 241 bp, Homo sapiens
ctaggaacaaattgcatattactaagcaatattctgttgaagaagaaatgaaaagaaaaattaaggaattgtttaacccgaataccttgaaaatattgcataccaatttttgtgataacagaaagagcaattatttatagggaaatatgtaactttaaataaatttatcaaaaaactcaaaatattataaacaaataaactaaatatccaactcagagttaaaatacaaagaccaaaaagg

SEQ ID NO: 386244 - DNA, 398 bp, Homo sapiens
aaaaatctttacatagttgaaggttttataatgaggaaaaaaatcagtagcttgcaaggaagctaaaataggttcaatgttgctaaactgatacaagttgtactctaaaaatgcaacaatcattgagaatatctaggacaaccttctttccccttttttttattttagggtagatcctctgttatggtctcactgctaggaacttcttcacattatttcatagaaatcttgtgtagagcatagaaagagttgtgacagggttgttttgaaatatgtgcttactggagccaaactgctaaatttaccagccatctgacatgagaaaaatcatttgatttttgtgtgccttagtttcctcatctttcaatgcagataataatacccattgcaaagattgc

SEQ ID NO: 386245 - DNA, 757 bp, Homo sapiens
agagagtgtatttttgggctgaagcttatgcattttctgtgccatcttgcaattaaaatggaaagtaattatccagttctaaaatgtggatgaactaaaaattatactgtaatatttccccataagacgaagggggtaatagaactacgctgattccatttatttttaatggcccatcaaagatgacaggatttgccattttgtaagaaaccatctgactcatcttgaacttcagtgaatccagtgcctaattctatgtgacatgtctggtggtgccttatatttttgcaaaaataaaatccctctgattaaaatttcacacctagctgaggaccatgaaactctgattacctggtccagtcctggcccagcattgccaaaaggtttacaaacctcagtacaacttgaggggaacttggcctaggcttcaagttagtggaatcattcaaagcccaaggcatttgccaggtggctgtttccctgccctgtgtcagcagctctaaattaggcacatgctctttaaaccagccatgaaaatgattggccaatatagccagaacccaaaggaaatatgatcaggctggccgtgactgaggctaagggcataaaagaagttcatcattcctctcctttgtcattctccatgggtttgaggagagaaagcaaagtttattctctgaaagcagatgctagagttccagtgacattgaaagaaacagaaaaaattgcaaaagcccagatttgcaaatgttggtgt

SEQ ID NO: 386246 - DNA, 210 bp, Homo sapiens
gactgggtggcgtcatcacagacagcgtgtgggaaccgtgcccccaagcgggcccagagggactccctgctgtcttgtaggcactggggatagggtcaggtggaaagcagatacaaatctttgtctttacagggtttcgagttgagggtggggctagaccaacaataaacacgtaagtgtctagtatgttagaagagaggtgctttccag

SEQ ID NO: 386247 - DNA, 211 bp, Homo sapiens
cttgtctccatcttttgctattacaaacaatactgcaatgaataactttatacacatgctatttctcacctatgcaggtgtatctctaggatagattccaaaagtggaatttctaagtcaaaggagggaagcaactctaattgtgatcaatttctgacaaactgttcttcctatggatttcaaaaatttacattcccattagcaatgtatg

SEQ ID NO: 386248 - DNA, 370 bp, Homo sapiens
atgggaggtgctcaaggtacgatatcaagggctgatttaattacacagccattcagtgggacaagcacggcaatttttagccaactgttctagtaaatattacgggaaacccttttatagagtgctaattccggcttagtgttttcgctaagctttagttcttactcaaacatgcacacgggcccccaaagatgctaccaccaggccagaaaatcacacagataaagcatgagcccatatgccatcttgcagtcaatcatccttttaaaaatgttataaatgtctgcatatcactgtcatttaggtggggacaaactaaggtccagtaacttccctgtgtctgttcttcctccgtccccctcccccgtga

SEQ ID NO: 386249 - DNA, 823 bp, Homo sapiens
atgttattgcttcacagtccttctgaatcataaagtgagttctgactgaggttccaggtgatgtagtgaacattccacacagggagctctaccatcaagtgaggggaatgcccaccatcgctatcatcaccatcaccactacttctgccacagccatcacattcacctctacctccaccatcaccatcactactcaagttggagaaatagaggccaggggaaggggataaagggagggcaaagaaaagtaattccaaaggaacatgagcaccaataatgctttaagagtgttttggaaatcaagagaatggaatatgaaaacatcaacatttgattcagatgaggatattctacttttacccaaaagaaaacgttttagaaagaaaaagtcaagaccagtgagacacaccaaacgccatgaagaggagcaggtctatgagcaagggaccacattaccctgttccatatgcaagcacgaaattgacctaactggtatttttctccataagaagcaacatgtagctctggccacgctgggtttccaatggatgggtagaaagaaaccacagccctcagtgattgctgttcagagacagttcatgatttctaaactattgtcatcttttatgttcactgaaaaaaccctacagagcattaataatgcttttgagctgctttggaaaaaacaaataccagcatactataagatttttgataacattgacaggagtgtcatatattctcaaaaaatatgtcatctgttaattaaaggagtgggcatttgtgaagacaggaattctacatggaaagctgacatgaatga

SEQ ID NO: 386250 - DNA, 535 bp, Homo sapiens
atgttattgcttcacagtccttctgaatcataaagtgagttctgactgaggttccaggtgatgtagtgaacattccacacagggagctctaccatcaagtgaggggaatgcccaccatcgctatcatcaccatcaccactacttctgccacagccatcacattcacctctacctccaccatcaccatcactactcaagttggagaaatagaggccaggggaaggggataaagggagggcaaagaaaagtaattccaaaggaacatgagcaccaataatgctttaagtctgagaccgtaggagaaagatggctgtggagtcgcacattacccagaaggaaattaagaaggagcttcagaagctgatcctcacaagcagacaggcccgctgccgccagtaacagccgccgccaccgaatggtcgagttctccggatgaaacataccgtccagcgtgctggcgacctacacttggatagatgcaaccttgaaagaactgagcttagtaaaataagtctatccagaggctagaaagaag

SEQ ID NO: 386251 - DNA, 374 bp, Homo sapiens
aacatcgaggatgcatgttactagatgggcagtcagttgtgcacccgagagataatttgggtgaggtggggtgtgatacattccactgcttggccaagtctgccacctcccatggcaaaggccccacctcataaaattcttcttgggacccaaatacttcctgttcctttaggggaggaaaaagggggcctcttcttcaagagtctttgctgctaatggatatagcagaccctggcttgaaacatgatctgtgtgaggaaccatttccccacactctggcaatttaccaagttagtcagacctggctatgaaattgggctggggggccgggtagccagactgaattgaatgttctccttgttctccctccctct

SEQ ID NO: 386252 - DNA, 473 bp, Homo sapiens
gcccgcctcggactcccaaagtgctgggattacaggcatgagccaccacgcccggctggtggatgttttttaaaccacctaaatgatatcataattttcattctagcttttaaaataatgtatttttaaataatgtgtttttaaagattttgattgcaaaatgaaagaaacaaggataagttgtgctaattccaataaagtatggaggccatggttttagcaacattcctggatctcctcttgcttaagtgtccagctcctggcacacggaaacatcccacattaaatcttccttaggtctgaatcaccccatatctttgactgatgtcttgttttgctaccttcctgatgctgagttcacttttagtgcccatttgttcaccctcacctctattttcagattatattctgtttgccttctctaccatgatacagtgattctatcagataatcataaaacacttccttcagta

SEQ ID NO: 386253 - DNA, 441 bp, Homo sapiens
tttagttaactcttgttttgcttgatattcgtgaatgtttcagcttttcatgagtcctgtactattttcctttattccaaaggttacaatttctaaagctatcataaacctatatttcagagcacctgttacagttctatagcttattagaaaccatcttttgaaaaggattaaaataggacaacaattgtctgtgaatagcaaaatgtccagggtaattacagttagaaacacaattgacaaaaaagtttggttatctccctaatggtttacagtaacttaaaatagcaactaaggactaagctctgatttttatcttgcccagattcctttctaaggagtctggggagtcatgccctacaaaccataaattctcatcagatgggttttatttaaccctgtatattgtgacttactttccaatctgactgtggcataaca

SEQ ID NO: 386254 - DNA, 1839 bp, Homo sapiens
cgggctgcctgcctgcctgcctgcctggcccggcccgagctccagcctgcctcttccactggccactgcctcccacccagggctggcatccctgctccctgccctgggtcccagactgtgtcctccatcaccgcagggtcggtgaggggctgggctggacaccagggcccgccctcccatcactgagctccactccttcctcattttgctgctgattctagccccaaacaaaacaggttgagctttttcctcccctcagaagctcctctctggctcgtggctgccttctgagtgttgcagacggcgccggccgggaaggggggcctgggccagccctgccaggactgggacgctgctgctggcgcctggccctccatcaggccagcctgtggcaggagagtgagctttgccgcggcagacgcctgaggatgatgccccagctgcagttcaaagatgccttttggtgcagggacttcacagcccacacgggctacgaggtgctgctgcagcggcttctggatggcaggaagatgtgcaaagacatggaggagctactgaggcagagggcccaggcggaggagcggtacgggaaggagctggtgcagatcgcacggaaggcaggtggccagacggagatcaactccctgagggcctcctttgactccttgaagcagcaaatggagaatgtgggcagctcacacatccagctggccctgaccctgcgtgaggagctgcggagtctcgaggagtttcgtgagaggcagaaggagcagaggaagaagtatgaggccgtcatggaccgggtccagaagagcaagctgtcgctctacaagaaggccatggagtccaagaagacatacgagcagaagtgccgggacgcggacgacgcggagcaggccttcgagcgcattagcgccaacggccaccagaagcaggtggagaagagtcagaacaaagccaggcagtgcaaggactcggccaccgaggcagagcgggtatacaggcagagcattgcgcagctggagaaggtccgggctgagtgggagcaggagcaccggaccacctgtgaggcctttcagctgcaagagtttgaccggctgaccattctccgcaacgccctgtgggtgcacagcaaccagctctccatgcagtgtgtcaaggatgatgagctctacgaggaagtgcggctgacgctggaaggctgcagcatagacgccgacatcgacagtttcatccaggccaagagcacgggcacagagccccccgctccggtgccctaccagaactattacgatcgggaggtcaccccgctgaccagcagccctggcatacagccgtcctgcggcatgataaagaggttctctggactgctgcacggaagtcccaagaccacttcgttggcagcttctgctgcgtccacagagaccctgacccccacccccgagcggaatgagggtgtctacacagccatcgcagtgcaggagatacagggaaacccggcctcaccagcccaggagtaccgggcgctctacgattatacagcgcagaacccagatgagctggacctgtccgcgggagacatcctggaggtgatcctggaaggggaggatggctggtggactgtggagaggaacgggcagcgtggcttcgtccctggttcctacctggagaagctttgaggaagggccaggagccccttcggacctgccctgccagtggagccagcagtgcccccagcactgtccccaccttgctagggcccagaaccaagcgtcccccagccccgagagggagcctgtcgtctcccagggaataaaggagtgcgttctgttcaaaaaa

SEQ ID NO: 386255 - DNA, 299 bp, Homo sapiens
attgcagagggttgattgctttaatttgcagagagctttgtcttccaaaaatcagtctggggccccagtggatggtcaccatctggctaaagggtcccttggttctagagtgacccagggtcttcccaccaaaataaaagtcctccccactgcccaccccgccgggaggcagcctggactgtaggttcccgctgtgctctcctcctcctgacctggacccatctgttttgcagctccctgagggcctcctttgactccttgaagcagctgtttcgactctgggcactgtttggactctg

SEQ ID NO: 386256 - DNA, 1782 bp, Homo sapiens
cgggctgcctgcctgcctgcctgcctggcccggcccgagctccagcctgcctcttccactggccactgcctcccacccagggctggcatccctgctccctgccctgggtcccagactgtgtcctccatcaccgcagggtcggtgaggggctgggctggacaccagggcccgccctcccatcactgagctccactccttcctcattttgctgctgattctagccccaaacaaaacaggttgagctttttcctcccctcagaagctcctctctggctcgtggctgccttctgagtgttgcagacggcgccggccgggaaggggggcctgggccagccctgccaggactgggacgctgctgctggcgcctggccctccatcaggccagcctgtggcaggagagtgagctttgccgcggcagacgcctgaggatgatgccccagctgcagttcaaagatgccttttggtgcagggacttcacagcccacacgggctacgaggtgctgctgcagcggcttctggatggcaggaagatgtgcaaagacatggaggagctactgaggcagagggcccaggcggaggagcggtacgggaaggagctggtgcagatcgcacggaaggcaggtggccagacggagatcaactccctgagggcctcctttgactccttgaagcagcaaatggagaatgtgggcagctcacacatccagctggccctgaccctgcgtgaggagctgcggagtctcgaggagtttcgtgagaggcagaaggagcagaggaagaagtatgaggccgtcatggaccgggtccagaagagcaagctgtcgctctacaagaaggccatggagtccaagaagacatacgagcagaagtgccgggacgcggacgacgcggagcaggccttcgagcgcattagcgccaacggccaccagaagcaggtggagaagagtcagaacaaagccaggcagtgcaaggactcggccaccgaggcagagcgggtatacaggcagagcattgcgcagctggagaaggtccgggctgagtgggagcaggagcaccggaccacctgtgaggcctttcagctgcaagagtttgaccggctgaccattctccgcaacgccctgtgggtgcacagcaaccagctctccatgcagtgtgtcaaggatgatgagctctacgaggaagtgcggctgacgctggaaggctgcagcatagacgccgacatcgacagtttcatccaggccaagagcacgggcacagagccccccggtgaggtccggcttgcggacagcgcagcctctaggttctctggactgctgcacggaagtcccaagaccacttcgttggcagcttctgctgcgtccacagagaccctgacccccacccccgagcggaatgagggtgtctacacagccatcgcagtgcaggagatacagggaaacccggcctcaccagcccaggagtaccgggcgctctacgattatacagcgcagaacccagatgagctggacctgtccgcgggagacatcctggaggtgatcctggaaggggaggatggctggtggactgtggagaggaacgggcagcgtggcttcgtccctggttcctacctggagaagctttgaggaagggccaggagccccttcggacctgccctgccagtggagccagcagtgcccccagcactgtccccaccttgctagggcccagaaccaagcgtcccccagccccgagagggagcctgtcgtctcccagggaataaaggagtgcgttctgttcaaaaaa

SEQ ID NO: 386257 - DNA, 1432 bp, Homo sapiens
attgcagagggttgattgctttaatttgcagagagctttgtcttccaaaaatcagtctggggccccagtggatggtcaccatctggctaaagggtcccttggttctagagtgacccagggtcttcccaccaaaataaaagtcctccccactgcccaccccgccgggaggcagcctggactgtaggttcccgctgtgctctcctcctcctgacctggacccatctgttttgcagctccctgagggcctcctttgactccttgaagcagcaaatggagaatgtgggcagctcacacatccagctggccctgaccctgcgtgaggagctgcggagtctcgaggagtttcgtgagaggcagaaggagcagaggaagaagtatgaggccgtcatggaccgggtccagaagagcaagctgtcgctctacaagaaggccatggagtccaagaagacatacgagcagaagtgccgggacgcggacgacgcggagcaggccttcgagcgcattagcgccaacggccaccagaagcaggtggagaagagtcagaacaaagccaggcagtgcaaggactcggccaccgaggcagagcgggtatacaggcagagcattgcgcagctggagaaggtccgggctgagtgggagcaggagcaccggaccacctgtgaggcctttcagctgcaagagtttgaccggctgaccattctccgcaacgccctgtgggtgcacagcaaccagctctccatgcagtgtgtcaaggatgatgagctctacgaggaagtgcggctgacgctggaaggctgcagcatagacgccgacatcgacagtttcatccaggccaagagcacgggcacagagccccccgctccggtgccctaccagaactattacgatcgggaggtcaccccgctgaccagcagccctggcatacagccgtcctgcggcatgataaagaggttctctggactgctgcacggaagtcccaagaccacttcgttggcagcttctgctgcgtccacagagaccctgacccccacccccgagcggaatgagggtgtctacacagccatcgcagtgcaggagatacagggaaacccggcctcaccagcccaggagtaccgggcgctctacgattatacagcgcagaacccagatgagctggacctgtccgcgggagacatcctggaggtgatcctggaaggggaggatggctggtggactgtggagaggaacgggcagcgtggcttcgtccctggttcctacctggagaagctttgaggaagggccaggagccccttcggacctgccctgccagtggagccagcagtgcccccagcactgtccccaccttgctagggcccagaaccaagcgtcccccagccccgagagggagcctgtcgtctcccagggaataaaggagtgcgttctgttcaaaaaa

SEQ ID NO: 386258 - DNA, 241 bp, Homo sapiens
gcttcccctctgtttcctcagagtcagaacaaagccaggcagtgcaaggactcggccaccgaggcaggtatgtgggcctggctgccccgtccgaccagggcggaggcctgggcggtactccccacacacacctcctcaccctggggacacacacactccccctggctgcacaatcatgggcgcggcgctctcattccagatatgtgccgtcaaagtaaacgctgtgttcccccattcgcca

SEQ ID NO: 386259 - DNA, 1595 bp, Homo sapiens
ggctggtactggtctgggatgtttgggatctcgtggctgccttctgagtgttgcagacggcgccggccgggaaggggggcctgggccagccctgccaggactgggacgctgctgctggcgcctggccctccatcaggccagcctgtggcaggagagtgagctttgccgcggcagacgcctgaggatgatgccccagctgcagttcaaagatgccttttggtgcagggacttcacagcccacacgggctacgaggtgctgctgcagcggcttctggatggcaggaagatgtgcaaagacatggaggagctactgaggcagagggcccaggcggaggagcggtacgggaaggagctggtgcagatcgcacggaaggcaggtggccagacggagatcaactccctgagggcctcctttgactccttgaagcagcaaatggagaatgtgggcagctcacacatccagctggccctgaccctgcgtgaggagctgcggagtctcgaggagtttcgtgagaggcagaaggagcagaggaagaagtatgaggccgtcatggaccgggtccagaagagcaagctgtcgctctacaagaaggccatggagtccaagaagacatacgagcagaagtgccgggacgcggacgacgcggagcaggccttcgagcgcattagcgccaacggccaccagaagcaggtggagaagagtcagaacaaagccaggcagtgcaaggactcggccaccgaggcagagcgggtatacaggcagagcattgcgcagctggagaaggtccgggctgagtgggagcaggagcaccggaccacctgtgaggcctttcagctgcaagagtttgaccggctgaccattctccgcaacgccctgtgggtgcacagcaaccagctctccatgcagtgtgtcaaggatgatgagctctacgaggaagtgcggctgacgctggaaggctgcagcatagacgccgacatcgacagtttcatccaggccaagagcacgggcacagagccccccgctccggtgccctaccagaactattacgatcgggaggtcaccccgctgaccagcagccctggcatacagccgtcctgcggcatgataaagaggttctctggactgctgcacggaagtcccaagaccacttcgttggcagcttctgctgcgtccacagagaccctgacccccacccccgagcggaatgagggtgtctacacagccatcgcagtgcaggagatacagggaaacccggcctcaccagcccaggagtaccgggcgctctacgattatacagcgcagaacccagatgagctggacctgtccgcgggagacatcctggaggtgatcctggaaggggaggatggctggtggactgtggagaggaacgggcagcgtggcttcgtccctggttcctacctggagaagctttgaggaagggccaggagccccttcggacctgccctgccagtggagccagcagtgcccccagcactgtccccaccttgctagggcccagaaccaagcgtcccccagccccgagagggagcctgtcgtctcccagggaataaaggagtgcgttctgttcaaaaaa

SEQ ID NO: 386260 - DNA, 1748 bp, Homo sapiens
cgggctgcctgcctgcctgcctgcctggcccggcccgagctccagcctgcctcttccactggccactgcctcccacccagggctggcatccctgctccctgccctgggtcccagactgtgtcctccatcaccgcagggtcggtgaggggctgggctggacaccagggcccgccctcccatcactgagctccactccttcctcattttgctgctgattctagccccaaacaaaacaggttgagctttttcctcccctcagaagctcctctctggctcgtggctgccttctgagtgttgcagacggcgccggccgggaaggggggcctgggccagccctgccaggactgggacgctgctgctggcgcctggccctccatcaggccagcctgtggcaggagagtgagctttgccgcggcagacgcctgaggatgatgccccagctgcagttcaaagatgccttttggtgcagggacttcacagcccacacgggctacgaggtgctgctgcagcggcttctggatggcaggaagatgtgcaaagacatggaggagctactgaggcagagggcccaggcggaggagcggtacgggaaggagctggtgcagatcgcacggaaggcaggtggccagacggagatcaactccctgagggcctcctttgactccttgaagcagcaaatggagaatgtgggcagctcacacatccagctggccctgaccctgcgtgaggagctgcggagtctcgaggagtttcgtgagaggcagaaggagcagaggaagaagtatgaggccgtcatggaccgggtccagaagagcaagctgtcgctctacaagaaggccatggagtccaagaagacatacgagcagaagtgccgggacgcggacgacgcggagcaggccttcgagcgcattagcgccaacggccaccagaagcaggtggagaagagtcagaacaaagccaggcagtgcaaggactcggccaccgaggcagagcgggtatacaggcagagcattgcgcagctggagaaggtccgggctgagtgggagcaggagcaccggaccacctgtgaggcctttcagctgcaagagtttgaccggctgaccattctccgcaacgccctgtgggtgcacagcaaccagctctccatgcagtgtgtcaaggatgatgagctctacgaggaagtgcggctgacgctggaaggctgcagcatagacgccgacatcgacagtttcatccaggccaagagcacgggcacagagccccccggttctctggactgctgcacggaagtcccaagaccacttcgttggcagcttctgctgcgtccacagagaccctgacccccacccccgagcggaatgagggtgtctacacagccatcgcagtgcaggagatacagggaaacccggcctcaccagcccaggagtaccgggcgctctacgattatacagcgcagaacccagatgagctggacctgtccgcgggagacatcctggaggtgatcctggaaggggaggatggctggtggactgtggagaggaacgggcagcgtggcttcgtccctggttcctacctggagaagctttgaggaagggccaggagccccttcggacctgccctgccagtggagccagcagtgcccccagcactgtccccaccttgctagggcccagaaccaagcgtcccccagccccgagagggagcctgtcgtctcccagggaataaaggagtgcgttctgttcaaaaaa

SEQ ID NO: 386261 - DNA, 384 bp, Homo sapiens
gttctctggactgctgcacggaagtcccaagaccacttcgttggcagcttctgctggtaaagggggtcaggaggggacccccaaacacactgatcctgggggggaggagaggtctcccacatggcacagatggggccactgaggccctcaagaggaagtgtgtgtcccccaacagcaagtgtggacagcagaaggaagaggcagggcccagcatggagaaaccccattctagtaggacttccaggggccagtgtccccagaaagggggaggggtctatgtctcaccctgctcttagcgtccacagagaccctgacccccacccccgagcggaatgagggtgtctacacagccatcgcagtgcaggagatacagggaaacccggc

SEQ ID NO: 386262 - DNA, 167 bp, Homo sapiens
gaggcaagatagctggttttgtccctcctgacaaaggtttcctcctccttctagacgacctgagtctgttagccagctccaagacgcccttctccttggtagaaccccaccgagtctgatttgggtggcaagttagagcttggtctacgcctggggtttctaaagcc

SEQ ID NO: 386263 - DNA, 491 bp, Homo sapiens
gaattccccaaccctgtgtgcttcctgggtgaagcgatgccccaccctgctttggcttgccctctgtgggctgcacccactgtctaaccagtcccaatgagatgagccaggtacctctgttggaaatgcagaaatcacctgccttctggattgatcttgctgggagctgcagacgggagctgttcctattcggccatcttgccagccagggtcattttttaaacttttcttttgcagaggttaccaaaggaccagcagcaagcaaaacttctctcccctccccaaaaatctttctttccattgattctattttgtttcaatccagtcctgattgtgagaaagctccctctcaggacagctctcctggttctcttcaggctgataatggaactctggtatgatggaagggtatgaaagtctttttctaaatgctgtatgtcttgccttttttgtatatttgtgtaaagaaattcatagtagtaattctctga

SEQ ID NO: 386264 - DNA, 596 bp, Homo sapiens
cgtggagatggggtttcaccgtgttggtcaggctggtctcgaaatcctgacctctagcgatccgccctcctcttttggggattacaggtgtgagccacctcgcccagccaggcttcacattattaagtagccatctcttaagtattttttaaatctcaagtacccaaggctgatggccaatgagtgcttcttttatgacatttgggataggtcagaggtttgttgtaagtctcttgcaaaaatgcctggaggccttttcaaggtctgtaaaccttaactggaaataatcctattattattttaaaaattcctcatgtctgaaagctttcagtgcacctgaacagattggggtggagccatgaagccaaacagattgggagagagagtgtgtctgcttttagaattcgtaccgatgatagcagctcattagcttcagtctgagcgctagtagagttctatcatggaattatggactagttgtcctgtgtaagatctgaaatacatgttggggggatttttgctttttcttaatgttcaatatgtacagatgatgtaataacattactagactgccttgtttttaaaaccctgtagtc

SEQ ID NO: 386265 - DNA, 502 bp, Homo sapiens
ccactgcgcccggcctcttcatcctctttctactctcctatatttggatgatcagtttctctttttggattttatttatttaagcatctctatgtcttctgggatggggtcaaagaggatgggtcatcttcagatttactgagcaaatttccaaattcgtgagtttccagatgaaaagagtgaagaacgccgtgtggagtcaagaggttcaagtcacctccctagttgggcagcccttggtgagcaacctgagccacctttcccattggcatgcctcctgtgcacatgcatgcacacgatttggggaaagaacgtgaagaggaaataacccgaaggtgggctgggcgtgctggccctgactttttgttcacataacgttttcaaggttcctcgaagttgtagtatatatcagaactttgttcctttttatggctgaataatattccgttttctagatataccaccttttgcttaattcatatttaaaatgaagcaatttctc

SEQ ID NO: 386266 - DNA, 364 bp, Homo sapiens
caatctcagtgaatgacattccttcttttcagttatacaagttggaatgtaaagggaattgacatagacttttctctgtctcctaccctgcaggtccatctagcccgaggtagtatcagttcttgtgcatctacctttttgacgtgacttgtaatcataccctcctctttattctcactgctactgacatagttaagaactttatcttgactgttattgccattatagtgacagtctaactcactgcttctcacattatctgagctgaagaaccagggtttattgtttctgtttttttaatttttaatctgttgcagaaattttgtagcatataaaaaaattaattagaaaaatgaaatgaaaa

SEQ ID NO: 386267 - DNA, 4401 bp, Homo sapiens
ataccttaaatgccgcgagactgaagagcaaacgtcagggattattatgtcgattttccgaggaccagggttcgcagctggcagtagaagaaaaggctggctcctcaggggtcccactggcatttgataccctgaacgaccctcaggattgcccaaattcggtggatcgcccaaattcggtggatcagcaactttcctatactgcatcccgaattttcaaagaacatattttccgttcacccccgctggtcttttactgccatcaatacactgttcttggtgcaaatacctcagcctctttattcaaagtatgttttatgtttttgccaaatatgatctctaattgaaagtttatttttggttttggatgaatctgcggagcttaagttgtgagaagaaagggggaacaagacacaatgaaagaaaagtccaaaaatgctgcgcggactaggagggagaaggaaaacagcgaattttatgaactggctaaattactgcctttggcctcggctatcacctcgcaggtggacaaagcatccataatcagactcacgaccagctatctcaaaatgagagtggtgttcccagaagggctcggcgaggcgtggggccactcaagtcggaccagccccctggacaacgttggccgagaactgggctcccatctgctccagaccctggatggcttcatcttcgtggtagccccagatgggaagatcatgtacatctcagagacagcctcagtccacttgggtctttctcaggtagagctgaccggaaacagcatttatgaatacattcacccggcagaccacgacgagatgacggcggtgctcaccgcccatcaaccctaccactctcacttcgtgcaggagtatgagatcgagcgctccttcttcctgaggatgaagtgcgtcttggccaagcgtaacgccggcctcacctgtggcggctacaaggtcatccactgcagcggctacttgaagatccgccagtacagcctggacatgtcccccttcgacggctgctaccaaaacgtgggcctggtggccgtgggccactcgctgcctcccagcgccgtcacggagatcaagctacacagcaatatgtttatgttccgcgccagcctggacatgaagctcatctttctggactccagggtggcggagctgacggggtacgaacctcaggacctgattgagaagactctgtaccaccatgtgcacggctgcgacaccttccacctgcgctgcgcgcaccatttgctgctggtgaagggacaggtgaccaccaagtactacaggttcctggcgaaacacggcggctgggtatgggtgcaaagctacgcgaccatcgtgcacaacagtcgctcctccaggccacactgtatcgtcagcgtcaactatgtcctcacagacacagaatacaaagggctgcagctctccctggatcagatctcagcctccaaaccagccttctcctataccagcagctccacccccaccatgactgacaacagaaagggggccaaatcccggctctccagctcaaagtcaaaatccaggacttccccataccctcagtattcgggatttcacacagaaagatcggaatctgatcatgacagccagtggggcggaagtcccttgaccgacacggcctctccgcagcttctggaccccgccgataggcctggctcccagcacgacgcatcgtgcgcctacagacagttttcggaccgcagctctctctgctatggctttgcgcttgaccactcgaggctggtggaagagaggcatttccatacccaggcctgtgaaggaggccgatgtgaggcaggcaggtacttcctgggaacgccgcaggccgggagggagccctggtggggctctcgcgcagccttgcccctgacaaaggcctccccagaaagcagagaagcctatgaaaacagcatgcctcacatcgcttcagtccacaggatccatgggcgaggtcattgggatgaagatagtgtggtcagttctccagaccctgggtcggccagtgaatcaggtgaccgatatcgtactgagcagtatcaaagtagcccacatgaacccagcaaaattgaaactcttataagagccactcagcaaatgattaaagaagaagagaacagattacagctaaggaaagccccctcagaccaactggcttccattaatggggctgggaaaaaacactccctgtgttttgcaaactaccaacagcccccaccaacaggtgaagtctgccatggctctgctcttgccaacacttcaccatgtgaccatatccagcagagagagggaaaaatgttgagcccccatgaaaatgactatgacaacagtcccaccgcactatctcggataagtagtcccaattcggatcgcatttcaaaatccagtttgatcctagctaaagactatctgcattcggatatatctcctcatcagacagcaggagaccaccctactgtctctccaaactgctttggctctcaccggcagtattttgacaagcatgcttacacattaactggatatgccctggagcacttatatgacagcgaaaccattagaaactattccttgggctgtaatggctcacactttgatgtaacttcccatctgaggatgcaaccagacccagcacaaggacacaagggaacatctgttataataaccaacggaagctgatgttttgctgaaatattttgttctttaaggatctctgaaacatatttatagtttaataccccattaccagcatttactatgccacagattgttagagagtataacttaagttactgggtatttgatacgtgttcctataaaatcaaagaaaacatagcactagcattcagggttatacacagaaaagggagctaaattgaatacacaaatttcccctctaattatatgggaaccagaatagataaattttgacttgaaaaatattcatgtagatcaagtgtgcatatatactacatgagaggactgatgaatgacaacattgcattgtgactatccagtgatcctcaaacacacaaactattacttacaaactgcggtatacattttacatatggaaatataggctatgtaatgtaaatacatcaaaaatgggtaattttctttgactctgtcacactaaacttcttaacgaaatttccattcccaaaataactgagaaagagagagatacatcttataaactgacttctttgtggtttcaaatcagccagctcatttggttcaggcataaattagagaaatggttctggatatggtgcaaaaatgagttttcacctggtatccattataaacaatcaggaagaggtaatttttcaccttgcttttcagttagacaaggaccaggattgcactgacatggcgctgagggtttttctaagtaagaacactgagatattgggacacacatcaaaaacctggagtgctcaattggaagtagttctatgaatatggaaaggccagaggcagagtgaaataaaatgctatctcaaagtttaacacaatttaagggctcagcataagtaaacaacatatttggggtttgcttgtaaaaccaactaaataaaaaattcaaaccaattcacccagaaaaaagaccaataggtgcaaaaataaaaggaaaaccagtgaagtgccacatgacagcagtgttaagtgtttgaaaacgtttcaaagcacatatgtgccaatgtgacaacatgtggaaagcctcaggagagagtctaagataaaagcttaggctgatagacaagtagttaagagctaagagcagtactctgaaggaataggcaaaatgtttattttccttattgtttgtaaacaacaaacttggtcttacatctgtgtggtatagtagaaaggccagctgactagatctctggattctaattttggccctacctgtaacttaattttgtgaccacagttgtaccattcaccgtgcctgggctctagtttcctggtttgtaaggcagccccagcgttcatgttctgtgatagagcagaactgaacttattacctaattaactctctgctatgagttgtcaagactgatcattctgttttttctgtacacagaagtttagatgctttgtgacttaagcaggtgtgtgggctcctttaggcaggttacagttaactttctagatttagccaaaatgtagttggtagaaatttatgacagagaagaaaaatagcaagatttatttaatgctctattctctagtaattaaagcaaaatgatataagtgattagagagatttcatagataatatttcctaggagtcccgtgcccaaaactcttgccatatttaaggaagggaatgtactggcagaacttgact

SEQ ID NO: 386268 - DNA, 405 bp, Homo sapiens
aataatcacatcagacccaatccaaacattttgttttgctgctataggtatatttctaatgcaacaactggttaacctgctgaagggagtgcttcaaatagattcttctagtgcgtacttgatctgtgctcccagagggcaaagaaagggaaagagaccttggagaattctcacagagacttgcaagcaaaagcagctatttcagtcagtgacttctctttttatgaaagaaacattccgtaaattacaattagggcctggccagaaagaagagctccctaagagagaaactttctcatacctttgctgggctcatcttcacgtccctggatgaatccctggatatccagatctcaccttgggcacctttctggagaggatcaggaggctgtcatttggttctta

SEQ ID NO: 386269 - DNA, 255 bp, Homo sapiens
aaacccagcaataatggcccattgatcttcaacaagggtgccaagacaattctgtggaaaaagaacagttttcaacagatagtgctgatacaactggatatgcacacagaaaaactgaaggtggaccagatggctcaaagacctaaatgtcagagcaaaagctattaatgtacaacctttagaagaagacagaggcaaatctttatgaccttggattaggcagtggcctgagatatgactccaaaagcacaaaca

SEQ ID NO: 386270 - DNA, 474 bp, Homo sapiens
agtgaagcctaaagtaagaagaaagaagaaaataataacaaaaagaaaattaatgaagttgaattggattctttgaaaagattaatatgctagacaaacatatcaagtaatataaatataatatataaaattataaaattttaatataatagaaaatcaaaggagagagaaaacataaattaatgttaagaataaaaggggccgggcgcggtggctcacgcctgtaatcccagcactttgggaggccgaggtgggcgaatcacgaggtcaggagatcgagatcatcctggctaacatggtgaaaccccgtctctactaaaaatacaaaaaattagccaggtgtggtggcgggcgcctgtagtcccagctactccggaggctgaggcaggagaatggcgtgaccccgggaggcggagcttgcagtgagccgagatcgtgcactccagcctgggtgacacagcaagactccatctc

SEQ ID NO: 386271 - DNA, 494 bp, Homo sapiens
cctgaccccggagaaccactgactttttttttttactggctttatagttttccctttcccagaatgtcatatatttggaatcacatgcatgtagcctttttatactggcttctttgacttagcaatatgtatttaagttccctccatgtcatttcttggcttgttagcttatttctttttattgctgaataattccaagccacagcttattggtctgtttatctattaaaggacatcttggttgctttcaagttttggaaattgtgactatgattgctagacatttgtgggcaggtttttgtatggacataagttttcaactcatttggataaagtacagtttctggatcatatgataagactatgtttagctttgcaagaaactgtcagactgttttccaaagggctgtacaattttgcactttcatcaaaaatgagagttcctgttgcgccatattcttaccctcaggttttgccagtgttttggattttag

SEQ ID NO: 386272 - DNA, 341 bp, Homo sapiens
gcagcctaggtaaagctatagaatgcacttgttgcttgctgcttttgtgcaaaaaaaaaaaaatgttagatttgtgtctggctctgcagctcagtcagagtaaggctgatggccgctgtctcacagggaacaagagggttggtgagagaacctgagggcgccagcacacccagtggcccatgtgaatgcccatgcatttgttgactgcctgctatgagccagccctgttgagggctttacccctcacatgaccttgtgaccctgtgaggcaggtcccgttattccctccattttccagacaatgcagagagacatgaaatgggttattgggttttaaagac

SEQ ID NO: 386273 - DNA, 414 bp, Homo sapiens
atttggttatcgttaacactaaagccaaaaaaggaattggaagagagccacttaaaaacccaaaggccttctccgcggcggctgccgccgcccttctcttgctctccgtgtctcccttagttttgggcgcaggagagccctgggctctacacgggcctgcaggcggcggcaaggacactacggccttagccctcttagggaggccgctgcagccccaccggaagacatgtgaggaattgcataagacagctatgcaaaatggagctggaggagctttatttgtgcacagagatactcctgagaataaccctgatactccatttgatttcacaccagaaaactataagaggatagaggcaattgtaaaaaactatccagaaggccataaagcagcagctgttcttccagtcctgg

SEQ ID NO: 386274 - DNA, 516 bp, Homo sapiens
  misc_feature (23)..(23): n is a, c, g, or t
gtggtgtctagaggatccctatnatgttgacgggggttgtggagtggatgctttggcaagatggcggggagcggcgtccgccaagctacttctaccgccagcaccttcgtgaagcccattttcagtcgggacatgaacgaggccaagcggagggtgcgcgagctctaccgcgcctggtatcgggaggtgccgaacactgtgcaccaattccagctggacatcactgtgaaaatgggacgggataaagtccgagaaatgtttatgaagaatgcccatgtcacagaccccagggtggttgatcttctggtcattaagggaaagatcgaactggaagaaacaattaaagtatggaagcagcggacacatgttatgcggttcttccatgaaacagaagcgccaaggccaaaggatttcctatccaagttctatgttggccacgatccatgaagtcattcagtggaaagatgcacgttgatactattttagagcacaaataaactcactatacaatggtca

SEQ ID NO: 386275 - DNA, 830 bp, Homo sapiens
  misc_feature (716)..(716): n is a, c, g, or t
  misc_feature (727)..(727): n is a, c, g, or t
  misc_feature (732)..(732): n is a, c, g, or t
  misc_feature (734)..(735): n is a, c, g, or t
  misc_feature (739)..(739): n is a, c, g, or t
  misc_feature (743)..(743): n is a, c, g, or t
aggccaagcggcgtttctgtagatgagcatgcgcagcacccaccgttcgctcagccagagagaggcttcccagccaatccgagagcctcagagtcatcctcccgcccacccagcatacaggcggggcgttcctccttagccaatgggaaaagacattcgcccgcggtccgcacgcgctgcttgcaaaggggtgggggttgtggagtggatgctttggcaagatggcggggagcggcgtccgccaagctacttctaccgccagcaccttcgtgaagcccattttcagtcgggacatgaacgaggccaagcggagggtgcgcgagctctaccgcgcctggtatcgggaggtgccgaacactgtgcaccaattccagctggacatcactgtgaaaatgggacgggataaagtccgagaaatgtttatgaagaatgcccatgtcacagaccccagggtggttgatcttctggtcattaagggaaagatcgaactggaagaaacaattaaagtatggaagcagcggacacatgttatgcggttcttccatgaaacagaagcgccaaggccaaaggatttcctatccaagttctatgttggccacgatccatgaagtcattcagtggaaagatgcacgttgatactattttagagcacaaataaactcactatacaatggtcaaaaaaaaacaaaaaaaaaaaaaatttggggggggcgccnggcccaaaaanttttnanncccnttcngtgggggcggggcccactgggaagggcacctgggcccagagggcccagggaaaccgggccggacacgggggggtttctcccaaaaaa

SEQ ID NO: 386276 - DNA, 1265 bp, Homo sapiens
aggccaagcggcgtttctgtagatgagcatgcgcagcacccaccgttcgctcagccagagagaggcttcccagccaatccgagagcctcagagtcatcctcccgcccacccagcatacaggcggggcgttcctccttagccaatgggaaaagacattcgcccgcggtccgcacgcgctgcttgcaaaggggtgggggttgtggagtggatgctttggcaagatggcggggagcggcgtccgccaagctacttctaccgccagcaccttcgtgaagcccattttcagtcgggacatgaacgaggccaagcggagggtgcgcgagctctaccgcgcctggtatcgggaggtgccgaacactgtgcaccaattccagctggacatcactgtgaaaatgggacgggataaagtccgagaaatgtttatgaagaatgcccatgtcacagaccccagggtggttgatcttctggtcattaagggaaagatcgaactggaagaaacaattaaagtatggaagcagcggacacatgttatgcggttcttccatgaaacagaagcgccaaggccaaaggatttcctatccaagttctatgttggccacgatccatgaagtcattcagtggaaagatgcacgttgatactattttagagcacaaataaactcactatacaatggtcactttgtgatagaattccattgatgaaccaattttctgcagcctctttttgcctgagcaagtgggaccttggtatacacatcacctgttctttcccttttcttgaaatgtggtgtttgctgtaaattggattgaattatttttctcagagccttgcatgtcagtaaacaggaaggaaggaggccatctgttcaaaaattgtgacattgggcatgaggctggacgacttgttaatgtagttgtttctatagcccctatgattagacacttcagtgtcagggcacagattatctaaaattagccagctcttcctgtcagggatcagggcagcactaacaggcgcaaaagtagagctgtcaagatgggctagttttccttgggttctgaagaaaatggatgtgcaaaggcttggctccgctacttgtaacaagctccagcccttaaaatgaaattaacttcctactcaggcaccctgcttaggtgcacagctgttcaatatacacagagaacagaaatattcctactgtctttggaaaccctggtgtacctctcagtggcagaataaacatcaacacaggttcaagaactga

SEQ ID NO: 386277 - DNA, 1728 bp, Homo sapiens
aggccaagcggcgtttctgtagatgagcatgcgcagcacccaccgttcgctcagccagagagaggcttcccagccaatccgagagcctcagagtcatcctcccgcccacccagcatacaggcggggcgttcctccttagccaatgggaaaagacattcgcccgcggtccgcacgcgctgcttgcaaaggggtgggggttgtggagtggatgctttggcaagatggcggggagcggcgtccgccaagctacttctaccgccagcaccttcgtgaagcccattttcagtcgggacatgaacgaggccaagcggagggtgcgcgagctctaccgcgcctggtatcgggaggtgccgaacactgtgcaccaattccagctggacatcactgtgaaaatgggacgggataaagtccgagaaatgtttatgaagaatgcccatgtcacagaccccagggtggttgatcttctggtcattaagggaaagatcgaactggaagaaacaattaaagtatggaagcagcggacacatgttatgcggttcttccatgaaacagaagcgccaaggccaaaggatttcctatccaagttctatgttggccacgatccatgaagtcattcagtggaaagatgcacgttgatactattttagagcacaaataaactcactatacaatggtcactttgtgatagaattccattgatgaaccaattttctgcagcctctttttgcctgagcaagtgggaccttggtatacacatcacctgttctttcccttttcttgaaatgtggtgtttgctgtaaattggattgaattatttttctcagagccttgcatgtcagtaaacaggaaggaaggaggccatctgttcaaaaattgtgacattgggcatgaggctggacgacttgttaatgtagttgtttctatagcccctatgattagacacttcagtgtcagggcacagattatctaaaattagccagctcttcctgtcagggatcagggcagcactaacaggcgcaaaagtagagctgtcaagatgggctagttttccttgggttctgaagaaaatggatgtgcaaaggcttggctccgctacttgtaacaagctccagcccttaaaatgaaattaacttcctactcaggcaccctgcttaggtgcacagctgttcaatatacacagagaacagaaatattcctactgtctttggaaaccctggtgtacctctcagtggcagaataaacatcaacacaggttcaagaactgaaaaaaaaaaaaaaaaaaaaaaaaaaaaaaaaaaaaaaaaaaaaaccgggggggcttattatgaggggggcggcggaaaacaaggcggttaatagtaatggcgcagccgtggcacaacggtggtttcctcgtcacccacattttttgtcacaagcgggggaaaaacgggggggggggccccccccaaaggagaggggggggcgccaattaaacttagccgaaacaacccgggggatttgccgcgcggttttaagatatttggtgctaaaaatacaggcgcatatatacacgggcacaactacgaccgacgacgactctaactatagtgctgacgaacgacgaacctacctagagaacaccagcgactgacagtacgaagatcaaccgcgagactaataacaacaaaacccgcacgcaccactcggtggtgatggagaggaacgaacactagagacgctgcgcta

SEQ ID NO: 386278 - DNA, 1074 bp, Homo sapiens
  misc_feature (23)..(23): n is a, c, g, or t
gtggtgtctagaggatccctatnatgttgacgggggttgtggagtggatgctttggcaagatggcggggagcggcgtccgccaagctacttctaccgccagcaccttcgtgaagcccattttcagtcgggacatgaacgaggccaagcggagggtgcgcgagctctaccgcgcctggtatcgggaggtgccgaacactaaaatgggacgggataaagtccgagaaatgtttatgaagaatgcccatgtcacagaccccagggtggttgatcttctggtcattaagggaaagatcgaactggaagaaacaattaaagtatggaagcagcggacacatgttatgcggttcttccatgaaacagaagcgccaaggccaaaggatttcctatccaagttctatgttggccacgatccatgaagtcattcagtggaaagatgcacgttgatactattttagagcacaaataaactcactatacaatggtcactttgtgatagaattccattgatgaaccaattttctgcagcctctttttgcctgagcaagtgggaccttggtatacacatcacctgttctttcccttttcttgaaatgtggtgtttgctgtaaattggattgaattatttttctcagagccttgcatgtcagtaaacaggaaggaaggaggccatctgttcaaaaattgtgacattgggcatgaggctggacgacttgttaatgtagttgtttctatagcccctatgattagacacttcagtgtcagggcacagattatctaaaattagccagctcttcctgtcagggatcagggcagcactaacaggcgcaaaagtagagctgtcaagatgggctagttttccttgggttctgaagaaaatggatgtgcaaaggcttggctccgctacttgtaacaagctccagcccttaaaatgaaattaacttcctactcaggcaccctgcttaggtgcacagctgttcaatatacacagagaacagaaatattcctactgtctttggaaaccctggtgtacctctcagtggcagaataaacatcaacacaggttcaagaactga

SEQ ID NO: 386279 - DNA, 927 bp, Homo sapiens
aggccaagcggcgtttctgtagatgagcatgcgcagcacccaccgttcgctcagccagagagaggcttcccagccaatccgagagcctcagagtcatcctcccgcccacccagcatacaggcggggcgttcctccttagccaatgggaaaagacattcgcccgcggtccgcacgcgctgcttgcaaaggggtgggggttgtggagtggatgctttggcaagatggcggggagcggcgtccgccaagctacttctaccgccagcaccttcgtgaagcccattttcagtcgggacatgaacgaggccaagcggagggtgcgcgagctctaccgcgcctggtatcgggaggtgccgaacactgtgcaccaattccagctggacatcactgtgaaaatgggacgggataaagtccgagaaatgtttatgaagaatgcccatgtcacagaccccagggtggttgatcttctggtcattaagggaaagatcgaactggaagaaacaattaaagtatggaagcagcggacacatgttatgcggttcttccatgaaacagaagcgccaaggccaaaggatttcctatccaagttctatgttggccacgatccatgaagtcattcagtggaaagatgcacgttgatactattttagagcacaaataaactcactatacaatggtcaaaaaaaaaacaaaccgaatcaacaaaaaaaaccggttggggcgcgcctgcaccaggaaagaggtttctaaacccatgcgttgggggcggggcgccagtaggctcagtgacacctggcccacgcgtcccaaggagacccgggccacacaggtcggtggtttcccacaatataaaagcccggcggacccgacggtttgacacacccagaggggtggagccatcggctcccagggaccgggagcgataagcag

SEQ ID NO: 386280 - DNA, 541 bp, Homo sapiens
  misc_feature (1)..(1): n is a, c, g, or t
naaactaggctaggtacgaggctgggtggcaagatggcggggagcggcgtccgccaagctacttctaccgccagcaccttcgtgaagcccattttcagtcgggacatgaacgaggccaagcggagggtgcgcgagctctaccgcgcctggtatcgggaggtgccgaacactggacgacttgttaatgtagttgtttctatagcccctatgattagacacttcagtgtcagggcacagattatctaaaattagccagctcttcctgtcagggatcagggcagcactaacaggcgcaaaagtagagctgtcaagatgggctagttttccttgggttctgaagaaaatggatgtgcaaaggcttggctccgctacttgtaacaagctccagcccttaaaatgaaattaacttcctactcaggcaccctgcttaggtgcacagctgttcaatatacacagagaacagaaatattcctactgtctttggaaaccctggtgtacctctcagtggcagaataaacatcaacacaggttcaagaactga

SEQ ID NO: 386281 - DNA, 603 bp, Homo sapiens
  misc_feature (1)..(1): n is a, c, g, or t
naaactaggctaggtacgaggctgggtggcaagatggcggggagcggcgtccgccaagctacttctaccgccagcaccttcgtgaagcccattttcagtcgggacatgaacgaggccaagcggagggtgcgcgagctctaccgcgcctggtatcgggaggtgccgaacactggtgagaggtagcggcttacgtggggacccggaggccgccgctcaaggtcgtagccggcccggccggggtttctcatgggcccagctgaggtcaccaacttgggcagaggcgactgcgggtgcttcaggggaagagggtcacccgagcctaccatgggccggacctggcggcggcgcggtggtcagaccggccgtgcctagcattcgtacgtgctatcggagctttggtctcttttgtccttcgcaattggcgggaggacgatgactgtcagtgacacactcactttgtgggtgaggcagcggaggcaccgagaggtgaagtgatgtgcccagggcccaagccgagccactggtgtacccagaacccaaagtctagagttgcagaatgtaattatagatgcccgttggatttttttgtttgtgacagagtct

SEQ ID NO: 386282 - DNA, 541 bp, Homo sapiens
  misc_feature (7)..(8): n is a, c, g, or t
cacgccnnagcgttatcgaattcccggcccttcatacgctgcgagagacgccagaagggggttgtggagtggatgctttggcaagatggcggggagcggcgtccgccaagctacttctaccgccagcaccttcgtgaagcccattttcagtcgggacatgaacgaggccaagcggagggtgcgcgagctctaccgcgcctggtatcgggaggtgccgaacactgtgcaccaattccagctggacatcactgtgaaaatgggacgggataaagtccgagaaatgtttatgaagaatgcccatgtcacagaccccagggtggttgatcttctggtcattaagggaaagatcgaactggaagaaacaattaaagtatggaagcagcggacacatgttatgcggttcttccatgaaacagaagcgccaaggccaaaggatttcctatccaagttctatgttggccacgatccatgaagtcattcagtggaaagatgcacgttgatactattttagagcacaaataaactcactatacaatggtca

SEQ ID NO: 386283 - DNA, 489 bp, Homo sapiens
  misc_feature (1)..(1): n is a, c, g, or t
naaactaggctaggtacgaggctgggtggcaagatggcggggagcggcgtccgccaagctacttctaccgccagcaccttcgtgaagcccattttcagtcgggacatgaacgaggccaagcggagggtgcgcgagctctaccgcgcctggtatcgggaggtgccgaacactgtgcaccaattccagctggacatcactgtgaaaatgggacgggataaagtccgagaaatgtttatgaagaatgcccatgtcacagaccccagggtggttgatcttctggtcattaagggaaagatcgaactggaagaaacaattaaagtatggaagcagcggacacatgttatgcggttcttccatgaaacagaagcgccaaggccaaaggatttcctatccaagttctatgttggccacgatccatgaagtcattcagtggaaagatgcacgttgatactattttagagcacaaataaactcactatacaatggtca

SEQ ID NO: 386284 - DNA, 1077 bp, Homo sapiens
  misc_feature (1)..(1): n is a, c, g, or t
naaactaggctaggtacgaggctgggtggcaagatggcggggagcggcgtccgccaagctacttctaccgccagcaccttcgtgaagcccattttcagtcgggacatgaacgaggccaagcggagggtgcgcgagctctaccgcgcctggtatcgggaggtgccgaacactgtgcaccaattccagctggacatcactgtgaaaatgggacgggataaagtccgagaaatgtttatgaagaatgcccatgtcacagaccccagggtggttgatcttctggtcattaagggaaagatcgaactggaagaaacaattaaagtatggaagcagcggacacatgttatgcggttcttccatgaaacagaagcgccaaggccaaaggatttcctatccaagttctatgttggccacgatccatgaagtcattcagtggaaagatgcacgttgatactattttagagcacaaataaactcactatacaatggtcactttgtgatagaattccattgatgaaccaattttctgcagcctctttttgcctgagcaagtgggaccttggtatacacatcacctgttctttcccttttcttgaaatgtggtgtttgctgtaaattggattgaattatttttctcagagccttgcatgtcagtaaacaggaaggaaggaggccatctgttcaaaaattgtgacattgggcatgaggctggacgacttgttaatgtagttgtttctatagcccctatgattagacacttcagtgtcagggcacagattatctaaaattagccagctcttcctgtcagggatcagggcagcactaacaggcgcaaaagtagagctgtcaagatgggctagttttccttgggttctgaagaaaatggatgtgcaaaggcttggctccgctacttgtaacaagctccagcccttaaaatgaaattaacttcctactcaggcaccctgcttaggtgcacagctgttcaatatacacagagaacagaaatattcctactgtctttggaaaccctggtgtacctctcagtggcagaataaacatcaacacaggttcaagaactga

SEQ ID NO: 386285 - DNA, 891 bp, Homo sapiens
aggccaagcggcgtttctgtagatgagcatgcgcagcacccaccgttcgctcagccagagagaggcttcccagccaatccgagagcctcagagtcatcctcccgcccacccagcatacaggcggggcgttcctccttagccaatgggaaaagacattcgcccgcggtccgcacgcgctgcttgcaaaggggtgggggttgtggagtggatgctttggcaagatggcggggagcggcgtccgccaagctacttctaccgccagcaccttcgtgaagcccattttcagtcgggacatgaacgaggccaagcggagggtgcgcgagctctaccgcgcctggtatcgggaggtgccgaacactgtgcaccaattccagctggacatcactgtgaaaatgggacgggataaagtccgagaaatgtttatgaagaatgcccatgtcacagaccccagggtggttgatcttctggtcattaagggaaagatcgaactggaagaaacaattaaagtatggaagcagcggacacatgttatgcggttcttccatgaaacagaagcgccaaggccaaaggatttcctatccaagttctatgttggccacgatccatgaagtcattcagtggaaagatgcacgttgatactattttagagcacaaataaactcactatacaatggtcaaaaaaaaaaaaacaaaaaaaaaaaaaaaaaaaaaaaaaaaaaaagacgcggggggctttatttgggggggggggaaaaaggggttataaaaaaggggcaatgtggggaaggggtgtgttcggggccccttttttttggacaggggggaaaagggggggccccaaaagggggggggaagaatgagaagggcggggttcccggtagttttttggaa

SEQ ID NO: 386286 - DNA, 1050 bp, Homo sapiens
  misc_feature (23)..(23): n is a, c, g, or t
gtggtgtctagaggatccctatnatgttgacgggggttgtggagtggatgctttggcaagatggcggggagcggcgtccgccaagctacttctaccgccagcaccttcgtgaagcccattttcagtcgggacatgaacgaggccaagcggagggtgcgcgagctctaccgcgcctggtatcgggaggtgccgaacactgtgcaccaattccagctggacatcactgtggaccccagggtggttgatcttctggtcattaagggaaagatcgaactggaagaaacaattaaagtatggaagcagcggacacatgttatgcggttcttccatgaaacagaagcgccaaggccaaaggatttcctatccaagttctatgttggccacgatccatgaagtcattcagtggaaagatgcacgttgatactattttagagcacaaataaactcactatacaatggtcactttgtgatagaattccattgatgaaccaattttctgcagcctctttttgcctgagcaagtgggaccttggtatacacatcacctgttctttcccttttcttgaaatgtggtgtttgctgtaaattggattgaattatttttctcagagccttgcatgtcagtaaacaggaaggaaggaggccatctgttcaaaaattgtgacattgggcatgaggctggacgacttgttaatgtagttgtttctatagcccctatgattagacacttcagtgtcagggcacagattatctaaaattagccagctcttcctgtcagggatcagggcagcactaacaggcgcaaaagtagagctgtcaagatgggctagttttccttgggttctgaagaaaatggatgtgcaaaggcttggctccgctacttgtaacaagctccagcccttaaaatgaaattaacttcctactcaggcaccctgcttaggtgcacagctgttcaatatacacagagaacagaaatattcctactgtctttggaaaccctggtgtacctctcagtggcagaataaacatcaacacaggttcaagaactga

SEQ ID NO: 386287 - DNA, 1140 bp, Homo sapiens
aggccaagcggcgtttctgtagatgagcatgcgcagcacccaccgttcgctcagccagagagaggcttcccagccaatccgagagcctcagagtcatcctcccgcccacccagcatacaggcggggcgttcctccttagccaatgggaaaagacattcgcccgcggtccgcacgcgctgcttgcaaaggggtgggggttgtggagtggatgctttggcaagatggcggggagcggcgtccgccaagctacttctaccgccagcaccttcgtgaagcccattttcagtcgggacatgaacgaggccaagcggagggtgcgcgagctctaccgcgcctggtatcgggaggtgccgaacactgtgcaccaattccagctggacatcactgtgaaaatgggacgggataaagtccgagaaatgtttatgaagaatgcccatgtcacagaccccagggtggttgatcttctggtcattaagggaaagatcgaactggaagaaacaattaaagtatggaagcagcggacacatgttatgcggttcttccatgaaacagaagcgccaaggccaaaggatttcctatccaagttctatgttggccacgatccatgaagtcattcagtggaaagatgcacgttgatactattttagagcacaaataaactcactatacaatggtcaaaaaaaaaaaaaaaaaaaaaaaaaaaaaaaaaaaaaaaaaaaaaccgggggggcttattatgaggggggcggcggaaaacaaggcggttaatagtaatggcgcagccgtggcacaacggtggtttcctcgtcacccacattttttgtcacaagcgggggaaaaacgggggggggggccccccccaaaggagaggggggggcgccaattaaacttagccgaaacaacccgggggatttgccgcgcggttttaagatatttggtgctaaaaatacaggcgcatatatacacgggcacaactacgaccgacgacgactctaactatagtgctgacgaacgacgaacctacctagagaacaccagcgactgacagtacgaagatcaaccgcgagactaataacaacaaaacccgcacgcaccactcggtggtgatggagaggaacgaacactagagacgctgcgcta

SEQ ID NO: 386288 - DNA, 554 bp, Homo sapiens
  misc_feature (1)..(1): n is a, c, g, or t
naaactaggctaggtacgaggctgggtggcaagatggcggggagcggcgtccgccaagctacttctaccgccagcaccttcgtgaagcccattttcagtcgggacatgaacgaggccaagcggagggtgcgcgagctctaccgcgcctggtatcgggaggtgccgaacactaaaatgggacgggataaagtccgagaaatgtttatgaagaatgcccatgtcacagaccccagggtggttgatcttctggtcattaagggaaagatcgaactggaagaaacaattaaagtatggaagcagcggtaaaagcttaagcttataccgccttcagagaaatgtctactcaatcgctttttcaattttttgattgggctatttggtatattgttgagttttagcagttctcaatatattctggatattattctcttaaccggcatataagcaaatcgattctcctattctgtggacgccattttgacttcgtgtacgctgtgctgtttgacgtacaaaatggttccgggatatctaaggagtccaattgtactagtggc

SEQ ID NO: 386289 - DNA, 810 bp, Homo sapiens
attctaaccctcctgtctgccagctctgatccagaactttgcatgactgatacggctgatagattgtctatggctgatagactgtcatttctgacctaaaagtctgatcattttacatctgttcagacatctttgcagcctttcggtgtcagttccaaagttgttagtgggaatttcaaagcctttaataatctagccccactttgttcactctctgtgtaataaccacatacaacaattggctgcatctccatagcacatggtactcctcccgttgtcttggttgtgccagcaacactggttttcgctttctcttcctgcttgttgaggtcatttccaaggcccaggtctttgtgctttttcccaagcttcccagagcttcttccatactccccttacttcctgagatttaactgttctctcttcagcgcttgtctagtaagaaggaggcagcagcagcactgtggggtggtggaaagtgtaccagctttagagtcagaccattggatctcagccctaccattttctacttagatttttttaggacaaatttctccatctttctaagcctccaattgctcacttacaaaattgatataacatttaccttgcaagattggtatggaaggtaattaacccagtatttagaacatagtaattaataaataactattattaccatcattactatagttaggacactcactgttaggtgctatacaaagaggatcataaaagggatgttgtcttgggcttcttggaataaatgttgtccttttactgtattttagaatatcattctgggtcata

SEQ ID NO: 386290 - DNA, 1525 bp, Homo sapiens
aaattcaaaacccagcgtgccagttagtattccaaaaagcaaagaaaaacagggacgtccaccaggtgcattggtgccagcatcttcactgaaaggaggtaatctgggctctatgtcagtccgttctaaattgccaaattctccagcagcatcttctcatcccaagctcaagtcttcaaaaggcataacgaagaaaccgcaggctccttcaaacaatgcatcatcttcacttgcttcattaaatccagtaggtaaaaacacttcttcaccagctttaccaagaactgcaccttgtatatctgagtcaccgagaaaatgtatttcatcccccaatacccccaaggccaaggttattccagcccagaattcagcagatctgcccgagtccacacttttgccaaataagtgttcaggaaaaactcaacctaagtatttgaaacataaccatatttcttccagagataatgcagtatctcacttagctgcacattcaaattcatcctcaaaatgtcccaagctgcctaaagcaaatatacctgtaagacctaaaccttctttccagtcctctgcaaaaatgacaaaaaccagttccaaaaccatagccacgggtctaggaacacagtctcaaccatccgatggagccccacaagcaaagccagtcccagcacagaaacttaaatcggccttgaatttaaatcagccagtttctgtgtcctcagtttctcctgtaaaagccacacagaaatcaaaagataagaatatagtttcagctaccaaaaagcagcctcagaataaaagtgcatttcagaagacaggacccagctccttgaagtctcctggccgtaccccactgtccatcgtgagcctaccccagtcttctaccaaaacacaaactgcaccgaagtcagcacagactgtcgctaagagccagcattcaactaaagggcctcccagaagtggcaaaaccccagcttcaatcaggaaaccaccctcatctgttaaggatgcagatagtggagataaaaaacctactgcaaagaaaaaggaagatgatgaccattattttgtcatgactggaagtaagaaacctagaaaataaatacatactcattataaaaaaagagaaaaggaagaatgaatgtgttagcttcacatcttaaaagtttctcctatttgtgtctgtctaaataggtgcagacactaaggatagtgaggatggaggctgggatgaggaaagggttcatcagaattcacatatctgaattcactggaaagagcccttctgaagcaaacagttgtaaaatcactgcaaggtttttattaataatagacatgtatatgattttcagtctatagcatctttgttaacatctgccttttgcaggaaatgtaaaagttatttaacactacaagaattttaacaatagttgctctatttttgaatatgtattaaatatggagttcatatacctgctaatatcaacggtggtgctcttactattagttaattgcattttggttaaaa

SEQ ID NO: 386291 - DNA, 201 bp, Homo sapiens
acttcctgtgaagcagagcctccacaaattgacgcataaaacgcaggactcttcccgcttggattcgcgaaggtcttgaaaaaatggaacgtgaaaagcagaagaaattggagaaagaaacaaattcgctcataacaaatattgtctgagtacataccataggtcatgtgtttgccaagtgctatagatataatacagaat

SEQ ID NO: 386292 - DNA, 499 bp, Homo sapiens
tgttagccaggatggtcttgatctcctgaccttgtgatccgcctgcctcagcctcccaaagtgctgggattacaggtgtgagccactgcgcccggcctagatgaagttttaaaggctctccattctctttctcgctggagttcacactttggtattcttaatgataattatattcgtctgtgtctcttccctagcttctttggaacatctcagggccttttgagttctaactactcttcttgttttatgtgggctctatctaatacctctagattaattcagaacatatttaatccttcttgtataatagccttcacatgtgtgaaagcttcttgatctctttcccagtcttaaaaactctccagcaacttcatccttccctcaccaaaatgcaaatttccttctgcttgaaccgtgatgtttaagttccctttcatagtggagtatccagaagggaacacattgtagctagcttgttgtgggttaagactgtcacttt

SEQ ID NO: 386293 - DNA, 164 bp, Homo sapiens
agaggacaattgaatgcaatgtcatattttataagttctaagtgacacaaatattaaattatcttaaaaattaaatgccaggttctatttcatacaaactgaactctgttttatgtttgactacaatgtgaagagacatgaggtagacaaaaaagggaggacca

SEQ ID NO: 386294 - DNA, 827 bp, Homo sapiens
aggcgaccgtgcaggaagaccagaaggaaagtaatctgccgcatccagaatgaacagaacaaaacccccgcactccaggaagaagtcaggagcccagtgggggctgcaggtccagcccacaacaacctagacatgtggggtgctccatggctcacgcttatgtcctgcaggctgaagcccgcgccaggtccgcagtctttgttccggacgcagaaccagtgcttcagctggttaccgaggcgtccccgaaggggaaagggtggacacggtgagaatctacagcacagcagatcacttcgtcctggcagcgaccagccctgcccgagcggcaccagcagcctccatgttagaggcagtaccatcagacttcccccctacagcatctctcctgctttttttttccctcacggctctaatctcctgcttttgttcatcctccttgtcacagtggggcacctggcactatagagactcagaaaatccgcagatgtggggggtcctgcagcatccaggcagacatgccggcagtcagagaggaaagtcctctgaagcctctagaaggaatggaacaggacccagcactgcaggaagaagtggggcacccagtggcggatgcaggccccacacaccgccgcggtaaacgtataaggctttccctggcccttgcctgtttcctagaagctgaagccgcgcggaggcccaggttcgcccttccacacacggaataagctgttggactggctgcctcacctaggacccgagttgcgccagagaaaatcgcggatgctgctttcccgcgggctgcagtgtctgtcactttagcgacc

SEQ ID NO: 386295 - DNA, 507 bp, Homo sapiens
tgttctcaaacaaaatagtaggcattacacgaaaatgattctgtgatcaaatacttttggggaatgctgcctttcataatgtacataatagtttaattctttttttggagatggggtcttgccatgttgcccaaagtaaacttgaactctcacctcagcttctcaaagtgttgcgattataagtgtgagccactgcacccagcccttaatagtctaggtttctgagagatgtgttccgcagtaatttgcaaaatgtgtaaaaatgtatttgaccatggaccccttttctgtgatgaatcttgaactggtatccctggaacagattttgggagaagttgggctagagcataagatgagtacaaggagctgataggaaatcaagttgggaaaaaagctggtggctggctcgtggagggccttgtatattatgttaagcaaacaattagctttttcctttagatggtgggaaaactttgaggaattttaagctattgagtaagatgatta

SEQ ID NO: 386296 - DNA, 490 bp, Homo sapiens
ccatgttggccaggttgctcttgaactcctgacttcaaatgacccacctgcctcggcctcccaaagtgctaggattacaggtgtgagctaccactcctggcctgttttttttgttgttgtttgtctgtttttttttttaagaaaaagattaccagtgctcactttaaataaacccattactactagagcagttgtgacagaaacagaaaaaacacacattttttaggcttttaaaatagaggcatatagaaaagtaagtagaaaatggttcataattctagtgtccagattacctttgttaaacttaaacaataaaattgaaaaagtaatacacattaagttggtcagaagtgcacataaagatttaaaaaacacatttctagaaatctaaaaaaaggaaagctgcctttttccaaatctctctcagcaaagataaccaccactgacagcttattgtggtttattgtggtttcttctaaaaaagagaaaa

SEQ ID NO: 386297 - DNA, 192 bp, Homo sapiens
gtgactgagcctccagaagtaatgcaggacactgggaggcagggggcatccaggcactcagggccctgacctgggctgctgcacactggggctaaggggaaaggaggggagaggctgaggaggaggctcccggggcgatattccaaggcagggggttccggggccctggggctgaagggcgccgaccctatg

SEQ ID NO: 386298 - DNA, 516 bp, Homo sapiens
cacagattctcctctgtgccatgtggacattgccatcccatgcaacaacaagggagctcactccgtgggtttgatgtggatgctggctcgggaagttctgcgcgtgcgtggcaccatttcccgtgaacatccatgggaggtcatgcctgaactctacttctacagagatcctgaagtgattaaaaaagaagagcaggctgctactgaaaaggcagtgaccaaggaggaatttcagtgtgaatggactgctccagctcctgagttcactgctactcagcctgaggttgcacactgatctgaaggcatgcaggtgccttctgtgcctcttcagcagttcccttctgaagactggagcactcagcctgccatagaagactggtctgcagctcccactgctcaggccactgaatgggtaggagcaaccactggaaggtcttaagctgttcttgcacgggttcttaagcaacatggaaaataaacatcagtatctaaataaaaaaaattttaaaaattaca

SEQ ID NO: 386299 - DNA, 370 bp, Homo sapiens
tggggctatgtatacagcctttgtgaccagtgtgaactatcacttttggttgtgctgagcagtcggttgaattgagcagaacaataaaacccaagtgatggacatttctgagatgctgccagttgcacatctgaactgaccagtttgtatgtactgttggcctcaactagattgacttgatgttgcttttgctaggaaacacataagaagtcaaaacctcttcagcatttttattgctgttcatgttaaagagaatttttttttttttttttttgagacagggtctcactgtcattgcccaggctggagtgcagtggtgcaatctcggctcactgcagccttgacttcccaagctcaggtgatcctccca

SEQ ID NO: 386300 - DNA, 217 bp, Homo sapiens
gggttagggggaacagggagaatggagacttattgtttaatgaatatagtgtttcagttttgcaaagtgaaaagaattctggagttggatggtggtcatgattgcacaacaatattgatgtgcttaataccattgaactgtatatggtacttaaaaatggctaagatactgtagtacatttgtattatgtgtattttaccacaattaaaaaaaatgg

SEQ ID NO: 386301 - DNA, 106 bp, Homo sapiens
tgcagctgccatggtgttgcttgctgctgtcaaggccaaagctcatgtgaagtgtatgttactccagtgatctgtatatagctgcttaaccttaaaaacaaacaga

SEQ ID NO: 386302 - DNA, 230 bp, Homo sapiens
tattgtgggtatgagaaggaaaatatatcacgaattgacataccttctaatattataacaaaatgcaaattcctcattagttatttggaaatggtttcatagattacagatagttatattaacataaaattttaattaatattctttaatagaatatcatagaaatatttaaaacttttaactgccaaataacttgaagatgtataaaactccctccaataagatccttt

SEQ ID NO: 386303 - DNA, 326 bp, Homo sapiens
tcgcagggctctgaggggagcaggctgaaggggcgggagtgggactccttggtggtggtagtgaagctgcaagacagggaacagggtcagggccgagggcaggaggaggcctgagcggccacaacgggaaaatggccatgagggcttggccacagtggggaatccacagcccaacgctggggctgctctcgtagcctaggatgggacccccatcctgtcccacctctcaagtctggaggcttctcccagaactggaaggttcctgggataccctccatcagagcgcccttcccactctattggaccggagccttccatttttctct

SEQ ID NO: 386304 - DNA, 233 bp, Homo sapiens
cccagggtcactgttacaatgtctataagaggacctgtagcttctatgtgaatgatcctccttcccccacctcaggcaggcagggggtctcttgaaaactcccagtgaaagtgtttgagcctctcttgtcaccctaaattcccttgtagttgaaaatattttgctggtctaatctcacatattctagttctgttgctatccccagtggaacaaaaggaaacagttctgagact

SEQ ID NO: 386305 - DNA, 467 bp, Homo sapiens
cactgcgcctgggtttaattccttttgacttaactaaatgcatgacatacagcatatttcagggcggtgacttaaagtcaacaagcaggatgtttactgaatacatgagagaatgttgatttttgtggaggaaaatgttgcctcagagagaggtaactgggattcagtagcaagctcccagggactgggagtcaggaaacctggagtccaatccatgctctaccactttctagttctcacacctccttgaacctcaggtttctcacctgtaaaatgaatataaaaaccacctctgcacctccagcctcacaggttgatgtgttggtaccttgcgattcctaaagtgttactgaaaggaagattttctttttgttaattaaatacctccaagcagcaggctaaaaacaagaagataattttctgcttttaaaagaaaactagacagagacataaggtaggctgttcca

SEQ ID NO: 386306 - DNA, 315 bp, Homo sapiens
aatacatcatgcacctgcctgcttggctgactaggtttcttgtcttccctgtctgcctggtaaggctggactctctgcataactcccccccaactttcccaggtgaaattagctgctccctcctcaaagtgccattgtcctatttaacttacatggccacctttcctggtaatcatgagatctgcaatggcagggtctacgccctgttcatcggctaagccagcaggggcctgggaaaggcggactgtctgaggggcaaggacaggatgaccattttagactatgcctgccatttataagactttggacatacct

SEQ ID NO: 386307 - DNA, 144 bp, Homo sapiens
agggggagtctggctatgactttagaatttcctgatcgaaatttctcctctaaagctccccaccctacttgggatctgaggttatcatcccctcccagtcccaagaacccttcttcccttgttggcagaaatctccaggaagca

SEQ ID NO: 386308 - DNA, 452 bp, Homo sapiens
tcattctgttcaatttaatgaaggcctatgatgtgtcaggcactgtcctatactctgaggacacaggagtggccaagagacaaaattgcatcccctcatggaacttgtattccagtgaacagtaagaagaatggttttgctttcctgctccttgctctaagacgggtatgagatagttttggtcaatgagttgtgagcattgtgagcctctggctgaagcttttcatttttttttttttattttttttttttatttttttgctggtacaaggccagtgctctcctttcctgccttaatcatggaaccacatacagagagagcagccatgaaatcaaagcagtccagaacactgagccactgcatggagggcggctattcccaagagtctccagacctatagtgaactttgtgagaacaagaaataaacatttgttctgttaaatcactgaga

SEQ ID NO: 386309 - DNA, 369 bp, Homo sapiens
tcattctgttcaatttaatgaaggcctatgatgtgtcaggcactgtcctatactctgaggacacaggagtggccaagagacaaaattgcatcccctcatggaacttgtattccagtgaacagtaagaagaatggttttgctttcctgctccttgctctaagacgggtatgagatagttttggtcaatgagttgtgagcattgtgagcctctggctgaagcttttcatttttttttttttattatactttaagttttagggtacatgtgcatgatgggcaggtttgttacatatgtatacatgtgccatgttggtgtgctgcacccagtaactcgtcattttatttttctttttgcttagacttaatttc

SEQ ID NO: 386310 - DNA, 532 bp, Homo sapiens
taaaaacaatggaaaaattgaaccatacaaacatactttaaatatgtgctgtcagaagtagctactaaaggattaattccaccaaagtgagggaaggtttgaaaagaaaaacattgtatacccatattcaaagcagcattattcacgatagccaagacaacacacaccaacacatgaatgaagaaaatgtggtatatatcgacaacggaatatcattcagccttaagaaggaaacctggtcacaggctgcaacagggataaacctgaaggacactgctaagtaaaataagccaatcacaaagaaaacccaatactgcacatttccatttatatgaggtgtctaaactgaaagtagactaatggctgctaggggctcggtgagggggatggatgaatgtttgttcaatgggcatagagtttcagtgttgcaagatgaaaagttctagagatctgttgcacaactatgtatttacagttaatactgtactactgtatactttaaaatagttaagataccaaattttacataatg

SEQ ID NO: 386311 - DNA, 1045 bp, Homo sapiens
tcttagttgccgcaggtgagggtgatacgggtgtttaagtaatggtttctctctccttgtgacactacagttaaagagagaaaacccagaaagtaatagaaaactttttaagggcaattatttgatggagcccattgtaaagaaaggaaatagaaatgatggttgagaagtgaagtttttataagagaggtgggacttctgatgagattaaaagaaactattcagccaagtattaagcctatttgtagaaacccaagaagatagaaatgctgatgatacctccctcagttctctagatgttacagtttataaaatgcttcagatgtttcctcctgaagtcttaatgcatgctgcaggttggtaagatgttactttcctcagcagaagccaaagctttgaatgtcttggtagctaccagggtaatagggccaaacgaggaatggggttccattaggattcaatttcagaacttaaggctattcctcgtccttgtcagtggcataagtgccatcttagtgatgagagagctgttggaggtggcctttagcaggatcttatggcaggttaatgaagtcttgccatttgatcttcagtgtctctgtgaaacagataagtttcaagtttacgtaccaattcagcaaggttaagtgatttgaccaagaacacacagccagttcaccgtagagctgaaactaaaaatttcattttgtggattccaaatcttcctgttctgttgtttaaccattccatagtaggatgagaacacttttgtctagattgattgtagtttgcagaaagatgtggaggagaaaggagtatatactgagtaatatgtatagtatcagatgttttatattctggggtcgttatcttatttaacccttaatataacctgagaggttggtctttgtttcacagatgaactgacagagcactcattaacctggtaactcatttacctggtaacacctcttacaagacacttccataggttaggatttggtgaccagtctaatgaagtagtggagatggggagcagggatgg

SEQ ID NO: 386312 - DNA, 360 bp, Homo sapiens
tcatctttccgtacttagaaatcctctaagtctctcagcaacaactttacacctgatccatgaaaaatataatgttggcttggcgtggtggctcacgcctgtaatcccagcactttgggaggctgaggcaggtggatcacctgaggtcaggagttcaagactagcctgaccaacatggtgaaaccccatctctactaaaactacaaaaaagttagctgagtgtggtggtgggcacctgtagtcccagttacctgggaggctgagataggagaatctcttgaacccgggagtcggaggttgcagtgaaccgagatctcaccactgcactccaacctggcaacagagtgagactccatctca

SEQ ID NO: 386313 - DNA, 373 bp, Homo sapiens
aagcatattttaaacttggttgcttgtctatataaaaatgatgatattccttctcattcacatctgtcagtaaagatcacaaatattccctctgtcctataactttcttctatgaaaataagttctataaaagtcttcattttctatatttgagggaaactaatataattgtggaagttcccttttagaattttttcttacaattaaaaaaatagatgtcaagcaatggtgaatatactgtgtaaaaagcataatgttttaagttatggtattgccataaaggacttataacactaatttgtctgaaatataatcaagggaattagaaagcaatattgtcattttgagatatggagatatttcagaaaattac

SEQ ID NO: 386314 - DNA, 371 bp, Homo sapiens
tagatacggggtttcaccatgttggccaggctggtcgtgaactcctgacctcagctgatccacctgcctccgcctcccaaagtactgggattacaggtgtgtgccaccgtgcccagcctcaagccaacctttcgccttagcgtcttgactttctgggaccacaggcatgcgctaccacgcttaatttttttattttttattatagagacgcggttttgccatgttgcctaagctggtctcgaactcctgagctcaagtgatccgcctgcttaggcctccaaaaatgctgggattacaggtatgagccaccatgcccagcctagaaataatatttaaagagataatggcttgaaatttcagattcgaaaaaa

SEQ ID NO: 386315 - DNA, 573 bp, Homo sapiens
tgagactactcaggagtcctgtattgccagcgactgacagactgctagagctgcaaattccctcggccccgaagaaggggctagatttcttttgataccttggtctaaatagaggaggggaggctagctgaagcgatttttttacagaagcagaataggcaaaaagttaaaagataaatggttacagaaacagttacaggaaaataaacagttccaggtacaggggcttaaattatcacaaagtgataaacgcaggggctttgggtaccatcaaccgagcgcgttcccaggagctgctggtacagcttgctccagtttcttatcagtattttatcagtaagcgcattcctggatgtgcttggagtcagcttgccccagttatgtccttaagggacggggacaaggggctgcaagcgaagaaaccaaaatggtgtctgtccggccctctcagctaagagagagtcagtcaggttaaaacaaagtagggtatcacaccgagaggcgcaggttgcggagagccaagatcgcaccattgcactccagtctgggagacaagagcgaaactcggtctca

SEQ ID NO: 386316 - DNA, 457 bp, Homo sapiens
aggggtttaacttttacattattattgaaaagaggaggggaaaggtctataaagctctgatctctctagaagtccacatacatggaaagtaaatagttaatttctagtgtagaaaaataacaccgtggtgccagtaggtgtgtccttgtgtttataaatatacatagtggatgttttagaccatttaatgagacctattatatattgaatacctgctgtatgccaggaactgtgcctgatgctttgtataatttctattatatcagcccagaaatagtgattttatgatctgtctaccggggaatgaactaacgttcatagaagtatagtaattgttcgaggtcttgcagttttaagtagtaaagttgccattggatcacaaaagctgtattcttccccctacacctatggtttccaaatgtgagcatcagaattaatttgggagatgtttttaaat

SEQ ID NO: 386317 - DNA, 212 bp, Homo sapiens
ctctgtggctagaacactccaaggccctttggtacccatcaaagtgggccccttgccaggtggcttttcagttacagagtccaatggaccattttttagaaccatgcacctccccgcaaagggtggggtagggtgggaaaaaggagcaggtctggaggtttgtggaacccagttcctacagaatttgtaaaacctaaataaatcatggccat

SEQ ID NO: 386318 - DNA, 387 bp, Homo sapiens
agtcatgtaatgttgttggcctctgctttgcaacctgaaaatggggacagtagtgaccttacagagttggtataaggatgaaataaattacaggaggaaatgaaggatcagggacacaattatgtgcccaacagcaccacgccattagggtaagttgccttctcctaaacccggcatacaatctgaccctgagcaaggaagaatctgactgcttttatctcctcgaaccttcctaaagccaactcttagggggaatgcacatcaagcttcttatctcctcgaaacttcctaaagccaactcttagggggactgcacatcaagccttcctgatctgacacctggaatccctttagtctgactcaaatgtatggctgcaatgtcaaaca

SEQ ID NO: 386319 - DNA, 811 bp, Homo sapiens
tgaactttcaattccatctcctcaattagagagacctccataccatccagctcccagctctggctgtgctcagtgaagtagcccactattactattactgttgcaaatagtgagagatacaggcgcatgccactatgcccagctaatttttagtagagatggggtttcaccatgttggccatgctggtctgaaactcctgacctcaggtgatctgcctgcctcggcctcccaaagtgctgggattacaggtgtgagccaccccacccagccaattttattgaatttttaatagaaatgattatatcatctgaaatactgatcattttgctatttcccttcctgctcttacctcttgcatgtacctcctctcttggcatagagctggaagcctcctattgtatgccaaatgttgggggaattggcagcaggacatatggcagggaggacaaaggtaagtggcctcaaggacaatggaggtaacattgtcatgttccctatcttaaagaaatgcatcggctgggcgcagtgactcctgcctgtaattccagcactttgggaggctgaggcaggaggactgcttgagtccgggagcttgagaccagcctgaacaacatagcaaaaccctgtctctaaaaaatttaaaaattagcaggacatggtggtacatgctgtggtcccagctactcaggaggctgaggcaggaggaccactcaagcccagaaggttgaggctgcagtgaatcatgatcacacaactgcactccagcctgggtgacaaactgagaccctataaaagaaagagaaagagaag

SEQ ID NO: 386320 - DNA, 293 bp, Homo sapiens
caaagatgacattataactgatcccccagaaatacaaaagatcctaagagactattatgaacacctctacatacacagactagaaaatctgaaggaaatgcataaattcctggaaacacacaatctcctaaaactgaatcaggaagaaattgaaacactgaacagaccaatatcgagttctgaaattgaatcagtaatttaaaaacctacaaaccaaaaaatatcccagaccgggtggattcataggtgaattctaccagacatacaaacaagagctggtaccaattctgctg

SEQ ID NO: 386321 - DNA, 524 bp, Homo sapiens
tgaccttctcttatcttcctttcacttgcccaaggcaggactctaatctaattgtaagtctaaagacttttattccagagagttcctgccccatactctggaggaaggaatgctgtacagagaggccaagaaaaatctgaactgaagggtgttggttgatttagatcataccctttttgtccagtcacatttctacatggttgtcaatcttgcctacactatgaagtcttcataaaaggcccaagaggactgggtctccagagagcttctggatagctgagcatgtggaggtttagggagagtggtgtgcccagggagggcatggaagcaccacgccccttcccccatatctcaccttacacatctcttcatctgtgtgctttgtaatgtcctttacaataaaccgttaaacgttaagtaggtgtttccttgagttctgtgagccactccagcaaattaattgaaaccgtgggatcccaacttgaaaccagtctatcagaagttctggaggtccagacctgtga

SEQ ID NO: 386322 - DNA, 352 bp, Homo sapiens
tcaatctataaatccaatataatatctatcaaatttccaatttcattcttcacggatattaaaaaaatcttaaaatccatgtgaaactacaaaacaccccaaatagccaaataaatcttaatcaaaaagagcaatgctagaggatttacactatctaatttcaaaatatattacaaagctatcctaactaaaacagcatggtattggcataaaaacaggcatgtagaccagtggaacaaaaatagggggcccaggcataaatccacatatttacatgcaacttatttttgacaaagttgcaaacattcaatggggaaaagacagtattttcaacaaatggtgctgggaaaag

SEQ ID NO: 386323 - DNA, 470 bp, Homo sapiens
gtgtctttaaacaaaactaacaacgggaaagacgatgacaaggaaatcacagtcatccactcagtggagctcatacatcttttgtgccttgaaaaaggtttgtcaaattcaggaccataatttaggaacgaaatgatcatcatacccttggtctcaggaagtttgtatagggccctgcactaccttcatgaagaaattcttctttcctttggggccaataccactcagaaacaaatagctatgaactggctttttaaaaacctccagacaccagcctggccaacgtaatgaaactccgtctctactaaaaataaaaaaaattagcgggcgtggtggcaggcgcctgtaatcccacctacttgggagactgaagcaggagaatcacttgaacccgggaggcggaggttgcagtgagccgagatcgcgccactgcactccagcccaggcgacagtgcaagactccgttgtca

SEQ ID NO: 386324 - DNA, 650 bp, Homo sapiens
caggtgatccacccacctctgcctcccaaagtgctgggattacaggcatgagccaccgcgcctggccagaagaaatctttatcttggtgtgcagtgtctggtgagggacaaatgtcatctctcttggatctgaatctggaaggatcaaggcactgaagggatttttttgtttcagacagtatccctctgtcgccaggctggagtgcagtggcgcaatctcagctcacggcaacctctgcctcccgggctcaagggatcctcctgcctcagcctctcgagtagctgggactacaggcacgcgtcaccaggcccagctaatttttgtatttttagtagagacagggttttaccacggtggccaggatggtctcaatctcttgacatcatgatccacctgccttggcctcccaaagggctgggattacaggcgtgagccaccacgcccggcctcactgaagggatttttttaatgtcacgtggctctcacaggtgcggtgtgtttgggtgcaagtgaagattacgactgatgcttaaaaacaaatgtaaaattccaggtggtgttgctatggggagcagctttaggacaatctgagtggtttcagttgcaagagtgtgcgtgtacgtgcaagtgctacagtcaagattcaact

SEQ ID NO: 386325 - DNA, 243 bp, Homo sapiens
tagccaggcctggtgacacatgcctgtagtcccacctactcgggagactgaggtgggaggactacttgattttttgagctcaggaagtcgaggctacagtgaaccatgattgcaccactgtacttcagcctgggcaacagagagaaagaccttgtttaaaaaaaagaaaagaatcaatttatttgatatatgagttatttaagtactcaaaaaattttgttaaatcacacaatgtagagctta

SEQ ID NO: 386326 - DNA, 457 bp, Homo sapiens
aactgtacatgtatatagaaagtgtatgtgtagagtgacaacattgagagtgctacagcctgaggcagcagaagagcagctttcctttatgtctcaggatgtatcatttctgtgtttctcagaaagcggaacctcattacattcttatctctttcataaattgcctatcagcttccagacttacaagaccagaaatttataactaagacagaggggttaagacaggcagagaggagagggcacgtgcatgtccccagaggccccaggtttagagatagacagacaactagctgactggccattttcaggcatttgcaatcaagctgttaaagacttttaaagagatgagagtaatcgactgtgttcattttgggaggagcctggacccaggaaggcaatcatgggactgctcaggcatacagtagtagtggcagccataatttgatcagaagctact

SEQ ID NO: 386327 - DNA, 1337 bp, Homo sapiens
gcttcctacttctgaagttctgaaatgaaccaggtgtataagaatgaacattcaacgaaacatgcatcctttttaaaatttagctttctagtacagaccatgcatttttcctctttgaactctttcatggatgccaagcagtgcctcactggaagtccttatcatcgtgcgtaaacatccagggctgtcactgttggcgatacagctcatgtgagagctgtggcagagcttcagacggaataattatgaacagcattgtaggaggtagttactatgggaaaatataataatggaggtcaaataaaggagacacaagctttcatcagttgggcgtcttcattttcttttggcgaagagaagctcagttctctttgtaaattaaaagctttttttctttccttccctttccctttccccttcctcctttccccttttcctcttcccccttccccctctcctcccctcttttcaaataaggacatattctcaccatcttgctcatgctgctttcaatctcctggcatcaagcagtcctcccaccttggcctcccgaagttctggtacaagtgggagccaccatgcctgggcagaccctcagttctaaaaccgtcttggcttgtttaccatcagcccttcaccgtttcagaaagatgctgttcggagaactgtaagggaattttccaattagttctgtttttctttctttttttcattagccctctcagctgacatgtgagttacataaactttttaattgagattcatgtgttcaaaatcatgttttaattttgtttttggttttgtggtagcttgatatgatgtggtactacctcttgtgaagtttaaagtttgtatttatgaaagggcatgggacgtgaaaaaattctgttttttatcttgagccgcagcttagcttgggatattaggattagcagtcactggagtggaacgtttccagtggcttccgtaaagtaccctggattcctcttccctggattactagagagcggcttccgagcatagccgctgcgaactgtaaaagcttgtggtcagtgaactcagttaagaaagtgctggcgatggtgaaagtcaagcccctttagatggtggttctttcgtggaccgggtgccttctctttgtgagcagattacccagtttggcgtcaaggggctgttaggcattccttcttccaggaaaacatttcctgaggctgtaggactcaactatgagaggcagttgtgaaggaggaaaaataatgtaagaattaactgaggtaatataaggcgtttgtgaatagaaacaagtggagaagcagttgtagagagataatttgtaa

SEQ ID NO: 386328 - DNA, 198 bp, Homo sapiens
ctgccttccttcttgtcataatcgttctgcttgaaatggacgttgtgaaaagcctaatttcagcttagaaaaatgtcctcttctaccgcccttcccattcaatggattaaggataaaagcagacaaacagattgaacatagaaactctgaaattatttacaatttcagaatcggtaatcaaagcaagagctccacagt

SEQ ID NO: 386329 - DNA, 319 bp, Homo sapiens
gggagctctggagtcagactgcccaaatttgaatcctgccccagccctttactaggtatgtgaccttgagcaaactgcttcatcatctataagataaaatcttacagggttgttgtggaaataaaataagataatgcatataagcactgagatcctaataaaagttaactgtcatggttatcatttccttggctgtcttccacttcagatggttccagaccttgatccacctgttaaaaggcaacattggcacaggactcctgggactccctctggcggtgaaaaatgcaggcatcgtggtaagggtctgcatcagtgg

SEQ ID NO: 386330 - DNA, 422 bp, Homo sapiens
caaggctaggagtttgagactgcagaaggaaaccctgtctctaaaaacaaggtccagctaaaatcagggtccagctccaccacaagcgcagctccaggggctgttgagttttgcctctaccattccaagtagtctctgctccagaccaagtcccaccatctggcagtcatgtcagtccaaccacagtcatatcagggcacttccaggttctttcattgagtgccccttgaggaggctggaggagaggccaatgacatttgcacttgagactccagagtctagatttataaccactatgttacggctgccagagtggctgcaaggacacttctttcattcattcatttacaatacatgtagcatctgctgtgtgccagatgccattctaggttctagggaaacaaggcagagcccctgttttc

SEQ ID NO: 386331 - DNA, 320 bp, Homo sapiens
aatcgatggtctggaggttggcaggccagttcttcctcatgaggtcatctagggcctgaggctctttcatctggtggcttgtggatcttctgaggttgttcctcatctgcatagtggcagatggcctaccacaccacgtctgcatttaagccattaggaaagaggggatgagagggaagggcacatttctttccagttgagggcatgacccaaaaattgcacacatcacttttgctcccaaaagttgcagggttgcacggacatctaactgcaagtgagtctaagaaacgtcgtctgtaagtgccagtatgtctattctt

SEQ ID NO: 386332 - DNA, 638 bp, Homo sapiens
atagaatcgagccggtaccaattcggccgggacaatgaatatgttcattatgttgattgtggtgatgttttcttgattgtgtacatatgtcaaaatttatcaaattgtacatattaaatatgtgcagtttttgaaatgtcaattacacctcaaactgttaaaaaatgtaggcacacaaaataataatacacacatgcaaggaacacacaaacaaaaacacacataccacacagaatgactggaggaaaagagaatcacagaacagcaggggaaagggagtacataaataaatacatttgagaatcataagagagggactctatgtggtagagagaaaagtgaggggggaaaaatgaaatttactctgttagaatggtgccccttttaaagacagtaaattctctaagattaaaacaattgaatctcaacagtagaagtttcagaccactaatcatatgaatgaggaaatatttagaagttcagagtttttcctggtatccctgaaataactcaaactcaatgtattcattcatttaacaaatatttactgagtgcctaccatgtgccagcttctgttcttagggccagtacttttctttttattttttaaattttgttttagagataggattatggtc

SEQ ID NO: 386333 - DNA, 720 bp, Homo sapiens
ccggtacatcacgtttacatgcatgcggaaaatgggcttggagattcttgattcaaatccgaggtatcacacatcggcccccaaaggtcaaacattaagaaggaagcttactgccctgtcccagacttttctaggtgacttcttcctccggactctgcagcagtcttactagttctgaaagcacaagcggaccgcacgtctcaacgcgggaaaacagttccatctgcagggatggaggaccgggctagacaagctggagttggctctgcgccgcaggggtgtgcaagcccaagactggggagcccgaggtcaccccggccgccctggcatcggggctgaggtgcaggctcctggaggagcggtgcgcaggcccaggggtagccgaggacacaagccaaggcacgagcggacaaccttacggggacgagtactaccgcccggacgcgacttcgcgagaggccaggcggaacccactggaagcgtgagctagcggggaccacccccgggcgaaaccaaaggagaaagaggggaacccaggggtcccggggcgcttaggcccgcgcggacggggaggccagagttgccccgaagctatctccttacctcaccggcccccacgggctccgcgctcagctacagcccggcgggagcaatgcggcagccacaacagttgccggcggtcgccgcgggccggaaagcggggttcggggatgggaaggg

SEQ ID NO: 386334 - DNA, 346 bp, Homo sapiens
cctcctcggttcaagcgattctcctgtctcagtctcccgagtagctgggattacaggcgcatgccactacacccgtctaattttgtatttttagtagagatgggatttcaccatgttggccaggctggtctcaaactcctgacctcagatgatctgcccgcctcagcctcccaaactcaactaaagaacatataattttaagcatatatgatacagctatattaaaaaaaaaaaaaaaaactaggccgggggtggtggctcacactggtaagcccagcactttgagaggctgagggggagggatcgtttgagcccaggagtttgagaccagtctgggcaatatagt

SEQ ID NO: 386335 - DNA, 418 bp, Homo sapiens
aaggatgctccctcttgaggccaacctggaatcctcctgcattgaattgacaattttgaatctgctactatatcctgttggatgtcaacagctaaggaaaggtatggaccatcatatacagggtcttactctattgaactgaacttctgtaagcactcagaatgaatctatatggtagctttctactaccctaaaagtaaggtcaggagttaggaatgaactctaaacagttttaaacttgaagtttatatttaggcacagtttcttctaatagagtaagatattagaaattatgaaaacttggccgggcacggtggctcatgcctgtaatcccagcacttttggaggccgaggtgggcggatcacgaggtcaagagattgagaccatcctggccaacatggtgaaactccgtctcta

SEQ ID NO: 386336 - DNA, 476 bp, Homo sapiens
acagaatagagaacctctaaataaagacagacacttaaaactaactgatcttcgacaaagaatacaaaaacataaattgggaaatagacaccctatttgataaatggcgctgggaaaattggatagccacatgtagaagaatgaaactggatccctttctctcactatattacaaaagttaactcaaaatggattaaagatttaaatccaagacctgaaactataaaaattctagaagaaaacctaagaaaaactcttctggacattgatctaggtaaagaatttatgataaagactccaaaaacaaatgcaacaaaaccaaaaataaataaatgggaccaaattaaattaaaaagcttctacacagcaaaataaataatcatcagaatagacaacctgtagaatgggagaaaatatttgcaaattatgaacccaacaaaggactgatatgcggaatatacaaataaatcagcaag

SEQ ID NO: 386337 - DNA, 307 bp, Homo sapiens
agtaccataaatatgttttttttctttccaagagtgagccagccaaactaataacgcttagctaagaaacatcctaaggctagctcagagattattttggatactattgaaatttgggcattaaagttataactgtgggtctccaaagtatattaatgaagaagactcaaaaccattctcttaaagtgagccagttattgtcagccttttgcttttggttgcagttcttataacttagagttacactttttttttgttagaagatacttttccttcagaaaaatagaataataatgttttataatta

SEQ ID NO: 386338 - DNA, 192 bp, Homo sapiens
tacaacatctccagtttcatgaaaacggacaatatttcattatccttggatcctgcctgacgcaatacctggctctcaacatgtttgctgatctgaattaaagagttgcggtaatccttttttttttcttttttttttgagatggagtcccactctgttgcccaggctggagtgcagtggcacgatctcagc

SEQ ID NO: 386339 - DNA, 336 bp, Homo sapiens
aatttgatcatattgtgccttggtgtagtttacttcatgtttcttgacttgaaacttgttgaaatttttgaaactttagatttatcattttctgcaaatttgaacaactttttggccatttttcctttaaatattttttctagatacctctacctcccatgtgtctgattgtatacacatgtggccacatatgtcccacagctcactgatgttcaattcatgttttctagtctttttttcctcccatttaattttagagtttctattcttgtttaaaattcagaaatttcactgtcttatctgccattaatcctatccagtgcttttttcacttga

SEQ ID NO: 386340 - DNA, 579 bp, Homo sapiens
agttttattgcctaggatgcttaacctgaatccaaccaagtctgtggactaaactcccagctcgatgggattgcccaggggtggaggtaaaggaacaagctaaatgcccccaggaggaagcaatcagataaatccagaatgtggttctgacagtcttggcattccccaagacaagtggcctgagttcttcaagatttcaacatcacgaaataaaatgggaggggaaaacgtcttgtgaatatcacttattactcaagtgtcagaacatcttccatcctggaaagttctaaaacagacctgtgaattgaataaggagatgaacttcaggtctcaatgacagaaaaaaaaaaaaaacaacccagatcaacccgtcttacacaaaatcaggaaggcagtggctcatataactgtaattgaacctgagaggctttaagttggagctacttgctgcaaaaggagacaaaatcttgagtatggagacaacagaggaggattgagtgacattggcaaaagcaccgaggctttgtaacgttgtttgggcccctctggacattgctctccagggcaatttgagttggg

SEQ ID NO: 386341 - DNA, 131 bp, Homo sapiens
tctccctacatcataccttgtgagctccacaaaagcagaggctttgtcaggcttgctcacagctatatagctggttcctacaatcaggaacacatcaagcattcaataaacatttagtgaacaaatgaaca

SEQ ID NO: 386342 - DNA, 792 bp, Homo sapiens
tgtagtatttggaatttggtgatgccatttgctcgagtaaggcagagctggaataaagaaagagcgtggaaaggacgagcaggaaagggtagcgatagaagggtgctaacgaaggaaaaaaagaaaaaaatgttgatggtgagggtggagaggaggggcctggtagaccctggccactgggtaaggccctggcctggctgttttggacaaatgatggatcttaatttaaagacctccagggaggcagatacgcaagcacctgggtctgaacctcccaagcagtcacgggtctgtcagatggctcgaaatcctcaccggtgcagatgacagcgagacagggcagctcattgcccctgcagtcccccgctccccactcctcatggctggatctctgaccctccctcctctgctccacgagaaagaatctccacctcttgggcaacagtctcttggtatcacagtgctgtggcgggcatgggactcaagggcgttggactgaggcaggctttcaaggcaagggttaggcagtctctgactccctgcagataaatgcaaaatgctgaatttgtgcctttccttggattcctgaaaagagaggccataccttaaattctcaaagcgctccctgctccgcaaaatatcaggaaccactgttctaagggggaggaaagatgagcctgtgattgccaatgggtaaccatgaggcctgaaaatgtttcccgtcaaataatttcagcccatcctgattcctggggttcatgaggccacagcagttcaactcagttaagtgca

SEQ ID NO: 386343 - DNA, 617 bp, Homo sapiens
ggcacgaggctcagtggtgaaggctgtgcggacactgggggcccgccaggggtttggccccttactcaacccaaccacggtcctctccggcgcaggccgatttgaggacctagactccttgatgctgacggcctgagggggctcccgggtgccggatatctgacacaggccagggaggctcccctgggagacctggcaggcctggaggtgtgagtcggctctgagcagctgctctgggagagccagtccacggagccaaagctggagggcagctgccggccacaagttggggaggaggagagacgcaaggccgtcagatgcttgtcctggaaaccaaccatgagctgtgatgaaatccaggcaactgagttgtgtttcagcccaaagcagcaaatggaatccagcttcaggaccatcatctgacataggggaagaagacttacatagaaggcctaaccagcacccaagatcatggctggtgtcagagaaggctgaattgggtaccaagacattccttctctccaggtggtaacaaggaccctcacatggtattaatgaagaccaaatgtttgaatttctgcttgacttcttcaattgtgaaatctggatctatgcag

SEQ ID NO: 386344 - DNA, 1120 bp, Homo sapiens
ggcacgaggctcagtggtgaaggctgtgcggacactgggggcccgccaggggtttggccccttactcaacccaaccacggtcctctccggcgcaggccgatttgaggacctagactccttgatgctgacggcctgagggggctcccgggtgccggatatctgacacaggccagggaggctcccctgggagacctggcaggcctggaggtgtgagtcggctctgagcagctgctctgggagagccagtccacggagccaaagctggagggcagctgccggccacaagttggggaggaggagagacgcaaggccgtcagatgcttgtcctggaaaccaaccatgagctgtgatgaaatccaggcaactgagttgtgtttcagcccaaagcagcaaatggaatccaggtgactgacatcattatctatcagacatgtgagagaactccttagaatgatgttactcattatctgcaaccacatgagaaacccggagcaagaaccacccagccaaggccaatctctagaactttgaaagataatcataaataaagcttcaggaccatcatctgacataggggaagaagacttacatagaaggcctaaccagcacccaagatcatgctcataggtggaggagacttgctttgtctcagatgagactttggactgtggacttttgagttaatgctgaaatgagttgagactttggggaactgttgggaaggcatgattggttttaaatatgaatatatgagatttgggagggggtcaggggtggaatgatatggtttggctctgtgtccccacccaaatctcatcttgtagctcccataatcctcccatgttgtgggagggacccagtgggagatgattgaatcatgagggcgggtctttctcatgctgttcatgatcccattcatgtgagaaagacccatgtgatcatgaatgggtctcacaagatctgatggtgttaaaaatgggagtttctctgcacaagctctctgcctgctgccattcacaaaggatgtgacttgcttctccttgccttctgctatgattgtgaggcctccctagccatgtggaactgtgagtccaattaaacctctttcttttgtaaattg

SEQ ID NO: 386345 - DNA, 781 bp, Homo sapiens
cactcggcagagaccccagaaggagccgggggcagcatcagagcctggggcctgggcaggggtgcccgagagcacagcagctgcaggccattgggaaggccagaagacagggaatggaaagccagggacgcatggagtgactcagagaagggactattcagctgggagtcctgcatttgccctttgtgtttcatccggggattttgaaaccaggtttttatctggacctcccagagctgcatctccctggccagcctcttccgctcttgagagcccaagtactggtggtaccggaagacggtctccaaggcgcggcacgaggctcagtggtgaaggctgtgcggacactgggggcccgccaggggtttggccccttactcaacccaaccacggtcctctccggcgcaggccgatttgaggacctagactccttgatgctgacggcctgagggggctcccgggtgccggatatctgacacaggccagggaggctcccctgggagacctggcaggcctggaggtgtgagtcggctctgagcagctgctctgggagagccagtccacggagccaaagctggagggcagctgccggccacaagttggggaggaggagagacgcaaggccgtcaggtgggccggagggaaggctgggcggggctggccaggcgcaggatctacctgggtgatttttttaatctataaaataatatttgcttttaatttttaatgttactatgttgtcaatatattgtaaagcttaaactctttttccttaagacca

SEQ ID NO: 386346 - DNA, 974 bp, Homo sapiens
ggcacgaggctcagtggtgaaggctgtgcggacactgggggcccgccaggggtttggccccttactcaacccaaccacggtcctctccggcgcaggccgatttgaggacctagactccttgatgctgacggcctgagggggctcccgggtgccggatatctgacacaggccagggaggctcccctgggagacctggcaggcctggaggtgtgagtcggctctgagcagctgctctgggagagccagtccacggagccaaagctggagggcagctgccggccacaagttggggaggaggagagacgcaaggccgtcagatgcttgtcctggaaaccaaccatgagctgtgatgaaatccaggcaactgagttgtgtttcagcccaaagcagcaaatggaatccagcttcaggaccatcatctgacataggggaagaagacttacatagaaggcctaaccagcacccaagatcatgctcataggtggaggagacttgctttgtctcagatgagactttggactgtggacttttgagttaatgctgaaatgagttgagactttggggaactgttgggaaggcatgattggttttaaatatgaatatatgagatttgggagggggtcaggggtggaatgatatggtttggctctgtgtccccacccaaatctcatcttgtagctcccataatcctcccatgttgtgggagggacccagtgggagatgattgaatcatgagggcgggtctttctcatgctgttcatgatcccattcatgtgagaaagacccatgtgatcatgaatgggtctcacaagatctgatggtgttaaaaatgggagtttctctgcacaagctctctgcctgctgccattcacaaaggatgtgacttgcttctccttgccttctgctatgattgtgaggcctccctagccatgtggaactgtgagtccaattaaacctctttcttttgtaaattg

SEQ ID NO: 386347 - DNA, 365 bp, Homo sapiens
tgagacctcctacatgccaggcaccagggaagtgtcgtaaattcagcagtgaagaggcaaggtccttgccttcatggtgcttattgtctggtgcaggagacagatcataaacaaataggtatattgacaagacctttccagattataatcatagctatgaaagaagtaagatgatggtgagatagagaataagggcatgccatctgaaatagggtggtgacagcaggcttctctgtggaggtaacatttgtccttaagcctgaaggatgagcaacaaccagccctggaaagcaccaatgaggagtactgcaggcagaggaaagagcgcttgcaaaggccctggggttggaaagagctcaccatat

SEQ ID NO: 386348 - DNA, 792 bp, Homo sapiens
ggtcagttttcatttgttgtttttataaatagaatcttgctaaatttttatgtgatcttctaattatttcattagcaaaaaatccctggattaacggatggacatggcatggcacggtggctcacgcctgtaatcccagtactttgagaggctgaggcaggcggattacttgaggccaggagtttgagaccagcttgggcaatattgtggaaccttgtttccacaaaaaataaaaaaaattagccaggtgtggtggtgtgcatctgtaatcccagctactctgcaggctgagaacccaggactgcactccaacctggatgacagagcgagactgtcttaaaacaaaacaaaacaagataaaaacagtagatatatttataaggcccatttgaggtgtaagtgacttaacatccctggcacttgaacactaatgaatattatgactgccactttaaaggaggcagaagaagtttaaaaagtaaaacaaaaagtttgtttcagaaaacaagcattttacctctgtttcaaatagtctaatttttttagtgatgaaaacttctgagaccagtagatgtttgtaaataaaaaacatttatggcagtctttgtaactgtaatgaaactggtagagagtaataatagcctgttttttgtttgtttgtttgctttgggggatatttgcaatacagtttattgatatgtcacatacatgtaaagtttataattcaccccagaatttatattactaagtttgtgctagtattaaagagcttttcaaattcagtgcctgttt

SEQ ID NO: 386349 - DNA, 298 bp, Homo sapiens
actgtattcataacttttactctttagatcataagcttaagtgaaagttatgtgttcaagtcacttatgaagatagacttcaagccttaaatttttaggtaatttgaccatgatattcttcagtatgggaaagttaatgtttatattgtttcatccagtacctaatatagggtctttcacaggcaaattttcagtaaatgactaaatttttctgtctttatttttcaagagatggggtcttgctctgttgctcaggctggaatgcaatggcacaatcatagctaactgcagtttcgaa

SEQ ID NO: 386350 - DNA, 387 bp, Homo sapiens
tgagtaactaaacccctctgagccccaacattcccacctctaacagcaagatgctggtgggatccccatctcatgggattgttggaggagcagaaaatgacatggaaggagctttggggtcactgtcagctcctcaccacaaagtgaggagatcccgccactaccaccaccaccaaggtgggaagaaacacatccaaatcagaccttcccaggaatcacaggatttcagagcccaaagtgcctccctgtttgtcttagagattaaggaagagtcccctgtcacaggatcccatgaaccagtgagacaggctccctctctcctgagagagctgggattgacagctgacacttggggaaaggaggccaggggtccaagagcaacacagg

SEQ ID NO: 386351 - DNA, 593 bp, Homo sapiens
  misc_feature (20)..(20): n is a, c, g, or t
caagtgcctagtcttctganaaatcatggaattctgtgaattattacctaaatctgcacatgagcaaacagcctgggcgacagagtgagactcctgtctcaaaaaaaagtactgctttgggcagtaaactacgtggtcgctcttgacctacgggataaccagttttccatgctcatgccccccagctagcccgcgctttcactaaagtttaaaaaccatgtagtgattattacccttttttttttttgagctccgtctcaagaaaaaaaaaaaaaaaaagaatagcacacatggaaaagtgcacaaaacataaatgtaaaacctaatgatttatcaaaaagtgagcctgggttagcatcacccatgccatggtactgaacagtcaagcagaagacctctgcagggtaattggtgttccaactacttttgtgataatcgcttccttgcttttggagttgtaccacctgagaatgtgtccctaaacactatagtttcgttttgtctgttccttgaactttatgtaaattgaattatacagtattattttgtgtctgccttcttttgcacaagaatacacttgcaaaactccttta

SEQ ID NO: 386352 - DNA, 456 bp, Homo sapiens
ctttaagcagttctcctttccatgtggtaccttaacctaaatctaaccaaccaacctcacttagaacttcagaactactctcttccagataaaagtatctccttgggataactatctcactagaaactttcacctgagttgcagagtatgaccacgagagcacttaaaggagactgatcaaagtcagaaaacagatgttaagaacgtgaacctcaaattcatttattcattcgatgcaatagctgcatttctaaaaatcttcatataatcgaaattcagtaggaattttttcaatgaggaggaagacagtcttagacgttcaaaaacaaaagcatttttcctgtattgaatttcaataataatagtgttttgtgtggttataagtgcagtactataaaacttaaatatgattgagcgaattcagcactctattacgtacagctttctttccagaaa

SEQ ID NO: 386353 - DNA, 412 bp, Homo sapiens
catttggggtttgaggttctgcgtttggcattggtttgctgtttcacttgggcaaatctcttggcctctctgggctgcgtttctgtagggaatcagtaataaggcaacctgtctggctctaaggctcagaggcacggggcaggctttgaatttccagcaagcaggagaaagagcctttgatttgaagcagagatttcctcttgaacattaatattctgggcttttccaggctggagctttagaaccgctgttactaaactaagtgacatgagtagccccccgttgcttacagaatttcttggcttggcatttggggttttctcacgttgattctaccctgcctgtatggcttaacccccaactacacccctacactgtaattaggaagagcctcagacttccccacacaccc

SEQ ID NO: 386354 - DNA, 188 bp, Homo sapiens
ggaggttgccatgagccaagattgcgccagtgcactccagtctgagtgacagggtgagactctgtctccaaagaaaccgtaatcacctggtctctagtctttggctttgacgctgaactgtctgagctgaccctggtagaaggcaccagaacaggcccactggaggtccggggcacttgctttaagaa

SEQ ID NO: 386355 - DNA, 376 bp, Homo sapiens
ttacttcggtgtatggtggtacttccggtgtcatagaccttgcacaacaaccctatgggtagccactattacaaatcccattatggagaggaggaagctgggaacgagactgtacacagtgagtaagaggctgaacccaggctggtctgccaccagagcctgagggctgcagcgcctgcctgccatccagcctgcatcctcctgcagaggccacgggcagctgccccgtcctctttgatactaggagtagagaacggacttcctacctttatttgaaaatgagactctctttccttttcaccattgtcatctcccagcctactgtgcaacagacccaagtaaagtgtatttctccagctgggtctctacctcacac

SEQ ID NO: 386356 - DNA, 1154 bp, Homo sapiens
aacaaggcactgacaaaattatattcacaaacagtttagataatcatctatcatagattataaaatgactatgtttaataaaattttaaaaataaaagagggagagaatgggctcaaaaaaagaaataaaaggctgggcatggtggctcgcacctgtaatcccagcactttggaaggccgagacgggcggatcatgaggtcaagagatcaagaccatcctggccaaaatggtgaaaccccgtctctgctaaaaatacaaaaattagttgggtgtggtggcatgcacctgtaatccaagctactcggcctccccaagtgctgggatcaaaggtgtgagccactgtgcccagcccctacataaatttcaaacaccacattccctgaatacaacacaaaaaagttagaaatcaaataatgaaaatataactagcaaaattctgtatgtttgaaaattttaaatattttcccagaaactataaaactacatgttaatgtggataaatctcaaacaatcttaactgaaataattaaatcacagaagcctgaataatggattcatttacataattaaagaacacattcatagtggtaacactataatgaaagatgagaaagattaacacaaagttcaccctagtgtttacctatgggtaataaggggactgtgaggtagggtagaaagaaggtacacaaaggatctctacagcactattaatgtttcacttcttgagctggggctagagatctgggtaatcatttcatttttattttttaaactacatataagctttgtacacttttggatattagaacttcaatacacaattataaaaaagagaaacagggaaaaaagtataattgtcaagatggagctaaaaaaataacatgggtgaacaaggtgccacccacatgcaagcttccttcccatgtcaggtaatgcctctcctcatctgctccatcaatcaataaaggcataatcactcctgtgatacctttaagaaaagaacacactctctcaaagctgggtgcagtggtgcacgcctgtaatcccagcctcctttgggaggccgaggcgggcagatcacctgaggtcaggagttggagaccagcgaaacccatctctactaaaaatacaaaaattagctgggcgtggt

SEQ ID NO: 386357 - DNA, 970 bp, Homo sapiens
caacctctgcctcccggattcaagcaattctcacgcctcagcctcccaagtggctgggattacagacaaacgccaccacatgcagctaatttttttatttttagtagagacagggtttcaccatgttggccaggctggtctcaaactcctggcctcaagtgatctgcctgcctcagcctccccaagtgctgggatcaaaggtgtgagccactgtgcccagcccctacataaatttcaaacaccacattccctgaatacaacacaaaaaagttagaaatcaaataatgaaaatataactagcaaaattctgtatgtttgaaaattttaaatattttcccagaaactatatcacagaagcctgaataatggattcatttacataattaaagaacacattcatagtggtaacactataatgaaagatgagaaagattaacacaaagttcaccctagtgtttacctatgggtaataaggggactgtgaggtagggtagaaagaaggtacacaaaggatctctacagcactattaatgtttcacttcttgagctggggctagagatctgggtaatcatttcatttttattttttaaactacatataagctttgtacacttttggatattagaacttcaatacacaattataaaaaagagaaacagggaaaaaagtataattgtcaagatggagctaaaaaaataacatgggtgaacaaggtgccacccacatgcaagcttccttcccatgtcaggtaatgcctctcctcatctgctccatcaatcaataaaggcataatcactcctgtgatacctttaagaaaagaacacactctctcaaagctgggtgcagtggtgcacgcctgtaatcccagcctcctttgggaggccgaggcgggcagatcacctgaggtcaggagttggagaccagcgaaacccatctctactaaaaatacaaaaattagctgggcgtggt

SEQ ID NO: 386358 - DNA, 421 bp, Homo sapiens
aacaaggcactgacaaaattatattcacaaacagtttagataatcatctatcatagattataaaatgactatgtttaataaaattttaaaaataaaagagggagagaatgggctcaaaaaaagaaataaaaggctgggcatggtggctcgcacctgtaatcccagcactttggaaggccgagacgggcggatcatgaggtcaagagatcaagaccatcctggccaaaatggtgaaaccccgtctctgctaaaaatacaaaaattagttgggtgtggtggcatgcacctgtaatccaagctactcgggaggctgaggcaggagaatcgcatgaacccgggaggcagaggttgcagtgagccaagatcgcgtcactgcactccagcctggatgacagagcaagactccatctcaaaaaaaaaa

SEQ ID NO: 386359 - DNA, 1024 bp, Homo sapiens
caacctctgcctcccggattcaagcaattctcacgcctcagcctcccaagtggctgggattacagacaaacgccaccacatgcagctaatttttttatttttagtagagacagggtttcaccatgttggccaggctggtctcaaactcctggcctcaagtgatctgcctgcctcagcctccccaagtgctgggatcaaaggtgtgagccactgtgcccagcccctacataaatttcaaacaccacattccctgaatacaacacaaaaaagttagaaatcaaataatgaaaatataactagcaaaattctgtatgtttgaaaattttaaatattttcccagaaactataaaactacatgttaatgtggataaatctcaaacaatcttaactgaaataattaaatcacagaagcctgaataatggattcatttacataattaaagaacacattcatagtggtaacactataatgaaagatgagaaagattaacacaaagttcaccctagtgtttacctatgggtaataaggggactgtgaggtagggtagaaagaaggtacacaaaggatctctacagcactattaatgtttcacttcttgagctggggctagagatctgggtaatcatttcatttttattttttaaactacatataagctttgtacacttttggatattagaacttcaatacacaattataaaaaagagaaacagggaaaaaagtataattgtcaagatggagctaaaaaaataacatgggtgaacaaggtgccacccacatgcaagcttccttcccatgtcaggtaatgcctctcctcatctgctccatcaatcaataaaggcataatcactcctgtgatacctttaagaaaagaacacactctctcaaagctgggtgcagtggtgcacgcctgtaatcccagcctcctttgggaggccgaggcgggcagatcacctgaggtcaggagttggagaccagcgaaacccatctctactaaaaatacaaaaattagctgggcgtggt

SEQ ID NO: 386360 - DNA, 3987 bp, Homo sapiens
gagagagagagagagagagagagagagagagagagagaggcctgccccgctagattcggcgctgcccgccccctgcagcctgtgctgcagctgccggccaccggagggggcgaacaaacaaacgtcaacctgttgtttgtcccgtcaccatttatcagctcagcaccacaaggaagtgcggcacccacacgcgctcggaaagttcagcatgcaggaagtttggggagagctcggcgattagcacagcgacccgggccagcgcagggcgagcgcaggcggcgagagcgcagggcggcgcggcgtcggtcccgggagcagaacccggctttttcttggagcgacgctgtctctagtcgctgatcccaaatgcaccggctcatctttgtctacactctaatctgcgcaaacttttgcagctgtcgggacacttctgcaaccccgcagagcgcatccatcaaagctttgcgcaacgccaacctcaggcgagatgagagcaatcacctcacagacttgtaccgaagagatgagaccatccaggtgaaaggaaacggctacgtgcagagtcctagattcccgaacagctaccccaggaacctgctcctgacatggcggcttcactctcaggagaatacacggatacagctagtgtttgacaatcagtttggattagaggaagcagaaaatgatatctgtaggtatgattttgtggaagttgaagatatatccgaaaccagtaccattattagaggacgatggtgtggacacaaggaagttcctccaaggataaaatcaagaacgaaccaaattaaaatcacattcaagtccgatgactactttgtggctaaacctggattcaagatttattattctttgctggaagatttccaacccgcagcagcttcagagaccaactgggaatctgtcacaagctctatttcaggggtatcctataactctccatcagtaacggatcccactctgattgcggatgctctggacaaaaaaattgcagaatttgatacagtggaagatctgctcaagtacttcaatccagagtcatggcaagaagatcttgagaatatgtatctggacacccctcggtatcgaggcaggtcataccatgaccggaagtcaaaagttgacctggataggctcaatgatgatgccaagcgttacagttgcactcccaggaattactcggtcaatataagagaagagctgaagttggccaatgtggtcttctttccacgttgcctcctcgtgcagcgctgtggaggaaattgtggctgtggaactgtcaactggaggtcctgcacatgcaattcagggaaaaccgtgaaaaagtatcatgaggtattacagtttgagcctggccacatcaagaggaggggtagagctaagaccatggctctagttgacatccagttggatcaccatgaacgatgtgattgtatctgcagctcaagaccacctcgataagagaatgtgcacatccttacattaagcctgaaagaacctttagtttaaggagggtgagataagagacccttttcctaccagcaaccaaacttactactagcctgcaatgcaatgaacacaagtggttgctgagtctcagccttgctttgttaatgccatggcaagtagaaaggtatatcatcaacttctatacctaagaatataggattgcatttaataatagtgtttgaggttatatatgcacaaacacacacagaaatatattcatgtctatgtgtatatagatcaaatgttttttttggtatatataaccaggtacaccagagcttacatatgtttgagttagactcttaaaatcctttgccaaaataagggatggtcaaatatatgaaacatgtctttagaaaatttaggagataaatttatttttaaattttgaaacacaaaacaattttgaatcttgctctcttaaagaaagcatcttgtatattaaaaatcaaaagatgaggctttcttacatatacatcttagttgattattaaaaaaggaaaaatatggtttccagagaaaaggccaatacctaagcattttttccatgagaagcactgcatacttacctatgtggactataataacctgtctccaaaaccatgccataataatataagtgctttagaaattaaatcattgtgttttttatgcattttgctgaggcatgcttattcatttaacacctatctcaaaaacttacttagaaggttttttattatagtcctacaaaagacaatgtataagctgtaacagaattttgaattgtttttctttgcaaaacccctccacaaaagcaaatcctttcaagaatggcatgggcattctgtatgaacctttccagatggtgttcagtgaaagatgtgggtagttgagaacttaaaaagtgaacattgaaacatcgacgtaactggaaattaggtgggatatttgataggatccatatctaataatggattcgaactctccaaactacaccaattaatttaatgtatcttgcttttgtgttcccgtctttttgaaatatagacatggatttataatggcattttatatttggcaggccatcatagattatttacaacctaaaagcttttgtgtatcaaaaaaatcacattttattaatgtaaatttctaatcgtatacttgctcactgttctgatttcctgtttctgaaccaagtaaaatcagtcctagaggctatggttcttaatctatggagcttgctttaagaagccagttgtcaattgtggtaacacaagtttggccctgctgtcctactgtttaatagaaaactgttttacattggttaatggtatttagagtaattttttctctctgcctcctttgtgtctgttttaaaggagactaactccaggagtaggaaatgattcatcatcctccaaagcaagaggcttaagagagaaacaccgaaattcagatagctcagggactgctaacagagaactacatttttcttattgccttgaaagttaaaaggaaagcagatttcttcagtgactttgtggtcctactaactacaaccagtttgggtgacagggctggtaaagtcccagtgttagatgagtgacctaaatatacttagatttctaagtatggtgctctcaggtccaagttcaactattcttaagcagtgcaattcttcccagttatttgagatgaaagatctctgcttattgaagatgtaccttctaaaactttcctaaaagtgtctgatgtttttactcaagaggggagtggtaaaattaaatactctattgttcaattctctaaaatcccagaacacaatcagaaatagctcaggcagacactaataattaagaacgctcttcctcttcataactgctttgcaagtttcctgtgaaaacatcagtttcctgtaccaaagtcaaaatgaacgttacatcactctaacctgaacagctcacaatgtagctgtaaatataaaaaatgagagtgttctacccagttttcaataaaccttccaggctgcaataaccagcaaggttttcagttaaagccctatctgcactttttatttattagctgaaatgtaagcaggcatattcactcacttttctttgcctttcctgagagttttattaaaacttctcccttggttacctgttatcttttgcacttctaacatgtagccaataaatctatttgatagccatcaaaggaataaaaagctggccgtacaaattacatttcaaaacaaaccctaataaatccacatttccgcatggctcattcacctggaataatgccttttattgaatatgttcttatagggcaaaacactttcataagtagagttttttatgttttttgtcatatcggtaacatgcagctttttcctctcatagcattttctatagcgaatgtaatatgcctcttatcttcatgaaaaataaatattgcttttgaacaaaacta

SEQ ID NO: 386361 - DNA, 3802 bp, Homo sapiens
ctaaaaaatatgttctctacaacaccaaggctcattaaaatattttaaatattaatatacatttcttctgtcagaaatacataaaactttattatatcagcgcagggcggcgcggcgtcggtcccgggagcagaacccggctttttcttggagcgacgctgtctctagtcgctgatcccaaatgcaccggctcatctttgtctacactctaatctgcgcaaacttttgcagctgtcgggacacttctgcaaccccgcagagcgcatccatcaaagctttgcgcaacgccaacctcaggcgagatgagagcaatcacctcacagacttgtaccgaagagatgagaccatccaggtgaaaggaaacggctacgtgcagagtcctagattcccgaacagctaccccaggaacctgctcctgacatggcggcttcactctcaggagaatacacggatacagctagtgtttgacaatcagtttggattagaggaagcagaaaatgatatctgtaggtatgattttgtggaagttgaagatatatccgaaaccagtaccattattagaggacgatggtgtggacacaaggaagttcctccaaggataaaatcaagaacgaaccaaattaaaatcacattcaagtccgatgactactttgtggctaaacctggattcaagatttattattctttgctggaagatttccaacccgcagcagcttcagagaccaactgggaatctgtcacaagctctatttcaggggtatcctataactctccatcagtaacggatcccactctgattgcggatgctctggacaaaaaaattgcagaatttgatacagtggaagatctgctcaagtacttcaatccagagtcatggcaagaagatcttgagaatatgtatctggacacccctcggtatcgaggcaggtcataccatgaccggaagtcaaaagttgacctggataggctcaatgatgatgccaagcgttacagttgcactcccaggaattactcggtcaatataagagaagagctgaagttggccaatgtggtcttctttccacgttgcctcctcgtgcagcgctgtggaggaaattgtggctgtggaactgtcaactggaggtcctgcacatgcaattcagggaaaaccgtgaaaaagtatcatgaggtattacagtttgagcctggccacatcaagaggaggggtagagctaagaccatggctctagttgacatccagttggatcaccatgaacgatgtgattgtatctgcagctcaagaccacctcgataagagaatgtgcacatccttacattaagcctgaaagaacctttagtttaaggagggtgagataagagacccttttcctaccagcaaccaaacttactactagcctgcaatgcaatgaacacaagtggttgctgagtctcagccttgctttgttaatgccatggcaagtagaaaggtatatcatcaacttctatacctaagaatataggattgcatttaataatagtgtttgaggttatatatgcacaaacacacacagaaatatattcatgtctatgtgtatatagatcaaatgttttttttggtatatataaccaggtacaccagagcttacatatgtttgagttagactcttaaaatcctttgccaaaataagggatggtcaaatatatgaaacatgtctttagaaaatttaggagataaatttatttttaaattttgaaacacaaaacaattttgaatcttgctctcttaaagaaagcatcttgtatattaaaaatcaaaagatgaggctttcttacatatacatcttagttgattattaaaaaaggaaaaatatggtttccagagaaaaggccaatacctaagcattttttccatgagaagcactgcatacttacctatgtggactataataacctgtctccaaaaccatgccataataatataagtgctttagaaattaaatcattgtgttttttatgcattttgctgaggcatgcttattcatttaacacctatctcaaaaacttacttagaaggttttttattatagtcctacaaaagacaatgtataagctgtaacagaattttgaattgtttttctttgcaaaacccctccacaaaagcaaatcctttcaagaatggcatgggcattctgtatgaacctttccagatggtgttcagtgaaagatgtgggtagttgagaacttaaaaagtgaacattgaaacatcgacgtaactggaaattaggtgggatatttgataggatccatatctaataatggattcgaactctccaaactacaccaattaatttaatgtatcttgcttttgtgttcccgtctttttgaaatatagacatggatttataatggcattttatatttggcaggccatcatagattatttacaacctaaaagcttttgtgtatcaaaaaaatcacattttattaatgtaaatttctaatcgtatacttgctcactgttctgatttcctgtttctgaaccaagtaaaatcagtcctagaggctatggttcttaatctatggagcttgctttaagaagccagttgtcaattgtggtaacacaagtttggccctgctgtcctactgtttaatagaaaactgttttacattggttaatggtatttagagtaattttttctctctgcctcctttgtgtctgttttaaaggagactaactccaggagtaggaaatgattcatcatcctccaaagcaagaggcttaagagagaaacaccgaaattcagatagctcagggactgctaacagagaactacatttttcttattgccttgaaagttaaaaggaaagcagatttcttcagtgactttgtggtcctactaactacaaccagtttgggtgacagggctggtaaagtcccagtgttagatgagtgacctaaatatacttagatttctaagtatggtgctctcaggtccaagttcaactattcttaagcagtgcaattcttcccagttatttgagatgaaagatctctgcttattgaagatgtaccttctaaaactttcctaaaagtgtctgatgtttttactcaagaggggagtggtaaaattaaatactctattgttcaattctctaaaatcccagaacacaatcagaaatagctcaggcagacactaataattaagaacgctcttcctcttcataactgctttgcaagtttcctgtgaaaacatcagtttcctgtaccaaagtcaaaatgaacgttacatcactctaacctgaacagctcacaatgtagctgtaaatataaaaaatgagagtgttctacccagttttcaataaaccttccaggctgcaataaccagcaaggttttcagttaaagccctatctgcactttttatttattagctgaaatgtaagcaggcatattcactcacttttctttgcctttcctgagagttttattaaaacttctcccttggttacctgttatcttttgcacttctaacatgtagccaataaatctatttgatagccatcaaaggaataaaaagctggccgtacaaattacatttcaaaacaaaccctaataaatccacatttccgcatggctcattcacctggaataatgccttttattgaatatgttcttatagggcaaaacactttcataagtagagttttttatgttttttgtcatatcggtaacatgcagctttttcctctcatagcattttctatagcgaatgtaatatgcctcttatcttcatgaaaaataaatattgcttttgaacaaaacta

SEQ ID NO: 386362 - DNA, 4200 bp, Homo sapiens
gagagagagagagagagagagagagagagagagagagaggcctgccccgctagattcggcgctgcccgccccctgcagcctgtgctgcagctgccggccaccggagggggcgaacaaacaaacgtcaacctgttgtttgtcccgtcaccatttatcagctcagcaccacaaggaagtgcggcacccacacgcgctcggaaagttcagcatgcaggaagtttggggagagctcggcgattagcacagcgacccgggccagcgcagggcgagcgcaggcggcgagagcgcagggcggcgcggcgtcggtcccgggagcagaacccggctttttcttggagcgacgctgtctctagtcgctgatcccaaatgcaccggctcatctttgtctacactctaatctgcgcaaacttttgcagctgtcgggacacttctgcaaccccgcagagcgcatccatcaaagctttgcgcaacgccaacctcaggcgagatgagagcaatcacctcacagacttgtaccgaagagatgagaccatccaggtgaaaggaaacggctacgtgcagagtcctagattcccgaacagctaccccaggaacctgctcctgacatggcggcttcactctcaggagaatacacggatacagctagtgtttgacaatcagtttggattagaggaagcagaaaatgatatctgtaggtatgattttgtggaagttgaagatatatccgaaaccagtaccattattagaggacgatggtgtggacacaaggaagttcctccaaggataaaatcaagaacgaaccaaattaaaatcacattcaagtccgatgactactttgtggctaaacctggattcaagatttattattctttgctggaagatttccaacccgcagcagcttcagagaccaactgggaatctgtcacaagctctatttcaggggtatcctataactctccatcagtaacggatcccactctgattgcggatgctctggacaaaaaaattgcagaatttgatacagtggaagatctgctcaagtacttcaatccagagtcatggcaagaagatcttgagaatatgtatctggacacccctcggtatcgaggcaggtcataccatgaccggaagtcaaaagttgacctggataggctcaatgatgatgccaagcgttacagttgcactcccaggaattactcggtcaatataagagaagagctgaagttggccaatgtggtcttctttccacgttgcctcctcgtgcagcgctgtggaggaaattgtggctgtggaactgtcaactggaggtcctgcacatgcaattcagggaaaaccgtgaaaaagtatcatgaggtattacagtttgagcctggccacatcaagaggaggggtagagctaagaccatggctctagttgacatccagttggatcaccatgaacgatgtgattgtatctgcagctcaagaccacctcgataagagaatgtgcacatccttacattaagcctgaaagaacctttagtttaaggagggtgagataagagacccttttcctaccagcaaccaaacttactactagcctgcaatgcaatgaacacaagtggttgctgagtctcagccttgctttgttaatgccatggcaagtagaaaggtatatcatcaacttctatacctaagaatataggattgcatttaataatagtgtttgaggttatatatgcacaaacacacacagaaatatattcatgtctatgtgtatatagatcaaatgttttttttggtatatataaccaggtacaccagagcttacatatgtttgagttagactcttaaaatcctttgccaaaataagggatggtcaaatatatgaaacatgtctttagaaaatttaggagataaatttatttttaaattttgaaacacaaaacaattttgaatcttgctctcttaaagaaagcatcttgtatattaaaaatcaaaagatgaggctttcttacatatacatcttagttgattattaaaaaaggaaaaatatggtttccagagaaaaggccaatacctaagcattttttccatgagaagcactgcatacttacctatgtggactataataacctgtctccaaaaccatgccataataatataagtgctttagaaattaaatcattgtgttttttatgcattttgctgaggcatgcttattcatttaacacctatctcaaaaacttacttagaaggttttttattatagtcctacaaaagacaatgtataagctgtaacagaattttgaattgtttttctttgcaaaacccctccacaaaagcaaatcctttcaagaatggcatgggcattctgtatgaacctttccagatggtgttcagtgaaagatgtgggtagttgagaacttaaaaagtgaacattgaaacatcgacgtaactggaaattaggtgggatatttgataggatccatatctaataatggattcgaactctccaaactacaccaattaatttaatgtatcttgcttttgtgttcccgtctttttgaaatatagacatggatttataatggcattttatatttggcaggccatcatagattatttacaacctaaaagcttttgtgtatcaaaaaaatcacattttattaatgtaaatttctaatcgtatacttgctcactgttctgatttcctgtttctgaaccaagtaaaatcagtcctagaggctatggttcttaatctatggagcttgctttaagaagccagttgtcaattgtggtaacacaagtttggccctgctgtcctactgtttaatagaaaactgttttacattggttaatggtatttagagtaattttttctctctgcctcctttgtgtctgttttaaaggagactaactccaggagtaggaaatgattcatcatcctccaaagcaagaggcttaagagagaaacaccgaaattcagatagctcagggactgctaacagagaactacatttttcttattgccttgaaagttaaaaggaaagcagatttcttcagtgactttgtggtcctactaactacaaccagtttgggtgacagggctggtaaagtcccagtgttagatgagtgacctaaatatacttagatttctaagtatggtgctctcaggtccaagttcaactattcttaagcagtgcaattcttcccagttatttgagatgaaagatctctgcttattgaagatgtaccttctaaaactttcctaaaagtgtctgatgtttttactcaagaggggagtggtaaaattaaatactctattgttcaattctctaaaatcccagaacacaatcagaaatagctcaggcagacactaataattaagaacgctcttcctcttcataactgctttgcaagtttcctgtgaaaacatcagtttcctgtaccaaagtcaaaatgaacgttacatcactctaacctgaacagctcacaatgtagctgtaaatataaaaaatgagagtgttctacccagttttcaataaaccttccaggctgcaataaccagcaaggttttcagttaaagccctatctgcactttttatttattagctgaaatgtaagcaggcatattcactcacttttctttgcctttcctgagagttttattaaaacttctcccttggttacctgttatcttttgcacttctaacatgtagccaataaatctatttgatagccatcaaaggaataaaaagctggccgtacaaattacatttcaaaacaaaccctaataaatccacatttccgcatggctcattcacctggaataatgccttttattgaatatgttcttatagggcaaaacactttcataagtagagttttttatgttttttgtcatatcggtaacatgcagctttttcctctcatagcattttctatagcgaatgtaatatgcctcttatcttcatgaaaaataaatattgcttttgaacaaaactaaaacacagaaggaatacgaaaaaagaaatagtccagaaaagaaggaaaacaaaaaaaatacgggggggcgccccggccccccaaaaaatgataacaaccttgggggcgccgccccaggtaaaagagcaggcgtccaaaaacagccgaaaggggggggtcccacaaaaacgcgggcggggaaacaaggtgtgggggggtcacaagaaaaccggg

SEQ ID NO: 386363 - DNA, 1786 bp, Homo sapiens
gagagagagagagagagagagagagagagagagagagaggcctgccccgctagattcggcgctgcccgccccctgcagcctgtgctgcagctgccggccaccggagggggcgaacaaacaaacgtcaacctgttgtttgtcccgtcaccatttatcagctcagcaccacaaggaagtgcggcacccacacgcgctcggaaagttcagcatgcaggaagtttggggagagctcggcgattagcacagcgacccgggccagcgcagggcgagcgcaggcggcgagagcgcagggcggcgcggcgtcggtcccgggagcagaacccggctttttcttggagcgacgctgtctctagtcgctgatcccaaatgcaccggctcatctttgtctacactctaatctgcgcaaacttttgcagctgtcgggacacttctgcaaccccgcagagcgcatccatcaaagctttgcgcaacgccaacctcaggcgagatgagagcaatcacctcacagacttgtaccgaagagatgagaccatccaggtgaaaggaaacggctacgtgcagagtcctagattcccgaacagctaccccaggaacctgctcctgacatggcggcttcactctcaggagaatacacggatacagctagtgtttgacaatcagtttggattagaggaagcagaaaatgatatctgtaggtatgattttgtggaagttgaagatatatccgaaaccagtaccattattagaggacgatggtgtggacacaaggaagttcctccaaggataaaatcaagaacgaaccaaattaaaatcacattcaagtccgatgactactttgtggctaaacctggattcaagatttattattctttgctggaagatttccaacccgcagcagcttcagagaccaactgggaatctgtcacaagctctatttcaggggtatcctataactctccatcagtaacggatcccactctgattgcggatgctctggacaaaaaaattgcagaatttgatacagtggaagatctgctcaagtacttcaatccagagtcatggcaagaagatcttgagaatatgtatctggacacccctcggtatcgaggcaggtcataccatgaccggaagtcaaaagttgacctggataggctcaatgatgatgccaagcgttacagttgcactcccaggaattactcggtcaatataagagaagagctgaagttggccaatgtggtcttctttccacgttgcctcctcgtgcagcgctgtggaggaaattgtggctgtggaactgtcaactggaggtcctgcacatgcaattcagggaaaaccgtgaaaaagtatcatgaggtatgtcattcttagatttcttgttgcaatgcttaatctataggattcaggaagacagggccattgcatacagttgttcaggttgttcactgcacaagggcacccagccagggtttgattaggagcagaaattctacccacactaggtttgccaagccaagtgtcctgatgacaggttaatcctatcctgacgaaggcactgttttttctaatttgaacaatacaccatgtggatcaacatcaacattgttagaatatataatcaaatatgtgatatagtaatttcagagcttgacctacttgcagaaagacagaaaaaaagagaaatatgatgttattcatttacaggatatgacggcacaatctcataagcaaaaccttaattcaattatatcatttaataaatttggcacaataaagatagcaaaatata

SEQ ID NO: 386364 - DNA, 4058 bp, Homo sapiens
agtggcagagcaggtttaggcccggcctgggaaactggggagctgaggtgctcgcgccgccgctctgagcccgagtgcgcgcctctcaggggccgcggccggggctggagaacgctgctgctccgctcgcctgccccgctagattcggcgctgcccgccccctgcagcctgtgctgcagctgccggccaccggagggggcgaacaaacaaacgtcaacctgttgtttgtcccgtcaccatttatcagctcagcaccacaaggaagtgcggcacccacacgcgctcggaaagttcagcatgcaggaagtttggggagagctcggcgattagcacagcgacccgggccagcgcagggcgagcgcaggcggcgagagcgcagggcggcgcggcgtcggtcccgggagcagaacccggctttttcttggagcgacgctgtctctagtcgctgatcccaaatgcaccggctcatctttgtctacactctaatctgcgcaaacttttgcagctgtcgggacacttctgcaaccccgcagagcgcatccatcaaagctttgcgcaacgccaacctcaggcgagatgacttgtaccgaagagatgagaccatccaggtgaaaggaaacggctacgtgcagagtcctagattcccgaacagctaccccaggaacctgctcctgacatggcggcttcactctcaggagaatacacggatacagctagtgtttgacaatcagtttggattagaggaagcagaaaatgatatctgtaggtatgattttgtggaagttgaagatatatccgaaaccagtaccattattagaggacgatggtgtggacacaaggaagttcctccaaggataaaatcaagaacgaaccaaattaaaatcacattcaagtccgatgactactttgtggctaaacctggattcaagatttattattctttgctggaagatttccaacccgcagcagcttcagagaccaactgggaatctgtcacaagctctatttcaggggtatcctataactctccatcagtaacggatcccactctgattgcggatgctctggacaaaaaaattgcagaatttgatacagtggaagatctgctcaagtacttcaatccagagtcatggcaagaagatcttgagaatatgtatctggacacccctcggtatcgaggcaggtcataccatgaccggaagtcaaaagttgacctggataggctcaatgatgatgccaagcgttacagttgcactcccaggaattactcggtcaatataagagaagagctgaagttggccaatgtggtcttctttccacgttgcctcctcgtgcagcgctgtggaggaaattgtggctgtggaactgtcaactggaggtcctgcacatgcaattcagggaaaaccgtgaaaaagtatcatgaggtattacagtttgagcctggccacatcaagaggaggggtagagctaagaccatggctctagttgacatccagttggatcaccatgaacgatgtgattgtatctgcagctcaagaccacctcgataagagaatgtgcacatccttacattaagcctgaaagaacctttagtttaaggagggtgagataagagacccttttcctaccagcaaccaaacttactactagcctgcaatgcaatgaacacaagtggttgctgagtctcagccttgctttgttaatgccatggcaagtagaaaggtatatcatcaacttctatacctaagaatataggattgcatttaataatagtgtttgaggttatatatgcacaaacacacacagaaatatattcatgtctatgtgtatatagatcaaatgttttttttggtatatataaccaggtacaccagagcttacatatgtttgagttagactcttaaaatcctttgccaaaataagggatggtcaaatatatgaaacatgtctttagaaaatttaggagataaatttatttttaaattttgaaacacaaaacaattttgaatcttgctctcttaaagaaagcatcttgtatattaaaaatcaaaagatgaggctttcttacatatacatcttagttgattattaaaaaaggaaaaatatggtttccagagaaaaggccaatacctaagcattttttccatgagaagcactgcatacttacctatgtggactataataacctgtctccaaaaccatgccataataatataagtgctttagaaattaaatcattgtgttttttatgcattttgctgaggcatgcttattcatttaacacctatctcaaaaacttacttagaaggttttttattatagtcctacaaaagacaatgtataagctgtaacagaattttgaattgtttttctttgcaaaacccctccacaaaagcaaatcctttcaagaatggcatgggcattctgtatgaacctttccagatggtgttcagtgaaagatgtgggtagttgagaacttaaaaagtgaacattgaaacatcgacgtaactggaaattaggtgggatatttgataggatccatatctaataatggattcgaactctccaaactacaccaattaatttaatgtatcttgcttttgtgttcccgtctttttgaaatatagacatggatttataatggcattttatatttggcaggccatcatagattatttacaacctaaaagcttttgtgtatcaaaaaaatcacattttattaatgtaaatttctaatcgtatacttgctcactgttctgatttcctgtttctgaaccaagtaaaatcagtcctagaggctatggttcttaatctatggagcttgctttaagaagccagttgtcaattgtggtaacacaagtttggccctgctgtcctactgtttaatagaaaactgttttacattggttaatggtatttagagtaattttttctctctgcctcctttgtgtctgttttaaaggagactaactccaggagtaggaaatgattcatcatcctccaaagcaagaggcttaagagagaaacaccgaaattcagatagctcagggactgctaacagagaactacatttttcttattgccttgaaagttaaaaggaaagcagatttcttcagtgactttgtggtcctactaactacaaccagtttgggtgacagggctggtaaagtcccagtgttagatgagtgacctaaatatacttagatttctaagtatggtgctctcaggtccaagttcaactattcttaagcagtgcaattcttcccagttatttgagatgaaagatctctgcttattgaagatgtaccttctaaaactttcctaaaagtgtctgatgtttttactcaagaggggagtggtaaaattaaatactctattgttcaattctctaaaatcccagaacacaatcagaaatagctcaggcagacactaataattaagaacgctcttcctcttcataactgctttgcaagtttcctgtgaaaacatcagtttcctgtaccaaagtcaaaatgaacgttacatcactctaacctgaacagctcacaatgtagctgtaaatataaaaaatgagagtgttctacccagttttcaataaaccttccaggctgcaataaccagcaaggttttcagttaaagccctatctgcactttttatttattagctgaaatgtaagcaggcatattcactcacttttctttgcctttcctgagagttttattaaaacttctcccttggttacctgttatcttttgcacttctaacatgtagccaataaatctatttgatagccatcaaaggaataaaaagctggccgtacaaattacatttcaaaacaaaccctaataaatccacatttccgcatggctcattcacctggaataatgccttttattgaatatgttcttatagggcaaaacactttcataagtagagttttttatgttttttgtcatatcggtaacatgcagctttttcctctcatagcattttctatagcgaatgtaatatgcctcttatcttcatgaaaaataaatattgcttttgaacaaaacta

SEQ ID NO: 386365 - DNA, 1142 bp, Homo sapiens
catcatattatactcaagcatttacacagtctcacttctaggaactactagtacctatctgactcacacggtcagatcctccctactatgcctagaaatgattgatactatcgttgttcattatagctatctctcactaatccacttcaagcagcccactccctacttacacacacatgaattggtgcctattgccatactaaatcttctgaccggctctgtcataaagctagacgcgttaagagtcctactctcctaatctacttctctaattgcgtcgcatcctaccagtatccgaccttatcactcatcagttacctataagctaaagaccctatctccaccaaatataattatagaaatgaaagatctctgcttattgaagatgtaccttctaaaactttcctaaaagtgtctgatgtttttactcaagaggggagtggtaaaattaaatactctattgttcaattctctaaaatcccagaacacaatcagaaatagctcaggcagacactaataattaagaacgctcttcctcttcataactgctttgcaagtttcctgtgaaaacatcagtttcctgtaccaaagtcaaaatgaacgttacatcactctaacctgaacagctcacaatgtagctgtaaatataaaaaatgagagtgttctacccagttttcaataaaccttccaggctgcaataaccagcaaggttttcagttaaagccctatctgcactttttatttattagctgaaatgtaagcaggcatattcactcacttttctttgcctttcctgagagttttattaaaacttctcccttggttacctgttatcttttgcacttctaacatgtagccaataaatctatttgatagccatcaaaggaataaaaagctggccgtacaaattacatttcaaaacaaaccctaataaatccacatttccgcatggctcattcacctggaataatgccttttattgaatatgttcttatagggcaaaacactttcataagtagagttttttatgttttttgtcatatcggtaacatgcagctttttcctctcatagcattttctatagcgaatgtaatatgcctcttatcttcatgaaaaataaatattgcttttgaacaaaacta

SEQ ID NO: 386366 - DNA, 1515 bp, Homo sapiens
  misc_feature (14)..(14): n is a, c, g, or t
tttgtctcttcctnagaaacgagcaaacctgaaagctactctctcagcttcagagggaaaaaatggttgtagatttctggacttgggagcagacatttcaagaactaatccaagaggcaaaaccccgggccacatggacgctgaagttggatggcaaccttcagctagactgcctggctcaagggtggaagcaataccaacagagagcatttggctggttccggtgttcctcctgccagcgaagttgggcttccgccaagttgcagattctgtgccacacgtactgggagcactggacatcccagggtcaggtgcgtatgaggctctttggccaaaggtgccagaagtgctcctggtcccaatatgagatgcctgagttctcctcggatagcaccatgaggattctgagcaacctggtgcagcatatactgaagaaatactatggaaatggcatgaggaagtctccagaaatgccagtaatcctggaagtgtccctggaaggatcccatgacacagccaattgtgaggcatgcactttgggcatatgtggacagggcttaaaaagctacatgacaaagccgtccaaatccctactcccccacctaaagactgggaattcctcacctggaattggtgctgtgtacctcgcaaaccaagccaagaaccagtcagatgaggcaaaagaggctaaggggagtgggtatgagaaattagggcccagtcgagacccagatccactgaacatctgtgtctttattttgctgcttgtatttattgtagtcaaatgctttacatcagaatgatgaaaataggcttgccactttctcttattttaattccatggtagtcaatgaactggctgccactttaatataactgaaaattcattttgagaccaagcaggatcaagtttgtagaataaacactggtttcctagctatcctctgaaaacagtatgaaacatgaccaagtacataatggatttagtaataaatattgtcgaattgctaaaaagtcttcaatcattcattcactaagtcactcagtgatatcaatatacttagctcagaaagtgtgggaggctgaataatggtgtctcccaacatatgcatgacttaatccccagaacctgtaaacatgttactttacatggtagaatggactttgcggatgtaattaaggaccttgaaatggttagattatttcatattgtccgggtggataagaaccaggattttgtaacagggaggcaacaagctcaaaatcagaaaaaagagatttgtcaatggaacaagaggttgaagtgctttgaagttggaggaagaggtcacaggcaaaaaagtacaggcagcctttagaaacccaaaaggacaaaggaacagattctcccctggagtctgcagaaggaaccagccctgcctgcacatggctttagcccagtgacactgattttggacatctgaccttcagaactgcttgctcataaacttgtcttgttttaatgcaaaaaaattg

SEQ ID NO: 386367 - DNA, 1009 bp, Homo sapiens
  misc_feature (14)..(14): n is a, c, g, or t
tttgtctcttcctnagaaacgagcaaacctgaaagctactctctcagcttcagagggaaaaaatggttgtagatttctggacttgggagcagacatttcaagaactaatccaagaggcaaaaccccgggccacatggacgctgaagttggatggcaaccttcagctagactgcctggctcaagggtggaagcaataccaacagagagcatttggctggttccggtgttcctcctgccagcgaagttgggcttccgccaagttgcagattctgtgccacacgtactgggagcactggacatcccagggtcaggtgcgtatgaggctctttggccaaaggtgccagaagtgctcctggtcccaatatgagatgcctgagttctcctcggatagcaccatgaggattctgagcaacctggtgcagcatatactgaagaaatactatggaaatggcatgaggaagtctccagaaatgccagtaatcctggaagtgtccctggaaggatcccatgacacagccaattgtgaggcatgcactttgggcatatgtggacagggcttaaaaagctacatgacaaagccgtccaaatccctactcccccacctaaagactgggaattcctcacctggaattggtgctgtgtacctcgcaaaccaagccaagaaccagtcagatgaggcaaaagaggctaaggggagtgggtatgagaaattagggcccagtcgagacccagatccactgaacatctgtgtctttattttgctgcttgtatttattgtagtcaaatgctttacatcagaatgatgaaaataggcttgccactttctcttattttaattccatggtagtcaatgaactggctgccactttaatataactgaaaattcattttgagaccaagcaggatcaagtttgtagaataaacactggtttcctagctatcctctgaaaacagtatgaaacatgaccaagtacataatggatttagtaataaatattgtcgaattgct

SEQ ID NO: 386368 - DNA, 449 bp, Homo sapiens
attgttaaatttctgttgttttaagccacccattgtgtagtactctgttatagtagcccaagaaaaccaatacactgtataatggaacattatttagccataaaaaatgaattaagggctgatacatgctacaatgcagacagactttaagaaaacataatgttaagtacaagaaaccagacacacaagactatttattatgtggttccacttatatgagacgtctaaaacagaaaaatctatagagataagcaaattagcacatgtcaagggctggggtgaaatgtagagtgactactaatgagtacacaattttttttgagatgatgaaaatgttctaaaattgtcgtgatagttgcataactctgtcattataccaaaaaaatcattgaattgtataatttaaaaagtatgtgaattatatctcaataaaatattttaaaaacaga

SEQ ID NO: 386369 - DNA, 733 bp, Homo sapiens
cgtccggtgaacgcagagggctgtgaggaggaagagggaataagtagacggcgagtagaaaggagagtacagtgatgaataggacgagtacgtggtaagactacagaaaaagtgagcccggaacaatgaatggacttgagcgagaaagagaactagggcgaacaagaaacaaggataagattccgagcaggtgatgaactagcgcgcggtggcagaaataagagaaatcgccgttatgggcagctcccttggcgaggtataagagtgttgtgaagagagggaataggtgaaggaaggataggatacagaacaccatcggagggacgcgaagataagagagggcggggacctggaacgcttgtataatggaacattatttagccataaaaaatgaattaagggctgatacatgctacaatgcagacagactttaagaaaacataatgttaagtacaagaaaccagacacacaagactatttattatgtggttccacttatatgagacgtctaaaacagaaaaatctatagagataagcaaattagcacatgtcaagggctggggtgaaatgtagagtgactactaatgagtacacaattttttttgagatgatgaaaatgttctaaaattgtcgtgatagttgcataactctgtcattataccaaaaaaatcattgaattgtataatttaaaaagtatgtgaattatatctcaataaaatattttaaaaacaga

SEQ ID NO: 386370 - DNA, 268 bp, Homo sapiens
ttcaaatgcaagctatcagttttctccaaaaggtctggacttaggcagtttgctgcttttacattctcacttctgttagattttctcaagagatcctcaatctagcatgaagcgaagaggaagatttgaatctcacctcttccacttaacagctgtgacactgggcaagttatttcaggtctttgaaagtcagtttccacatttgttaaatgagattaagaatccttacctcataaccactttagaaatccttttggcagtatctact

SEQ ID NO: 386371 - DNA, 607 bp, Homo sapiens
atgaaaagcaggcacaagaatttgaagcacagtagtttagggataacacacctctgagatcataactggataatacagtgatgatcctgggtcattgagaaaactttaaattatgttcagcatgctttgaggaagaatgcaggaattatgtatttttttaagaagccagataaaaattgatttttaaaaaattaggatatagttaaggctggcaagatggccaattaggaacatctccggtctgcagctcccagtgagatcgatgcagaagggggtgatttctgcatttccaactgaggtactggttcatctcactggggctagttggacagcgggtgcagcccaaggagggtgagccaaagcaaggtgaggcgttgcctcacctgagaagcacaagggatgggggaattatcttccttacccaagggaagccttgagggactgagcctgaggaactgtgcactctggcccagatactgtgcttttcccatggtccttgcaacctgcagaccaggagactgcctctggtgcctacaccaccagggccctgggtttcaagcacaaaacagggcggccattcaggcagacactgaactagctgcaggag

SEQ ID NO: 386372 - DNA, 155 bp, Homo sapiens
atgcaggagccagcttcagcagaactcctggctagcagctctgcctggcagtacagaaactgtctcaaaatgtgaaacagatgagccttttaaagaaagttatttatattgtggaatctttcagagcaagcagaaacttgaagagccttatcacc

SEQ ID NO: 386373 - DNA, 223 bp, Homo sapiens
gtgcaagtcctcactccctttctcccatgatgacacatttctcctccgtggctgccttttagcttttgttgtttcaaagctggcttctgtctgagctctgattgttgtagagaaagatgctgtcattcattaggaagtgatagctgaatgctacaatggatgcttccagactttatctctctgtgtgtgtgtgtgtgtgtgtgtgtgtgtgtgtgtgtgtgtt

SEQ ID NO: 386374 - DNA, 517 bp, Homo sapiens
ttgttctgaagtaaaacaatccagaccattaccacattgataattttctccaattagacagattagaggtttaatcctaaaagaaccccagtatccaatatttttgcctacatctttaacattaaggaaatcctgtttttaaatttatatttttaaccattacacaagatctttattattggaaaaaggacagacgcaaattaatcagaaaatttctcattgaggaagattgagtttttaaatgtatgttaacaaaaggtagaaaaactcatcacacttagcatgtatacagtacttatatggactagaaagtttgttcttgtgctttcagtagaagcataaaacaaatctgatgttgtcatagagatagtttcataataggttatgtttttgtacaagtcccatattttcactagaactattacaaacattacagtcatcagcagatgttacacatgtctagcatagaaatttctttttttgtttttgttgtttgtttgtttgagacggagtcttg

SEQ ID NO: 386375 - DNA, 454 bp, Homo sapiens
atcaccgccatggcatggggtgtggaggagaagctgctggtgattggcacccaggatggcatcatggctgtgtgggacatggaagagcagcatgtgatccacatgctaactggacacacaggagaggtgaggtgtgtgaaaatatttgccaaagggaccctcgccaactctgcttcaaaggattacacgctgcacttgtggaacttactctctggccaggagaaatttaccatttgggatggaggctcaaaaaatcccgctgaacctcagatctggaaccttcatgtggatgaggcacacaaagttgtgtattcagcatctggctcaaagatcaatgcttggaatctggaaactgcagagccggtattccatatcctgggagatgcctctgatccttggatgtgcatggccgtgctggcctcccaggccacactgctgacagtgtccagggatg

SEQ ID NO: 386376 - DNA, 3150 bp, Homo sapiens
gcggccgcggccgagcgggggtgctgcgcggcggccgtgatggctggtgacggcggggccgggcaggggaccggggccgcggcccgggagcgggccagctgccgggagccctgaatcaccgcctggcccgactccaccatgaacgtcgcgctgcaggagctgggagctggcagcaacgtgggattccagaaggggacaagacagctgttaggctcacgcacgcagctggagctggtcttagcaggtgcctctctactgctggctgcactgcttctgggctgccttgtggccctaggggtccagtaccacagagacccatcccacagcacctgccttacagaggcctgcattcgagtggctggaaaaatcctggagtccctggaccgaggggtgagcccctgtgaggacttttaccagttctcctgtgggggctggattcggaggaaccccctgcccgatgggcgttctcgctggaacaccttcaacagcctctgggaccaaaaccaggccatactgaagcacctgcttgaaaacaccaccttcaactccagcagtgaagctgagcagaagacacagcgcttctacctatcttgcctacaggtggagcgcattgaggagctgggagcccagccactgagagacctcattgagaagattggtggttggaacattacggggccctgggaccaggacaactttatggaggtgttgaaggcagtagcagggacctacagggccaccccattcttcaccgtctacatcagtgctgactctaagagttccaacagcaatgttatccaggtggaccagtctgggctctttctgccctctcgggattactacttaaacagaactgccaatgagaaagtgctcactgcctatctggattacatggaggaactggggatgctgctgggtgggcggcccacctccacgagggagcagatgcagcaggtgctggagttggagatacagctggccaacatcacagtgccccaggaccagcggcgcgacgaggagaagatctaccacaagatgagcatttcggagctgcaggctctggcgccctccatggactggcttgagttcctgtctttcttgctgtcaccattggagttgagtgactctgagcctgtggtggtgtatgggatggattatttgcagcaggtgtcagagctcatcaaccgcacggaaccaagcatcctgaacaattacctgatctggaacctggtgcaaaagacaacctcaagcctggaccgacgctttgagtctgcacaagagaagctgctggagaccctctatggcactaagaagtcctgtgtgccgaggtggcagacctgcatctccaacacggatgacgcccttggctttgctttggggtccctcttcgtgaaggccacgtttgaccggcaaagcaaagaaattgcagaggggatgatcagcgaaatccggaccgcatttgaggaggccctgggacagctggtttggatggatgagaagacccgccaggcagccaaggagaaagcagatgccatctatgatatgattggtttcccagactttatcctggagcccaaagagctggatgatgtttatgacgggtacgaaatttctgaagattctttcttccaaaacatgttgaatttgtacaacttctctgccaaggttatggctgaccagctccgcaagcctcccagccgagaccagtggagcatgaccccccagacagtgaatgcctactaccttccaactaagaatgagatcgtcttccccgctggcatcctgcaggcccccttctatgcccgcaaccaccccaaggccctgaacttcggtggcatcggtgtggtcatgggccatgagttgacgcatgcctttgatgaccaagggcgcgagtatgacaaagaagggaacctgcggccctggtggcagaatgagtccctggcagccttccggaaccacacggcctgcatggaggaacagtacaatcaataccaggtcaatggggagaggctcaacggccgccagacgctgggggagaacattgctgacaacggggggctgaaggctgcctacaatgcttacaaagcatggctgagaaagcatggggaggagcagcaactgccagccgtggggctcaccaaccaccagctcttcttcgtgggatttgcccaggtgtggtgctcggtccgcacaccagagagctctcacgaggggctggtgaccgacccccacagccctgcccgcttccgcgtgctgggcactctctccaactcccgtgacttcctgcggcacttcggctgccctgtcggctcccccatgaacccagggcagctgtgtgaggtgtggtagacctggatcaggggagaaatgcccagctgtcaccagacctggggcagctctcctgacaaagctgtttgctcttgggttgggaggaagcaaatgcaagctgggctgggtctagtccctcccccccacaggtgacatgagtacagaccctcctcaatcaccacattgtgcctctgctttgggggtgcccctgcctccagcagagcccccaccattcactgtgacatctttccgtgtcaccctgcctggaagaggtctgggtggggaggccagttcccataggaaggagtctgcctcttctgtccccaggctcactcagcctggcggccatggggcctgccgtgcctgccccactgtgacccacaggcctgggtggtgtacctcctggacttctccccaggctcactcagtgcgcacttaggggtggactcagctctgtctggctcaccctcacgggctacccccacctcaccctgtgctccttgtgccactgctcccagtgctgctgctgaccttcactgacagctcctagtggaagcccaagggcctctgaaagcctcctgctgcccactgtttccctgggctgagaggggaagtgcatatgtgtagcgggtactggttcctgtgtcttagggcacaagccttagcaaatgattgattctccctggacaaagcaggaaagcagatagagcagggaaaaggaagaacagagtttatttttacagaaaagagggtgggagggtgtggtcttggcccttataggaccctgtgccaataaacagacatgcatccgtaaggagttca

SEQ ID NO: 386377 - DNA, 1218 bp, Homo sapiens
gcggccgcggccgagcgggggtgctgcgcggcggccgtgatggctggtgacggcggggccgggcaggggaccggggccgcggcccgggagcgggccagctgccgggagccctgaatcaccgcctggcccgactccaccatgaacgtcgcgctgcaggagctgggagctggcagcaacgtgggattccagaaggggacaagacagctgttaggctcacgcacgcagctggagctggtcttagcaggtgcctctctactgctggctgcactgcttctgggctgccttgtggccctaggggtccagtaccacagagacccatcccacagcacctgccttacagaggcctgcattcgagtggctggaaaaatcctggagtccctggaccgaggggtgagcccctgtgaggacttttaccagttctcctgtgggggctggattcggaggaaccccctgcccgatgggcgttctcgctggaacaccttcaacagcctctgggaccaaaaccaggccatactgaagcacctgcttgaaaacaccaccttcaactccagcagtgaagctgagcagaagacacagcgcttctacctatcttgcctacaggtggagcgcattgaggagctgggagcccagccactgagagacctcattgagaagattggtggttggaacattacggggccctgggaccaggacaactttatggaggtgttgaaggcagtagcagggacctacagggccaccccattcttcaccgtctacatcagtgctgactctaagagttccaacagcaatgttatccaggtggaccagtctgggctctttctgccctctcgggattactacttaaacagaactgccaatgagaaagtaaggaacatcttccgaacccccatccctacccctggctgagctgggctgatccctgttgacttttccctttgccaagggtcagagcagggaaggtgagcctatcctgtcacctagtgaacaaactgcccctcctttctttcttcttttcttcctccctccctccctttcttccccttttccttccttccttcctcttattcttctagtaggtttcatagacacctactgtgtgccaggtccagtgggggaattctgagatataagtttccgagccattgccacaggaagcgttcagtgtcgatgggttcatggacctagatagctgagaacaaagctcacaagagggtc

SEQ ID NO: 386378 - DNA, 102 bp, Homo sapiens
cgtcgcgctgcaggagctgggagctggcagcaacgtgagtgggggccccgggctccacgggaggggactgggtggagggggacgaggcagaggggtcggccg

SEQ ID NO: 386379 - DNA, 3237 bp, Homo sapiens
gcggccgcggccgagcgggggtgctgcgcggcggccgtgatggctggtgacggcggggccgggcaggggaccggggccgcggcccgggagcgggccagctgccgggagccctgaatcaccgcctggcccgactccaccatgaacgtcgcgctgcaggagctgggagctggcagcaacatggtggagtacaaacgggccacgcttcgggatgaagacgcacccgagacccccgtagagggcggggcctccccggacgccatggaggtgggattccagaaggggacaagacagctgttaggctcacgcacgcagctggagctggtcttagcaggtgcctctctactgctggctgcactgcttctgggctgccttgtggccctaggggtccagtaccacagagacccatcccacagcacctgccttacagaggcctgcattcgagtggctggaaaaatcctggagtccctggaccgaggggtgagcccctgtgaggacttttaccagttctcctgtgggggctggattcggaggaaccccctgcccgatgggcgttctcgctggaacaccttcaacagcctctgggaccaaaaccaggccatactgaagcacctgcttgaaaacaccaccttcaactccagcagtgaagctgagcagaagacacagcgcttctacctatcttgcctacaggtggagcgcattgaggagctgggagcccagccactgagagacctcattgagaagattggtggttggaacattacggggccctgggaccaggacaactttatggaggtgttgaaggcagtagcagggacctacagggccaccccattcttcaccgtctacatcagtgctgactctaagagttccaacagcaatgttatccaggtggaccagtctgggctctttctgccctctcgggattactacttaaacagaactgccaatgagaaagtgctcactgcctatctggattacatggaggaactggggatgctgctgggtgggcggcccacctccacgagggagcagatgcagcaggtgctggagttggagatacagctggccaacatcacagtgccccaggaccagcggcgcgacgaggagaagatctaccacaagatgagcatttcggagctgcaggctctggcgccctccatggactggcttgagttcctgtctttcttgctgtcaccattggagttgagtgactctgagcctgtggtggtgtatgggatggattatttgcagcaggtgtcagagctcatcaaccgcacggaaccaagcatcctgaacaattacctgatctggaacctggtgcaaaagacaacctcaagcctggaccgacgctttgagtctgcacaagagaagctgctggagaccctctatggcactaagaagtcctgtgtgccgaggtggcagacctgcatctccaacacggatgacgcccttggctttgctttggggtccctcttcgtgaaggccacgtttgaccggcaaagcaaagaaattgcagaggggatgatcagcgaaatccggaccgcatttgaggaggccctgggacagctggtttggatggatgagaagacccgccaggcagccaaggagaaagcagatgccatctatgatatgattggtttcccagactttatcctggagcccaaagagctggatgatgtttatgacgggtacgaaatttctgaagattctttcttccaaaacatgttgaatttgtacaacttctctgccaaggttatggctgaccagctccgcaagcctcccagccgagaccagtggagcatgaccccccagacagtgaatgcctactaccttccaactaagaatgagatcgtcttccccgctggcatcctgcaggcccccttctatgcccgcaaccaccccaaggccctgaacttcggtggcatcggtgtggtcatgggccatgagttgacgcatgcctttgatgaccaagggcgcgagtatgacaaagaagggaacctgcggccctggtggcagaatgagtccctggcagccttccggaaccacacggcctgcatggaggaacagtacaatcaataccaggtcaatggggagaggctcaacggccgccagacgctgggggagaacattgctgacaacggggggctgaaggctgcctacaatgcttacaaagcatggctgagaaagcatggggaggagcagcaactgccagccgtggggctcaccaaccaccagctcttcttcgtgggatttgcccaggtgtggtgctcggtccgcacaccagagagctctcacgaggggctggtgaccgacccccacagccctgcccgcttccgcgtgctgggcactctctccaactcccgtgacttcctgcggcacttcggctgccctgtcggctcccccatgaacccagggcagctgtgtgaggtgtggtagacctggatcaggggagaaatgcccagctgtcaccagacctggggcagctctcctgacaaagctgtttgctcttgggttgggaggaagcaaatgcaagctgggctgggtctagtccctcccccccacaggtgacatgagtacagaccctcctcaatcaccacattgtgcctctgctttgggggtgcccctgcctccagcagagcccccaccattcactgtgacatctttccgtgtcaccctgcctggaagaggtctgggtggggaggccagttcccataggaaggagtctgcctcttctgtccccaggctcactcagcctggcggccatggggcctgccgtgcctgccccactgtgacccacaggcctgggtggtgtacctcctggacttctccccaggctcactcagtgcgcacttaggggtggactcagctctgtctggctcaccctcacgggctacccccacctcaccctgtgctccttgtgccactgctcccagtgctgctgctgaccttcactgacagctcctagtggaagcccaagggcctctgaaagcctcctgctgcccactgtttccctgggctgagaggggaagtgcatatgtgtagcgggtactggttcctgtgtcttagggcacaagccttagcaaatgattgattctccctggacaaagcaggaaagcagatagagcagggaaaaggaagaacagagtttatttttacagaaaagagggtgggagggtgtggtcttggcccttataggaccctgtgccaataaacagacatgcatccgtaaggagttca

SEQ ID NO: 386380 - DNA, 2553 bp, Homo sapiens
ggtggtccccccctccccccctggcacccacagatgtgagacgccctctccccaaaaaaaaaaaaaaaaaaaaaaaagaagaagaagaagtaagtaaacaatacttagccaatggaggtaagcagtgtgtcaaaaatgaaacaggtcatccagaaaggcttccagaaggatcaagcagaagagatattgggcagaggtggtggtaagaacagatctcagccttgggcaggacttgttgctgggctctgaggatcacccgggccttgacaggtgctcactgcctatctggattacatggaggaactggggatgctgctgggtgggcggcccacctccacgagggagcagatgcagcaggtgctggagttggagatacagctggccaacatcacagtgccccaggaccagcggcgcgacgaggagaagatctaccacaagatgagcatttcggagctgcaggctctggcgccctccatggactggcttgagttcctgtctttcttgctgtcaccattggagttgagtgactctgagcctgtggtggtgtatgggatggattatttgcagcaggtgtcagagctcatcaaccgcacggaaccaagcatcctgaacaattacctgatctggaacctggtgcaaaagacaacctcaagcctggaccgacgctttgagtctgcacaagagaagctgctggagaccctctatggcactaagaagtcctgtgtgccgaggtggcagacctgcatctccaacacggatgacgcccttggctttgctttggggtccctcttcgtgaaggccacgtttgaccggcaaagcaaagaaattgcagaggggatgatcagcgaaatccggaccgcatttgaggaggccctgggacagctggtttggatggatgagaagacccgccaggcagccaaggagaaagcagatgccatctatgatatgattggtttcccagactttatcctggagcccaaagagctggatgatgtttatgacgggtacgaaatttctgaagattctttcttccaaaacatgttgaatttgtacaacttctctgccaaggttatggctgaccagctccgcaagcctcccagccgagaccagtggagcatgaccccccagacagtgaatgcctactaccttccaactaagaatgagatcgtcttccccgctggcatcctgcaggcccccttctatgcccgcaaccaccccaaggccctgaacttcggtggcatcggtgtggtcatgggccatgagttgacgcatgcctttgatgaccaagggcgcgagtatgacaaagaagggaacctgcggccctggtggcagaatgagtccctggcagccttccggaaccacacggcctgcatggaggaacagtacaatcaataccaggtcaatggggagaggctcaacggccgccagacgctgggggagaacattgctgacaacggggggctgaaggctgcctacaatgcttacaaagcatggctgagaaagcatggggaggagcagcaactgccagccgtggggctcaccaaccaccagctcttcttcgtgggatttgcccaggtgtggtgctcggtccgcacaccagagagctctcacgaggggctggtgaccgacccccacagccctgcccgcttccgcgtgctgggcactctctccaactcccgtgacttcctgcggcacttcggctgccctgtcggctcccccatgaacccagggcagctgtgtgaggtgtggtagacctggatcaggggagaaatgcccagctgtcaccagacctggggcagctctcctgacaaagctgtttgctcttgggttgggaggaagcaaatgcaagctgggctgggtctagtccctcccccccacaggtgacatgagtacagaccctcctcaatcaccacattgtgcctctgctttgggggtgcccctgcctccagcagagcccccaccattcactgtgacatctttccgtgtcaccctgcctggaagaggtctgggtggggaggccagttcccataggaaggagtctgcctcttctgtccccaggctcactcagcctggcggccatggggcctgccgtgcctgccccactgtgacccacaggcctgggtggtgtacctcctggacttctccccaggctcactcagtgcgcacttaggggtggactcagctctgtctggctcaccctcacgggctacccccacctcaccctgtgctccttgtgccactgctcccagtgctgctgctgaccttcactgacagctcctagtggaagcccaagggcctctgaaagcctcctgctgcccactgtttccctgggctgagaggggaagtgcatatgtgtagcgggtactggttcctgtgtcttagggcacaagccttagcaaatgattgattctccctggacaaagcaggaaagcagatagagcagggaaaaggaagaacagagtttatttttacagaaaagagggtgggagggtgtggtcttggcccttataggaccctgtgccaataaacagacatgcatccgtaaggagttca

SEQ ID NO: 386381 - DNA, 850 bp, Homo sapiens
tacacagaccccaagtgtctttttctctttctacatttgttagaaaggtaacctgacctttgcttttggtctttcctcccccattctgctaccttcctctcttcttttcttcttactagtttcaaataatgggttggaatcaattcaatgctgctccatccgtcagaggcacttcccaaaatacaagtgtgactcatagtcctcataacccccctttgctttttgtttgactttcaatctcttctatcctctgggcctatttcccaggaaaattgaccaaacataagctactggcagctgtctctctcctccaggatttatagtgtgagataaggagcatggctgacccactcccttgccttccagctctcttcccttcccagaggaatgcatagccaggtgtgaatgcccatttcatggattattcttagttctagaccacctgacttattacctagcatacccattacaacatcagctctatcgctggtgtattagcccacagtttcattttattattagcctaaacaaaagattattaggaaagtaaatctgtcagacgtgtatataaacatatatggaatgccaaatataaaggatttttatattgtccatgattttttaaaatctataattgtcttcctatgtaagcatgaataattaagagctcaatgtttttgctgttgtaagtattgggatgtatgctttctgcagaacctattttgaactgtgtgccatgctttaagaccagtgtttgtcccatatacagtatgaattcacttagtaaccaatatttattgattgctttctctgtggtaggcacttcgttaagtgatcaaaatacaaaaaa

SEQ ID NO: 386382 - DNA, 876 bp, Homo sapiens
cgtaagttttcttttgaaagttgtatcattttaggtcctacattttggtcttttatcccattttgagcctaatttgtgtacatgttacaagcttttactatattttatgagctgttttcttagtggctgccctgggattacaatgaacatcttaattcataacagtcttgtttggattaatacgaacttcatttcagtaatatgtaaagactttctttctatatagctctgttccttcccgaacattgtgttattgtcatctaaattacatctttatgcattatatgtctaccaatgtagatttataattatttcttcttgtagttgtcttttaaattaaaaagaaaaagaattacaaacaaaaaaaaaaaaaaaaaaaaaaaaaaaaaaaaaaaaaaaaaaaaaaaaaaaaaaaaaaaaaaaaaaaaaaaaaaaaaaaaaaaaaaaaaaaaaaaaaaaaaaaaaaaaaaaaaaaaaaaataaaaaaaaaaaaaaaaaaaaaaaaaaaaaatttttggcccccttcccccaaactttttttatttttcaaattttttttttgggggcccaaatttgggctttttgtgaaaaacccccttttggggggggttttaaaaaaaaaggggcggggttttaaaaaagggggctgggaaaaaactcgtgggtcccccaaaaaaattgcctttgaaaaaaaccccttttttcgcgggggggcaataatccggagggcccccccccaacgcctttctcaaaaattggcgcccccccggtgggtattaaaaattcggggcgattatttttaaaaaccgcggcaaattttttttaacaccccttttttttaccaaaaggcgcccaatgcggaaaccccttttatat

SEQ ID NO: 386383 - DNA, 2131 bp, Homo sapiens
  misc_feature (27)..(27): n is a, c, g, or t
aaggctagtagggccgggggaatcggncgaggggagatgtccgcccccagtcgtagcctcggacggtttctgagcgttggtgtttggcacgcgccaccctctcttgctttggttccgccatgccgatgtaccaggtaaaaccttatcacgggcgcggcgcgcctctccgtgtggagcttcccacctgcatgtaccggctctctaacgtgcaaggcaggagcggcggcccagcgcccggcgttggccacctacagtctttggtagatgagtggctggatagctacaagcaagaccaggatgcaggatttctggagcttgttaactttttcatctgatcttgtggatgtaaaggactcgggggactatcctctgacagctccaggtctatcctggaagaagttccagggcagcttctgtgagtttgtggggacattggtctgtcggtgccagtacatcctcctccatgatgacttccctatggacaacctcatctccctgctcactggcttctcagactcacaagtctgcgccttctgtcacactagcaccctggctgctatgaaactgatgacctccctggtaagagttgccctccaactgagtctgcacgaagatatcaatcagcgtcagtatgaggctgaaagaaacaaggggccagggcagagggcacctgagcggctggagagcctgttggagaaacacaaagagctgcattaatactacattgtcaaagacaaagacgaacatgagacatgcgatatgagttttaaaaggagagaagagcaaaaaaacaatacagctatccaaggagcaagtgctgagcttgtgaaaaaacagcttctattttattaaataatagtgttcctgcagggatgtctgaagtactctgcaaggctaattaggacagatcaatgtacacttacctctccagaaggctgaaaggtgtgtagtgactatgtgtcattaaaaatttacttgaccatgggcaacagatgtccatgaaagaatgaccctggtgagtgctctaagttttcattttactcatgtcatcctcaatgcatcataaatgccatagacaccattactatcacgtaggctcatagcagctgatgtgctgtatatgcttgagagggtggtatcaattaactatattatctataaagccatacttgcaattactaccacttcacaatttatcattaacgcatttggcagatttttttttctccaaagtaacatttatttaaaggtttatcaaaattcttagaacagcatttattataatgtgatttttgataattgactaaatcagtggctcttaaaaacaccctcatctcagtcccgctcagtatacaccacagtgccatttggggaaaagaaatacatattagaaatgttcatttcagacctcgtcatggaagatcatatattaatgtaatcaggtggtacgtttacatgctcattagtaatccatcattagtccaaatgctcactattaggaataaatgtacaacgagttattcagaatacccagaaagagtatttcttatttaaacattcaggacaagctgactgaaataagtgcacaccttgaatttgaactttcaaggcacatcactaaagtcaatcagttatgtcaggacactcttctataataatctcaattataaaattcctgcctctccctaacacaggagttggagggagttccaatatctgaatctttctaattcactgtaactgcaaaaaaatcttgatgaagtgtgtatttaaatttcatgccttaatacatagcatgccactaaaaccacattagttatgctttatgctgcttaatcatacgtcaaaatctgtaaaatctgctcttgcatgctaaggtaatttaactgcaattaatcaattaagaaaaataaaatgtaataaatgccaaataatgtaacttcttttaaacagaccactatctacacatttattccccaaatacttattagctgacaccatataaggaaaacataataaaaagtagacttcactgagcctttctcccattggtagcttgctctaaacttacaaatgttttagagaattctttggcatgatctgactttccaactaaaatgtgagcaacttg

SEQ ID NO: 386384 - DNA, 2329 bp, Homo sapiens
  misc_feature (27)..(27): n is a, c, g, or t
aaggctagtagggccgggggaatcggncgaggggagatgtccgcccccagtcgtagcctcggacggtttctgagcgttggtgtttggcacgcgccaccctctcttgctttggttccgccatgccgatgtaccaggtaaaaccttatcacgggcgcggcgcgcctctccgtgtggagcttcccacctgcatgtaccggctctctaacgtgcaaggcaggagcggcggcccagcgcccggcgttggccacctacagacggagtttcactgtgtcacccaggctggagtgcagtggtgtgagctcggctcactgcaacctctgcctcccgggttcaagcagttctcccatctcagcctcctgagtagcttggattacagtctttggtagatgagtggctggatagctacaagcaagaccaggatgcaggatttctggagcttgttaactttttcatctgatcttgtggatgtaaaggcactgtgagccctgagatgttcaagaagatgtccaactcagagatcatccagcacctaacagagcgtttaatgaggactcgggggactatcctctgacagctccaggtctatcctggaagaagttccagggcagcttctgtgagtttgtggggacattggtctgtcggtgccagtacatcctcctccatgatgacttccctatggacaacctcatctccctgctcactggcttctcagactcacaagtctgcgccttctgtcacactagcaccctggctgctatgaaactgatgacctccctggtaagagttgccctccaactgagtctgcacgaagatatcaatcagcgtcagtatgaggctgaaagaaacaaggggccagggcagagggcacctgagcggctggagagcctgttggagaaacacaaagagctgcattaatactacattgtcaaagacaaagacgaacatgagacatgcgatatgagttttaaaaggagagaagagcaaaaaaacaatacagctatccaaggagcaagtgctgagcttgtgaaaaaacagcttctattttattaaataatagtgttcctgcagggatgtctgaagtactctgcaaggctaattaggacagatcaatgtacacttacctctccagaaggctgaaaggtgtgtagtgactatgtgtcattaaaaatttacttgaccatgggcaacagatgtccatgaaagaatgaccctggtgagtgctctaagttttcattttactcatgtcatcctcaatgcatcataaatgccatagacaccattactatcacgtaggctcatagcagctgatgtgctgtatatgcttgagagggtggtatcaattaactatattatctataaagccatacttgcaattactaccacttcacaatttatcattaacgcatttggcagatttttttttctccaaagtaacatttatttaaaggtttatcaaaattcttagaacagcatttattataatgtgatttttgataattgactaaatcagtggctcttaaaaacaccctcatctcagtcccgctcagtatacaccacagtgccatttggggaaaagaaatacatattagaaatgttcatttcagacctcgtcatggaagatcatatattaatgtaatcaggtggtacgtttacatgctcattagtaatccatcattagtccaaatgctcactattaggaataaatgtacaacgagttattcagaatacccagaaagagtatttcttatttaaacattcaggacaagctgactgaaataagtgcacaccttgaatttgaactttcaaggcacatcactaaagtcaatcagttatgtcaggacactcttctataataatctcaattataaaattcctgcctctccctaacacaggagttggagggagttccaatatctgaatctttctaattcactgtaactgcaaaaaaatcttgatgaagtgtgtatttaaatttcatgccttaatacatagcatgccactaaaaccacattagttatgctttatgctgcttaatcatacgtcaaaatctgtaaaatctgctcttgcatgctaaggtaatttaactgcaattaatcaattaagaaaaataaaatgtaataaatgccaaataatgtaacttcttttaaacagaccactatctacacatttattccccaaatacttattagctgacaccatataaggaaaacataataaaaagtagacttcactgagcctttctcccattggtagcttgctctaaacttacaaatgttttagagaattctttggcatgatctgactttccaactaaaatgtgagcaacttg

SEQ ID NO: 386385 - DNA, 2011 bp, Homo sapiens
  misc_feature (27)..(27): n is a, c, g, or t
aaggctagtagggccgggggaatcggncgaggggagatgtccgcccccagtcgtagcctcggacggtttctgagcgttggtgtttggcacgcgccaccctctcttgctttggttccgccatgccgatgtaccagtctttggtagatgagtggctggatagctacaagcaagaccaggatgcaggatttctggagcttgttaactttttcatctgatcttgtggatgtaaaggactcgggggactatcctctgacagctccaggtctatcctggaagaagttccagggcagcttctgtgagtttgtggggacattggtctgtcggtgccagtacatcctcctccatgatgacttccctatggacaacctcatctccctgctcactggcttctcagactcacaagtctgcgccttctgtcacactagcaccctggctgctatgaaactgatgacctccctggtaagagttgccctccaactgagtctgcacgaagatatcaatcagcgtcagtatgaggctgaaagaaacaaggggccagggcagagggcacctgagcggctggagagcctgttggagaaacacaaagagctgcattaatactacattgtcaaagacaaagacgaacatgagacatgcgatatgagttttaaaaggagagaagagcaaaaaaacaatacagctatccaaggagcaagtgctgagcttgtgaaaaaacagcttctattttattaaataatagtgttcctgcagggatgtctgaagtactctgcaaggctaattaggacagatcaatgtacacttacctctccagaaggctgaaaggtgtgtagtgactatgtgtcattaaaaatttacttgaccatgggcaacagatgtccatgaaagaatgaccctggtgagtgctctaagttttcattttactcatgtcatcctcaatgcatcataaatgccatagacaccattactatcacgtaggctcatagcagctgatgtgctgtatatgcttgagagggtggtatcaattaactatattatctataaagccatacttgcaattactaccacttcacaatttatcattaacgcatttggcagatttttttttctccaaagtaacatttatttaaaggtttatcaaaattcttagaacagcatttattataatgtgatttttgataattgactaaatcagtggctcttaaaaacaccctcatctcagtcccgctcagtatacaccacagtgccatttggggaaaagaaatacatattagaaatgttcatttcagacctcgtcatggaagatcatatattaatgtaatcaggtggtacgtttacatgctcattagtaatccatcattagtccaaatgctcactattaggaataaatgtacaacgagttattcagaatacccagaaagagtatttcttatttaaacattcaggacaagctgactgaaataagtgcacaccttgaatttgaactttcaaggcacatcactaaagtcaatcagttatgtcaggacactcttctataataatctcaattataaaattcctgcctctccctaacacaggagttggagggagttccaatatctgaatctttctaattcactgtaactgcaaaaaaatcttgatgaagtgtgtatttaaatttcatgccttaatacatagcatgccactaaaaccacattagttatgctttatgctgcttaatcatacgtcaaaatctgtaaaatctgctcttgcatgctaaggtaatttaactgcaattaatcaattaagaaaaataaaatgtaataaatgccaaataatgtaacttcttttaaacagaccactatctacacatttattccccaaatacttattagctgacaccatataaggaaaacataataaaaagtagacttcactgagcctttctcccattggtagcttgctctaaacttacaaatgttttagagaattctttggcatgatctgactttccaactaaaatgtgagcaacttg

SEQ ID NO: 386386 - DNA, 2020 bp, Homo sapiens
tccgaacgaccgcagcagggtcacaagggagatgtccgcccccagtcgtagcctcggacggtttctgagcgttggtgtttggcacgcgccaccctctcttgctttggttccgccatgccgatgtaccaggtaaaaccttatcacgggcgcggcgcgcctctccgtgtggagcttcccacctgcatgtaccggctctctaacgtgcaaggcaggagcggcggcccagcgcccggcgttggccacctacagtctttggtagatgagtggctggatagctacaagcaagaccaggatgcaggatttctggagcttgttaactttttcatctgatcttgtggatgtaaagtcctccatgatgacttccctatggacaacctcatctccctgctcactggcttctcagactcacaagtctgcgccttctgtcacactagcaccctggctgctatgaaactgatgacctccctggtaagagttgccctccaactgagtctgcacgaagatatcaatcagcgtcagtatgaggctgaaagaaacaaggggccagggcagagggcacctgagcggctggagagcctgttggagaaacacaaagagctgcattaatactacattgtcaaagacaaagacgaacatgagacatgcgatatgagttttaaaaggagagaagagcaaaaaaacaatacagctatccaaggagcaagtgctgagcttgtgaaaaaacagcttctattttattaaataatagtgttcctgcagggatgtctgaagtactctgcaaggctaattaggacagatcaatgtacacttacctctccagaaggctgaaaggtgtgtagtgactatgtgtcattaaaaatttacttgaccatgggcaacagatgtccatgaaagaatgaccctggtgagtgctctaagttttcattttactcatgtcatcctcaatgcatcataaatgccatagacaccattactatcacgtaggctcatagcagctgatgtgctgtatatgcttgagagggtggtatcaattaactatattatctataaagccatacttgcaattactaccacttcacaatttatcattaacgcatttggcagatttttttttctccaaagtaacatttatttaaaggtttatcaaaattcttagaacagcatttattataatgtgatttttgataattgactaaatcagtggctcttaaaaacaccctcatctcagtcccgctcagtatacaccacagtgccatttggggaaaagaaatacatattagaaatgttcatttcagacctcgtcatggaagatcatatattaatgtaatcaggtggtacgtttacatgctcattagtaatccatcattagtccaaatgctcactattaggaataaatgtacaacgagttattcagaatacccagaaagagtatttcttatttaaacattcaggacaagctgactgaaataagtgcacaccttgaatttgaactttcaaggcacatcactaaagtcaatcagttatgtcaggacactcttctataataatctcaattataaaattcctgcctctccctaacacaggagttggagggagttccaatatctgaatctttctaattcactgtaactgcaaaaaaatcttgatgaagtgtgtatttaaatttcatgccttaatacatagcatgccactaaaaccacattagttatgctttatgctgcttaatcatacgtcaaaatctgtaaaatctgctcttgcatgctaaggtaatttaactgcaattaatcaattaagaaaaataaaatgtaataaatgccaaataatgtaacttcttttaaacagaccactatctacacatttattccccaaatacttattagctgacaccatataaggaaaacataataaaaagtagacttcactgagcctttctcccattggtagcttgctctaaacttacaaatgttttagagaattctttggcatgatctgactttccaactaaaatgtgagcaacttg

SEQ ID NO: 386387 - DNA, 1627 bp, Homo sapiens
gcctcccaaagtgctgggattacaggtgtgagccatggcgcccagcccagatgccacaatttaaaagggttactttcctgggtcaagctgccttttttgggggtcattagggaaggaatggatgtgtgctctacgggttcttagaatagcaatgaaccttcataatcagactcattccttaattttgcttactttttcatgcagctgcattaatactacattgtcaaagacaaagacgaacatgagacatgcgatatgagttttaaaaggagagaagagcaaaaaaacaatacagctatccaaggagcaagtgctgagcttgtgaaaaaacagcttctattttattaaataatagtgttcctgcagggatgtctgaagtactctgcaaggctaattaggacagatcaatgtacacttacctctccagaaggctgaaaggtgtgtagtgactatgtgtcattaaaaatttacttgaccatgggcaacagatgtccatgaaagaatgaccctggtgagtgctctaagttttcattttactcatgtcatcctcaatgcatcataaatgccatagacaccattactatcacgtaggctcatagcagctgatgtgctgtatatgcttgagagggtggtatcaattaactatattatctataaagccatacttgcaattactaccacttcacaatttatcattaacgcatttggcagatttttttttctccaaagtaacatttatttaaaggtttatcaaaattcttagaacagcatttattataatgtgatttttgataattgactaaatcagtggctcttaaaaacaccctcatctcagtcccgctcagtatacaccacagtgccatttggggaaaagaaatacatattagaaatgttcatttcagacctcgtcatggaagatcatatattaatgtaatcaggtggtacgtttacatgctcattagtaatccatcattagtccaaatgctcactattaggaataaatgtacaacgagttattcagaatacccagaaagagtatttcttatttaaacattcaggacaagctgactgaaataagtgcacaccttgaatttgaactttcaaggcacatcactaaagtcaatcagttatgtcaggacactcttctataataatctcaattataaaattcctgcctctccctaacacaggagttggagggagttccaatatctgaatctttctaattcactgtaactgcaaaaaaatcttgatgaagtgtgtatttaaatttcatgccttaatacatagcatgccactaaaaccacattagttatgctttatgctgcttaatcatacgtcaaaatctgtaaaatctgctcttgcatgctaaggtaatttaactgcaattaatcaattaagaaaaataaaatgtaataaatgccaaataatgtaacttcttttaaacagaccactatctacacatttattccccaaatacttattagctgacaccatataaggaaaacataataaaaagtagacttcactgagcctttctcccattggtagcttgctctaaacttacaaatgttttagagaattctttggcatgatctgactttccaactaaaatgtgagcaacttg

SEQ ID NO: 386388 - DNA, 757 bp, Homo sapiens
tccgaacgaccgcagcagggtcacaagggagatgtccgcccccagtcgtagcctcggacggtttctgagcgttggtgtttggcacgcgccaccctctcttgctttggttccgccatgccgatgtaccaggtaaaaccttatcacgggcgcggcgcgcctctccgtgtggagcttcccacctgcatgtaccggctctctaacgtgcaaggcaggagcggcggcccagcgcccggcgttggccacctacagtctttggtagatgagtggctggatagctacaagcaagaccaggatgcaggatttctggagcttgttaactttttcatctgatcttgtggatgtaaagagagattgccttatagcagatacacagttggatgttggcagaccgttgaccagggggtcttttgattccccacctaagctctttgcacagtgtttccttgctcatattcaggtatatctgtaaatgatcacagcatcctgttattttcctcgtaagcacctcatatccttcattctttaggcactgtgagccctgagatgttcaagaagatgtccaactcagagatcatccagcacctaacagagcgtttaatgaggtggaagaagatgaccaggatcctcttacccctcttatttcaaaacacaatgcctattatccccttctttttgattctgtgaaatagggtagcttttagaaggtggagttcagtctcttgggggtaaaagagatctgaatatgcctctcaaactg

SEQ ID NO: 386389 - DNA, 2126 bp, Homo sapiens
tccgaacgaccgcagcagggtcacaagggagatgtccgcccccagtcgtagcctcggacggtttctgagcgttggtgtttggcacgcgccaccctctcttgctttggttccgccatgccgatgtaccaggtaaaaccttatcacgggcgcggcgcgcctctccgtgtggagcttcccacctgcatgtaccggctctctaacgtgcaaggcaggagcggcggcccagcgcccggcgttggccacctacagtctttggtagatgagtggctggatagctacaagcaagaccaggatgcaggatttctggagcttgttaactttttcatctgatcttgtggatgtaaaggactcgggggactatcctctgacagctccaggtctatcctggaagaagttccagggcagcttctgtgagtttgtggggacattggtctgtcggtgccagtacatcctcctccatgatgacttccctatggacaacctcatctccctgctcactggcttctcagactcacaagtctgcgccttctgtcacactagcaccctggctgctatgaaactgatgacctccctggtaagagttgccctccaactgagtctgcacgaagatatcaatcagcgtcagtatgaggctgaaagaaacaaggggccagggcagagggcacctgagcggctggagagcctgttggagaaacacaaagagctgcattaatactacattgtcaaagacaaagacgaacatgagacatgcgatatgagttttaaaaggagagaagagcaaaaaaacaatacagctatccaaggagcaagtgctgagcttgtgaaaaaacagcttctattttattaaataatagtgttcctgcagggatgtctgaagtactctgcaaggctaattaggacagatcaatgtacacttacctctccagaaggctgaaaggtgtgtagtgactatgtgtcattaaaaatttacttgaccatgggcaacagatgtccatgaaagaatgaccctggtgagtgctctaagttttcattttactcatgtcatcctcaatgcatcataaatgccatagacaccattactatcacgtaggctcatagcagctgatgtgctgtatatgcttgagagggtggtatcaattaactatattatctataaagccatacttgcaattactaccacttcacaatttatcattaacgcatttggcagatttttttttctccaaagtaacatttatttaaaggtttatcaaaattcttagaacagcatttattataatgtgatttttgataattgactaaatcagtggctcttaaaaacaccctcatctcagtcccgctcagtatacaccacagtgccatttggggaaaagaaatacatattagaaatgttcatttcagacctcgtcatggaagatcatatattaatgtaatcaggtggtacgtttacatgctcattagtaatccatcattagtccaaatgctcactattaggaataaatgtacaacgagttattcagaatacccagaaagagtatttcttatttaaacattcaggacaagctgactgaaataagtgcacaccttgaatttgaactttcaaggcacatcactaaagtcaatcagttatgtcaggacactcttctataataatctcaattataaaattcctgcctctccctaacacaggagttggagggagttccaatatctgaatctttctaattcactgtaactgcaaaaaaatcttgatgaagtgtgtatttaaatttcatgccttaatacatagcatgccactaaaaccacattagttatgctttatgctgcttaatcatacgtcaaaatctgtaaaatctgctcttgcatgctaaggtaatttaactgcaattaatcaattaagaaaaataaaatgtaataaatgccaaataatgtaacttcttttaaacagaccactatctacacatttattccccaaatacttattagctgacaccatataaggaaaacataataaaaagtagacttcactgagcctttctcccattggtagcttgctctaaacttacaaatgttttagagaattctttggcatgatctgactttccaactaaaatgtgagcaacttg

SEQ ID NO: 386390 - DNA, 937 bp, Homo sapiens
aaggagtgaggagactggtttctgactcgcttcttgcaggtgtttcaagctggtagggaggggagataggctcctccctttatttcttctgctgcatgacagtttctcagctttaattattagaacacattgctaaaggaaatggatgacagattttttttaatggagagagaatgagcgccataggagaaactttccaaaattagatgaaaaacaggacttctggtctttgagagaacttttgatttaaaggaagagagtgaatccctgtgtcctgggggccatcttccttgtttttgtggatgcaccggagcagttgtgtgtcccctgtgttacataaggtgtgctgtgtttattttttaatttttaaaatattttaaaaatttttgtaaggatgaagtctctctatgttgcccacgctggtcttgaactcctggcctcaagcgatcctcctgccttagcctcccaaagtgttgggactatgggcatgagccactgcactgggccgccatgctgtatttaggattaggcatccagagttctcagcataagagactagcaggtgaatagctaacgtttacttggtgcctgctatgtgcaagcaagtctctgtgcctctttggaccaaaagtacgctggtatttgggatagcacaggagtggggaagttgggggccaggtctagctgcaatagggtccatgtggcaggagctgcttggagggtgatgacttgagttggtgccagatggggcagggtcacccgtgcacccgtggtagcacttcctggatgatataggagaggcacacaactcgctgcccgcatccttaggctgcccaccctgcttccttgagaactaccacaggcacacaccagggagccaacatttaaaaatgtttaaaaggtagagatttcttaccaaactcataccaaaaaaaga

SEQ ID NO: 386391 - DNA, 288 bp, Homo sapiens
aatggtgaaatagaagtccaattacctggggaaacttcatcttaaccctctggaattttcagtctaacctaaatattgatactacacctgcagcagcatttagtttagcatgtagtgaaaaagtaagtctaaaaaatattttcataatctttggttcctaaaattgttttaaaagagatgcagtgacatatgtctggagtttgcttatggccaataggttaatgcttctagcttctatgcttattgcaaattttaattatgtgaatatgcaattttcacttatatttg

SEQ ID NO: 386392 - DNA, 5504 bp, Homo sapiens
cggggagtgagcgcctgtctctttaaatgccacgggctgcgctcccgcccgggagcccggagccggatctacaatcccgtccctccagctccggtgcttgttgctcgcccggcccaagcgggagctgttgccgccaggctgcgaggctgccgtcctctcctcctcgcgccccacctcccccgagagctggctgaggaggggcagcagccccagctggcgggaggaagcgcggtgtgaacagggattgccccccgccttcaagtatcggggcgctacgcagccgcgggggaaagacatgcccctagtctgcccgctgcgctgccctctgcccagcctcgctgccgcccgcgccgggagaggagggactgccgagcctacaccttcaaactcgccctagaagtctcggggcgcggcagggagcccttccccaggccccacggccttcacctctccgcgggtagcctcagcccctgtccggggacctgtgcaaatgaccctggagttggtttcgctttctccccttgcggcggtgtgaacgtgtgtccgcagcgtgatgggcaaccaggtggagaaattgacccacctaagttacaaggaagttcccacggccgacccgactggcgtggaccgggacgacgggccccgcattggggtctcctacattttctccaatgacgatgaggacgtggagccgcagccgccgcctcaggggccagatggcggcggcttgcccgacggtggggacgggccgccgccgccccagccgcagccctacgatccgcggctgcacgaggtggaatgctccgtgttctaccgggacgaatgcatctaccagaagagcttcgcgccgggctcggcggcgctgagtacctacacgcccgagaacctgctcaacaagtgcaagccgggcgatctggtggagttcgtgtcgcaggctcagtacccgcactgggccgtatatgtgggtaacttccaggtggtgcacctgcaccggctggaggtgattaacagcttcctgactgacgccagccagggccgtcgcggccgcgtggtcaacgatctgtaccgctacaagccgctaagctccagcgccgtggtgcgcaacgcgctggcgcacgtgggtgccaaggagcgcgagctgagctggcgcaactcggagagtttcgccgcctggtgccgctacggcaagcgcgagttcaagatcggcggcgagctgcgcatcggcaagcagccctaccggctgcagattcagctgtcggcgcagcgcagccacacgctcgagttccagagtctagaggacctgatcatggagaagcgacgcaacgaccagatcgggcgcgcggccgtgctgcaggagctcgccacgcacctgcacccggcggagccggaggagggcgacagcaacgtggcgcggactacgccgcctcccgggcgcccccctgcgcccagctccgaggaggaggacggagaggcagtggcacactgatgggcgagctgagcgcagagctgcgaaggggaactgtttgcagtagcagccgctgctccctttctccctctcttcctccctcttttgccactgtctgggccccatctgggattcctgggccctttggaaaagagttggtgaaatgcgcagccggctgtggacgggggaggaggaaggggacagagggagcaggtaggaaacactttagttgggggtggggggcgtctccctctggccccctgtctgtcttcctctccgcggtggagcaaactgtggacttgcctggcacttaaaccttggtagatctgggtttataatcggccattcttaagcacgtggggttgggggaaagttcggagtacccattcctgccgttgcttcctatcctgggcttggaagaatcctggtagaaaggccagagtgggtttgtggagtcgccactgcgggaccagcacgaaagctgcttgtctgctttggcggagctgagctgtgtatgggatccaggaggctggggtgatttattttatgggattcctggagcgcagggctggtgaatccatgacaaggtccgggagcagcagaccaaaaccacagcagcctcctattaagtgtaacaaatagttaagcaaactcgggctacaaacaaagactttgctacctccctcctccacaacccccaagtaattagccttctggagctggctcttagctgaggctcctgctacctcctgctccacccgccccttcctaggttacaagtaaatcattgtcaagggccagccaggggaaggtttcaattaaggttctgttctgctgcctttgtttctcccctgctgttgtaggcacttacagctgcgttgttatgaaaggagggaatagccctttgtgtctttgatctaattaaacctgcttggctgtgtttatccgcagggcaggtcacagatagggttggctgtgccactccataaagtatctattgtggaagcagccaaaaagggctgctgtggcaggaattggttaatttctccttccacttcccttcctgaatagtgaagggagcccttttaaaacaaggctttggtggtaatcctgtgatttttttttctcccccatcccctcactggcccatccctctcaccctcacttttgttctgctggtgggtaaaatcttaggctgaacacatatttcaatggtaagatacttattttgctatccacacttgatgcaattgaattcaaggtgcaaagtcttgtactgaagcagtctccttgttgcttggagaacacctccttcagagccctttgttaaataagaggggcgacgttgatcatagatgccacctggttagcaccgaatctgactttggtgacagtcctaaagcacagttggtgattgtgagatctgttagcggcaggctgagcagatactacttggttttgcttggtatgagatactactgtttgcttagtatgagattttttccagcctgtctcttaaactcctgtgacatcttcaatgatatgtgccctcagttgcagcatagcttctctgctgcctattgccattgctgtctcaaaagttgagtgaattttgaggcgtcttttttttttttcctctcttgggagtcgttgtaaactactgtgtacaagtcattttgtgatatgattctgaacagttggaatagaatcatagttaagtggtacagccatggctatcgtcaggcctgttgcctggagatctctaagttaaggcaacaagacttaaagaattttctaatacacttgtttcacacatggacgttgaggccatagtctttaaaagcttggacctttgtagcacctcaacatgaaagggcattagctatgtttcctgtttttacagtgatcaccaaacagatcttgccactttgattgttaaaaatgaaccacattctagccctggtctgggactttggagggagatgaatttcttgttggaaatgtaaatctagtgtccatatttaatactctcacagctttgtgtttattctctttgctcatggaatagcagaacaagataaacatgggttaagacatttaggagaacctgctgtatctaacccagttggattttctttcatgcttaacacagtagtgaaaatagaaggtaggccgggcacagtggctcatgcctgtaatcccagcactttgggaggctgaggcaggtagatcacctgaagttaggagttcgagaccagcctggccaacatggcgaaaccctgtctctaccacaaatacagaaaattagctgggcgtggtggcaggcgcctgtaatgcctgctacttgggagcctgaggcagaagaattgcttgaagctgggaagcagaggttgcagtgagccgagatcgcaccactgcactccagcctgggcagcagagcaagtagtaataaccaccgtgtagacaagtgggagggaagaatagaatggcactgtccagctctgggctagccagatcaactcccccacccgtcttcttcctctgtcccagaatggaaaatgatgtatggtcagtcacgctgaagtatagcagcgactgtgttaagagagagcagtgactctctcttctagagaagaggttttcaataacagggcttggaaatgaactagaataggaaatagatcttttcagatgctgctttcccatgtaatacaagcgtttctacagggtaccagaggtgtgaaatatgtgacacttaagaacagtgatttttattgggaattttcttagggttattacacttaaagcaacaaccaactagtaacagctccaggaaaggggaatgaatcaactcttggttctttcctgaagacggcagtgttgtggataagtgagtttttaatgccctggcagtggctacatttgacactttagaaaaaataaacatatttaataatttttgtttctccttaggaataagactgtagaactgttttgtactgtgaattacggatgctctttgaaggaaagaaatatcgattctaatgttcttcagaagttctggcagggataagcaggacatcgactggaacgtatgctaaatgaaagcagacaaatttctattttcttacctgagcaaatattttattgaaactgcttatgtatgtcaaaggagcccacaacttcagctacacaactttttgtattgaaagaactcatactttttgtagcttttatttcacatttaatttaaagtgacttttagcactaaaatgcctagaagattttactccagacctataaggaaatgtttagtttttatgaaaaatgacaagtcgatggttaaacttctcatgtctttggtgctttggccctaatagcactggacaacaccacgaccacatggaaacatatttttggaagcaaaactttaattttatataacgtatgctatggagagctaagacaatttaaggactacttgttttctattttttttcttaataaaatggaatccactgtgttgaagactcttgatatcatgtgcttgtctaaccattttttgttttataaattagaataaaatatagttgtgataatggtcatcgaatggatttgtttggaaagctacatcttatttgtgaaatgttttttaaatcagagtaactatcaactgattcagctttttgttgttttgttcttggctataatacttgtgactcatgaagaattatgttgacaaacaggataaattccacatgcattttatttcccagtgagttgtataaactttatttttgttgaaggttgtatgttaaatcaatgttacattcttatatcacttcttgagaaggaagttccgatttgaaattgtatcatttccttcaaaatgaagggcagtgcttagttaaataaaagattgatgatatcttttaagccatttcctcttcactatgtcttattaaaataaaacctgtcaagttcttttcaaaagatgctatgagcgtttccaataaaccatctattagagttcactgga

SEQ ID NO: 386393 - DNA, 5400 bp, Homo sapiens
cggggagtgagcgcctgtctctttaaatgccacgggctgcgctcccgcccgggagcccggagccggatctacaatcccgtccctccagctccggtgcttgttgctcgcccggcccaagcgggagctgttgccgccaggctgcgaggctgccgtcctctcctcctcgcgccccacctcccccgagagctggctgaggaggggcagcagccccagctggcgggaggaagcgcggtgtgaacagggattgccccccgccttcaagtatcggggcgctacgcagccgcgggggaaagacatgcccctagtctgcccgctgcgctgccctctgcccagcctcgctgccgcccgcgccgggagaggagggactgccgagcctacaccttcaaactcgccctagaagtctcggggcgcggcagggagcccttccccaggccccacggccttcacctctccgcgggtagcctcagcccctgtccggggacctgtgcaaatgaccctggagttggtttcgctttctccccttgcggcggtgtgaacgtgtgtccgcagcgtgatgggcaaccaggtggagaaattgacccacctaagttacaaggaagttcccacggccgacccgactggcgtggaccgggacgacgggccccgcattggggtctcctacattttctccaatgacgatgaggacgtggagccgcagccgccgcctcaggggccagatggcggcggcttgcccgacggtggggacgggccgccgccgccccagccgcagccctacgatccgcggctgcacgaggtggaatgctccgtgttctaccgggacgaatgcatctaccagaagagcttcgcgccgggctcggcggcgctgagtacctacacgcccgagaacctgctcaacaagtgcaagccgggcgatctggtggagttcgtgtcgcaggctcagtacccgcactgggccgtatatgtgggtaacttccaggtggtgcacctgcaccggctggaggtgattaacagcttcctgactgacgccagccagggccgtcgcggccgcgtggtcaacgatctgtaccgctacaagccgctaagctccagcgccgtggtgcgcaacgcgctggcgcacgtgggtgccaaggagcgcgagctgagctggcgcaactcggagagtttcgccgcctggtgccgctacggcaagcgcgagttcaagatcggcggcgagctgcgcatcggcaagcagccctaccggctgcagattcagctgtcggcgcagcgcagccacacgctcgagttccagagtctagaggacctgatcatggagaagcgacgcaacgaccagatcgggcgcgcggccgtgctgcaggagctcgccacgcacctgcacccggcggagccggaggagggcgacagcaacgtggcgcggactacgccgcctcccgggcgcccccctgcgcccagctccgaggaggaggacggagaggcagtggcacactgatgggcgagctgagcgcagagctgcgaaggggaactgtttgcagtagcagccgctgctccctttctccctctcttcctccctcttttgccactgtctgggccccatctgggattcctgggccctttggaaaagagttggtgaaatgcgcagccggctgtggacgggggaggaggaaggggacagagggagcaggtaggaaacactttagttgggggtggggggcgtctccctctggccccctgtctgtcttcctctccgcggtggagcaaactgtggacttgcctggcacttaaaccttggtagatctgggtttataatcggccattcttaagcacgtggggttgggggaaagttcggagtacccattcctgccgttgcttcctatcctgggcttggaagaatcctggtagaaaggccagagtgggtttgtggagtcgccactgcgggaccagcacgaaagctgcttgtctgctttggcggagctgagctgtgtatgggatccaggaggctggggtgatttattttatgggattcctggagcgcagggctggtgaatccatgacaaggtccgggagcagcagaccaaaaccacagcagcctcctattaagtgtaacaaatagttaagcaaactcgggctacaaacaaagactttgctacctccctcctccacaacccccaagtaattagccttctggagctggctcttagctgaggctcctgctacctcctgctccacccgccccttcctaggttacaagtaaatcattgtcaagggccagccaggggaaggtttcaattaaggttctgttctgctgcctttgtttctcccctgctgttgtaggcacttacagctgcgttgttatgaaaggagggaatagccctttgtgtctttgatctaattaaacctgcttggctgtgtttatccgcagggcaggtcacagatagggttggctgtgccactccataaagtatctattgtggaagcagccaaaaagggctgctgtggcaggaattggttaatttctccttccacttcccttcctgaatagtgaagggagcccttttaaaacaaggctttggtggtaatcctgtgatttttttttctcccccatcccctcactggcccatccctctcaccctcacttttgttctgctggtgggtaaaatcttaggctgaacacatatttcaatggtaagatacttattttgctatccacacttgatgcaattgaattcaaggtgcaaagtcttgtactgaagcagtctccttgttgcttggagaacacctccttcagagccctttgttaaataagaggggcgacgttgatcatagatgccacctggttagcaccgaatctgactttggtgacagtcctaaagcacagttggtgattgtgagatctgttagcggcaggctgagcagatactacttggttttgcttggtatgagatactactgtttgcttagtatgagattttttccagcctgtctcttaaactcctgtgacatcttcaatgatatgtgccctcagttgcagcatagcttctctgctgcctattgccattgctgtctcaaaagttgagtgaattttgaggcgtcttttttttttttcctctcttgggagtcgttgtaaactactgtgtacaagtcattttgtgatatgattctgaacagttggaatagaatcatagttaagtggtacagccatggctatcgtcaggcctgttgcctggagatctctaagttaaggcaacaagacttaaagaattttctaatacacttgtttcacacatggacgttgaggccatagtctttaaaagcttggacctttgtagcacctcaacatgaaagggcattagctatgtttcctgtttttacagtgatcaccaaacagatcttgccactttgattgttaaaaatgaaccacattctagccctggtctgggactttggagggagatgaatttcttgttggaaatgtaaatctagtgtccatatttaatactctcacagctttgtgtttattctctttgctcatggaatagcagaacaagataaacatgggttaagacatttaggagaacctgctgtatctaacccagttggattttctttcatgcttaacacagtagtgaaaatagaaggtaggccgggcacagtggctcatgcctgtaatcccagcactttgggaggctgaggcaggtagatcacctgaagttaggagttcgagaccagcctggccaacatggcgaaaccctgtctctaccacaaatacagaaaattagctgggcgtggtggcaggcgcctgtaatgcctgctacttgggagcctgaggcagaagaattgcttgaagctgggaagcagaggttgcagtgagccgagatcgcaccactgcactccagcctgggcagcagagcaagtagtaataaccaccgtgtagacaagtgggagggaagaatagaatggcactgtccagctctgggctagccagatcaactcccccacccgtcttcttcctctgtcccagaatggaaaatgatgtatggtcagtcacgctgaagtatagcagcgactgtgttaagagagagcagtgactctctcttctagagaagaggttttcaataacagggcttggaaatgaactagaataggaaatagatcttttcagatgctgctttcccatgtaatacaagcgtttctacagggtaccagaggtgtgaaatatgtgacacttaagaacagtgatttttattgggaattttcttagggttattacacttaaagcaacaaccaactagtaacagctccaggaaaggggaatgaatcaactcttggttctttcctgaagacggcagtgttgtggataagtgagtttttaatgccctggcagtggctacatttgacactttagaaaaaataaacatatttaataatttttgtttctccttaggaataagactgtagaactgttttgtactgtgaattacggatgctctttgaaggaaagaaatatcgattctaatgttcttcagaagttctggcagggataagcaggacatcgactggaacgtatgctaaatgaaagcagacaaatttctattttcttacctgagcaaatattttattgaaactgcttatgtatgtcaaaggagcccacaacttcagctacacaactttttgtattgaaagaactcatactttttgtagcttttatttcacatttaatttaaagtgacttttagcactaaaatgcctagaagattttactccagacctataaggaaatgtttagtttttatgaaaaatgacaagtcgatggttaaacttctcatgtctttggtgctttggccctaatagcactggacaacaccacgaccacatggaaacatatttttggaagcaaaactttaattttatataacgtatgctatggagagctaagacaatttaaggactacttgttttctattttttttcttaataaaatggaatccactgtgttgaagactcttgatatcatgtgcttgtctaaccattttttgttttataaattagaataaaatatagttgtgataatggtcatcgaatggatttgtttggaaagctacatcttatttgtgaaatgttttttaaatcagagtaactatcaactgattcagctttttgttgttttgttcttggctataatacttgtgactcatgaagaattatgttgacaaacaggataaattccacatgcattttatttcccagtgagttgtataaactttatttttgttgaaggttgtatgttaaatcaatgttacattcttatatcacttcttgagaaggaagttccgatttgaaattgtatcatttccttcaaaatgaagggcagtgcttagttaaataaaagattgatgatatctttta

SEQ ID NO: 386394 - DNA, 3289 bp, Homo sapiens
cgtccggacagcttgatctagatgagcagagctgctgagtagtagatttctagtttctaaacaacaataagtctgcccgcagatagcctcttagcagagccaaaagccagcagagagaagactcagcattgcttggagtaagttgcgtgcgatgggcgcgcctcgatctaataacagctgcttggctgtgtttatccgcagggcaggtcacagatagggttggctgtgccactccataaagtatctattgtggaagcagccaaaaagggctgctgtggcaggaattggttaatttctccttccacttcccttcctgaatagtgaagggagcccttttaaaacaaggctttggtggtaatcctgtgatttttttttctcccccatcccctcactggcccatccctctcaccctcacttttgttctgctggtgggtaaaatcttaggctgaacacatatttcaatggtaagatacttattttgctatccacacttgatgcaattgaattcaaggtgcaaagtcttgtactgaagcagtctccttgttgcttggagaacacctccttcagagccctttgttaaataagaggggcgacgttgatcatagatgccacctggttagcaccgaatctgactttggtgacagtcctaaagcacagttggtgattgtgagatctgttagcggcaggctgagcagatactacttggttttgcttggtatgagatactactgtttgcttagtatgagattttttccagcctgtctcttaaactcctgtgacatcttcaatgatatgtgccctcagttgcagcatagcttctctgctgcctattgccattgctgtctcaaaagttgagtgaattttgaggcgtcttttttttttttcctctcttgggagtcgttgtaaactactgtgtacaagtcattttgtgatatgattctgaacagttggaatagaatcatagttaagtggtacagccatggctatcgtcaggcctgttgcctggagatctctaagttaaggcaacaagacttaaagaattttctaatacacttgtttcacacatggacgttgaggccatagtctttaaaagcttggacctttgtagcacctcaacatgaaagggcattagctatgtttcctgtttttacagtgatcaccaaacagatcttgccactttgattgttaaaaatgaaccacattctagccctggtctgggactttggagggagatgaatttcttgttggaaatgtaaatctagtgtccatatttaatactctcacagctttgtgtttattctctttgctcatggaatagcagaacaagataaacatgggttaagacatttaggagaacctgctgtatctaacccagttggattttctttcatgcttaacacagtagtgaaaatagaaggtaggccgggcacagtggctcatgcctgtaatcccagcactttgggaggctgaggcaggtagatcacctgaagttaggagttcgagaccagcctggccaacatggcgaaaccctgtctctaccacaaatacagaaaattagctgggcgtggtggcaggcgcctgtaatgcctgctacttgggagcctgaggcagaagaattgcttgaagctgggaagcagaggttgcagtgagccgagatcgcaccactgcactccagcctgggcagcagagcaagtagtaataaccaccgtgtagacaagtgggagggaagaatagaatggcactgtccagctctgggctagccagatcaactcccccacccgtcttcttcctctgtcccagaatggaaaatgatgtatggtcagtcacgctgaagtatagcagcgactgtgttaagagagagcagtgactctctcttctagagaagaggttttcaataacagggcttggaaatgaactagaataggaaatagatcttttcagatgctgctttcccatgtaatacaagcgtttctacagggtaccagaggtgtgaaatatgtgacacttaagaacagtgatttttattgggaattttcttagggttattacacttaaagcaacaaccaactagtaacagctccaggaaaggggaatgaatcaactcttggttctttcctgaagacggcagtgttgtggataagtgagtttttaatgccctggcagtggctacatttgacactttagaaaaaataaacatatttaataatttttgtttctccttaggaataagactgtagaactgttttgtactgtgaattacggatgctctttgaaggaaagaaatatcgattctaatgttcttcagaagttctggcagggataagcaggacatcgactggaacgtatgctaaatgaaagcagacaaatttctattttcttacctgagcaaatattttattgaaactgcttatgtatgtcaaaggagcccacaacttcagctacacaactttttgtattgaaagaactcatactttttgtagcttttatttcacatttaatttaaagtgacttttagcactaaaatgcctagaagattttactccagacctataaggaaatgtttagtttttatgaaaaatgacaagtcgatggttaaacttctcatgtctttggtgctttggccctaatagcactggacaacaccacgaccacatggaaacatatttttggaagcaaaactttaattttatataacgtatgctatggagagctaagacaatttaaggactacttgttttctattttttttcttaataaaatggaatccactgtgttgaagactcttgatatcatgtgcttgtctaaccattttttgttttataaattagaataaaatatagttgtgataatggtcatcgaatggatttgtttggaaagctacatcttatttgtgaaatgttttttaaatcagagtaactatcaactgattcagctttttgttgttttgttcttggctataatacttgtgactcatgaagaattatgttgacaaacaggataaattccacatgcattttatttcccagtgagttgtataaactttatttttgttgaaggttgtatgttaaatcaatgttacattcttatatcacttcttgagaaggaagttccgatttgaaattgtatcatttccttcaaaatgaagggcagtgcttagttaaataaaagattgatgatatcttttaagccatttcctcttcactatgtcttattaaaataaaacctgtcaagttcttttcaaaagatgctatgagcgtttccaataaaccatctattagagttcactgga

SEQ ID NO: 386395 - DNA, 2744 bp, Homo sapiens
cggggagtgagcgcctgtctctttaaatgccacgggctgcgctcccgcccgggagcccggagccggatctacaatcccgtccctccagctccggtgcttgttgctcgcccggcccaagcgggagctgttgccgccaggctgcgaggctgccgtcctctcctcctcgcgccccacctcccccgagagctggctgaggaggggcagcagccccagctggcgggaggaagcgcggtgtgaacagggattgccccccgccttcaagtatcggggcgctacgcagccgcgggggaaagacatgcccctagtctgcccgctgcgctgccctctgcccagcctcgctgccgcccgcgccgggagaggagggactgccgagcctacaccttcaaactcgccctagaagtctcggggcgcggcagggagcccttccccaggccccacggccttcacctctccgcgggtagcctcagcccctgtccggggacctgtgcaaatgaccctggagttggtttcgctttctccccttgcggcggtgtgaacgtgtgtccgcagcgtgatgggcaaccaggtggagaaattgacccacctaagttacaaggaagttcccacggccgacccgactggcgtggaccgggacgacgggccccgcattggggtctcctacattttctccaatgacgatgaggacgtggagccgcagccgccgcctcaggggccagatggcggcggcttgcccgacggtggggacgggccgccgccgccccagccgcagccctacgatccgcggctgcacgaggtggaatgctccgtgttctaccgggacgaatgcatctaccagaagagcttcgcgccgggctcggcggcgctgagtacctacacgcccgagaacctgctcaacaagtgcaagccgggcgatctggtggagttcgtgtcgcaggctcagtacccgcactgggccgtatatgtgggtaacttccaggtggtgcacctgcaccggctggaggtgattaacagcttcctgactgacgccagccagggccgtcgcggccgcgtggtcaacgatctgtaccgctacaagccgctaagctccagcgccgtggtgcgcaacgcgctggcgcacgtgggtgccaaggagcgcgagctgagctggcgcaactcggagagtttcgccgcctggtgccgctacggcaagcgcgagttcaagatcggcggcgagctgcgcatcggcaagcagccctaccggctgcagattcagctgtcggcgcagcgcagccacacgctcgagttccagagtctagaggacctgatcatggagaagcgacgcaacgaccagatcgggcgcgcggccgtgctgcaggagctcgccacgcacctgcacccggcggagccggaggagggcgacagcaacgtggcgcggactacgccgcctcccgggcgcccccctgcgcccagctccgaggaggaggacggagaggcagtggcacactgatgggcgagctgagcgcagagctgcgaaggggaactgtttgcagtagcagccgctgctccctttctccctctcttcctccctcttttgccactgtctgggccccatctgggattcctgggccctttggaaaagagttggtgaaatgcgcagccggctgtggacgggggaggaggaaggggacagagggagcaggaataagactgtagaactgttttgtactgtgaattacggatgctctttgaaggaaagaaatatcgattctaatgttcttcagaagttctggcagggataagcaggacatcgactggaacgtatgctaaatgaaagcagacaaatttctattttcttacctgagcaaatattttattgaaactgcttatgtatgtcaaaggagcccacaacttcagctacacaactttttgtattgaaagaactcatactttttgtagcttttatttcacatttaatttaaagtgacttttagcactaaaatgcctagaagattttactccagacctataaggaaatgtttagtttttatgaaaaatgacaagtcgatggttaaacttctcatgtctttggtgctttggccctaatagcactggacaacaccacgaccacatggaaacatatttttggaagcaaaactttaattttatataacgtatgctatggagagctaagacaatttaaggactacttgttttctattttttttcttaataaaatggaatccactgtgttgaagactcttgatatcatgtgcttgtctaaccattttttgttttataaattagaataaaatatagttgtgataatggtcatcgaatggatttgtttggaaagctacatcttatttgtgaaatgttttttaaatcagagtaactatcaactgattcagctttttgttgttttgttcttggctataatacttgtgactcatgaagaattatgttgacaaacaggataaattccacatgcattttatttcccagtgagttgtataaactttatttttgttgaaggttgtatgttaaatcaatgttacattcttatatcacttcttgagaaggaagttccgatttgaaattgtatcatttccttcaaaatgaagggcagtgcttagttaaataaaagattgatgatatcttttaagccatttcctcttcactatgtcttattaaaataaaacctgtcaagttcttttcaaaagatgctatgagcgtttccaataaaccatctattagagttcactgga

SEQ ID NO: 386396 - DNA, 1523 bp, Homo sapiens
cggggagtgagcgcctgtctctttaaatgccacgggctgcgctcccgcccgggagcccggagccggatctacaatcccgtccctccagctccggtgcttgttgctcgcccggcccaagcgggagctgttgccgccaggctgcgaggctgccgtcctctcctcctcgcgccccacctcccccgagagctggctgaggaggggcagcagccccagctggcgggaggaagcgcggtgtgaacagggattgccccccgccttcaagtatcggggcgctacgcagccgcgggggaaagacatgcccctagtctgcccgctgcgctgccctctgcccagcctcgctgccgcccgcgccgggagaggagggactgccgagcctacaccttcaaactcgccctagaagtctcggggcgcggcagggagcccttccccaggccccacggccttcacctctccgcgggaataagactgtagaactgttttgtactgtgaattacggatgctctttgaaggaaagaaatatcgattctaatgttcttcagaagttctggcagggataagcaggacatcgactggaacgtatgctaaatgaaagcagacaaatttctattttcttacctgagcaaatattttattgaaactgcttatgtatgtcaaaggagcccacaacttcagctacacaactttttgtattgaaagaactcatactttttgtagcttttatttcacatttaatttaaagtgacttttagcactaaaatgcctagaagattttactccagacctataaggaaatgtttagtttttatgaaaaatgacaagtcgatggttaaacttctcatgtctttggtgctttggccctaatagcactggacaacaccacgaccacatggaaacatatttttggaagcaaaactttaattttatataacgtatgctatggagagctaagacaatttaaggactacttgttttctattttttttcttaataaaatggaatccactgtgttgaagactcttgatatcatgtgcttgtctaaccattttttgttttataaattagaataaaatatagttgtgataatggtcatcgaatggatttgtttggaaagctacatcttatttgtgaaatgttttttaaatcagagtaactatcaactgattcagctttttgttgttttgttcttggctataatacttgtgactcatgaagaattatgttgacaaacaggataaattccacatgcattttatttcccagtgagttgtataaactttatttttgttgaaggttgtatgttaaatcaatgttacattcttatatcacttcttgagaaggaagttccgatttgaaattgtatcatttccttcaaaatgaagggcagtgcttagttaaataaaagattgatgatatcttttaagccatttcctcttcactatgtcttattaaaataaaacctgtcaagttcttttcaaaagatgctatgagcgtttccaataaaccatctattagagttcactgga

SEQ ID NO: 386397 - DNA, 3569 bp, Homo sapiens
cggggagtgagcgcctgtctctttaaatgccacgggctgcgctcccgcccgggagcccggagccggatctacaatcccgtccctccagctccggtgcttgttgctcgcccggcccaagcgggagctgttgccgccaggctgcgaggctgccgtcctctcctcctcgcgccccacctcccccgagagctggctgaggaggggcagcagccccagctggcgggaggaagcgcggtgtgaacagggattgccccccgccttcaagtatcggggcgctacgcagccgcgggggaaagacatgcccctagtctgcccgctgcgctgccctctgcccagcctcgctgccgcccgcgccgggagaggagggactgccgagcctacaccttcaaactcgccctagaagtctcggggcgcggcagggagcccttccccaggccccacggccttcacctctccgcgggtagcctcagcccctgtccggggacctgtgcaaatgaccctggagttggtttcgctttctccccttgcggcggtgtgaacgtgtgtccgcagcgtgatgggcaaccaggtggagaaattgacccacctaagttacaaggaagttcccacggccgacccgactggcgtggaccgggacgacgggccccgcattggggtctcctacattttctccaatgacgatgaggacgtggagccgcagccgccgcctcaggggccagatggcggcggcttgcccgacggtggggacgggccgccgccgccccagccgcagccctacgatccgcggctgcacgaggtggaatgctccgtgttctaccgggacgaatgcatctaccagaagagcttcgcgccgggctcggcggcgctgagtacctacacgcccgagaacctgctcaacaagtgcaagccgggcgatctggtggagttcgtgtcgcaggctcagtacccgcactgggccgtatatgtgggtaacttccaggtggtgcacctgcaccggctggaggtgattaacagcttcctgactgacgccagccagggccgtcgcggccgcgtggtcaacgatctgtaccgctacaagccgctaagctccagcgccgtggtgcgcaacgcgctggcgcacgtgggtgccaaggagcgcgagctgagctggcgcaactcggagagtttcgccgcctggtgccgctacggcaagcgcgagttcaagatcggcggcgagctgcgcatcggcaagcagccctaccggctgcagattcagctgtcggcgcagcgcagccacacgctcgagttccagagtctagaggacctgatcatggagaagcgacgcaacgaccagatcgggcgcgcggccgtgctgcaggagctcgccacgcacctgcacccggcggagccggaggagggcgacagcaacgtggcgcggactacgccgcctcccgggcgcccccctgcgcccagctccgaggaggaggacggagaggcagtggcacactgatgggcgagctgagcgcagagctgcgaaggggaactgtttgcagtagcagccgctgctccctttctccctctcttcctccctcttttgccactgtctgggccccatctgggattcctgggccctttggaaaagagttggtgaaatgcgcagccggctgtggacgggggaggaggaaggggacagagggagcaggtaggaaacactttagttgggggtggggggcgtctccctctggccccctgtctgtcttcctctccgcggtggagcaaactgtggacttgcctggcacttaaaccttggtagatctgggtttataatcggccattcttaagcacgtggggttgggggaaagttcggagtacccattcctgccgttgcttcctatcctgggcttggaagaatcctggtagaaaggccagagtgggtttgtggagtcgccactgcgggaccagcacgaaagctgcttgtctgctttggcggagctgagctgtgtatgggatccaggaggctggggtgatttattttatgggattcctggagcgcagggctggtgaatccatgacaaggtccgggagcagcagaccaaaaccacagcagcctcctattaagtgtaacaaatagttaagcaaactcgggctacaaacaaagactttgctacctccctcctccacaacccccaagtaattagccttctggagctggctcttagctgaggctcctgctacctcctgctccacccgccccttcctaggttacaagtaaatcattgtcaagggccagccaggggaaggtttcaattaaggttctgttctgctgcctttgtttctcccctgctgttgtaggcacttacagctgcgttgttatgaaaggagggaatagccctttgtgtctttgatctaattaaacctgcttggctgtgtttatccgcagggcaggtcacagatagggttggctgtgccactccataaagtatctattgtggaagcagccaaaaagggctgctgtggcaggaattggttaatttctccttccacttcccttcctgaatagtgaagggagcccttttaaaacaaggctttggtggtaatcctgtgatttttttttctcccccatcccctcactggcccatccctctcaccctcacttttgttctgctggtgggtaaaatcttaggctgaacacatatttcaatggtaagatacttattttgctatccacacttgatgcaattgaattcaaggtgcaaagtcttgtactgaagcagtctccttgttgcttggagaacacctccttcagagccctttgttaaataagaggggcgacgttgatcatagatgccacctggttagcaccgaatctgactttggtgacagtcctaaagcacagttggtgattgtgagatctgttagcggcaggctgagcagatactacttggttttgcttggtatgagatactactgtttgcttagtatgagattttttccagcctgtctcttaaactcctgtgacatcttcaatgatatgtgccctcagttgcagcatagcttctctgctgcctattgccattgctgtctcaaaagttgagtgaattttgaggcgtcttttttttttttcctctcttgggagtcgttgtaaactactgtgtacaagtcattttgtgatatgattctgaacagttggaatagaatcatagttaagtggtacagccatggctatcgtcaggcctgttgcctggagatctctaagttaaggcaacaagacttaaagaattttctaatacacttgtttcacacatggacgttgaggccatagtctttaaaagcttggacctttgtagcacctcaacatgaaagggcattagctatgtttcctgtttttacagtgatcaccaaacagatcttgccactttgattgttaaaaatgaaccacattctagccctggtctgggactttggagggagatgaatttcttgttggaaatgtaaatctagtgtccatatttaatactctcacagctttgtgtttattctctttgctcatggaatagtttatgctgtaatagtttatgctgtaatagtttatg

SEQ ID NO: 386398 - DNA, 250 bp, Homo sapiens
agtagaagctgctgatgcaatgggcttttgccagggccaggcgaagggctggggacagggagaacaggagttgcccagtctcctgtgaccgtgaccttacaggtggagaaacgagggaaagctcgctacacccgagacttccccctaaaatggctccaggtgctgagcccccaccgattctttttcggaacaaaacgcccttttcacggaggggctcctgcatggctttcttgccttcctctcccaacag

SEQ ID NO: 386399 - DNA, 316 bp, Homo sapiens
cggcttgcccgacggtggggacgggccgccgccgccccagccgcagccctacgatccgcggctgcacgaggtggaatgctccgtgttctaccgggacgaatgcatctaccagaagagcttcgcgccgggctcggcggcgctgagtacctacacgcccgagaacctgctcaacaagtgcaagccgggcgatctggtggagttcgtgtcgcaggctcagtacccgcactgggccgtatatgtgggtaacttccaggtggtgcacctgcaccggctggaggtgattaacagcttcctgactgacgccagccagggccgt

SEQ ID NO: 386400 - DNA, 5450 bp, Homo sapiens
cggggagtgagcgcctgtctctttaaatgccacgggctgcgctcccgcccgggagcccggagccggatctacaatcccgtccctccagctccggtgcttgttgctcgcccggcccaagcgggagctgttgccgccaggctgcgaggctgccgtcctctcctcctcgcgccccacctcccccgagagctggctgaggaggggcagcagccccagctggcgggaggaagcgcggtgtgaacagggattgccccccgccttcaagtatcggggcgctacgcagccgcgggggaaagacatgcccctagtctgcccgctgcgctgccctctgcccagcctcgctgccgcccgcgccgggagaggagggactgccgagcctacaccttcaaactcgccctagaagtctcggggcgcggcagggagcccttccccaggccccacggccttcacctctccgcgggtagcctcagcccctgtccggggacctgtgcaaatgaccctggagttggtttcgctttctccccttgcggcggtgtgaacgtgtgtccgcagcgtgatgggcaaccaggtggagaaattgacccacctaagttacaaggaagttcccacggccgacccgactggcgtggaccgggacgacgggccccgcattggggtctcctacattttctccaatgacgatgaggacgtggagccgcagccgccgcctcaggggccagatggcggcggcttgcccgacggtggggacgggccgccgccgccccagccgcagccctacgatccgcggctgcacgaggtggaatgctccgtgttctaccgggacgaatgcatctaccagaagagcttcgcgccgggctcggcggcgctgagtacctacacgcccgagaacctgctcaacaagtgcaagccgggcgatctggtggagttcgtgtcgcaggctcagtacccgcactgggccgtatatgtgggtaacttccaggtggtgcacctgcaccggctggaggtgattaacagcttcctgactgacgccagccagggccgtcgcggccgcgtggtcaacgatctgtaccgctacaagccgctaagctccagcgccgtggtgcgcaacgcgctggcgcacgtgggtgccaaggagcgcgagctgagctggcgcaactcggagagtttcgccgcctggtgccgctacggcaagcgcgagttcaagatcggcggcgagctgcgcatcggcaagcagccctaccggctgcagattcagctgtcggcgcagcgcagccacacgctcgagttccagagtctagaggacctgatcatggagaagcgacgcaacgaccagatcgggcgcgcggccgtgctgcaggagctcgccacgcacctgcacccggcggagccggaggagggcgacagcaacgtggcgcggactacgccgcctcccgggcgcccccctgcgcccagctccgaggaggaggacggagaggcagtggcacactgatgggcgagctgagcgcagagctgcgaaggggaactgtttgcagtagcagccgctgctccctttctccctctcttcctccctcttttgccactgtctgggccccatctgggattcctgggccctttggaaaagagttggtgaaatgcgcagccggctgtggacgggggaggaggaaggggacagagggagcaggtaggaaacactttagttgggggtggggggcgtctccctctggccccctgtctgtcttcctctccgcggtggagcaaactgtggacttgcctggcacttaaaccttggtagatctgggtttataatcggccattcttaagcacgtggggttgggggaaagttcggagtacccattcctgccgttgcttcctatcctgggcttggaagaatcctggtagaaaggccagagtgggtttgtggagtcgccactgcgggaccagcacgaaagctgcttgtctgctttggcggagctgagctgtgtatgggatccaggaggctggggtgatttattttatgggattcctggagcgcagggctggtgaatccatgacaaggtccgggagcagcagaccaaaaccacagcagcctcctattaagtgtaacaaatagttaagcaaactcgggctacaaacaaagactttgctacctccctcctccacaacccccaagtaattagccttctggagctggctcttagctgaggctcctgctacctcctgctccacccgccccttcctaggttacaagtaaatcattgtcaagggccagccaggggaaggtttcaattaaggttctgttctgctgcctttgtttctcccctgctgttgtaggcacttacagctgcgttgttatgaaaggagggaatagccctttgtgtctttgatctaattaaacctgcttggctgtgtttatccgcagggcaggtcacagatagggttggctgtgccactccataaagtatctattgtggaagcagccaaaaagggctgctgtggcaggaattggttaatttctccttccacttcccttcctgaatagtgaagggagcccttttaaaacaaggctttggtggtaatcctgtgatttttttttctcccccatcccctcactggcccatccctctcaccctcacttttgttctgctggtgggtaaaatcttaggctgaacacatatttcaatggtaagatacttattttgctatccacacttgatgcaattgaattcaaggtgcaaagtcttgtactgaagcagtctccttgttgcttggagaacacctccttcagagccctttgttaaataagaggggcgacgttgatcatagatgccacctggttagcaccgaatctgactttggtgacagtcctaaagcacagttggtgattgtgagatctgttagcggcaggctgagcagatactacttggttttgcttggtatgagatactactgtttgcttagtatgagattttttccagcctgtctcttaaactcctgtgacatcttcaatgatatgtgccctcagttgcagcatagcttctctgctgcctattgccattgctgtctcaaaagttgagtgaattttgaggcgtcttttttttttttcctctcttgggagtcgttgtaaactactgtgtacaagtcattttgtgatatgattctgaacagttggaatagaatcatagttaagtggtacagccatggctatcgtcaggcctgttgcctggagatctctaagttaaggcaacaagacttaaagaattttctaatacacttgtttcacacatggacgttgaggccatagtctttaaaagcttggacctttgtagcacctcaacatgaaagggcattagctatgtttcctgtttttacagtgatcaccaaacagatcttgccactttgattgttaaaaatgaaccacattctagccctggtctgggactttggagggagatgaatttcttgttggaaatgtaaatctagtgtccatatttaatactctcacagctttgtgtttattctctttgctcatggaatagcagaacaagataaacatgggttaagacatttaggagaacctgctgtatctaacccagttggattttctttcatgcttaacacagtagtgaaaatagaaggtaggccgggcacagtggctcatgcctgtaatcccagcactttgggaggctgaggcaggtagatcacctgaagttaggagttcgagaccagcctggccaacatggcgaaaccctgtctctaccacaaatacagaaaattagctgggcgtggtggcaggcgcctgtaatgcctgctacttgggagcctgaggcagaagaattgcttgaagctgggaagcagaggttgcagtgagccgagatcgcaccactgcactccagcctgggcagcagagcaagtagtaataaccaccgtgtagacaagtgggagggaagaatagaatggcactgtccagctctgggctagccagatcaactcccccacccgtcttcttcctctgtcccagaatggagcagtgactctctcttctagagaagaggttttcaataacagggcttggaaatgaactagaataggaaatagatcttttcagatgctgctttcccatgtaatacaagcgtttctacagggtaccagaggtgtgaaatatgtgacacttaagaacagtgatttttattgggaattttcttagggttattacacttaaagcaacaaccaactagtaacagctccaggaaaggggaatgaatcaactcttggttctttcctgaagacggcagtgttgtggataagtgagtttttaatgccctggcagtggctacatttgacactttagaaaaaataaacatatttaataatttttgtttctccttaggaataagactgtagaactgttttgtactgtgaattacggatgctctttgaaggaaagaaatatcgattctaatgttcttcagaagttctggcagggataagcaggacatcgactggaacgtatgctaaatgaaagcagacaaatttctattttcttacctgagcaaatattttattgaaactgcttatgtatgtcaaaggagcccacaacttcagctacacaactttttgtattgaaagaactcatactttttgtagcttttatttcacatttaatttaaagtgacttttagcactaaaatgcctagaagattttactccagacctataaggaaatgtttagtttttatgaaaaatgacaagtcgatggttaaacttctcatgtctttggtgctttggccctaatagcactggacaacaccacgaccacatggaaacatatttttggaagcaaaactttaattttatataacgtatgctatggagagctaagacaatttaaggactacttgttttctattttttttcttaataaaatggaatccactgtgttgaagactcttgatatcatgtgcttgtctaaccattttttgttttataaattagaataaaatatagttgtgataatggtcatcgaatggatttgtttggaaagctacatcttatttgtgaaatgttttttaaatcagagtaactatcaactgattcagctttttgttgttttgttcttggctataatacttgtgactcatgaagaattatgttgacaaacaggataaattccacatgcattttatttcccagtgagttgtataaactttatttttgttgaaggttgtatgttaaatcaatgttacattcttatatcacttcttgagaaggaagttccgatttgaaattgtatcatttccttcaaaatgaagggcagtgcttagttaaataaaagattgatgatatcttttaagccatttcctcttcactatgtcttattaaaataaaacctgtcaagttcttttcaaaagatgctatgagcgtttccaataaaccatctattagagttcactgga

SEQ ID NO: 386401 - DNA, 5450 bp, Homo sapiens
cggggagtgagcgcctgtctctttaaatgccacgggctgcgctcccgcccgggagcccggagccggatctacaatcccgtccctccagctccggtgcttgttgctcgcccggcccaagcgggagctgttgccgccaggctgcgaggctgccgtcctctcctcctcgcgccccacctcccccgagagctggctgaggaggggcagcagccccagctggcgggaggaagcgcggtgtgaacagggattgccccccgccttcaagtatcggggcgctacgcagccgcgggggaaagacatgcccctagtctgcccgctgcgctgccctctgcccagcctcgctgccgcccgcgccgggagaggagggactgccgagcctacaccttcaaactcgccctagaagtctcggggcgcggcagggagcccttccccaggccccacggccttcacctctccgcgggtagcctcagcccctgtccggggacctgtgcaaatgaccctggagttggtttcgctttctccccttgcggcggtgtgaacgtgtgtccgcagcgtgatgggcaaccaggtggagaaattgacccacctaagttacaaggaagttcccacggccgacccgactggcgtggaccgggacgacgggccccgcattggggtctcctacattttctccaatgacgatgaggacgtggagccgcagccgccgccccagccgcagccctacgatccgcggctgcacgaggtggaatgctccgtgttctaccgggacgaatgcatctaccagaagagcttcgcgccgggctcggcggcgctgagtacctacacgcccgagaacctgctcaacaagtgcaagccgggcgatctggtggagttcgtgtcgcaggctcagtacccgcactgggccgtatatgtgggtaacttccaggtggtgcacctgcaccggctggaggtgattaacagcttcctgactgacgccagccagggccgtcgcggccgcgtggtcaacgatctgtaccgctacaagccgctaagctccagcgccgtggtgcgcaacgcgctggcgcacgtgggtgccaaggagcgcgagctgagctggcgcaactcggagagtttcgccgcctggtgccgctacggcaagcgcgagttcaagatcggcggcgagctgcgcatcggcaagcagccctaccggctgcagattcagctgtcggcgcagcgcagccacacgctcgagttccagagtctagaggacctgatcatggagaagcgacgcaacgaccagatcgggcgcgcggccgtgctgcaggagctcgccacgcacctgcacccggcggagccggaggagggcgacagcaacgtggcgcggactacgccgcctcccgggcgcccccctgcgcccagctccgaggaggaggacggagaggcagtggcacactgatgggcgagctgagcgcagagctgcgaaggggaactgtttgcagtagcagccgctgctccctttctccctctcttcctccctcttttgccactgtctgggccccatctgggattcctgggccctttggaaaagagttggtgaaatgcgcagccggctgtggacgggggaggaggaaggggacagagggagcaggtaggaaacactttagttgggggtggggggcgtctccctctggccccctgtctgtcttcctctccgcggtggagcaaactgtggacttgcctggcacttaaaccttggtagatctgggtttataatcggccattcttaagcacgtggggttgggggaaagttcggagtacccattcctgccgttgcttcctatcctgggcttggaagaatcctggtagaaaggccagagtgggtttgtggagtcgccactgcgggaccagcacgaaagctgcttgtctgctttggcggagctgagctgtgtatgggatccaggaggctggggtgatttattttatgggattcctggagcgcagggctggtgaatccatgacaaggtccgggagcagcagaccaaaaccacagcagcctcctattaagtgtaacaaatagttaagcaaactcgggctacaaacaaagactttgctacctccctcctccacaacccccaagtaattagccttctggagctggctcttagctgaggctcctgctacctcctgctccacccgccccttcctaggttacaagtaaatcattgtcaagggccagccaggggaaggtttcaattaaggttctgttctgctgcctttgtttctcccctgctgttgtaggcacttacagctgcgttgttatgaaaggagggaatagccctttgtgtctttgatctaattaaacctgcttggctgtgtttatccgcagggcaggtcacagatagggttggctgtgccactccataaagtatctattgtggaagcagccaaaaagggctgctgtggcaggaattggttaatttctccttccacttcccttcctgaatagtgaagggagcccttttaaaacaaggctttggtggtaatcctgtgatttttttttctcccccatcccctcactggcccatccctctcaccctcacttttgttctgctggtgggtaaaatcttaggctgaacacatatttcaatggtaagatacttattttgctatccacacttgatgcaattgaattcaaggtgcaaagtcttgtactgaagcagtctccttgttgcttggagaacacctccttcagagccctttgttaaataagaggggcgacgttgatcatagatgccacctggttagcaccgaatctgactttggtgacagtcctaaagcacagttggtgattgtgagatctgttagcggcaggctgagcagatactacttggttttgcttggtatgagatactactgtttgcttagtatgagattttttccagcctgtctcttaaactcctgtgacatcttcaatgatatgtgccctcagttgcagcatagcttctctgctgcctattgccattgctgtctcaaaagttgagtgaattttgaggcgtcttttttttttttcctctcttgggagtcgttgtaaactactgtgtacaagtcattttgtgatatgattctgaacagttggaatagaatcatagttaagtggtacagccatggctatcgtcaggcctgttgcctggagatctctaagttaaggcaacaagacttaaagaattttctaatacacttgtttcacacatggacgttgaggccatagtctttaaaagcttggacctttgtagcacctcaacatgaaagggcattagctatgtttcctgtttttacagtgatcaccaaacagatcttgccactttgattgttaaaaatgaaccacattctagccctggtctgggactttggagggagatgaatttcttgttggaaatgtaaatctagtgtccatatttaatactctcacagctttgtgtttattctctttgctcatggaatagcagaacaagataaacatgggttaagacatttaggagaacctgctgtatctaacccagttggattttctttcatgcttaacacagtagtgaaaatagaaggtaggccgggcacagtggctcatgcctgtaatcccagcactttgggaggctgaggcaggtagatcacctgaagttaggagttcgagaccagcctggccaacatggcgaaaccctgtctctaccacaaatacagaaaattagctgggcgtggtggcaggcgcctgtaatgcctgctacttgggagcctgaggcagaagaattgcttgaagctgggaagcagaggttgcagtgagccgagatcgcaccactgcactccagcctgggcagcagagcaagtagtaataaccaccgtgtagacaagtgggagggaagaatagaatggcactgtccagctctgggctagccagatcaactcccccacccgtcttcttcctctgtcccagaatggaaaatgatgtatggtcagtcacgctgaagtatagcagcgactgtgttaagagagagcagtgactctctcttctagagaagaggttttcaataacagggcttggaaatgaactagaataggaaatagatcttttcagatgctgctttcccatgtaatacaagcgtttctacagggtaccagaggtgtgaaatatgtgacacttaagaacagtgatttttattgggaattttcttagggttattacacttaaagcaacaaccaactagtaacagctccaggaaaggggaatgaatcaactcttggttctttcctgaagacggcagtgttgtggataagtgagtttttaatgccctggcagtggctacatttgacactttagaaaaaataaacatatttaataatttttgtttctccttaggaataagactgtagaactgttttgtactgtgaattacggatgctctttgaaggaaagaaatatcgattctaatgttcttcagaagttctggcagggataagcaggacatcgactggaacgtatgctaaatgaaagcagacaaatttctattttcttacctgagcaaatattttattgaaactgcttatgtatgtcaaaggagcccacaacttcagctacacaactttttgtattgaaagaactcatactttttgtagcttttatttcacatttaatttaaagtgacttttagcactaaaatgcctagaagattttactccagacctataaggaaatgtttagtttttatgaaaaatgacaagtcgatggttaaacttctcatgtctttggtgctttggccctaatagcactggacaacaccacgaccacatggaaacatatttttggaagcaaaactttaattttatataacgtatgctatggagagctaagacaatttaaggactacttgttttctattttttttcttaataaaatggaatccactgtgttgaagactcttgatatcatgtgcttgtctaaccattttttgttttataaattagaataaaatatagttgtgataatggtcatcgaatggatttgtttggaaagctacatcttatttgtgaaatgttttttaaatcagagtaactatcaactgattcagctttttgttgttttgttcttggctataatacttgtgactcatgaagaattatgttgacaaacaggataaattccacatgcattttatttcccagtgagttgtataaactttatttttgttgaaggttgtatgttaaatcaatgttacattcttatatcacttcttgagaaggaagttccgatttgaaattgtatcatttccttcaaaatgaagggcagtgcttagttaaataaaagattgatgatatcttttaagccatttcctcttcactatgtcttattaaaataaaacctgtcaagttcttttcaaaagatgctatgagcgtttccaataaaccatctattagagttcactgga

SEQ ID NO: 386402 - DNA, 1836 bp, Homo sapiens
tacaacatcctgtcgtctaccagaaatcacggtaagttaagtgaggcatgtgcagacagtgtgtctctgtaaagagacttgctgactctgtgaactactgcgtgtggaatacatctcgcattaaaagacatgcgggcaccgcgagaggatcgcgagtcgatgcctgagaatcaatcccaaatggacgttccatggacgtgtcgactatgacatgagactcatgatacgatacaatagacgctaccgtgtagactcgatgagtcagggtaagaactacgagatcggtgactgtccagctctgggctagccagatcaactcccccacccgtcttcttcctctgtcccagaatggaaaatgatgtatggtcagtcacgctgaagtatagcagcgactgtgttaagagagagcagtgactctctcttctagagaagaggttttcaataacagggcttggaaatgaactagaataggaaatagatcttttcagatgctgctttcccatgtaatacaagcgtttctacagggtaccagaggtgtgaaatatgtgacacttaagaacagtgatttttattgggaattttcttagggttattacacttaaagcaacaaccaactagtaacagctccaggaaaggggaatgaatcaactcttggttctttcctgaagacggcagtgttgtggataagtgagtttttaatgccctggcagtggctacatttgacactttagaaaaaataaacatatttaataatttttgtttctccttaggaataagactgtagaactgttttgtactgtgaattacggatgctctttgaaggaaagaaatatcgattctaatgttcttcagaagttctggcagggataagcaggacatcgactggaacgtatgctaaatgaaagcagacaaatttctattttcttacctgagcaaatattttattgaaactgcttatgtatgtcaaaggagcccacaacttcagctacacaactttttgtattgaaagaactcatactttttgtagcttttatttcacatttaatttaaagtgacttttagcactaaaatgcctagaagattttactccagacctataaggaaatgtttagtttttatgaaaaatgacaagtcgatggttaaacttctcatgtctttggtgctttggccctaatagcactggacaacaccacgaccacatggaaacatatttttggaagcaaaactttaattttatataacgtatgctatggagagctaagacaatttaaggactacttgttttctattttttttcttaataaaatggaatccactgtgttgaagactcttgatatcatgtgcttgtctaaccattttttgttttataaattagaataaaatatagttgtgataatggtcatcgaatggatttgtttggaaagctacatcttatttgtgaaatgttttttaaatcagagtaactatcaactgattcagctttttgttgttttgttcttggctataatacttgtgactcatgaagaattatgttgacaaacaggataaattccacatgcattttatttcccagtgagttgtataaactttatttttgttgaaggttgtatgttaaatcaatgttacattcttatatcacttcttgagaaggaagttccgatttgaaattgtatcatttccttcaaaatgaagggcagtgcttagttaaataaaagattgatgatatcttttaagccatttcctcttcactatgtcttattaaaataaaacctgtcaagttcttttcaaaagatgctatgagcgtttccaataaaccatctattagagttcactgga

SEQ ID NO: 386403 - DNA, 1969 bp, Homo sapiens
cggggagtgagcgcctgtctctttaaatgccacgggctgcgctcccgcccgggagcccggagccggatctacaatcccgtccctccagctccggtgcttgttgctcgcccggcccaagcgggagctgttgccgccaggctgcgaggctgccgtcctctcctcctcgcgccccacctcccccgagagctggctgaggaggggcagcagccccagctggcgggaggaagcgcggtgtgaacagggattgccccccgccttcaagtatcggggcgctacgcagccgcgggggaaagacatgcccctagtctgcccgctgcgctgccctctgcccagcctcgctgccgcccgcgccgggagaggagggactgccgagcctacaccttcaaactcgccctagaagtctcggggcgcggcagggagcccttccccaggccccacggccttcacctctccgcgggtagcctcagcccctgtccggggacctgtgcaaatgaccctggagttggtttcgctttctccccttgcggcggtgtgaacgtgtgtccgcagcgtgatgggcaaccaggtggagaaattgacccacctaagttacaaggaagttcccacggccgacccgactggcgtggaccgggacgacgggccccgcattggggtctcctacattttctccaatgacgatgaggacgtggagccgcagccgccgcctcaggggccagatggcggcggcttgcccgacggtggggacgggccgccgccgccccagccgcagccctacgatccgcggctgcacgaggtggaatgctccgtgttctaccgggacgaatgcatctaccagaagagcttcgcgccgggctcggcggcgctgagtacctacacgcccgagaacctgctcaacaagtgcaagccgggcgatctggtggagttcgtgtcgcaggctcagtacccgcactgggccgtatatgtgggtaacttccaggtggtgcacctgcaccggctggaggtgattaacagcttcctgactgacgccagccagggccgtcgcggccgcgtggtcaacgatctgtaccgctacaagccgctaagctccagcgccgtggtgcgcaacgcgctggcgcacgtgggtgccaaggagcgcgagctgagctggcgcaactcggagagtttcgccgcctggtgccgctacggcaagcgcgagttcaagatcggcggcgagctgcgcatcggcaagcagccctaccggctgcagattcagctgtcggcgcagcgcagccacacgctcgagttccagagtctagaggacctgatcatggagaagcgacgcaacgaccagatcgggcgcgcggccgtgctgcaggagctcgccacgcacctgcacccggcggagccggaggagggcgacagcaacgtggcgcggactacgccgcctcccgggcgcccccctgcgcccagctccgaggaggaggacggagaggcagtggcacactgatgggcgagctgagcgcagagctgcgaaggggaactgtttgcagtagcagccgctgctccctttctccctctcttcctccctcttttgccactgtctgggccccatctgggattcctgggccctttggaaaagagttggtgaaatgcgcagccggctgtggacgggggaggaggaaggggacagagggagcaggtaggaaacactttagttgggggtggggggcgtctccctctggccccctgtctgtcttcctctccgcggtggagcaaactgtggacttgcctggcacttaaaccttggtagatctgggtttataatcggccattcttaagcacgtggggttgggggaaagttcggagtacccattcctgccgttgcttcctatcctgggcttggaagaatcctggaacacctctcccaggcaagacattttcacagcaccattcgcaacggttgggacaaaccccaacttttccttcatca

SEQ ID NO: 386404 - DNA, 358 bp, Homo sapiens
ggagggaaagtataacttttatttacaaataattattgagcatgctagatgctactagaacaaaagttacagtttccactgttaaggagaaacaatggagaaaccagcgtgactccagtgctttcttcgatttggtgcactgaagaatcccattttgggagcagaaaaaccctgtgtgttgtgttagctgttccttatcaccaacgagagtaagtattgttaccctcactacatctatgggtaactgaggcacaaacgttgtgaggcagttaatgttcccagggtcacccatgggccagctgggagggcagcatcgccccgtgaacataccctggggcccacttttatgaatcttaaa

SEQ ID NO: 386405 - DNA, 4407 bp, Homo sapiens
  misc_feature (1945)..(1945): n is a, c, g, or t
  misc_feature (2756)..(2756): n is a, c, g, or t
  misc_feature (3213)..(3213): n is a, c, g, or t
  misc_feature (3221)..(3221): n is a, c, g, or t
  misc_feature (4217)..(4217): n is a, c, g, or t
  misc_feature (4320)..(4320): n is a, c, g, or t
  misc_feature (4328)..(4328): n is a, c, g, or t
agctgccctcttttctactacccaattccagaaaacagcccatccagcccacctcattacatcatcacaaaacatacacaataaaaaatggcaaaccaaagactagtgggaggttcttgttattagaccacccttttaattttccccctgtaggcaatttggaaaattattagagatggaatagatgtgggtttttttttgatagattctttgagattgacaatatgaaagatttagtttagatcacgcaataggatctgtagcctcttggtaattaatgacacggccatccgccctctacttatggtacttccctccagtaataacttctctgctgttattattggaattctgtgtatctgtaggataagtcgaatatatgtttgtcagtgaggctgtttgttattatacgtccccagtgtatggttgcacctataatggtgcagtgtagaacaacaagaagatagaaaactgatagaaaagggggagcattaactctaagaaacacatgagacatttttgctggaagaaatcatctccacactaaagttttccctccctacaattggctttggagagtatgtgcatggtctttgacaaggcaacaaggttccagtcatagatattagccagcccttctcataacattgacacttcatcagaatgtagaagtagaaaaatctgaagaactgtttttgtagctttatttactttcaggtaatccatatcccgtggtcttctgagtaaacctgaaaagatacttgaagtatacgtaaggcaaagggatattatagatataaagccataatataacatacaaattatgttgataaagttagattgataaatgtaactctaacatttgatctttgtggcatttgggtactgtacacttcttggaacaggagtattgtctctcatttagcttttgcatgcccaaccacacctagcaaaaggcctactattgagcagttatgtttagacatgtttctatattaaagatgcctcaggggctaggcaacaaagctgaacactgaccatagttggctatttatttttttgtgaggagattgtaatatttttctgtataactaatttcttaataattataatgattataattataaattctatataaccaatttcttaaaaattttatacttttgggtacaaatgagaactattccaggagagaggtaatttatgtacaactttaatgtaacctaataaaaagggtgacatccatcacctttgctgtattatattatttagatgtcaatcaccacttcaactcaaggggaaggtactaggtaaatgcatggactctagcgcccacctgggagctactggaagcctggggacgctgccccagtgtggtgatgggggatgacctgggactcaactgcttccaccacttcttactcagaagagcaaggaagaggtggtggggagttccaaaacgacatgagtacaaatggcctggagagtaatcaatttaaataaagaggttcagaatcttctaaaggaagcttacaaaagcagtgacttcacagaataaatgatataatcaagagtctgtaaataactaaaaatatgacaataaaggcaataaaggcaaatagcgtaggaaaaactctaggaaggctggtgaagtactatatttttcaggcctacaaagcaaactatgcaagacgatacaaatataaaacaaattttgatgcattttaaaatgcatggtttgtgaaggaaaaaaatctatttgacctcgatgtgagaaacattctctcatgagtgatccaaggttcgtgacattggatttgcaaagaaaaaaatgcatcaacatattacctgacctggcactaacagtatttacaaaacaattataatatgatggccatttattgattttcaacttttagcaatattgtgtaacaaaatgtagaanatattgttatggttgtatgacaaaatataaatatcaacaatcttaaaattatagaagtaaatatttagctgacagaagaggggatgtggaaggaagaatgatgactaatattgacattttacagattgtggagttgaggaagactgtcaaatattgaaataagagagagattttaagaaattagttacagagttaacaggactcaaataatattataaatatcaaacataccaaaaggatatagtaggagagtagtgtgagtaactaaatcttcatttttcatgtatagaaatcaatagatactaaagttgacaaataaaaaattagaggtatactcatataagggtaaagagacaccctaaaaaataaagtaaggacaattcccagaggagtgttaagagttaaaaaaattggctgggctgggagagtctaagcttttctagacagcttgcatggaaatacaaatacatatattcacatgcattactttaaaagtaataaaaatagatgtaaaaaatccctaaattggttaaagaaacgtgctattctgagtccttcgcttattacctcttgtgatttgtctcctccacagttaactccttaggggtacgcattggttacctttgaggtaacttacagaattaaaatgttattcagtagtaacaaataactgtgtcttgattgattgagcttctatagcaatttcccttctaaataggaaacacaaaattatgcgtgcatacaggtctctttattgttcatttaagatttatcgagcaattactatttgcaagtcttaattgtaggctcncattggactcaaggtatatacaatcttttcagtttaataagtaggcaggttaggttgattatttgatcagtatcactcaaatgtctattatgagctaggcactattccaggccctggagatacaatgtttactacaacagggtcctggttctctagaattggaatctactattaataattccccaaaggaggcaccaccttatgcatactatttatttggctgattatgatgtgacagtactctaaatatctgtggaaagaaaaataaccttgtagtatgtttcaattcaaatactatcaaagagatcatgagctctggagaaaactacatttcagaggaagatgaatgagtttaatggaagtatgttacatattagaaatctctaaagcctgaggtcaaagcatgagaacaagttctttaccctgttcatagaactgaaataatattcatttgggnctgtgacntgtagcaatgtatggaaataaagacaagagtatgcctctttgattttttttaaaactctttaaagagattaaaaaaattttactgctttagatgatttagagatctaaatgggagtgttagattcgcgaatttgtaccagtttaagtgtggaagggtaaatgttacagaaatgattggagaagtcagtgatcaggttgagctgtgataattttgaggtcagaggcaaattgggagttatgccaacaaagagtttttctttaaatacacatgattttatatcttgtcatctcctttttcaagagcctccaaatatacatctcagtttctccatccaacccctgcacctggcacatggaaacagatggaagaattcaaaatctcagttaaagttgcctttgaatgtatcatgaactcctgttgtgaagtcttgtgaattagaaacacagtaccaacactctgccaccttgtggcttctggagtcattgcagcacatatagaggaaaatcagcacccagttccagttttactggaacaacatgtcttaggttttttgggcagatactttatttaaaggaatatgtagggttcgtgagaatgcatttcggagttatctttctaatatatatatatttaatatagttatcatgtcattggctataattcattagcctgccacaaaataatgttttccaaattgcagttttaaggatcatgaaatctttgaactaaaagggacctcaaaggttacgcagttcagtatttgaattccttttattatcattctaataggagggactgaagtgtgagcttaaacatctctagggcagcttaattttgcaaagcttactatcccaactatcttcgacaacatttatttgaagatttatacatttaactaatgttgcttggataaagctcaaatttttccatatgaaccatgagaaattatgtaagagtcttttaaagttgcattttccatatttattagttcagcnccaagtatataataggccctcattaaataatagccctgtttggttttcctatatttaaatttttaagatgtaggcttatagattattaacgttgaaatagctntatgttcnatgataaaatgctttcaataaatacacttccagctttccacatttacttttgtctttttaaaaattattttctcattgc

SEQ ID NO: 386406 - DNA, 542 bp, Homo sapiens
agtctcagggtaaataaacgacataaataactacttaaagttggtgtaataacaaatatgtatgaagtgccaagagcacctagatgaaggggtaaacagttctgtttatagaacttacagaaagtggaactgaactggaggatgagctcagaatctccaacctcattccactctactctccttaacttagttctagccatgtagatcatcctctagttcctcaaaactaccaaagttctttcccactttagggtttccatactctacctggacctatctttgtcacacttgtcctctggctatctcctactcattcattagatcagttagtatatcacttcctcagttagcctttctcagactccccagttctcccttatttttctcagagcaaccttaatttctttatatcatttttcacaatatgtaattacataaccacatgtggtggccgggtgcggtggcacacgtctgtaatcccagcactttgggagactgaggcgggcagatcacttgaggtcagaagttcaagaccatcctgg

SEQ ID NO: 386407 - DNA, 370 bp, Homo sapiens
gcagccaagtggtcactacatggcagagagctgtgactgagagacgctgtagaaaaaatgcatgtctgatcctttttatattagtgcttctcctgaggggttaaatgtgcataaaaaagaaaatcagtgctggtgggtttttgttattttccatctagatggaaggttgtcaccagtgtctgcgtttccctgactacacacgggtccctcagggaaaagcaaacccatacatctctgtcctatgattcggtggtaacctttcatttcttcaaaaataacatggtattatggagaggatttgactgctacttcacagtatcttaattttcaaagacgaggaatacttccctcagatgggaggaaaccctaa

SEQ ID NO: 386408 - DNA, 409 bp, Homo sapiens
tgcacattggtaggcgtggtagattagaccattgtttaaaatattctctccctccccatcgcctccatgttggaaagtgcatccccacacccgactttgggcttagccatttaacttgctttggccagtgagatgtcagcagacagaacataatcaaaggtttggaaagtgtttgggctggccttgccctctttatgacactgccataagaagaatgtattcaggctaacttgctggccccaagaggagcgagatacgcatgaagcagaactgctccggccatgccctgttctagttcagctgatccctcatgactgagtgggcccagccaagagcagcagtgcgatcagccaaacgcagccaagatcagccaacacatagacatcagggctgagcaacagctgattaa

SEQ ID NO: 386409 - DNA, 747 bp, Homo sapiens
agcaactttatacatacatacagattccaaatttgcacttaactgctatattatgtatgtacttgttcatgacaccacttggaattcaggtagaggtattttcaatcagctccaacatccctttccttccttggatgtttccaagacaccatcaagccaggcacatttaggcagagaggttgctggggagaatagaacattgccaagctctggcgccaaatactgcactctggcaacgtgtaagtgtaaggcaggcattgtgggtgtgtgacctctgcaatcacacagggcctcatgctcaggagggccctgtgcttgattcaatactctgctggccccatcttgaaattcttaatgatttttgaacaaggggctccacatgtccatttatcagtgagcccctcaaattatatagccagttttgtgtgaggacaaagcaatggacagatactatgaagctcctttctgggtggcattttctctttcttttctccttcctttcagagctaccaagtcaccccacactctagctcaagagctctacctgaccaaaactcaatggcctttcctcaggaaatccagctatgctaatgccaccagaactgagtcagaactcctaactctacaaatatggctcctctgtattgagtgcctgctaggtgccaggcacaacactcaactgggaccaatattatttctgatctgggagatagataggtatgatcagccccatttcacagttgagga

SEQ ID NO: 386410 - DNA, 864 bp, Homo sapiens
gacatctgcccagacctcagtatgaagtaaagttgccttctcattcaaactatagcaacaacagcagcaagaacaaaaactaccaccacaacagattactactagaaaactgctactaaaacaggttttttgcccttattccttttcgaccttccttttctcctgtttatccttcacctcctcctccaccttctttcaaaacctgttattgatgctcatcatcatcatcatcatcatcaagcaaaatgtactagttaagaatacagacttttcgttagacatacattccaggcctagctcttccacttactgcctctgtgaccttgagaaagttattgaactgtctatttaaattattaatttctatatttattcagtggggttaatagtacctaatagcgttgatggaagaaacacatgggatgatgcaaataaaacactaaatttaatgcctggtccataggaacagtgcagcaaatgttatctattaatattactatacttctaatactaataggaaatataacacaggttctcatttgctctgtcattcaacttattacattaatagctaaaatttacggaacacttcaatgtcataagtagtgttctaagccctttatattaattcattcatttattcctcaaagaaattctttgaagtaagtaccattattagtatcctaacccccattttgcagttgaagaagctgaaaggaactgagacaaagaaaggatgaataacttgctgaagatcatacaattagtaagtggtttatacaggatttgtgcctaggtagtcactgtaggaatgctcactgtagtaaatttggaaaatatagctaactattgaaagcaagcaag

SEQ ID NO: 386411 - DNA, 327 bp, Homo sapiens
ataaaaatgacaaattcaaatatatcatcatctcaataaatgcacttgggctaaacactagagggttaaaactcagattgagctttaagaaatccaactaaatactgtttataagaggcagtcttggctgggcgtggtggctaacgcttgtaatcccaggactttaggaggccaaggtgtgtggattgcttgaggccaggagttcatgaccatcctgggcaacacaagaagaccccatctgtattattaaaaataagaagaagaagaaaaaagagacaatcttaaaacataatgacccacctctaaagtagtcagattcaaagaaac

SEQ ID NO: 386412 - DNA, 376 bp, Homo sapiens
caaagcagagactgagaatgctgatgcttattttagtgtgatgcgtaggtgtgttaggtgtagggaggtagggttgggaagtagaaggtcaaggtatgttaatgattctaaactggccagtttttctgtccttaggtataaagttgcgttaaactagactctcttctctggagccccttccttattctgctaagttaatgacagacctggctgtggtaatatcttaatcactataattctttccttctttattacctggcaccaagaagctcatgtcaggcccgataataacctactttgattattttggacctctttcctccccctagttttttcatgactctacgtcttcctctcctcacttttctttctattt

SEQ ID NO: 386413 - DNA, 375 bp, Homo sapiens
ggcatttagttgaactttctgaatggcccttacagcagccagcaaagattgtccagacgtgatctgttgtgatttctttgaagcttatatatagagttgtctagcttcagctttcaggactttgggaaaagggcagttttagtcctccatgatgtcaagccacgagggtaggaaaaaaactagaagtgttagtttgaagagttgtagtcagatcagaggaaatgaaaagaattgagaatttgttaaggactgacaaaacgtacaagacagagcctaccagggtgcactattgttttccattgaaacataaaatttttctctataattactacactccttcattcttgtttacaaaataaatctagtctcattaga

SEQ ID NO: 386414 - DNA, 3612 bp, Homo sapiens
ttttttgagacggagttttcgctgttgttacccagactggaatgcaatggtgcgatctcggctcactgcaacctctgcctcccggattcaggcgattctcctgcctcagcctccgggagtagctggaattacaggcatgcgccaccacacccggctaattttgtatttttagtagagacagggtttctccatgttggtcaggctggtctcaaaactcccgaccccaggtgatctgcctgcctccgcctcccaaagtaatgggattacaggcgtgaccaccgcgcctggcctctccatctcttttaaacttaattttagcaagctttccatgcacccacatgttgttttatgccttacctgtccttttcctttttttcccttaggatactttttcttatttagaaactctcaccatgcttaccgtccttcacatttcctatccccaaagcactttttgaatgttttcttagtttaattttgtacaagggagaattaaggcccacttttggcacattgaacctagttcatgtcctgcatgccctgcagctcccctctgccctccaatccattttctttatactggtggctttcgccttcctgttagtcattgctatttcatcatagcctccttttatccttcctacttcatttcttttcttccctcaagtttacgttgtttgttttttaattattttagaccaagatcactccatggatgaaatgacagctgtggtgaaaattgaaaaaggagttggtggcaataatgggggcaatggtaatggtggtggtgccttttcacaggctcgaagtagcagcacaggcagtagcagcagcactggaggaggagggcaggagtcccagccatcccctttggctctgctggcagcaacttgcagcagaattgagtcacccaatgagaacagcaacaactcccagggcccgagtcagtcagggggaacaggtgagcttgacctcacagccacacaactttcacagggtgccaatggctggcagatcatctcttcctcctctggggctacccctacctcaaaggaacagagtggcagcagtaccaatggcagcaatggcagtgagtcttccaagaatcgcacagtctctggtgggcagtatgttgtggctgccgctcccaacttacagaaccagcaagttctgacaggactacctggagtgatgcctaatattcagtatcaagtaatcccacagttccagaccgttgatgggcaacagctgcagtttgctgccactggggcccaagtgcagcaggatggttctggtcaaatacagatcataccaggtgcaaaccaacagattatcacaaatcgaggaagtggaggcaacatcattgctgctatgccaaacctactccagcaggctgtccccctccaaggcctggctaataatgtactctcaggacagactcagtatgtgaccaatgtaccagtggccctgaatgggaacatcaccttgctacctgtcaacagcgtttctgcagctaccttgactcccagctctcaggcagtcacgatcagcagctctgggtcccaggagagtggctcacagcctgtcacctcagggactaccatcagttctgccagcttggtatcatcacaagccagttccagctcctttttcaccaatgccaatagctactcaactactactaccaccagcaacatgggaattatgaactttactaccagtggatcatcagggaccaactctcaaggccagacaccccagagggtcagtgggctacaggggtctgatgctctgaacatccagcaaaaccagacatctggaggctcattgcaagcaggccagcaaaaagaaggagagcaaaaccagcagacacagcagcaacaaattcttatccagcctcagctagttcaagggggacaggccctccaggccctccaagcagcaccattgtcagggcagacctttacaactcaagccatctcccaggaaaccctccagaacctccagcttcaggctgttccaaactctggtcccatcatcatccggacaccaacagtggggcccaatggacaggtcagttggcagactctacagctgcagaacctccaagttcagaacccacaagcccaaacaatcaccttagccccaatgcagggtgtttccttggggcagaccagcagcagcaacaccactctcacacccattgcctcagctgcttccattcctgctggcacagtcactgtgaatgctgctcaactctcctccatgccaggcctccagaccattaacctcagtgcattgggtacttcaggaatccaggtgcacccaattcaaggcctgccgttggctatagcaaatgccccaggtgatcatggagctcagcttggtctccatggggctggtggtgatggaatacatgatgacacagcaggtggagaggaaggagaaaacagcccagatgcccaaccccaagccggtcggaggacccggcgggaagcatgcacctgcccctactgtaaagacagtgaaggaaggggctcgggggatcctggcaaaaagaaacagcatatttgccacatccaaggctgtgggaaagtgtatggcaagacctctcacctgcgggcacacttgcgctggcatacaggcgagaggccatttatgtgtacctggtcatactgtgggaaacgcttcacacgttcggatgagctacagaggcacaaacgtacacacacaggtgagaagaaatttgcctgccctgagtgtcctaagcgcttcatgaggagtgaccacctgtcaaaacatatcaagacccaccagaataagaagggaggcccaggtgtagctctgagtgtgggcactttgcccctggacagtggggcaggttcagaaggcagtggcactgccactccttcagcccttattaccaccaatatggtagccatggaggccatctgtccagagggcattgcccgtcttgccaacagtggcatcaacgtcatgcaggtggcagatctgcagtccattaatatcagtggcaatggcttctgagatcaggcacccggggccagagacatatgggccataccccttaaccccgggatgcaaggtagcatgggtccaagagacatggaagagagagccatgaagcattaaaatgcatggtgttgagaagaatcaggagagggatacaagagaggagatggggtcccggcacccatctgtatcatcagtgcctctttgaaggtgggaaacattagtgaaaattctgttggtgccacgctttgatgagcatttgtttgaccccagtttcttcttacacttcttaccccagcctacccttcctgcatttctcttctcagctcttccatgatggattcccccccctttcctaaagccatcatgccttgataaatatatatgatcattgaaatactttttaacaaaaaacagattctatattattatatatatatatatatataaagatatatagagatgcattcacagggttggctggagaggaagaccattctgtgaccaaaataccttggtcattttttttatattgccttatttccctatggctgagccttgttgtgacacatcaagctt

SEQ ID NO: 386415 - DNA, 2957 bp, Homo sapiens
actgaaatgtgttgtgtctggtatgtatgtactgaggttagtttgattagtcatagtagggtggtgattagtcggatgttgatgagatatttggagttggtggcaataatgggggcaatggtaatggtggtggtgccttttcacaggctcgaagtagcagcacaggcagtagcagcagcactggaggaggagggcaggagtcccagccatcccctttggctctgctggcagcaacttgcagcagaattgagtcacccaatgagaacagcaacaactcccagggcccgagtcagtcagggggaacaggtgagcttgacctcacagccacacaactttcacagggtgccaatggctggcagatcatctcttcctcctctggggctacccctacctcaaaggaacagagtggcagcagtaccaatggcagcaatggcagtgagtcttccaagaatcgcacagtctctggtgggcagtatgttgtggctgccgctcccaacttacagaaccagcaagttctgacaggactacctggagtgatgcctaatattcagtatcaagtaatcccacagttccagaccgttgatgggcaacagctgcagtttgctgccactggggcccaagtgcagcaggatggttctggtcaaatacagatcataccaggtgcaaaccaacagattatcacaaatcgaggaagtggaggcaacatcattgctgctatgccaaacctactccagcaggctgtccccctccaaggcctggctaataatgtactctcaggacagactcagtatgtgaccaatgtaccagtggccctgaatgggaacatcaccttgctacctgtcaacagcgtttctgcagctaccttgactcccagctctcaggcagtcacgatcagcagctctgggtcccaggagagtggctcacagcctgtcacctcagggactaccatcagttctgccagcttggtatcatcacaagccagttccagctcctttttcaccaatgccaatagctactcaactactactaccaccagcaacatgggaattatgaactttactaccagtggatcatcagggaccaactctcaaggccagacaccccagagggtcagtgggctacaggggtctgatgctctgaacatccagcaaaaccagacatctggaggctcattgcaagcaggccagcaaaaagaaggagagcaaaaccagcagacacagcagcaacaaattcttatccagcctcagctagttcaagggggacaggccctccaggccctccaagcagcaccattgtcagggcagacctttacaactcaagccatctcccaggaaaccctccagaacctccagcttcaggctgttccaaactctggtcccatcatcatccggacaccaacagtggggcccaatggacaggtcagttggcagactctacagctgcagaacctccaagttcagaacccacaagcccaaacaatcaccttagccccaatgcagggtgtttccttggggcagaccagcagcagcaacaccactctcacacccattgcctcagctgcttccattcctgctggcacagtcactgtgaatgctgctcaactctcctccatgccaggcctccagaccattaacctcagtgcattgggtacttcaggaatccaggtgcacccaattcaaggcctgccgttggctatagcaaatgccccaggtgatcatggagctcagcttggtctccatggggctggtggtgatggaatacatgatgacacagcaggtggagaggaaggagaaaacagcccagatgcccaaccccaagccggtcggaggacccggcgggaagcatgcacctgcccctactgtaaagacagtgaaggaaggggctcgggggatcctggcaaaaagaaacagcatatttgccacatccaaggctgtgggaaagtgtatggcaagacctctcacctgcgggcacacttgcgctggcatacaggcgagaggccatttatgtgtacctggtcatactgtgggaaacgcttcacacgttcggatgagctacagaggcacaaacgtacacacacaggtgagaagaaatttgcctgccctgagtgtcctaagcgcttcatgaggagtgaccacctgtcaaaacatatcaagacccaccagaataagaagggaggcccaggtgtagctctgagtgtgggcactttgcccctggacagtggggcaggttcagaaggcagtggcactgccactccttcagcccttattaccaccaatatggtagccatggaggccatctgtccagagggcattgcccgtcttgccaacagtggcatcaacgtcatgcaggtggcagatctgcagtccattaatatcagtggcaatggcttctgagatcaggcacccggggccagagacatatgggccataccccttaaccccgggatgcaaggtagcatgggtccaagagacatggaagagagagccatgaagcattaaaatgcatggtgttgagaagaatcaggagagggatacaagagaggagatggggtcccggcacccatctgtatcatcagtgcctctttgaaggtgggaaacattagtgaaaattctgttggtgccacgctttgatgagcatttgtttgaccccagtttcttcttacacttcttaccccagcctacccttcctgcatttctcttctcagctcttccatgatggattcccccccctttcctaaagccatcatgccttgataaatatatatgatcattgaaatactttttaacaaaaaacagattctatattattatatatatatatatatataaagatatatagagatgcattcacagggttggctggagaggaagaccattctgtgaccaaaataccttggtcattttttttatattgccttatttccctatggctgagccttgttgtgacacatcaagctt

SEQ ID NO: 386416 - DNA, 1293 bp, Homo sapiens
tttttcccggccccccccaacccccccggacaggacccccttgagcttgtccctcagctgccaccatgagcgaccaagatcactccatggatgaaatgacagctgtggtgaaaattgaaaaaggagttggtggcaataatgggggcaatggtaatggtggtggtgccttttcacaggctcgaagtagcagcacaggcagtagcagcagcactggaggaggagggcaggagtcccagccatcccctttggctctgctggcagcaacttgcagcagaattgagtcacccaatgagaacagcaacaactcccagggcccgagtcagtcagggggaacaggtgagcttgacctcacagccacacaactttcacagggtgccaatggctggcagatcatctcttcctcctctggggctacccctacctcaaaggaacagagtggcagcagtaccaatggcagcaatggcagtgagtcttccaagaatcgcacagtctctggtgggcagtatgttgtggctgccgctcccaacttacagaaccagcaagttctgacaggactacctggagtgatgcctaatattcagtatcaagtaatcccacagttccagaccgttgatgggcaacagctgcagtttgctgccactggggcccaagtgcagcaggatggttctggtcaaatacagatcataccaggtgcaaaccaacagattatcacaaatcgaggaagtggaggcaacatcattgctgctatgccaaacctactccagcaggctgtccccctccaaggcctggctaataatgtactctcaggacagactcagtatgtgaccaatgtaccagtggccctgaatgggaacatcaccttgctacctgtcaacagcgtttctgcagctaccttgactcccagctctcaggcagtcacgatcagcagctctgggtcccaggagagtggctcacagcctgtcacctcagggactaccatcagttctgccagcttggtatcatcacaagccagttccagctcctttttcaccaatgccaatagctactcaactactactaccaccagcaacatgggaattatgaactttactaccagtggatcatcagggaccaactctcaaggccagacaccccagagggtcagtgggctacaggggtctgatgctctgaacatccagcaaaaccagacatctggaggctcattgcaagcaggccagcaaaaagaaggagagcaaagaattcctctgacatatatttgagaaactgggctactgaaagccctaaccccacttg

SEQ ID NO: 386417 - DNA, 2987 bp, Homo sapiens
tttttcccggccccccccaacccccccggacaggacccccttgagcttgtccctcagctgccaccatgagcgaccaagatcactccatggatgaaatgacagctgtggtgaaaattgaaaaaggagttggtggcaataatgggggcaatggtaatggtggtggtgccttttcacaggctcgaagtagcagcacaggcagtagcagcagcactggaggaggagggcaggagtcccagccatcccctttggctctgctggcagcaacttgcagcagaattgagtcacccaatgagaacagcaacaactcccagggcccgagtcagtcagggggaacaggtgagcttgacctcacagccacacaactttcacagggtgccaatggctggcagatcatctcttcctcctctggggctacccctacctcaaaggaacagagtggcagcagtaccaatggcagcaatggcagtgagtcttccaagaatcgcacagtctctggtgggcagtatgttgtggctgccgctcccaacttacagaaccagcaagttctgacaggactacctggagtgatgcctaatattcagtatcaagtaatcccacagttccagaccgttgatgggcaacagctgcagtttgctgccactggggcccaagtgcagcaggatggttctggtcaaatacagatcataccaggtgcaaaccaacagattatcacaaatcgaggaagtggaggcaacatcattgctgctatgccaaacctactccagcaggctgtccccctccaaggcctggctaataatgtactctcaggacagactcagtatgtgaccaatgtaccagtggccctgaatgggaacatcaccttgctacctgtcaacagcgtttctgcagctaccttgactcccagctctcaggcagtcacgatcagcagctctgggtcccaggagagtggctcacagcctgtcacctcagggactaccatcagttctgccagcttggtatcatcacaagccagttccagctcctttttcaccaatgccaatagctactcaactactactaccaccagcaacatgggaattatgaactttactaccagtggatcatcagggaccaactctcaaggccagacaccccagagggtcagtgggctacaggggtctgatgctctgaacatccagcaaaaccagacatctggaggctcattgcaagcaggccagcaaaaagaaggagagcaaaaccagcagacacagcagcaacaaattcttatccagcctcagctagttcaagggggacaggccctccaggccctccaagcagcaccattgtcagggcagacctttacaactcaagccatctcccaggaaaccctccagaacctccagcttcaggctgttccaaactctggtcccatcatcatccggacaccaacagtggggcccaatggacaggtcagttggcagactctacagctgcagaacctccaagttcagaacccacaagcccaaacaatcaccttagccccaatgcagggtgtttccttggggcagaccagcagcagcaacaccactctcacacccattgcctcagctgcttccattcctgctggcacagtcactgtgaatgctgctcaactctcctccatgccaggcctccagaccattaacctcagtgcattgggtacttcaggaatccaggtgcacccaattcaaggcctgccgttggctatagcaaatgccccaggtgatcatggagctcagcttggtctccatggggctggtggtgatggaatacatgatgacacagcaggtggagaggaaggagaaaacagcccagatgcccaaccccaagccggtcggaggacccggcgggaagcatgcacctgcccctactgtaaagacagtgaaggaaggggctcgggggatcctggcaaaaagaaacagcatatttgccacatccaaggctgtgggaaagtgtatggcaagacctctcacctgcgggcacacttgcgctggcatacaggcgagaggccatttatgtgtacctggtcatactgtgggaaacgcttcacacgttcggatgagctacagaggcacaaacgtacacacacaggtgagaagaaatttgcctgccctgagtgtcctaagcgcttcatgaggagtgaccacctgtcaaaacatatcaagacccaccagaataagaagggaggcccaggtgtagctctgagtgtgggcactttgcccctggacagtggggcaggttcagaaggcagtggcactgccactccttcagcccttattaccaccaatatggtagccatggaggccatctgtccagagggcattgcccgtcttgccaacagtggcatcaacgtcatgcaggtggcagatctgcagtccattaatatcagtggcaatggcttctgagatcaggcacccggggccagagacatatgggccataccccttaaccccgggatgcaaggtagcatgggtccaagagacatggaagagagagccatgaagcattaaaatgcatggtgttgagaagaatcaggagagggatacaagagaggagatggggtcccggcacccatctgtatcatcagtgcctctttgaaggtgggaaacattagtgaaaattctgttggtgccacgctttgatgagcatttgtttgaccccagtttcttcttacacttcttaccccagcctacccttcctgcatttctcttctcagctcttccatgatggattcccccccctttcctaaagccatcatgccttgataaatatatatgatcattgaaatactttttaacaaaaaacagattctatattattatatatatatatatatataaagatatatagagatgcattcacagggttggctggagaggaagaccattctgtgaccaaaataccttggtcattttttttatattgccttatttccctatggctgagccttgttgtgacacatcaagctt

SEQ ID NO: 386418 - DNA, 2961 bp, Homo sapiens
agcgaaggccccgcccgggccaaccgcctgcctggtccgccctctgaccaagatcactccatggatgaaatgacagctgtggtgaaaattgaaaaaggagttggtggcaataatgggggcaatggtaatggtggtggtgccttttcacaggctcgaagtagcagcacaggcagtagcagcagcactggaggaggagggcaggagtcccagccatcccctttggctctgctggcagcaacttgcagcagaattgagtcacccaatgagaacagcaacaactcccagggcccgagtcagtcagggggaacaggtgagcttgacctcacagccacacaactttcacagggtgccaatggctggcagatcatctcttcctcctctggggctacccctacctcaaaggaacagagtggcagcagtaccaatggcagcaatggcagtgagtcttccaagaatcgcacagtctctggtgggcagtatgttgtggctgccgctcccaacttacagaaccagcaagttctgacaggactacctggagtgatgcctaatattcagtatcaagtaatcccacagttccagaccgttgatgggcaacagctgcagtttgctgccactggggcccaagtgcagcaggatggttctggtcaaatacagatcataccaggtgcaaaccaacagattatcacaaatcgaggaagtggaggcaacatcattgctgctatgccaaacctactccagcaggctgtccccctccaaggcctggctaataatgtactctcaggacagactcagtatgtgaccaatgtaccagtggccctgaatgggaacatcaccttgctacctgtcaacagcgtttctgcagctaccttgactcccagctctcaggcagtcacgatcagcagctctgggtcccaggagagtggctcacagcctgtcacctcagggactaccatcagttctgccagcttggtatcatcacaagccagttccagctcctttttcaccaatgccaatagctactcaactactactaccaccagcaacatgggaattatgaactttactaccagtggatcatcagggaccaactctcaaggccagacaccccagagggtcagtgggctacaggggtctgatgctctgaacatccagcaaaaccagacatctggaggctcattgcaagcaggccagcaaaaagaaggagagcaaaaccagcagacacagcagcaacaaattcttatccagcctcagctagttcaagggggacaggccctccaggccctccaagcagcaccattgtcagggcagacctttacaactcaagccatctcccaggaaaccctccagaacctccagcttcaggctgttccaaactctggtcccatcatcatccggacaccaacagtggggcccaatggacaggtcagttggcagactctacagctgcagaacctccaagttcagaacccacaagcccaaacaatcaccttagccccaatgcagggtgtttccttggggcagaccagcagcagcaacaccactctcacacccattgcctcagctgcttccattcctgctggcacagtcactgtgaatgctgctcaactctcctccatgccaggcctccagaccattaacctcagtgcattgggtacttcaggaatccaggtgcacccaattcaaggcctgccgttggctatagcaaatgccccaggtgatcatggagctcagcttggtctccatggggctggtggtgatggaatacatgatgacacagcaggtggagaggaaggagaaaacagcccagatgcccaaccccaagccggtcggaggacccggcgggaagcatgcacctgcccctactgtaaagacagtgaaggaaggggctcgggggatcctggcaaaaagaaacagcatatttgccacatccaaggctgtgggaaagtgtatggcaagacctctcacctgcgggcacacttgcgctggcatacaggcgagaggccatttatgtgtacctggtcatactgtgggaaacgcttcacacgttcggatgagctacagaggcacaaacgtacacacacaggtgagaagaaatttgcctgccctgagtgtcctaagcgcttcatgaggagtgaccacctgtcaaaacatatcaagacccaccagaataagaagggaggcccaggtgtagctctgagtgtgggcactttgcccctggacagtggggcaggttcagaaggcagtggcactgccactccttcagcccttattaccaccaatatggtagccatggaggccatctgtccagagggcattgcccgtcttgccaacagtggcatcaacgtcatgcaggtggcagatctgcagtccattaatatcagtggcaatggcttctgagatcaggcacccggggccagagacatatgggccataccccttaaccccgggatgcaaggtagcatgggtccaagagacatggaagagagagccatgaagcattaaaatgcatggtgttgagaagaatcaggagagggatacaagagaggagatggggtcccggcacccatctgtatcatcagtgcctctttgaaggtgggaaacattagtgaaaattctgttggtgccacgctttgatgagcatttgtttgaccccagtttcttcttacacttcttaccccagcctacccttcctgcatttctcttctcagctcttccatgatggattcccccccctttcctaaagccatcatgccttgataaatatatatgatcattgaaatactttttaacaaaaaacagattctatattattatatatatatatatatataaagatatatagagatgcattcacagggttggctggagaggaagaccattctgtgaccaaaataccttggtcattttttttatattgccttatttccctatggctgagccttgttgtgacacatcaagctt

SEQ ID NO: 386419 - DNA, 2842 bp, Homo sapiens
tgctgtttatttgttgtatattgccccctaggctggcagctgggtgtcactaactcctttcctctcccttattttcggccaggagtcccagccatcccctttggctctgctggcagcaacttgcagcagaattgagtcacccaatgagaacagcaacaactcccagggcccgagtcagtcagggggaacaggtgagcttgacctcacagccacacaactttcacagggtgccaatggctggcagatcatctcttcctcctctggggctacccctacctcaaaggaacagagtggcagcagtaccaatggcagcaatggcagtgagtcttccaagaatcgcacagtctctggtgggcagtatgttgtggctgccgctcccaacttacagaaccagcaagttctgacaggactacctggagtgatgcctaatattcagtatcaagtaatcccacagttccagaccgttgatgggcaacagctgcagtttgctgccactggggcccaagtgcagcaggatggttctggtcaaatacagatcataccaggtgcaaaccaacagattatcacaaatcgaggaagtggaggcaacatcattgctgctatgccaaacctactccagcaggctgtccccctccaaggcctggctaataatgtactctcaggacagactcagtatgtgaccaatgtaccagtggccctgaatgggaacatcaccttgctacctgtcaacagcgtttctgcagctaccttgactcccagctctcaggcagtcacgatcagcagctctgggtcccaggagagtggctcacagcctgtcacctcagggactaccatcagttctgccagcttggtatcatcacaagccagttccagctcctttttcaccaatgccaatagctactcaactactactaccaccagcaacatgggaattatgaactttactaccagtggatcatcagggaccaactctcaaggccagacaccccagagggtcagtgggctacaggggtctgatgctctgaacatccagcaaaaccagacatctggaggctcattgcaagcaggccagcaaaaagaaggagagcaaaaccagcagacacagcagcaacaaattcttatccagcctcagctagttcaagggggacaggccctccaggccctccaagcagcaccattgtcagggcagacctttacaactcaagccatctcccaggaaaccctccagaacctccagcttcaggctgttccaaactctggtcccatcatcatccggacaccaacagtggggcccaatggacaggtcagttggcagactctacagctgcagaacctccaagttcagaacccacaagcccaaacaatcaccttagccccaatgcagggtgtttccttggggcagaccagcagcagcaacaccactctcacacccattgcctcagctgcttccattcctgctggcacagtcactgtgaatgctgctcaactctcctccatgccaggcctccagaccattaacctcagtgcattgggtacttcaggaatccaggtgcacccaattcaaggcctgccgttggctatagcaaatgccccaggtgatcatggagctcagcttggtctccatggggctggtggtgatggaatacatgatgacacagcaggtggagaggaaggagaaaacagcccagatgcccaaccccaagccggtcggaggacccggcgggaagcatgcacctgcccctactgtaaagacagtgaaggaaggggctcgggggatcctggcaaaaagaaacagcatatttgccacatccaaggctgtgggaaagtgtatggcaagacctctcacctgcgggcacacttgcgctggcatacaggcgagaggccatttatgtgtacctggtcatactgtgggaaacgcttcacacgttcggatgagctacagaggcacaaacgtacacacacaggtgagaagaaatttgcctgccctgagtgtcctaagcgcttcatgaggagtgaccacctgtcaaaacatatcaagacccaccagaataagaagggaggcccaggtgtagctctgagtgtgggcactttgcccctggacagtggggcaggttcagaaggcagtggcactgccactccttcagcccttattaccaccaatatggtagccatggaggccatctgtccagagggcattgcccgtcttgccaacagtggcatcaacgtcatgcaggtggcagatctgcagtccattaatatcagtggcaatggcttctgagatcaggcacccggggccagagacatatgggccataccccttaaccccgggatgcaaggtagcatgggtccaagagacatggaagagagagccatgaagcattaaaatgcatggtgttgagaagaatcaggagagggatacaagagaggagatggggtcccggcacccatctgtatcatcagtgcctctttgaaggtgggaaacattagtgaaaattctgttggtgccacgctttgatgagcatttgtttgaccccagtttcttcttacacttcttaccccagcctacccttcctgcatttctcttctcagctcttccatgatggattcccccccctttcctaaagccatcatgccttgataaatatatatgatcattgaaatactttttaacaaaaaacagattctatattattatatatatatatatatataaagatatatagagatgcattcacagggttggctggagaggaagaccattctgtgaccaaaataccttggtcattttttttatattgccttatttccctatggctgagccttgttgtgacacatcaagctt

SEQ ID NO: 386420 - DNA, 620 bp, Homo sapiens
aaaaaagacaagtaactcttaggagaagcactaactcaaattagaaactacagtattgtgtccactcttactctgtgactgaagacacagtcacatgttttcagtgttaatatttcagagaagaacaggtgtcagtcctagaaggaattacacagaaggggggccctgttccctccagggtcaggtgtcaaagctggctgggaacctggacttcactcaatcggcccctttccttctgtccacaagcatctgcctgtggcttctactgcagacaactcacccccatactgtgccttctgtgccctataactggggagaaaagaatagaatgagggttctctcctgtatatccataatcttactgatgaactgatttgctgacttcaccaaatcgagaataaactggaatcaagatgttccctgctcttgagggataatagtctacaagacagttgtactactgcaaaaacacataacacaacttgcatctttttaatttcaggaaagagagaagtcataccaaaatataaaacaataaatcagaaataaaatctcatattcatgtatgatgctgtttacctttgatataccaaataaaactattaaaataatacaagaaa

SEQ ID NO: 386421 - DNA, 354 bp, Homo sapiens
gagagattgatttaaagaaaaataatgcttgactatctgaaataatattttaaccctatcataaaatctctgcctggtagaacagctgactgtggaagggtaaaatgcagagaaccagtcattggatctcccttctctactttgttactgaaatcttgaacctgtagaacattacttatcactgtgttcctttctaatgggaaaataataataaacacttgcagagtattttttaaaagtttttagctttaaaaaaaaaaaaccctgtgccttacacaatgtgtatattgagttgatactgattatgataattagatggtattatacaatcattcattcagcaaacattcactt

SEQ ID NO: 386422 - DNA, 412 bp, Homo sapiens
aaacccacctcctccttcaatgcctcttcagtgccctccacagttgtgccagctgacaaaggaaaagtagttaaagggcccagctccatcttcacagcacaggcaatgatgggcgaataaactgataactggcacagtttacccctttggctgcacagcttccatttgcacctttctacaacatctgaactcccatacaaaaacaaacaactggatgtctacctatcaagatagttatccttcttatgaaattctcacccttttgcccagagagccccaaccatcattctaccaatccctggctacaataacttctcaaagtcagtcacagtctcactgaatattctgttacctaaagactacattataaagctaactgtcaacaacttgtatagaaaagaatgggaaggag

SEQ ID NO: 386423 - DNA, 464 bp, Homo sapiens
gactcgtgggtgacccccagtcttggcttctgccgcacagaactgacagtgtggggaattagtggccaccctcctacctcaggtcctttgcacatgctgtggttctcgagtgctcagtgctgagatgaggaatgcatgggggcattgcagccctcgggcatggtgagatggatgggtgaaagggagagggccaggtgaacagagaccttggccacccactccctgtcactccaaactaacgcttcccagatgccaccctcagccctgcaccacctgacccactcactcagtagttgccccagctccacactgggtccctataagaccctgtcatatcccttcccgctgaggatcctcacatccctccttacctacttgggtccttggcattcctgggcggatctgcagacccccccacactgaccagtgacctcccaggaggggcgtcagctgcccaggtggtg

SEQ ID NO: 386424 - DNA, 2929 bp, Homo sapiens
cgggtacagggggcccaagagctgggctggctgtctcctgctcatccagccatgcggtggctgtggcccctggctgtctctcttgctgtgattttggctgtggggctaagcagggtctctgggggtgcccccctgcacctgggcaggcacagagccgagacccaggagcagcagagccgatccaagaggggcaccgaggatgaggaggccaagggcgtgcagcagtatgtgcctgaggagtgggcggagtacccccggcccattcaccctgctggcctgcagccaaccaagcccttggtggccaccagccctaaccccgacaaggatgggggcaccccagacagtgggcaggaactgaggggcaatctgacaggggcaccagggcagaggctacagatccagaaccccctgtatccggtgaccgagagctcctacagtgcctatgccatcatgcttctggcgctggtggtgtttgcggtgggcattgtgggcaacctgtcggtcatgtgcatcgtgtggcacagctactacctgaagagcgcctggaactccatccttgccagcctggccctctgggattttctggtcctctttttctgcctccctattgtcatcttcaacgagatcaccaagcagaggctactgggtgacgtttcttgtcgtgccgtgcccttcatggaggtctcctctctgggagtcacgactttcagcctctgtgccctgggcattgaccgcttccacgtggccaccagcaccctgcccaaggtgaggcccatcgagcggtgccaatccatcctggccaagttggctgtcatctgggtgggctccatgacgctggctgtgcctgagctcctgctgtggcagctggcacaggagcctgcccccaccatgggcaccctggactcatgcatcatgaaaccctcagccagcctgcccgagtccctgtattcactggtgatgacctaccagaacgcccgcatgtggtggtactttggctgctacttctgcctgcccatcctcttcacagtcacctgccagctggtgacatggcgggtgcgaggccctccagggaggaagtcagagtgcagggccagcaagcacgagcagtgtgagagccagctcaacagcaccgtggtgggcctgaccgtggtctacgccttctgcaccctcccagagaacgtctgcaacatcgtggtggcctacctctccaccgagctgacccgccagaccctggacctcctgggcctcatcaaccagttctccaccttcttcaagggcgccatcaccccagtgctgctcctttgcatctgcaggccgctgggccaggccttcctggactgctgctgctgctgctgctgtgaggagtgcggcggggcttcggaggcctctgctgccaatgggtcggacaacaagctcaagaccgaggtgtcctcttccatctacttccacaagcccagggagtcacccccactcctgcccctgggcacaccttgctgaggccccagtaggggtggggagggagggagaggccgccacccccgccggtgtctgctgttctttccccataggtcttgctttgttgcctgtcttgctgtctagggatggacttggttcctcttgtcaaggtttgggaatgtcaaagccccctccccacacagggcctttcctgtcccttgtggggccttccaaccctgtcctttccactggtgggcggtgatgcttctaggtccttagaactgcccagaaactctgagtcccagcagctgggagccagaactttgcctgccctcccttggttccagtctctcttctctctctctgccttggaacctgaccatactttagttgtgcccttcccaggcatcatcctcctaccaccaacctggggccccatcttggaatgggggctccttggggccagcccagtgtggctcaccacactcttctttttttttttttttttttttggagatggagtcttgctctgttgcccaggctggagtccatttggcctgatgtcagctccctgaacctccgcctcctgggttcaagcgattctcctgcctcagcctcctgagtagctgggattacaggtgtgcaccaacacacccggctaatttttgtatttgtagaagaggcggggtttcaccatgttggccaggctggtgttgaactcctgacctcaagtgatctgcctgccttggcctcccaaagtgctgggattacaggtgtgagctgccacgcccagccccagtacactcttctctggaccagatctgtcccagtcctggatgcctcctcctactggtgccttcttttcttccagaggatttctctctccttcctcctcctttctttgggatccctgggttgccctgtcccaacctccttgttaggtgctttcccataggaggcccttcttgagaaacaataaactaggtagaactacccctatgcccatccactttcttgtgccacattctggcagggcccagatgcagctgggccttcctggcctggcagtgcctaggagaatttctcctgacctggcctggcctgtggctgatgttcagaacagccttgtggccgatgttcagaacagccttgtggccctggcgactccaagggttttatggcttttgagggacagagaggatggagggcttggggagccggaggacctaagtcctcatcctggcctaaaccccatgctccttgggaagtcaaaagcctggaaaatatctcctctggagccttcatctctgctatgccctctctccacaaagccccccttggagggagtccagtggtctttcctctgtgagccccagggcttcccagcctttgtcactctgagagctgctcttgttcagtttcttagaatggactgttttgcctgtagacggcccagctgcctgccctggcctgc

SEQ ID NO: 386425 - DNA, 514 bp, Homo sapiens
ctggccctctgggattttctggtcctctttttctgcctccctattgtcatcttcaacgagatcaccaagcagaggctactgggtgacgtttcttgtcgtgccgtgcccttcatggaggtgagtgtgtgttctgtttgagctctgctgggaggctgcaatccagggaagggactcaaagtctccatcaggtctttggaaatggaatttgtgggtgtgcaaaacctgagtcttggagctctgacttgctcctcctttaccttggagaaggagacaaatacggtattggtttctggttgctctcaagagaagtaggcaggccagggggacaggcgggtgtgtggggcccctgggttccagccccagcctgatcttctgcttcgggagcaacctcaaggcaggcctttgccactttctccagaccctaagctgccctctcccttcctcagcccttctcccctgtcccacccaagatacctctgtcctttgttgtgactcctcttctttcctctgtacc

SEQ ID NO: 386426 - DNA, 1293 bp, Homo sapiens
aggcggatccagccggccagctgcctctctggagcccagctcttgggccccctgcactcacctgctcttcctgggctggctgtctcctgctcatccagccatgcggtggctgtggcccctggctgtctctcttgctgtgattttggctgtggggctaagcagggtctctgggggtgcccccctgcacctgggcaggcacagagccgagacccaggagcagcagagccgatccaagaggggcaccgaggatgaggaggccaagggcgtgcagcagtatgtgcctgaggagtgggcggagtacccccggcccattcaccctgctggcctgcagccaaccaagcccttggtggccaccagccctaaccccgacaaggatgggggcaccccagacagtgggcaggaactgaggggcaatctgacaggggcaccagggcagaggctacagatccagaaccccctgtatccggtgaccgagagctcctacagtgcctatgccatcatgcttctggcgctggtggtgtttgcggtgggcattgtgggcaacctgtcggtcatgtgcatcgtgtggcacagctactacctgaagagcgcctggaactccatccttgccagccccagtacactcttctctggaccagatctgtcccagtcctggatgcctcctcctactggtgccttcttttcttccagaggatttctctctccttcctcctcctttctttgggatccctgggttgccctgtcccaacctccttgttaggtgctttcccataggaggcccttcttgagaaacaataaactaggtagaactacccctatgcccatccactttcttgtgccacattctggcagggcccagatgcagctgggccttcctggcctggcagtgcctaggagaatttctcctgacctggcctggcctgtggctgatgttcagaacagccttgtggccgatgttcagaacagccttgtggccctggcgactccaagggttttatggcttttgagggacagagaggatggagggcttggggagccggaggacctaagtcctcatcctggcctaaaccccatgctccttgggaagtcaaaagcctggaaaatatctcctctggagccttcatctctgctatgccctctctccacaaagccccccttggagggagtccagtggtctttcctctgtgagccccagggcttcccagcctttgtcactctgagagctgctcttgttcagtttcttagaatggactgttttgcctgtagacggcccagctgcctgccctggcctgc

SEQ ID NO: 386427 - DNA, 2969 bp, Homo sapiens
gctggtactggcccggaatcgttgggatagctcttgggccccctgcactcacctgctcttcctgggctggctgtctcctgctcatccagccatgcggtggctgtggcccctggctgtctctcttgctgtgattttggctgtggggctaagcagggtctctgggggtgcccccctgcacctgggcaggcacagagccgagacccaggagcagcagagccgatccaagaggggcaccgaggatgaggaggccaagggcgtgcagcagtatgtgcctgaggagtgggcggagtacccccggcccattcaccctgctggcctgcagccaaccaagcccttggtggccaccagccctaaccccgacaaggatgggggcaccccagacagtgggcaggaactgaggggcaatctgacaggggcaccagggcagaggctacagatccagaaccccctgtatccggtgaccgagagctcctacagtgcctatgccatcatgcttctggcgctggtggtgtttgcggtgggcattgtgggcaacctgtcggtcatgtgcatcgtgtggcacagctactacctgaagagcgcctggaactccatccttgccagcctggccctctgggattttctggtcctctttttctgcctccctattgtcatcttcaacgagatcaccaagcagaggctactgggtgacgtttcttgtcgtgccgtgcccttcatggaggtctcctctctgggagtcacgactttcagcctctgtgccctgggcattgaccgcttccacgtggccaccagcaccctgcccaaggtgaggcccatcgagcggtgccaatccatcctggccaagttggctgtcatctgggtgggctccatgacgctggctgtgcctgagctcctgctgtggcagctggcacaggagcctgcccccaccatgggcaccctggactcatgcatcatgaaaccctcagccagcctgcccgagtccctgtattcactggtgatgacctaccagaacgcccgcatgtggtggtactttggctgctacttctgcctgcccatcctcttcacagtcacctgccagctggtgacatggcgggtgcgaggccctccagggaggaagtcagagtgcagggccagcaagcacgagcagtgtgagagccagctcaacagcaccgtggtgggcctgaccgtggtctacgccttctgcaccctcccagagaacgtctgcaacatcgtggtggcctacctctccaccgagctgacccgccagaccctggacctcctgggcctcatcaaccagttctccaccttcttcaagggcgccatcaccccagtgctgctcctttgcatctgcaggccgctgggccaggccttcctggactgctgctgctgctgctgctgtgaggagtgcggcggggcttcggaggcctctgctgccaatgggtcggacaacaagctcaagaccgaggtgtcctcttccatctacttccacaagcccagggagtcacccccactcctgcccctgggcacaccttgctgaggccccagtaggggtggggagggagggagaggccgccacccccgccggtgtctgctgttctttccccataggtcttgctttgttgcctgtcttgctgtctagggatggacttggttcctcttgtcaaggtttgggaatgtcaaagccccctccccacacagggcctttcctgtcccttgtggggccttccaaccctgtcctttccactggtgggcggtgatgcttctaggtccttagaactgcccagaaactctgagtcccagcagctgggagccagaactttgcctgccctcccttggttccagtctctcttctctctctctgccttggaacctgaccatactttagttgtgcccttcccaggcatcatcctcctaccaccaacctggggccccatcttggaatgggggctccttggggccagcccagtgtggctcaccacactcttctttttttttttttttttttttggagatggagtcttgctctgttgcccaggctggagtccatttggcctgatgtcagctccctgaacctccgcctcctgggttcaagcgattctcctgcctcagcctcctgagtagctgggattacaggtgtgcaccaacacacccggctaatttttgtatttgtagaagaggcggggtttcaccatgttggccaggctggtgttgaactcctgacctcaagtgatctgcctgccttggcctcccaaagtgctgggattacaggtgtgagctgccacgcccagccccagtacactcttctctggaccagatctgtcccagtcctggatgcctcctcctactggtgccttcttttcttccagaggatttctctctccttcctcctcctttctttgggatccctgggttgccctgtcccaacctccttgttaggtgctttcccataggaggcccttcttgagaaacaataaactaggtagaactacccctatgcccatccactttcttgtgccacattctggcagggcccagatgcagctgggccttcctggcctggcagtgcctaggagaatttctcctgacctggcctggcctgtggctgatgttcagaacagccttgtggccgatgttcagaacagccttgtggccctggcgactccaagggttttatggcttttgagggacagagaggatggagggcttggggagccggaggacctaagtcctcatcctggcctaaaccccatgctccttgggaagtcaaaagcctggaaaatatctcctctggagccttcatctctgctatgccctctctccacaaagccccccttggagggagtccagtggtctttcctctgtgagccccagggcttcccagcctttgtcactctgagagctgctcttgttcagtttcttagaatggactgttttgcctgtagacggcccagctgcctgccctggcctgc

SEQ ID NO: 386428 - DNA, 339 bp, Homo sapiens
tgagagatcaagcctctttcccaaaacacatgactaagttagtaagaaaaagaatattttggtacataacagtatgaaacagaaaaaagtacataactgaaacaatgtaacttctccacacatctgtggaacagcacttaatcaggaacccttaagtatttagggaattgaaacttaaaatcagtcctatttattgaagattggtaagacaaacaaaactctaaaatagaatgtaaactaattaaatattattacatgaattaaatttatacagctttgcaggatcatacgtatgtcttaagatgtgtttcaggcttcattttgactgggcctttccat

SEQ ID NO: 386429 - DNA, 132 bp, Homo sapiens
tacttaaaggagggtgataagaaatacgtgtggcataggctggggaggaaaagagagctaagcgatcattttctaaagtggaaaattcagcgataatacctaaaactaaacactccacaggcagcaatttaa

SEQ ID NO: 386430 - DNA, 243 bp, Homo sapiens
agaagacaatgaaaacacacatcatattaccgctccagagatgctgtgaacatttttatgtattaggaaatagatatttatagtcattagtatagtatgtaaaaatgagagcctattaaaacgtgcagcagtgacctatagaaaccaaaggtaaaaaaaaatctgtgtttgaaatctgtttgttgcctgtccaagtgctcactgcagctccccagtgtgttatggagcacaggttcttaaaac

SEQ ID NO: 386431 - DNA, 466 bp, Homo sapiens
agaccctcagattgaagagatcatttaaagacgaagatgataaaggaaaagccacacttagacaaattacagtacaatttaggacctcaaagacaaacaaaaaatcctaaaagttgatagagaaaaggcggattgcataaaaaagaaagaagcagcaaatttctatcagaattcaaaaaaataaacaactggaagcaagaagactatcgtgtcttttcaaagaattaaaggaaaagaaatctgaacttagaatgatatgtccaaactgtcatccaaagatcagagcataataaaaaatattctcagaaatacaaagcatcagcagctgagaccttcactgaaaatagtttttgatgaagtactaaaataagagattattaaaatccgggagaatgagaagacagaataatacctaatgtattttacctgataaagtttgttatctataaaataaatatctaagacc

SEQ ID NO: 386432 - DNA, 188 bp, Homo sapiens
agtgggatggggacacagacgaggaaagagagagaaaacagaaaatgcagagaaggagtgtgacaggcctgaggcaccaagagaactccagtctagctggagtgtggtgtgaggtgaagcaggggacaggcagctgttggagggccttcaaagccagaggaggggttttggattttatgtgaaggaca

SEQ ID NO: 386433 - DNA, 415 bp, Homo sapiens
caaatagatggcctattttggggttttaccttgtgactgtgtgagtcaatactctttaataagctttccttcacatatacacctatcctgttagttctgtccctctagaaaaccctaatatacttcccaactaattttatgaattcatcattactctgatacaaaacaatataaagacattacaaataaatgaaactacacaccaatatttcttatgaatactcacacaaaaattctcaaaatattggctaattgaattcagtaatatattaaaaatgcaaaagtacaatgaggaaatgaggtttatattgaaaattcagggttccttcacatttgcatgttatatgataatctcagtaaatgagaaaaaaagcatttaataagattcaacatccattaatattaaaatctctca

SEQ ID NO: 386434 - DNA, 877 bp, Homo sapiens
  misc_feature (877)..(877): n is a, c, g, or t
cgcctcagtgagccgagcagaggggccgcctccgcccgcacccagcatgcttcgccgaggctataaggcctctgaaaggcgaagacacttgagcgagaggctcagctggcaccaagaccaggcgctgagtagcagcatctacctcctacgagagatgggccccactggcttcctgctgagggaggaggagccggaatacatggatttccgagtttttctaggaaatcctcacgtttgtaactgttccacatttccgaaaggaggggaactttgtaagcatatctgctgggtcttgttgaaaaaattcaagcttccaaggaaccatgaatctgctttacaactgggtcttggagaaagagagataagtgacttgcttcgggggatacatcgagttcaaactccccaaccaggaacaaatgacgaaaatgaacatgttgaagaagatgggtacattaaacagaaggaaattgattcagaggatatctgctctatttgtcaagagctacttttagagaaaaagcttcctgtcaccttttgcaggtttggctgtggcaatagtattcatataaaatgcatgaagatcttagctaattatcagagtacatcaaacacttccatgttgaaatgtcctctgtgcaggaaagagtttgcaccattaaaactgattttggaggaattcaaaaactctagcaaactagtagctgcagcagaaaacagagagactggacaaacacctcggggattctctgttattacttgcaaacagtttcccaattgagggggaagtggtataagtgtaccggaatgctttgaatattcttatggcagaatgttcggaagcaacgggcatctttccaccgtttaaattctgggaacn

SEQ ID NO: 386435 - DNA, 434 bp, Homo sapiens
aagaacctcagccttctttccctactcagctcctcagaagcccagcagcccagaaataccctcccggaatgaaatgagaagaggcagttttctccctgagcaatgtttttcaaactttttgacccaaaagcccacagtaaggaatacatttgatttcataactaaaacccacaaataaatataaatacataacagaaacaaaatttcaggaaaaaaaccactcatcactactatgggcaaggcattttgatatctactgctctgtttcacttaaaaaaaaaatgtgggccaggagtggtggctcatgcctataatcacaacactttgggaggctgaggtgggagaattgctcaaccctgggaggttgtggctgcagtgagttgtgatcatcccactgcactccagcctgggtgacagagtgacattctgtctca

SEQ ID NO: 386436 - DNA, 1477 bp, Homo sapiens
ggcacgagcgcttagagggagctgtgttttggtgacctctgaaactcagtactgcagcgaatgagctcctgaccttgaggagtacttaacagaattatgtctcgaagaatcattgtgggaacccttcaaagaacccagcgaaacatgaattctggaatctcgcaagtcttccagagggaactcacctgccccatctgcatgaactacttcatagacccggtcaccatagactgtgggcacagcttttgcaggccctgtttctacctcaactggcaagacatcccaattcttactcagtgctttgaatgcataaagacaatacagcagagaaacctcaaaactaacattcgattgaagaagatggcttcccttgccagaaaagccagtctctggctattcctgagctctgaggagcaaatgtgtggcattcacagggagacaaagaagatgttctgtgaagtggacaggagcctgctctgtttgctgtgctccagctctcaggagcaccggtatcacagacactgtcccgctgagtgggctgctgaggaacactgggagaagctgttaaagaaaatgcagtctttatgggaaaaagcttgtgaaaatcagagaaacctgaatgtggaaaccaccagaatcagccactggaaggctttggagacatattatacgcttttggagacatattatacagaggagtgagtccgtgctgctgcacatgccccagcctctgaatctagcgctcagggcagggcccatcactggactgagggacaggctcaaccaattctgagtggatattactctgcatcacaaatgaagccaacagtcatatcttccgatgtggagatttgagaagcatttgtattggatgtgaccgtcaaaatccgccccatatcactgcaacacctacaagttttcttgcatggggtgctcagactttcacctctggcaaatattactgggaggtccatgtgggggactcttggaattgggcttttggtgtctgtaataagtattggaaagggaagaatcagaatggcaatatatatggagaggagggactctttagtcttgggtgtgttaagaacgacattcagtgcagtctctttaccacctccccaattacactgcagtatgtcccaagacctaccaaccatgtagaattattcctggattgtgaagctagaactgtgagcttcgttgatgttagtcaaagctcccctatatacaccatccctaattgctccttctcacctcctctcagacctatctttttctgtattctcctctgaccagagacaaatcagaaatgtgttcatctgctgtgggaacccctttatcccagaaagccctcttccttgtgccttatcaaacaggacaaataggttcggttttatgtcttgaattgcattctaatgttattaaaactcatttattgtgttactattaaatgtagtaaaaacactaaaagtat

SEQ ID NO: 386437 - DNA, 322 bp, Homo sapiens
aaatgccatttactagggacttatttgtctctcattctgggccccctcccaatgaaacggtctgtatgttactttattgtcttcactggtgcttcaatttatggctcttttgcaggagaagctgttaaagaaaatgcagtctttatgggaaaaagcttgtgaaaatcagagaaacctgaatgtggaaaccaccagaatcagccactggaaggctttggagacatattatactgtaataccctaccttctccaggaacttatggtgggcaaatgggtgactcttaaaataggaacttgatatcaaaccgtaatgtttctggga

SEQ ID NO: 386438 - DNA, 1245 bp, Homo sapiens
ggcacgagcgcttagagggagctgtgttttggtgacctctgaaactcagtactgcagcgaatgagctcctgaccttgaggagtacttaacagaattatgtctcgaagaatcattgtgggaacccttcaaagaacccagcgaaacatgaattctggaatctcgcaagtcttccagagggaactcacctgccccatctgcatgaactacttcatagacccggtcaccatagactgtgggcacagcttttgcaggccctgtttctacctcaactggcaagacatcccaattcttactcagtgctttgaatgcataaagacaatacagcagagaaacctcaaaactaacattcgattgaagaagatggcttcccttgccagaaaagccagtctctggctattcctgagctctgaggagcaaatgtgtggcattcacagggagacaaagaagatgttctgtgaagtggacaggagcctgctctgtttgctgtgctccagctctcaggagcaccggtatcacagacactgtcccgctgagtgggctgctgaggaacactgggagaagctgttaaagaaaatgcagtctttatgggaaaaagcttgtgaaaatcagagaaacctgaatgtggaaaccaccagaatcagccactggaaggctttggagacatattatacaggagtgagtccgtgctgctgcacatgccccagcctctgaatctagcgctcagggcagggcccatcactggactgagggacaggctcaaccaattctgagtggatattactctgcatcacaaatgaagccaacagtcatatcttccgatgtggagatttgagaagcatttgtattggatgtgaccgtcaaaatccgccccatatcactgcaacacctacaagttttcttgcatggggtgctcagactttcacctctggcaaatattactgggaggtccatgtgggggactcttggaattgggcttttggtgtctgtaataagtattggaaagggaagaatcagaatggcaatatatatggagaggagggactctttagtcttgggtgtgttaagaacgacaaatcagaaatgtgttcatctgctgtgggaacccctttatcccagaaagccctcttccttgtgccttatcaaacaggacaaataggttcggttttatgtcttgaattgcattctaatgttattaaaactcatttattgtgttactattaaatgtagtaaaaacactaaaagtat

SEQ ID NO: 386439 - DNA, 734 bp, Homo sapiens
cacagtcctcttgccttcgtgtcgaccaaagtgctgggattataggtgaaagccaccatgcccggctcttccttttttactcactgcatcagaaaactttcttgtctctgttaacaaagtgtattctaaatctcactcttttcctcctgccttggcctcctgagtctctgggattataggcacgaaccacaatgcctggcacttcttcctttaaaaaataacttgattaaggtacaattgacatacaataagtgggatatatttaaagagtaaaatttgataagttttgataggtgtatatatccatgaaatcaccaccacaatcagcagagtgaatatatcaatttctcacaaaagtttccacatgacttttcataattcctctccctttcctccctgtcccctcaacactcattacccccggaattcccaatctactttctgtcactatatatcagacagcatcttctagagttttacagtacatagagttttatagaatcatatagtatgtacttttttttctggcttctttcactcagcataattattctgagattcatccatgttgttgtttgcatcaatattttactcttttttattgctaatattctactgtgtggatttaccgcaattaatttatccatttactctttgatggacgtttaagttgtttccagcttttggctattaaaaataaagctgttatgaacatttggatacgaatctttgaa

SEQ ID NO: 386440 - DNA, 787 bp, Homo sapiens
ctagcaggactccccctgcagttcttcacatttcagagggtctgggcaacatccacatggcagcagtaggatccaggcatccacaagagaagaccaagccttatccaaggaggaagagatggagaccgagtcagatgcagaggtagcatgtgacctgagcaatatggaaatcaccgaagagctccgccagtactttgcagagacagagaggcacagagaagaactactgcggcggcaacagctggatgcggagcgcctgaacagctacgtgaacgctgaacacgacctgtactgcaacacccgccggtcggtagaggccccagctgagaggcctggtgagcggcgccaggccgaaatgaagcgtttgtactgggacagcgccgccaagatccaggccatggaggctaacgtgcagctgagctttgacaagcactgtgatccaaagcagcctaattactggccggtcatccccccgaagttctgagctcggggcacagggcacccagcctcttcctcttccttttggatacgcgctcttcatctctccttctgtacatttctcagggaaaggggactttgtactgaggtacaggcacgttcaccacagtcccagtgggcctgtcacggggtggatgtactgtgccagccacttggaggtcggcaggacatattctgttgccaacatgataaattttatcctggacataaaatgataattttgtatatattatactggttttttatgttgtcagtaacagttcaattcattaaagttcttgcctagaga

SEQ ID NO: 386441 - DNA, 725 bp, Homo sapiens
ctgacggggaaggaaggtaaaaaaggagcgctaaagattggcgggggttgtgggaaagcaagccgagtgtacgggaagggccggctgcggcccgccatgtttgaacctggcaagagcgaaagaagccggttggaatgccttcttcctgcccaaactaataaaaccgcatgcctaccttttgcttagtattggctagggatgactaatcataacatttgtaagtacttacggggtttcctccatggagacacagaagtctgggacgtttctagaagcctgtggcaaatttgaaaagcaagatacaaaatagcgtatggagtctgattatcgctatgtcaataaattttcttaaaggacaaagcactgaaataaaatggaaataataattcttttaaaaaatttttaaattatttttatagagatgggggttttgccatgttgcccaagcaggtctccaactcctggactcaagcgatccccccacccccagccccgtctccgcctcccaaagtgttaggatcacaggcgtgagccaatgcgacccgcctggaaagaattctaaaacatggcctgcttggccaccgcccaggatctgcaagctgcgcgcccacaagtttcggcacccatttggactttcacaatcggagatggcagtggtgaaggcatcaacatcaaaagctaccaggccttggtattctcatccagtatatgcaagatactggcaa

SEQ ID NO: 386442 - DNA, 467 bp, Homo sapiens
ctgacggggaaggaaggtaaaaaaggagcgctaaagattggcgggggttgtgggaaagcaagccgagtatccaggccatggaggctaacgtgcagctgagctttgacaagcactgtgatccaaagcagcctaattactggccggtcatccccccgaagttctgagctcggggcacagggcacccagcctcttcctcttccttttggatacgcgctcttcatctctccttctgtacatttctcagggaaaggggactttgtactgaggtacaggcacgttcaccacagtcccagtgggcctgtcacggggtggatgtactgtgccagccacttggaggtcggcaggacatattctgttgccaacatgataaattttatcctggacataaaatgataattttgtatatattatactggttttttatgttgtcagtaacagttcaattcattaaagttcttgcctagaga

SEQ ID NO: 386443 - DNA, 505 bp, Homo sapiens
cttatgtctgctctgcaggcctcctccggattcactgccttatcccaaacatgagatctccctgtgccctgctccatcgtggtgacgctcacacctgggagctgcccaacacggatccaaacatgagctctccctgtgccctgctccatcgtggtgatgctcacacctggagctgcccaacacggatctagcaccatttggggtttgtgcaggttctggcgcctctgctctggactggggtcagtcccgtgtgtgttttccatgggggagcactggacaagaggctcagccacaccactgctgggatgtggtctggagtgtattcacttcggtcccatctgcccaagcacagccactgctgagctcagaatccccggtgtggggaagtgttcctctgtcataggcagagcaaggcagtgtggaactggctacgtggtaatgcggtccacccctccatctcctcttaatcttatcttttaggtagaaaatgtcagagactttaagt

SEQ ID NO: 386444 - DNA, 543 bp, Homo sapiens
ctgattgaatgcacgtatcctaatatttcatcatgtgtctgtattaaaatttacttcacttttcccgtacttcttagacactcatttacacctgatattttgttgttctaaataagcctgactctcttattataataagtggaaggaaagagagggagttgctccacccttcctgggccatccacccagccatcttctctaggtccccgcttccctccaccgcacacagccccaccttaggccaccacatgctttgtggagggtcactacttgcaccctctgagccgtctggttatggtccctcagaaagatgcccctgcatccttattgtccacccgccgaaggctggcagtgggacagaccccacctcccattctgctccttctttcagttccctgcaaacctactgctctaggctctatgagtgcatcaaacattcctgaaggcttgtgtctaacaaaagaatttttggtgtaagaaaatattttaaattgtgtacaaaatgtgtcctcttctatagctcaaggggacataaaaaaaaaa

SEQ ID NO: 386445 - DNA, 242 bp, Homo sapiens
tagatgcctggggcagggcctagcaattcgtgtttttcacaatcaccctaggtgaacatgactaccagacctgtgtcttacctaccctctcccgcctccagggctacaaggcaccagaccagtgggtcctggccgctggcccctgagaggcagggcaggagctgtgtgcccctagaagcatgtgccagggggaacttgggccctggagcagctggggcagcaggtggggagaaggagggtag

SEQ ID NO: 386446 - DNA, 330 bp, Homo sapiens
atttacagctcatcatttttctctgcctagaggaattcctttttaatatttcttatagtatagatctgctggtgatggattgtttcagcttattatgtcagaaaaagtttttctgtcactttcattttgaaaggtatttttactgggtaaagaaaaagttaaagaaaagatttttttttaatttcagttctttaaaggtgctattctagtgtcttctggcttacattgtttccaacaagaaatatactcttatttttatcttagttcctctgtatgtaatatgtctttttttcctggatgctcttaagagtttgtctttatcattgattt

SEQ ID NO: 386447 - DNA, 169 bp, Homo sapiens
aataataataaatttattattgaatttttagaggtctttatatactctggatacaggtgctttattacatatgtactttgcaaatattttcttcaagtctgtgacttgtctttttcaaagagcagaagttattaattttgaagatttattatgtttattttattattat

SEQ ID NO: 386448 - DNA, 229 bp, Homo sapiens
gggtgggtggtgcggcaggtgctgtggaaagagtcctgggcgttgagaagggaggtccaggcttgggcttggctagacccactgtgtgaccctagacaagctactctgcctctcaggttctccgcttccacctaccaaacagggacgcaggccagctctttgctaatggtagcaatcatgaggcgtgtcattcatatcctgctctccccggccttcctccaaacccgtt

SEQ ID NO: 386449 - DNA, 719 bp, Homo sapiens
taccggaatctcactctgttgcccaggctggagttcagtggtgccatcttgggtcactgcaaactctgcctcccaggttcaagtgattctcctgcctcagcctcctgagtagctgagaaagaattgcttgaacccgggatgcggaagtcactgcactccagcctgggtgacagagcgagactctgtctcaaaaaagaaagaaatacattggcagcccattcagagggcccagagatctgtgtcttgcttcaacagtgtttggacggaactgatccagggactctctttcttccagcctctgaccaccttgggatctcctctccacttgcaatctccgggaccatcttcttggccatcttctgcttctgggaccagccaacaccgtttttgtggttagctccttcttgccaaccaaccatgagctcccagattcatcaaaattattccacggagggtgaggctaccatcaaccgcctggtcaatttgcacctgcgggcctcctacatctgcctctgtctgggcttctattcccaccgtgataatgtgtctctggaaggcatgggtcactttggcgaattggctgaggagaagcgccagggcacagagcgtttcctgaaaatgcaaagccaacacggcagctgcgctctcttccatgacatccagatgccggctcaagatgagtacggataaaaccctggacgcgacggaagccaccatag

SEQ ID NO: 386450 - DNA, 298 bp, Homo sapiens
ttgttccattttgtagattggtatcatcatctccctgagaaacctttactacaattaagggaggagaccacccctcatattgtcttatgcccaatttctgcctccaaaggaagaagaagtaaaaactaaaaggcagaaatgaaatccacaggcagacagcccggcgtgctgcgccctgggcctggtaaagatcaacccctgaccgattccagacattgtatggaaaagcattgtgaaaatccctgtcctgttctgttctgattacctgtgcttgcagccccctgttacgtaccccctg

SEQ ID NO: 386451 - DNA, 388 bp, Homo sapiens
cttcagcctgggtgacagaaagagactctgtcttaaaaaaaaaaaaaaagaagaagaagaaaaagaaaaaagaaaagaaagggagtgaagccgagtaaggaagaagaaagaggcaattgaaaatgtggtcttagatcaatcaagtctagtcttggtctgatgcagggaggctcttgagtctaaactacactgcaagggcattctgctatattataagggtgctgaatatccttcctgggtggagtggcttccagtaacccagggacattttctggaggaagggtgcagctgtgaactcttagctgccaacacttgcagcagccaagggatgggtgggtacatcagatccacccatctggataaaaaggtaacctggtgttatgctgaa

SEQ ID NO: 386452 - DNA, 2514 bp, Homo sapiens
cggcggcagcagcccatgcctccggtgcaacagctgcgcctcctccggtgccccggcggcgggggcgggagataacctgtccctgctgctccgcacctcctcgcccggcggcgccttccggacccgcacctcctcgccgctgtcgggctcgtcctgctgctgctgctgctgctcgtcgcgccggggcagccagctcaatgtgagcgagctgacgccgtccagccatgccagtgcgctccggcagcagtacgcgcagcagtccgcgcagcagtcggcgtccgcctcccagtaccaccagtgccacagcctgcagcccgccgccagccccacgggcagcctcggcagtctgggctccgcgcccccgctctcgcaccaccaccaccacccgcacccggcgcaccaccagcaccaccagccccaggcgcgccgcgagagcaaccccttcaccgaaatagccatgagcagctgcaggtacaacgggggcgtcatgcggccgctcagcaacttgagcgcgtcccgccggaacctccacgagatggactcagaggcgcagcccctgcagccccccgcgtctgtcggaggaggtggcggcgcgtcctccccgtctgcagccgctgccgccgccgccgctgtttcgtcctcagcccccgagatcgtggtgtctaagcccgagcacaacaactccaacaacctggcgctctatggaaccggcggcggaggcagcactggaggaggcggcggcggtggcgggagcgggcacggcagcagcagtggcaccaagtccagcaaaaagaaaaaccagaacatcggctacaagctgggccaccggcgcgccctgttcgaaaagcgcaagcggctcagcgactacgcgctcatcttcggcatgttcggcatcgtggtcatggtcatcgagaccgagctgtcgtggggcgcctacgacaaggcgtcgctgtattccttagctctgaaatgccttatcagtctctccacgatcatcctgctcggtctgatcatcgtgtaccacgccagggaaatacagttgttcatggtggacaatggagcagatgactggagaatagccatgacttatgagcgtattttcttcatctgcttggaaatactggtgtgtgctattcatcccatacctgggaattatacattcacatggacggcccggcttgccttctcctatgccccatccacaaccaccgctgatgtggatattattttatctataccaatgttcttaagactctatctgattgccagagtcatgcttttacatagcaaacttttcactgatgcctcctctagaagcattggagcacttaataagataaacttcaatacacgttttgttatgaagactttaatgactatatgcccaggaactgtactcttggtttttagtatctcattatggataattgccgcatggactgtccgagcttgtgaaaggtaccatgatcaacaggatgttactagcaacttccttggagcgatgtggttgatatcaataacttttctctccattggttatggtgacatggtacctaacacatactgtggaaaaggagtctgcttacttactggaattatgggtgctggttgcacagccctggtggtagctgtagtggcaaggaagctagaacttaccaaagcagaaaaacacgtgcacaatttcatgatggatactcagctgactaaaagagtaaaaaatgcagctgccaatgtactcagggaaacatggctaatttacaaaaatacaaagctagtgaaaaagatagatcatgcaaaagtaagaaaacatcaacgaaaattcctgcaagctattcatcaattaagaagtgtaaaaatggagcagaggaaactgaatgaccaagcaaacactttggtggacttggcaaagacccagaacatcatgtatgatatgatttctgacttaaacgaaaggagtgaagacttcgagaagaggattgttaccctggaaacaaaactagagactttgattggtagcatccacgccctccctgggctcataagccagaccatcaggcagcagcagagagatttcattgaggctcagatggagagctacgacaagcacgtcacttacaatgctgagcggtcccggtcctcgtccaggaggcggcggtcctcttccacagcaccaccaacttcatcagagagtagctagaagagaataagttaaccacaaaataagactttttgccatcatatggtcaatattttagcttttattgtaaagcccctatggttctaatcagcgttatccgggttctgatgtcagaatcctgggaacctgaacactaagttttaggccaaaatgagtgaaaactctttttttttctttcagatgcacagggaatgcacctattattgctatatagattgttcctcctgtaatttcactaactttttattcatgcacttcaaacaaactttactactacattatatgatatataataaaaaaagttaaatttctgcaca

SEQ ID NO: 386453 - DNA, 1488 bp, Homo sapiens
aaaacgtacggctaggtacgaggctgggtggtgcttcacactgtggaagctttgttctttcgctcttttgcaataaatcttgctactgctcactctttgggtccacactgcctttatgagctgtaacactcaccgcgaaaggtctgcagcttcactcctgaagccagcgagcccacgagcccacagggaggaatgaacaactccagatgcaccgccttaagagctgtaacactcacggcgaaggtctgcagcttcactcctgagccagcgagaccaggaacccaccagaaggaagaaactccgaacacatccgaacatcagaaggaacaaactccagacggcgccaccttaagagctgtaacactcaccgccagggtccggggcttcgttcttgaagtcagtgagaccaagaacccaccaattccggacgcagtaccatgatcaacaggatgttactagcaacttccttggagcgatgtggttgatatcaataacttttctctccattggttatggtgacatggtacctaacacatactgtggaaaaggagtctgcttacttactggaattatgggtgctggttgcacagccctggtggtagctgtagtggcaaggaagctagaacttaccaaagcagaaaaacacgtgcacaatttcatgatggatactcagctgactaaaagagtaaaaaatgcagctgccaatgtactcagggaaacatggctaatttacaaaaatacaaagctagtgaaaaagatagatcatgcaaaagtaagaaaacatcaacgaaaattcctgcaagctattcatcaattaagaagtgtaaaaatggagcagaggaaactgaatgaccaagcaaacactttggtggacttggcaaagacccagaacatcatgtatgatatgatttctgacttaaacgaaaggagtgaagacttcgagaagaggattgttaccctggaaacaaaactagagactttgattggtagcatccacgccctccctgggctcataagccagaccatcaggcagcagcagagagatttcattgaggctcagatggagagctacgacaagcacgtcacttacaatgctgagcggtcccggtcctcgtccaggaggcggcggtcctcttccacagcaccaccaacttcatcagagagtagctagaagagaataagttaaccacaaaataagactttttgccatcatatggtcaatattttagcttttattgtaaagcccctatggttctaatcagcgttatccgggttctgatgtcagaatcctgggaacctgaacactaagttttaggccaaaatgagtgaaaactctttttttttctttcagatgcacagggaatgcacctattattgctatatagattgttcctcctgtaatttcactaactttttattcatgcacttcaaacaaactttactactacattatatgatatataataaaaaaagttaaatttctgcaca

SEQ ID NO: 386454 - DNA, 2095 bp, Homo sapiens
cggcggcagcagcccatgcctccggtgcaacagctgcgcctcctccggtgccccggcggcgggggcgggagataacctgtccctgctgctccgcacctcctcgcccggcggcgccttccggacccgcacctcctcgccgctgtcgggctcgtcctgctgctgctgctgctgctcgtcgcgccggggcagccagctcaatgtgagcgagctgacgccgtccagccatgccagtgcgctccggcagcagtacgcgcagcagtccgcgcagcagtcggcgtccgcctcccagtaccaccagtgccacagcctgcagcccgccgccagccccacgggcagcctcggcagtctgggctccgcgcccccgctctcgcaccaccaccaccacccgcacccggcgcaccaccagcaccaccagccccaggcgcgccgcgagagcaaccccttcaccgaaatagccatgagcagctgcaggtacaacgggggcgtcatgcggccgctcagcaacttgagcgcgtcccgccggaacctccacgagatggactcagaggcgcagcccctgcagccccccgcgtctgtcggaggaggtggcggcgcgtcctccccgtctgcagccgctgccgccgccgccgctgtttcgtcctcagcccccgagatcgtggtgtctaagcccgagcacaacaactccaacaacctggcgctctatggaaccggcggcggaggcagcactggaggaggcggcggcggtggcgggagcgggcacggcagcagcagtggcaccaagtccagcaaaaagaaaaaccagaacatcggctacaagctgggccaccggcgcgccctgttcgaaaagcgcaagcggctcagcgactacgcgctcatcttcggcatgttcggcatcgtggtcatggtcatcgagaccgagctgtcgtggggcgcctacgacaaggcgtcgctgtattccttagctctgaaatgccttatcagtctctccacgatcatcctgctcggtctgatcatcgtgtaccacgccagggaaatacaggtaccatgatcaacaggatgttactagcaacttccttggagcgatgtggttgatatcaataacttttctctccattggttatggtgacatggtacctaacacatactgtggaaaaggagtctgcttacttactggaattatgggtgctggttgcacagccctggtggtagctgtagtggcaaggaagctagaacttaccaaagcagaaaaacacgtgcacaatttcatgatggatactcagctgactaaaagagtaaaaaatgcagctgccaatgtactcagggaaacatggctaatttacaaaaatacaaagctagtgaaaaagatagatcatgcaaaagtaagaaaacatcaacgaaaattcctgcaagctattcatcaattaagaagtgtaaaaatggagcagaggaaactgaatgaccaagcaaacactttggtggacttggcaaagacccagaacatcatgtatgatatgatttctgacttaaacgaaaggagtgaagacttcgagaagaggattgttaccctggaaacaaaactagagactttgattggtagcatccacgccctccctgggctcataagccagaccatcaggcagcagcagagagatttcattgaggctcagatggagagctacgacaagcacgtcacttacaatgctgagcggtcccggtcctcgtccaggaggcggcggtcctcttccacagcaccaccaacttcatcagagagtagctagaagagaataagttaaccacaaaataagactttttgccatcatatggtcaatattttagcttttattgtaaagcccctatggttctaatcagcgttatccgggttctgatgtcagaatcctgggaacctgaacactaagttttaggccaaaatgagtgaaaactctttttttttctttcagatgcacagggaatgcacctattattgctatatagattgttcctcctgtaatttcactaactttttattcatgcacttcaaacaaactttactactacattatatgatatataataaaaaaagttaaatttctgcaca

SEQ ID NO: 386455 - DNA, 1032 bp, Homo sapiens
agaatctgtctaaaaaaaaaaaaaaaaaaaaaaaacaaaacaaagaggaaactcaggtggcaatttcatagaagaaagaataaggaaatatctttataatacagaacatggataatatcaatgagagtttacccataagaagagagtccccttgctgtgtagggaaatactaagaacaagtcagagagctgatggatgaaagccttaacctctggggagataaaagaaagaagcttggaaatacaggaggccaaagatagcagtcttgagatggtatatgagggaagcagaaattaatattagaacctgggtacaggacagattctgaaagtgaatagtattacataaagcttggtaggaaaatcgcactagttcaccagtaatggatccaaaccaagaagaaatccctgatttacctgaaaaagagttcacgaagttagttattaagctaatcagggagggaccagagaaagacaaagcccaatgcaaggaaatccaaaatatgatacaagaagtgaagggggaaatagtcaagggaataaagaaaaaaccatcaaaaattcaggaaattttggacacgcttttagaaatgcaaaatgctccggaaagtctcagtaatagagctgaacaagtagaagaaggaaattcagagctcgaagataagttcttctaattaactcaatccaacaaagacaaaaaaaaaaaaaagaataagactatatgaagaaagcctccaagaagtctgtgattatgttaaacaaccaaatctaagaatagttggtgtacctgaggaagaagagaattctaaaagcctggaaaacatatttgggggaataatcgaggaaaacttccctggccttgatatccaagatgctagagacctagatatccaaaaacaagaagcacaaagaacacctgggaaattcatagcaaaacaatcttcgcctaggcacattgtcatcaggttatccaaagttaagacgaaggaaagactcgtaagagctgtgagacagaagcaccaggtaacctgta

SEQ ID NO: 386456 - DNA, 385 bp, Homo sapiens
ttacattttacatttaggtctacagtcaattttaaattaattttgtataaggcgtgaggtattggttgagatgctttcttttttttttctttttgtgtatggacattcagttgttccagttctctatgttgacaagactatcctttcttcactgaattgcctttgtaacttctgaaaacatcagttgactatatttgcatggatctgtttctggattctctgttttgtttattgatccatacatacacctcttcacccattccatgctgtcttgatcactgtagcttgatagtaagtcttgacatggggtgatgtgagtcctccaattttttttttaaaggttgtttttagctatgttcctttgcctttctatatacattttaga

SEQ ID NO: 386457 - DNA, 729 bp, Homo sapiens
aggtttggtaaacccaagggttgggtattcgggggccccccccggaggttaacctaattttgggaaggcttaaggaatgaaatgggtgtagggtggtgggaccatgtggggcttgttggcctgtaatatttagccagagtttactttctaaggggttccttttttgccaggagattcagaccttgatcagctaacaagaatatttgaaactttgggcacaccaactgaggaacagtggccggacatgtgtagtcttccagattatgtgacatttaagagtttccctggaatacctttgcatcacatcttcagtgcagcaggagacgacttactagatctcatacaaggcttattcttatttaatccatgtgctcgaattacggccacacaggcactgaaaatgaagtatttcagtaatcggccagggccaacacctggatgtcagctgccaagaccaaactgtccagtggaaaccttaaaggagcaatcaaatccagctttggcaataaaaaggaaaagaacagaggccttagaacaaggaggattgcccaagaaactaattttttaaagagaacactggacaacattttactactgagggaaatagccaaaaaggcaaataatggaaaaatagtaaacattaagtaaatgctgtagaagtgagtttgtaaatattctacacatgtaaaatatgtaaaactatgggttatttttattaaatgtatttta

SEQ ID NO: 386458 - DNA, 1914 bp, Homo sapiens
ggaacgccaaccgcctgggcctagcgcagcttcctccgcccaccacggaagtgaggcggggatactaaagcgacggagcccggtggacggaagtgggtgttggaggctttaaggtagctttaaattcgtgttgtcctgggagctcgcccttttcggctggagtcgggctttacggcgccggatggctctggacgtgaagtctcgggcaaagcgttatgagaagctggacttccttggggagggacagtttgccaccgtttacaaggccagagataagaataccaaccaaattgtcgccattaagaaaatcaaacttggacatagatcagaagctaaagatggtataaatagaaccgccttaagagagataaaattattacaggagctaagtcatccaaatataattggtctccttgatgcttttggacataaatctaatattagccttgtctttgattttatggaaactgatctagaggttataataaaggataatagtcttgtgctgacaccatcacacatcaaagcctacatgttgatgactcttcaaggattagaatatttacatcaacattggatcctacatagggatctgaaaccaaacaacttgttgctagatgaaaatggagttctaaaactggcagattttggcctggccaaatcttttgggagccccaatagagcttatacacatcaggttgtaaccaggtggtatcgggcccccgagttactatttggagctaggatgtatggtgtaggtgtggacatgtgggctgttggctgtatattagcagagttacttctaagggttccttttttgccaggagattcagaccttgatcagctaacaagaatatttgaaactttgggcacaccaactgaggaacagtggccggacatgtgtagtcttccagattatgtgacatttaagagtttccctggaatacctttgcatcacatcttcagtgcagcaggagacgacttactagatctcatacaaggcttattcttatttaatccatgtgctcgaattacggccacacaggcactgaaaatgaagtatttcagtaatcggccagggccaacacctggatgtcagctgccaagaccaaactgtccagtggaaaccttaaaggagcaatcaaatccagctttggcaataaaaaggaaaagaacagaggccttagaacaaggaggattgcccaagaaactaattttttaaagagaacactggacaacattttactactgagggaaatagccaaaaaggcaaataatggaaaaatagtaaacattaagtaaatgctgtagaagtgagtttgtaaatattctacacatgtaaaatatgtaaaactatgggttatttttattaaatgtattttaaaataaaaatttaattctggtttttctgattagagtgcaaaagtgagaaaagttcaatactcttgaaatgtagaattgaaaatgcattagggaaaacttaataaaaattattaccagttaaaaacaaacagaaacgcccacacacacccaccccaacacccccaagccgcggggcccccccccccaaggcgcccgcgcccccactacagcggtcacacgctcacacacccgcaggggcacgcagagaccgaaaccacagaaccaaggcacggcgggtacaccaataacaagcagggggaccacaagcgcacggggctcacctgacacacagggccaccagcaactcgcccgcagggcgacaacaagccccagcacccagcaagtctgcgggaacaggaacccacagcaaaggatagcgtagcccacgcagcaggagagtgcagaggcacgggtgaataagtcggacgagtaaactaacacacacgcgccgccaggcaaccagaaagagcgaggccgaagacccaccagaga

SEQ ID NO: 386459 - DNA, 1941 bp, Homo sapiens
  misc_feature (21)..(21): n is a, c, g, or t
cccactactttctgcgagaanacgacagaatggtgggtgttggaggctttaaggtagctttaaattcgtgttgtcctgggagctcgcccttttcggctggagtcgggctttacggcgccggatggctctggacgtgaagtctcgggcaaagcgttatgagaagctggacttccttggggagggacagtttgccaccgtttacaaggccagagataagaataccaaccaaattgtcgccattaagaaagagtctctgctggtagccactacagctgtgaatgtgctgtgtcatacctgaagccaatatgtctcggagtttcacctgaggcccatgatcaaacttggacatagatcagaagctaaagatggtataaatagaaccgccttaagagagataaaattattacaggagctaagtcatccaaatataattggtctccttgatgcttttggacataaatctaatattagccttgtctttgattttatggaaactgatctagaggttataataaaggataatagtcttgtgctgacaccatcacacatcaaagcctacatgttgatgactcttcaaggattagaatatttacatcaacattggatcctacatagggatctgaaaccaaacaacttgttgctagatgaaaatggagttctaaaactggcagattttggcctggccaaatcttttgggagccccaatagagcttatacacatcaggttgtaaccaggtggtatcgggcccccgagttactatttggagctaggatgtatggtgtaggtgtggacatgtgggctgttggctgtatattagcagagttacttctaagggttccttttttgccaggagattcagaccttgatcagctaacaagaatatttgaaactttgggcacaccaactgaggaacagtggccggacatgtgtagtcttccagattatgtgacatttaagagtttccctggaatacctttgcatcacatcttcagtgcagcaggagacgacttactagatctcatacaaggcttattcttatttaatccatgtgctcgaattacggccacacaggcactgaaaatgaagtatttcagtaatcggccagggccaacacctggatgtcagctgccaagaccaaactgtccagtggaaaccttaaaggagcaatcaaatccagctttggcaataaaaaggaaaagaacagaggccttagaacaaggaggattgcccaagaaactaattttttaaagagaacactggacaacattttactactgagggaaatagccaaaaaggcaaataatggaaaaatagtaaacattaagtaaatgctgtagaagtgagtttgtaaatattctacacatgtaaaatatgtaaaactatgggttatttttattaaatgtattttaaaataaaaatttaattctggtttttctgattagagtgcaaaagtgagaaaagttcaatactcttgaaatgtagaattgaaaatgcattagggaaaacttaataaaaattattaccagttaaaaacaaacagaaacgcccacacacacccaccccaacacccccaagccgcggggcccccccccccaaggcgcccgcgcccccactacagcggtcacacgctcacacacccgcaggggcacgcagagaccgaaaccacagaaccaaggcacggcgggtacaccaataacaagcagggggaccacaagcgcacggggctcacctgacacacagggccaccagcaactcgcccgcagggcgacaacaagccccagcacccagcaagtctgcgggaacaggaacccacagcaaaggatagcgtagcccacgcagcaggagagtgcagaggcacgggtgaataagtcggacgagtaaactaacacacacgcgccgccaggcaaccagaaagagcgaggccgaagacccaccagaga

SEQ ID NO: 386460 - DNA, 1780 bp, Homo sapiens
ggaacgccaaccgcctgggcctagcgcagcttcctccgcccaccacggaagtgaggcggggatactaaagcgacggagcccggtggacggaagtgggtgttggaggctttaagtttgccaccgtttacaaggccagagataagaataccaaccaaattgtcgccattaagaaaatcaaacttggacatagatcagaagctaaagatggtataaatagaaccgccttaagagagataaaattattacaggagctaagtcatccaaatataattggtctccttgatgcttttggacataaatctaatattagccttgtctttgattttatggaaactgatctagaggttataataaaggataatagtcttgtgctgacaccatcacacatcaaagcctacatgttgatgactcttcaaggattagaatatttacatcaacattggatcctacatagggatctgaaaccaaacaacttgttgctagatgaaaatggagttctaaaactggcagattttggcctggccaaatcttttgggagccccaatagagcttatacacatcaggttgtaaccaggtggtatcgggcccccgagttactatttggagctaggatgtatggtgtaggtgtggacatgtgggctgttggctgtatattagcagagttacttctaagggttccttttttgccaggagattcagaccttgatcagctaacaagaatatttgaaactttgggcacaccaactgaggaacagtggccggacatgtgtagtcttccagattatgtgacatttaagagtttccctggaatacctttgcatcacatcttcagtgcagcaggagacgacttactagatctcatacaaggcttattcttatttaatccatgtgctcgaattacggccacacaggcactgaaaatgaagtatttcagtaatcggccagggccaacacctggatgtcagctgccaagaccaaactgtccagtggaaaccttaaaggagcaatcaaatccagctttggcaataaaaaggaaaagaacagaggccttagaacaaggaggattgcccaagaaactaattttttaaagagaacactggacaacattttactactgagggaaatagccaaaaaggcaaataatggaaaaatagtaaacattaagtaaatgctgtagaagtgagtttgtaaatattctacacatgtaaaatatgtaaaactatgggttatttttattaaatgtattttaaaataaaaatttaattctggtttttctgattagagtgcaaaagtgagaaaagttcaatactcttgaaatgtagaattgaaaatgcattagggaaaacttaataaaaattattaccagttaaaaacaaacagaaacgcccacacacacccaccccaacacccccaagccgcggggcccccccccccaaggcgcccgcgcccccactacagcggtcacacgctcacacacccgcaggggcacgcagagaccgaaaccacagaaccaaggcacggcgggtacaccaataacaagcagggggaccacaagcgcacggggctcacctgacacacagggccaccagcaactcgcccgcagggcgacaacaagccccagcacccagcaagtctgcgggaacaggaacccacagcaaaggatagcgtagcccacgcagcaggagagtgcagaggcacgggtgaataagtcggacgagtaaactaacacacacgcgccgccaggcaaccagaaagagcgaggccgaagacccaccagaga

SEQ ID NO: 386461 - DNA, 1786 bp, Homo sapiens
  misc_feature (21)..(21): n is a, c, g, or t
cccactactttctgcgagaanacgacagaatggtgggtgttggaggctttaaggtagctttaaattcgtgttgtcctgggagctcgcccttttcggctggagtcgggctttacggcgccggatggctctggacgtgaagtctcgggcaaagcgttatgagaagctggacttccttggggagggacagtttgccaccgtttacaaggccagagataagaataccaaccaaattgtcgccattaagaaaatcaaacttggacatagatcagaagctaaagatgctccttgatgcttttggacataaatctaatattagccttgtctttgattttatggaaactgatctagaggttataataaaggataatagtcttgtgctgacaccatcacacatcaaagcctacatgttgatgactcttcaaggattagaatatttacatcaacattggatcctacatagggatctgaaaccaaacaacttgttgctagatgaaaatggagttctaaaactggcagattttggcctggccaaatcttttgggagccccaatagagcttatacacatcaggttgtaaccaggtggtatcgggcccccgagttactatttggagctaggatgtatggtgtaggtgtggacatgtgggctgttggctgtatattagcagagttacttctaagggttccttttttgccaggagattcagaccttgatcagctaacaagaatatttgaaactttgggcacaccaactgaggaacagtggccggacatgtgtagtcttccagattatgtgacatttaagagtttccctggaatacctttgcatcacatcttcagtgcagcaggagacgacttactagatctcatacaaggcttattcttatttaatccatgtgctcgaattacggccacacaggcactgaaaatgaagtatttcagtaatcggccagggccaacacctggatgtcagctgccaagaccaaactgtccagtggaaaccttaaaggagcaatcaaatccagctttggcaataaaaaggaaaagaacagaggccttagaacaaggaggattgcccaagaaactaattttttaaagagaacactggacaacattttactactgagggaaatagccaaaaaggcaaataatggaaaaatagtaaacattaagtaaatgctgtagaagtgagtttgtaaatattctacacatgtaaaatatgtaaaactatgggttatttttattaaatgtattttaaaataaaaatttaattctggtttttctgattagagtgcaaaagtgagaaaagttcaatactcttgaaatgtagaattgaaaatgcattagggaaaacttaataaaaattattaccagttaaaaacaaacagaaacgcccacacacacccaccccaacacccccaagccgcggggcccccccccccaaggcgcccgcgcccccactacagcggtcacacgctcacacacccgcaggggcacgcagagaccgaaaccacagaaccaaggcacggcgggtacaccaataacaagcagggggaccacaagcgcacggggctcacctgacacacagggccaccagcaactcgcccgcagggcgacaacaagccccagcacccagcaagtctgcgggaacaggaacccacagcaaaggatagcgtagcccacgcagcaggagagtgcagaggcacgggtgaataagtcggacgagtaaactaacacacacgcgccgccaggcaaccagaaagagcgaggccgaagacccaccagaga

SEQ ID NO: 386462 - DNA, 1799 bp, Homo sapiens
gctcgttctcgttgggggaaaccgtccagacgcacttgctgcccattctttacatcctgggggtgaatccctgaggggcctctccttgctgaagagtagcctggagctggacggagactgacccgccacgtttccagccgccgcgagtctgctcaggaactctgggctctttgcttcgcgaaatgtaaaaatgcaaaaaggcaaacacaaaaactcccataaacttatgttatttctatttttctttctagtttgccaccgtttacaaggccagagataagaataccaaccaaattgtcgccattaagaaaatcaaacttggacatagatcagaagctaaagatggtataaatagaaccgccttaagagagataaaattattacaggagctaagtcatccaaatataattggtctccttgatgcttttggacataaatctaatattagccttgtctttgattttatggaaactgatctagaggttataataaaggataatagtcttgtgctgacaccatcacacatcaaagcctacatgttgatgactcttcaaggattagaatatttacatcaacattggatcctacatagggtggtatcgggcccccgagttactatttggagctaggatgtatggtgtaggtgtggacatgtgggctgttggctgtatattagcagagttacttctaagggttccttttttgccaggagattcagaccttgatcagctaacaagaatatttgaaactttgggcacaccaactgaggaacagtggccggacatgtgtagtcttccagattatgtgacatttaagagtttccctggaatacctttgcatcacatcttcagtgcagcaggagacgacttactagatctcatacaaggcttattcttatttaatccatgtgctcgaattacggccacacaggcactgaaaatgaagtatttcagtaatcggccagggccaacacctggatgtcagctgccaagaccaaactgtccagtggaaaccttaaaggagcaatcaaatccagctttggcaataaaaaggaaaagaacagaggccttagaacaaggaggattgcccaagaaactaattttttaaagagaacactggacaacattttactactgagggaaatagccaaaaaggcaaataatggaaaaatagtaaacattaagtaaatgctgtagaagtgagtttgtaaatattctacacatgtaaaatatgtaaaactatgggttatttttattaaatgtattttaaaataaaaatttaattctggtttttctgattagagtgcaaaagtgagaaaagttcaatactcttgaaatgtagaattgaaaatgcattagggaaaacttaataaaaattattaccagttaaaaacaaacagaaacgcccacacacacccaccccaacacccccaagccgcggggcccccccccccaaggcgcccgcgcccccactacagcggtcacacgctcacacacccgcaggggcacgcagagaccgaaaccacagaaccaaggcacggcgggtacaccaataacaagcagggggaccacaagcgcacggggctcacctgacacacagggccaccagcaactcgcccgcagggcgacaacaagccccagcacccagcaagtctgcgggaacaggaacccacagcaaaggatagcgtagcccacgcagcaggagagtgcagaggcacgggtgaataagtcggacgagtaaactaacacacacgcgccgccaggcaaccagaaagagcgaggccgaagacccaccagaga

SEQ ID NO: 386463 - DNA, 774 bp, Homo sapiens
ggaacgccaaccgcctgggcctagcgcagcttcctccgcccaccacggaagtgaggcggggatactaaagcgacggagcccggtggacggaagtgggtgttggaggctttaaggtagctttaaattcgtgttgtcctgggagctcgcccttttcggctggagtcgggctttacggcgccggatggctctggacgtgaagtctcgggcaaagcgttatgagaagctggacttccttggggagggacagtttgccaccgtttacaaggccagagataagaataccaaccaaattgtcgccattaagaaaatcaaacttggacatagatcagaagctaaagatggtataaatagaaccgccttaagagagataaaattattacaggagctaagtcatccaaatataattggtctccttgatgcttttggacataaatctaatattagccttgtctttgattttatggaaactgatctagaggttataataaaggataatagtcttgtgctgacaccatcacacatcaaagcctacatgttgatgactcttcaaggattagaatatttacatcaacattggatcctacatagggatctgaaaccaaacaacttgttgctagatgaaaatggagttctaaaactggcagattttggcctggccaaatcttttgggagccccaatagagcttatacacatcaggttgtaaccaggtggtatcgggcccccgagttactatttggagctaggaacttaagcggatcagcgggtaccgagct

SEQ ID NO: 386464 - DNA, 693 bp, Homo sapiens
ggaacgccaaccgcctgggcctagcgcagcttcctccgcccaccacggaagtgaggcggggatactaaagcgacggagcccggtggacggaagtgggtgttggaggctttaaggtagctttaaattcgtgttgtcctgggagctcgcccttttcggctggagtcgggctttacggcgccggatggctctggacgtgaagtctcgggcaaagcgttatgagaagctggacttccttggggagggacagtttgccaccgtttacaaggccagagataagaataccaaccaaattgtcgccattaagaaaatcaaacttggacatagatcagaagctaaagatggtataaatagaaccgccttaagagagataaaattattacaggagctaagtcatccaaatataattggtctccttgatgcttttggacataaatctaatattagccttgtctttgattttatggaaactgatctagaggttataataaaggataatagtcttgtgctgacaccatcacacatcaaagcctacatgttgatgactcttcaaggattagaatatttacatcaacattggatcctacataggatctgaaaccaaacaacttgttgctaggtgaataggcctattcacatgagggtggaaccaggtggtatcgtctccccggtttctatttgagctagaattatagg

SEQ ID NO: 386465 - DNA, 269 bp, Homo sapiens
ccaccgtttacaaggccagagataagaataccaaccaaattgtcgccattaagaaagtgagttacctttttatgttgtttttaagtctccttgaagatgtctgtattattaattgactgatagccattttattagtcttgaccatactctgataatgagttactcatgtcattttcagagacaaaataattaattagtgctttgtgttcccaaacggaactctagggttgaacccgttttaatttctattgaaatgaagaagaagctgt

SEQ ID NO: 386466 - DNA, 1383 bp, Homo sapiens
ggaacgccaaccgcctgggcctagcgcagcttcctccgcccaccacggaagtgaggcggggatactaaagcgacggagcccggtggacggaagtgggtgttggaggctttaaggtagctttaaattcgtgttgtcctgggagctcgcccttttcggctggagtcgggctttacggcgccggatggctctggacgtgaagtctcgggcaaagcgttatgagaagctggacttccttggggagggacagtttgccaccgtttacaaggccagagataagaataccaaccaaattgtcgccattaagaaaatcaaacttggacatagatcagaagctaaagatggtataaatagaaccgccttaagagagataaaattattacaggagctaagtcatccaaatataattggtctccttgatgcttttggacataaatctaatattagccttgtctttgattttatggaaactgatctagaggttataataaaggataatagtcttgtgctgacaccatcacacatcaaagcctacatgttgatgactcttcaaggattagaatatttacatcaacattggatcctacatagggatctgaaaccaaacaacttgttgctagatgaaaatggagttctaaaactggcagattttggcctggccaaatcttttgggagccccaatagagcttatacacatcaggttgtaaccaggtggtatcgggcccccgagttactatttggagctaggatgtatggtgtaggtgtggacatgtgggctgttggctgtatattagcagagttacttctaagggttccttttttgccaggagattcagaccttgatcagctaacaagaatatttgaaactttgggcacaccaactgaggaacagtggccggacatgtgtagtcttccagattatgtgacatttaagagtttccctggaatacctttgcatcacatcttcagtgcagcaggagacgacttactagatctcatacaaggcttattcttatttaatccatgtgctcgaattacggccacacaggcactgaaaatgaagtatttcagtaatcggccagggccaacacctggatgtcagctgccaagaccaaactgtccagtggaaaccttaaaggagcaatcaaatccagctttggcaataaaaaggaaaagaacagaggccttagaacaaggaggattgcccaagaaactaattttttaaagagaacactggacaacattttactactgagggaaatagccaaaaaggcaaataatggaaaaatagtaaacattaagtaaatgctgtagaagtgagtttgtaaatattctacacatgtaaaatatgtaaaactatgggttatttttattaaatgtatttta

SEQ ID NO: 386467 - DNA, 1323 bp, Homo sapiens
  misc_feature (21)..(21): n is a, c, g, or t
cccactactttctgcgagaanacgacagaatggtgggtgttggaggctttaaggtagctttaaattcgtgttgtcctgggagctcgcccttttcggctggagtcgggctttacggcgccggatggctctggacgtgaagtctcgggcaaagcgttatgagaagctggacttccttggggagggacagtttgccaccgtttacaaggccagagataagaataccaaccaaattgtcgccattaagaaaatcaaacttggacatagatcagaagctaaagatggtataaatagaaccgccttaagagagataaaattattacaggagctaagtcatccaaatataattggtctccttgatgcttttggacataaatctaatattagccttgtctttgattttatggaaactgatctagaggttataataaaggataatagtcttgtgctgacaccatcacacatcaaagcctacatgttgatgactcttcaaggattagaatatttacatcaacattggatcctacatagggatctgaaaccaaacaacttgttgctagatgaaaatggagttctaaaactggcagattttggcctggccaaatcttttgggagccccaatagagcttatacacatcaggttgtaaccaggtggtatcgggcccccgagttactatttggagctaggatgtatggtgtaggtgtggacatgtgggctgttggctgtatattagcagagttacttctaagggttccttttttgccaggagattcagaccttgatcagctaacaagaatatttgaaactttgggcacaccaactgaggaacagtggccggacatgtgtagtcttccagattatgtgacatttaagagtttccctggaatacctttgcatcacatcttcagtgcagcaggagacgacttactagatctcatacaaggcttattcttatttaatccatgtgctcgaattacggccacacaggcactgaaaatgaagtatttcagtaatcggccagggccaacacctggatgtcagctgccaagaccaaactgtccagtggaaaccttaaaggagcaatcaaatccagctttggcaataaaaaggaaaagaacagaggccttagaacaaggaggattgcccaagaaactaattttttaaagagaacactggacaacattttactactgagggaaatagccaaaaaggcaaataatggaaaaatagtaaacattaagtaaatgctgtagaagtgagtttgtaaatattctacacatgtaaaatatgtaaaactatgggttatttttattaaatgtatttta

SEQ ID NO: 386468 - DNA, 1918 bp, Homo sapiens
gctcgttctcgttgggggaaaccgtccagacgcacttgctgcccattctttacatcctgggggtgaatccctgaggggcctctccttgctgaagagtagcctggagctggacggagactgacccgccacgtttccagccgccgcgagtctgctcaggaactctgggctctttgcttcgcgaaatgtaaaaatgcaaaaaggcaaacacaaaaactcccataaacttatgttatttctatttttctttctagtttgccaccgtttacaaggccagagataagaataccaaccaaattgtcgccattaagaaaatcaaacttggacatagatcagaagctaaagatggtataaatagaaccgccttaagagagataaaattattacaggagctaagtcatccaaatataattggtctccttgatgcttttggacataaatctaatattagccttgtctttgattttatggaaactgatctagaggttataataaaggataatagtcttgtgctgacaccatcacacatcaaagcctacatgttgatgactcttcaaggattagaatatttacatcaacattggatcctacatagggatctgaaaccaaacaacttgttgctagatgaaaatggagttctaaaactggcagattttggcctggccaaatcttttgggagccccaatagagcttatacacatcaggttgtaaccaggtggtatcgggcccccgagttactatttggagctaggatgtatggtgtaggtgtggacatgtgggctgttggctgtatattagcagagttacttctaagggttccttttttgccaggagattcagaccttgatcagctaacaagaatatttgaaactttgggcacaccaactgaggaacagtggccggacatgtgtagtcttccagattatgtgacatttaagagtttccctggaatacctttgcatcacatcttcagtgcagcaggagacgacttactagatctcatacaaggcttattcttatttaatccatgtgctcgaattacggccacacaggcactgaaaatgaagtatttcagtaatcggccagggccaacacctggatgtcagctgccaagaccaaactgtccagtggaaaccttaaaggagcaatcaaatccagctttggcaataaaaaggaaaagaacagaggccttagaacaaggaggattgcccaagaaactaattttttaaagagaacactggacaacattttactactgagggaaatagccaaaaaggcaaataatggaaaaatagtaaacattaagtaaatgctgtagaagtgagtttgtaaatattctacacatgtaaaatatgtaaaactatgggttatttttattaaatgtattttaaaataaaaatttaattctggtttttctgattagagtgcaaaagtgagaaaagttcaatactcttgaaatgtagaattgaaaatgcattagggaaaacttaataaaaattattaccagttaaaaacaaacagaaacgcccacacacacccaccccaacacccccaagccgcggggcccccccccccaaggcgcccgcgcccccactacagcggtcacacgctcacacacccgcaggggcacgcagagaccgaaaccacagaaccaaggcacggcgggtacaccaataacaagcagggggaccacaagcgcacggggctcacctgacacacagggccaccagcaactcgcccgcagggcgacaacaagccccagcacccagcaagtctgcgggaacaggaacccacagcaaaggatagcgtagcccacgcagcaggagagtgcagaggcacgggtgaataagtcggacgagtaaactaacacacacgcgccgccaggcaaccagaaagagcgaggccgaagacccaccagaga

SEQ ID NO: 386469 - DNA, 1578 bp, Homo sapiens
gggcttcctgaggaaacttagataacctcttttgagagtctcctgtattgatacttacattttaagtctgtaaattgttttatgtggtagagtttatttgaaataataaagggtacctgtatattgtatacttgctttacaggttataataaaggataatagtcttgtgctgacaccatcacacatcaaagcctacatgttgatgactcttcaaggattagaatatttacatcaacattggatcctacatagggatctgaaaccaaacaacttgttgctagatgaaaatggagttctaaaactggcagattttggcctggccaaatcttttgggagccccaatagagcttatacacatcaggttgtaaccaggtggtatcgggcccccgagttactatttggagctaggatgtatggtgtaggtgtggacatgtgggctgttggctgtatattagcagagttacttctaagggttccttttttgccaggagattcagaccttgatcagctaacaagaatatttgaaactttgggcacaccaactgaggaacagtggccggacatgtgtagtcttccagattatgtgacatttaagagtttccctggaatacctttgcatcacatcttcagtgcagcaggagacgacttactagatctcatacaaggcttattcttatttaatccatgtgctcgaattacggccacacaggcactgaaaatgaagtatttcagtaatcggccagggccaacacctggatgtcagctgccaagaccaaactgtccagtggaaaccttaaaggagcaatcaaatccagctttggcaataaaaaggaaaagaacagaggccttagaacaaggaggattgcccaagaaactaattttttaaagagaacactggacaacattttactactgagggaaatagccaaaaaggcaaataatggaaaaatagtaaacattaagtaaatgctgtagaagtgagtttgtaaatattctacacatgtaaaatatgtaaaactatgggttatttttattaaatgtattttaaaataaaaatttaattctggtttttctgattagagtgcaaaagtgagaaaagttcaatactcttgaaatgtagaattgaaaatgcattagggaaaacttaataaaaattattaccagttaaaaacaaacagaaacgcccacacacacccaccccaacacccccaagccgcggggcccccccccccaaggcgcccgcgcccccactacagcggtcacacgctcacacacccgcaggggcacgcagagaccgaaaccacagaaccaaggcacggcgggtacaccaataacaagcagggggaccacaagcgcacggggctcacctgacacacagggccaccagcaactcgcccgcagggcgacaacaagccccagcacccagcaagtctgcgggaacaggaacccacagcaaaggatagcgtagcccacgcagcaggagagtgcagaggcacgggtgaataagtcggacgagtaaactaacacacacgcgccgccaggcaaccagaaagagcgaggccgaagacccaccagaga

SEQ ID NO: 386470 - DNA, 1103 bp, Homo sapiens
ggaacgccaaccgcctgggcctagcgcagcttcctccgcccaccacggaagtgaggcggggatactaaagcgacggagcccggtggacggaagtgggtgttggaggctttaaggtagctttaaattcgtgttgtcctgggagctcgcccttttcggctggagtcgggctttacggcgccggatggctctggacgtgaagtctcgggcaaagcgttatgagaagctggacttccttggggagggacagtttgccaccgtttacaaggccagagataagaataccaaccaaattgtcgccattaagaaaatcaaacttggacatagatcagaagctaaagatggtataaatagaaccgccttaagagagataaaattattacaggagctaagtcatccaaatataattggtctccttgatgcttttggacataaatctaatattagccttgtctttgattttatggaaactgatctagaggttataataaaggataatagtcttgtgctgacaccatcacacatcaaagcctacatgttgatgactcttcaaggattagaatatttacatcaacattggatcctacatagggatctgaaaccaaacaacttgttgctagatgaaaatggagttctaaaactggcagattttggcctggccaaatcttttgggagccccaatagagcttatacacatcaggttgtaaccaggtggtatcgggcccccgagttactatttggagctaggatgtatggtgtaggtgtggacatgtgggctgttggctgtatattagcagagttacttctaaggtctttttggccggagatcgaactgtcagtacagattttgacttgggccccattggggacgtggcggcatggtgtcttccgatttgtgaacttaagttccggaacctgggccccttccggcgggagatcgactcaaggggttcttatcggtcgctatgcccggcggagagatttttgtcgggccgttgttgtcgcctctcggcttgcacaccgcgggaaaaaaagcgcggcgtctgcgcggggcgtgcctgtccgctccgtctccgctctcctcttctcttttgcttttggggtgc

SEQ ID NO: 386471 - DNA, 598 bp, Homo sapiens
attttgctggcctaattttctgtactgaacagtaaacattccttctactagagtttaatacactaatgctttggggatgactagcatgaagagaaattccacaatttttgaaacagaaattctatttttctatcttctttaatgtcaaatcaacattttttagttagtaaaaccaaagaatatcaaacaatgagagtcctttctagctaagattttggagtcacaaataaagctacatcctaaaaagccaaaaggaaaggaaaaaaaaatcaacccctgcatttatcaaggtgctttaaatacccaaagacacctctgaactgggttttgttgatgggtgcttgttgtgtgcccagtgtaattttttaataaatattttcctgtgctatgaatgtttccatttttataaggagaaagctgactttgaaatgcagtgggaaacaggatttgccaagaaaaaatgccagtaggataaagcccaattttattattaataatataggtttatttgtatatcatacaaactgctaagagtctcttcttcgatgtgaattcctgtattatcaggacacagtcaaatccacttgtaagaaaattt

SEQ ID NO: 386472 - DNA, 730 bp, Homo sapiens
tttattgtagaccaaaacaacttttcttcgtacttcaagaaagacgtttgtatacatgttactacagcctatggtttcgttcttctgtggaccttataattataatacattgttttcagaactcagtatatcatgttaactaagtgctctgatgctttaataagcattattaaatactaattaatgtaaaaaggaacctcttactcttctgtaattatagctctaaaatcactggaattagatgattatcagctttcacgtaaaaaaaaactgtctatagaaacaagttttaagaacttcaaagattgttgggtaatgcagcactttactgtgcagccaaaatttgaaaacatctcaaaattctttggactgttagaattggtatgtttaggaaggtagactattgggtcaaagatgaaaatataaatgtgatgtattgtcaaaactgctattgtcagccatggctcaatgtagattatcccactcatttttatcagttctgtaagaatgccatgtatcagattctttatagaggtatgattaactgtggctttttctgtcactttactctacattaaataaaatatagggggccctagccagaacagtcaggcagacaaaaaagatagaaggcattcagattggaaaggaagaagtaaagttgtctctgttttcagatgagatgatcttatgcatagaaatacctaaggattccacacacaaaaaaaaa

SEQ ID NO: 386473 - DNA, 311 bp, Homo sapiens
cacctattcatccacctatcattcatccatccacccatcattccatccatcccccattcatccatccagccacctaccaaccctgcatctacctacccattcatccattcatctgtctatccacccaccatgtatccatctaatcttattcaaggagctacagcatgcgggaccatgctcagcaatgtaaagacaacgattaacagttcaatcatagttcctgtcccaaatggactcccatctactgcagtttgtacccagggatgtggaggaaaccctggtccccaaatcagaaggaatgaccccagcct

SEQ ID NO: 386474 - DNA, 158 bp, Homo sapiens
aatgccattatcatgggagtgggtttgttgtgagagtgaaatcagcccttcctcactgtctcaccacaaggtgccttctgccatgtgataaggcagcgagaagcccttgccggatgcagctccttaacctgggacttcccagcctccagaagcataag

SEQ ID NO: 386475 - DNA, 519 bp, Homo sapiens
ggcattttagaagataaaatcccatacaaatgatatatgctatatttatgttggtgttggagaagaaagagcagtatataaagaaataattcaagactgcagcactgtcaacctgaaactttgtaaatatttcctagcttctggtttggtgcggtgacagcactttcatcacaggatgttaccttgtattcaccaggcggagtgcgagctgctgcacatcctcctcagatctcacctgtccccactgtacatccacccgccagctgcttgcaaacctcatctctagctttagttcgaaaccacattgcagggttcaggtgacctctacaaaaaactacctcttcagaatgaggtaatgaatagttatttattttaaaatatgaaaagtcaggagctctagaacatgacgatgatttaagattttaacttttttgtgtacttgtatttgagcactctcattttgtcctaaagggcattatacatttaagcagtaatactgtaaaaaaatgtgttgctcgg

SEQ ID NO: 386476 - DNA, 453 bp, Homo sapiens
  misc_feature (1)..(1): n is a, c, g, or t
ngatccgtgctgatatcagtctttccaactcagtctgaggtaaacaaaccctgcactggttgatgcaacagttatggccttccctaggacagttgccaggaaagataatgttgattcttctcagaagccatcccgaacacctctgtttttttctaaaccgggctagaatgctgtggtgggctcctagaggtgaggtagagagtgtgacacatcaggtagtgtgccacacacacacacacacacacacacacaaacacacatacacaaataaactgttcaagttatctcatttatatgaacatcaatctggagaacaggcatggggatggatattaattgtatgagattatggtgtaaggaacatagagttgtatcaggctgaatttactgattaggaccatcaaggtagtgactttgtgtttaatatggcagcttggcgagttaaaaaaaaaa

SEQ ID NO: 386477 - DNA, 848 bp, Homo sapiens
ggtcctcttcagaaggtcagttagctcaaggcaatcacattcttcccaggcctcttaagaaatactccaaccccagaaaaggcccttctttctggtatcaggagccatgggccacaaacacaaatccaatagcatttcagccatttacctcccagatcatcccctccctgaagttctaactacagcaggaaaaaataatgaaaacaccacctgcagtcacaaatcctccagtttcctggccaagatgtcacattcccttcaagatacctcccaaagaggacatgacaagggaggggcacagagggtgctacaggtactgataaggttctatttcttttttatttttattttttgagatggagtttcactctagtcacccaggctgttgagtgcaatggtgcaatcttggctcactgcaacctctgcctcctaggttcaagtgattctcccacctcagcctcccaagtagctgggattacaggcacctgccaccacgcctggctaatttttgtatttttagtagagatggggtttcaccatcttggctgggctggtctcaaactcctgtcctcaggtgatccacctgccttggcctcccaagtgctgggattacaggcgtgagccaccatgcccagccaaaggttctatttctttaaagtttggtgttgtgcatatgttcatatgatttaatgtttttttttaaaaatggtatcttcctgttttttgtgtgtgtgtgttttttttgttgtaggcctgagtgcttcattcgttcacccatatgaatccgtaaagaagtagccattagcaacttcagcctatactggattcatactttaggaagacaaccc

SEQ ID NO: 386478 - DNA, 773 bp, Homo sapiens
gcagggacatggatgaagctgaaaaccatcattctcagcaaactaacacaggaacagaaaccaaacaccacatgttctcactcataagtagaagctgaacaatgagaacacatggacacaagctctccaaaaccatgagggagaagaagtcagagaataatgaagttcttccttacgtgatgtgcttcttattcccaagctatctttgtactctggacctggctgatgttgaaagcagagcattcacatgagcattttctgggttctttagaggctcccctgctggaatccctcaattgtaagtttccagaagttgctgctggttttcagcagttcactacatgcagaatctctccattgaactttaaaaaaatgacccccagactgaaaattgctttgaatagttgcattctgacaccttgtattggaacttcatatcagctgtgttatgtgtccatggtggaaaattccaattaaacattaaattatatataagaaagaaaatgaagttgatttctagttccaaatgacctacacagaaataacagttgtatataggtttgcacatactttacaaacatttttaggtatgtagaaacaatgtatacacacacatgcacacacacattagtgcaaatgctagtgtatgcatatccatatgtattgtatgtgtgtatatagatatacatatgtgcaaatatataatgtatatgcatatatgcagtggatgtatgtgcacatacatcttctatgtgtgtgtgtgtgtgtgtgtg

SEQ ID NO: 386479 - DNA, 531 bp, Homo sapiens
gcagggacatggatgaagctgaaaaccatcattctcagcaaactaacacaggaacagaaaccaaacaccacatgttctcactcataagtagaagctgaacaatgagaacacatggacacaagctctccaaaaccatgagggagaagaagtcagagaataatgaagttcttccttacgtgatgtgcttcttattcccaagctatctttgtactctggacctggctgatgttgaaagcagagcattcacatgagcattttctgggttctttagaggctcccctgctggaatccctcaattgtaagtttccagaagttgctgctggttttcagcagttcactacatgcagaatctctccattgaactttaaaaaaatgacccccagactgaaaattgctttgaatagttgcattctgacaccttgtattggaacttcatatcagctgtgttatgtgtccatggtggaaaattccaattaaacattaaattatatataagaaatataaaaaatcaaaatggccttgctggcctca

SEQ ID NO: 386480 - DNA, 276 bp, Homo sapiens
gtaatagtggcctcataaaatgagctaggaagtgttccatcctcttctatttctggggggagattgtgtaatactgatgttaattctttaaatgtttgggatgattcttcagtgaacaaagtgatataagcacggagatttcttttttagaagccttttagttatgaattcattttctttaatggttaaaggactattctgatgatttgggggttttttgttgttgttgttgctttttttttgagatggagtttcactcttgttgcccaggctgga

SEQ ID NO: 386481 - DNA, 520 bp, Homo sapiens
caacttccagcaatgatttacaggaagcgtttagctcatgcatatattggggccaatctgaaaaggaatcaaggttcatgaaactctcaactgtgacattttatagggtatggcgcaaccagagttagctaagtacagatatcattagctatatgttcatttgattgctattacatattctctctctctgacacacacatacacacacacacacacacgcacacacacacgactgaattatattcagcagtattttatgctctttggaaactgttacttattcagatacagggtgttttgtttttgctttttgctgattctctactaattttattattcccaatactctctttcattttgaattatggagtttattgcagtattgtattttttgagatgtaaaaactattataattagaactaaatttttcaaaaatggaaacatgcaggttaaatgataaaaatagtgtatttgtgaaatttgggttccgttttgttttgtcatcatagcaaatagaga

SEQ ID NO: 386482 - DNA, 410 bp, Homo sapiens
cataacaagtaaaatatatttaggactgccagtgtagcagaggccacagtgacaggtccttgctcatatccctcaggtcttctctgcaagcttccagctgtcagtacgtgcctctctgccctcaggccatttccccaagcccaaggagcctgctctacctgtgcacaaaacaggcctgaagtttagaattactatgcccaggaggagccattaccaatgaccaataagtgctggtgattgataccccagcttcctagtccttgagccaaggtaattctaaagtgtgtgttttatttcacggtggggctaagcttctaacgtacttttgagtggctgcattttctatccctgtgtcgtacacctgccataccagtgtttcctgcaactttcaaataaaccactagtcctcg

SEQ ID NO: 386483 - DNA, 420 bp, Homo sapiens
taaaaagtgcctatttcaatctctgagataaaaatcacaggtttatcttttcatgacaacttaatgaaatggcttgcatattattagtatgagaaatgtactttcaaatatataaaagtaattagagttcttagattttagaatatatatgaaagaatacatcatttttataattgtaaaggtaaacctaaacctgctgattagcatactacattttcctgttatttacaaaaccccgttttgctgacataggcatagagataagcagatatgcagtataatttgccaatatgtaataaggttaaattcaaatagaagaaagtatgctaattagtacagaaaacttagagaaagtactaatttagttaagattaattctgttcttattttaattcaaaagatagatcaatttctgtttat

SEQ ID NO: 386484 - DNA, 2628 bp, Homo sapiens
agcggggggcgacgtgccctgcgtccccctcggcgggctgccgccgtgcccgcgccggctccccagcccgagcctgccccttgccctggtgaggtgcaaagagcgggatcggaggcggggcctggccgggctgtgagcggcgtatgcaaatcgagggtctcggggatgcggatccaagaccctgggaaggtcttctttggcaatgtggattcatctgggataaaacacaatatttttaaccctccaattattgctcgatacatccgtttgcacccaactcattatagcattcgcagcactcttcgcatggagttgatgggctgtgatttaaatagttgcagcatgccattgggaatggagagtaaagcaatatcagatgcacagattactgcttcatcctactttaccaatatgtttgccacctggtctccttcaaaagctcgacttcacctccaagggaggagtaatgcctggagacctcaggtgaataatccaaaagagtggctgcaagtggacttccagaagacaatgaaagtcacaggagtaactactcagggagtaaaatctctgcttaccagcatgtatgtgaaggagttcctcatctccagcagtcaagatggccatcagtggactctcttttttcagaatggcaaagtaaaggtttttcagggaaatcaagactccttcacacctgtggtgaactctctagacccaccgttactgactcgctaccttcgaattcacccccagagttgggtgcaccagattgccctgaggatggaggttctgggctgcgaggcacaggacctctactgagggtggccactgcagcacctgccactgccgtcacctctccctcctcagctccagggcagtgtccctccctggcttgccttctacctttgtgctaaatcctagcagacactgccttgaagcctcctgaattaactatcatcagtcctgcatttctttggtggggggccaggagggtgcatccaatttaacttaactcttacctattttctgcagctgctcccagattactccttccttccaatataactaggcaaaaagaagtgaggagaaacctgcatgaaagcattcttccctgaaaagttaggcctctcagagtcaccacttcctctgttgtagaaaaactatgtgatgaaactttgaaaaagatatttatgatgttaacatttcaggttaagcctcatacgtttaaaataaaactctcagttgtttattatcctgatcaagcatggaacaaagcatgtttcaggatcagatcaatacaatcttggagtcaaaaggcaaatcatttggacaatctgcaaaatggagagaatacaataactactacagtaaagtctgtttctgcttccttacacatagatataattatgttatttagtcattatgaggggcacattcttatctccaaaactagcattcttaaactgagaattatagatggggttcaagaatccctaagtcccctgaaattatataaggcattctgtataaatgcaaatgtgcatttttctgacgagtgtccatagatataaagccatttggtcttaattctgaccaataaaaaaataagtcaggaggatgcaattgttgaaagctttgaaataaaataacaatgtcttcttgaaatttgtgatggccaagaaagaaaatgatgatgacattaggcttctaaaggacatacatttaatatttctgtggaaatatgaggaaaatccatggttatctgagataggagatacaaactttgtaattctaataatgcactcagtttactctctccctctactaatttcctgctgaaaataacacaacaaaaatgtaacaggggaaattatataccgtgactgaaaactagagtcctacttacatagttgaaatatcaaggaggtcagaagaaaattggactggtgaaaacagaaaaaacactccagtctgccatatcaccacacaataggatcccccttcttgccctccacccccataagattgtgaagggtttactgctccttccatctgcctgaccccttcactatgactacacagaatctcctgatagtaaagggggctggaggcaaggataagttatagagcagttggaggaagcatccaaagattgcaacccagggcaaatggaaaacaggagatcctaatatgaaagaaaaatggatcccaatctgagaaaaggcaaaagaatggctacttttttctatgctggagtattttctaataatcctgcttgacccttatctgacctctttggaaactataacatagctgtcacagtatagtcacaatccacaaatgatgcaggtgcaaatggtttatagccctgtgaagttcttaaagtttagaggctaacttacagaaatgaataagttgttttgttttatagcccggtagaggagttaaccccaaaggtgatatggttttatttcctgttatgtttaacttaataatcttattttggcattcttttcccattgactatatacatctctatttctcaaatgttcatggaactagctcttttattttcctgctggtttcttcagtaatgagttaaataaaacattgacacatacaaaaaaaaaa

SEQ ID NO: 386485 - DNA, 1367 bp, Homo sapiens
agcggggggcgacgtgccctgcgtccccctcggcgggctgccgccgtgcccgcgccggctccccagcccgagcctgccccttgccctggtgaggtgcaaagagcgggatcggaggcggggcctggccgggctgtgagcggcgtatgcaaatcgagggtctcggggatgcggatccaagaccctgggaaggtcttctttggcaatgtggattcatctgggataaaacacaatatttttaaccctccaattattgctcgatacatccgtttgcacccaactcattatagcattcgcagcactcttcgcatggagttgatgggctgtgatttaaatagttgcagcatgccattgggaatggagagtaaagcaatatcagatgcacagattactgcttcatcctactttaccaatatgtttgccacctggtctccttcaaaagctcgacttcacctccaagggaggagtaatgcctggagacctcaggtgaataatccaaaagagtggctgcaagtggacttccagaagacaatgaaagtcacaggagtaactactcagggagtaaaatctctgcttaccagcatgtatgtgaaggagttcctcatctccagcagtcaagatggccatcagtggactctcttttttcagaatggcaaagtaaaggtttttcagggaaatcaagactccttcacacctgtggtgaactctctagacccaccgttactgactcgctaccttcgaattcacccccagagttgggtgcaccagattgccctgaggatggaggttctgggctgcgaggcacaggacctctactgagggtggccactgcagcacctgccactgccgtcacctctccctcctcagctccagggcagtgtccctccctggcttgccttctacctttgtgctaaatcctagcagacactgccttgaagcctcctgaattaactatcatcagtcctgcatttctttggtggggggccaggagggtgcatccaatttaacttaactcttacctattttctgcagctgctcccagattactccttccttccaatataactaggcaaaaagaagtgaggagaaacctgcatgaaagcattcttccctgaaaagttaggcctctcagagtcaccacttcctctgttgtagaaaaactatgtgatgaaactttgaaaaagatatttatgatgttaacatttcaggttaagcctcatacgtttaaaataaaactctcagttgtttattatcctgatcaagcatggaacaaagcatgtttcaggatcagatcaatacaatcttggagtcaaaaggcaaatcatttggacaatctgcaaaatggagagaatacaataactactacagta

SEQ ID NO: 386486 - DNA, 2536 bp, Homo sapiens
agcggggggcgacgtgccctgcgtccccctcggcgggctgccgccgtgcccgcgccggctccccagcccgagcctgccccttgccctggtgaggtgcaaagagcgggatcggaggcggggcctggccgggctgtgagcggcgtatgcaaatcgagggtctcggggatgcggatccaagaccctgggaaggtcttctttggcaatgtggattcatctgggataaaacacaatatttttaaccctccaattattgctcgatacatccgtttgcacccaactcattatagcattcgcagcactcttcgcatggagttgatgggctgtgatttaaatagttgcagcatgccattgggaatggagagtaaagcaatatcagatgcacagattactgcttcatcctactttaccaatatgtttgccacctggtctccttcaaaagctcgacttcacctccaagggaggagtaatgcctggagacctcaggtgaataatccaaaagagtggctgcaagtggacttccagaagacaatgaaagtcacaggagtaactactcagggagtaaaatctctgcttaccagcatgtatgtgaaggagttcctcatctccagcagtcaagatggccatcagtggacttcgctaccttcgaattcacccccagagttgggtgcaccagattgccctgaggatggaggttctgggctgcgaggcacaggacctctactgagggtggccactgcagcacctgccactgccgtcacctctccctcctcagctccagggcagtgtccctccctggcttgccttctacctttgtgctaaatcctagcagacactgccttgaagcctcctgaattaactatcatcagtcctgcatttctttggtggggggccaggagggtgcatccaatttaacttaactcttacctattttctgcagctgctcccagattactccttccttccaatataactaggcaaaaagaagtgaggagaaacctgcatgaaagcattcttccctgaaaagttaggcctctcagagtcaccacttcctctgttgtagaaaaactatgtgatgaaactttgaaaaagatatttatgatgttaacatttcaggttaagcctcatacgtttaaaataaaactctcagttgtttattatcctgatcaagcatggaacaaagcatgtttcaggatcagatcaatacaatcttggagtcaaaaggcaaatcatttggacaatctgcaaaatggagagaatacaataactactacagtaaagtctgtttctgcttccttacacatagatataattatgttatttagtcattatgaggggcacattcttatctccaaaactagcattcttaaactgagaattatagatggggttcaagaatccctaagtcccctgaaattatataaggcattctgtataaatgcaaatgtgcatttttctgacgagtgtccatagatataaagccatttggtcttaattctgaccaataaaaaaataagtcaggaggatgcaattgttgaaagctttgaaataaaataacaatgtcttcttgaaatttgtgatggccaagaaagaaaatgatgatgacattaggcttctaaaggacatacatttaatatttctgtggaaatatgaggaaaatccatggttatctgagataggagatacaaactttgtaattctaataatgcactcagtttactctctccctctactaatttcctgctgaaaataacacaacaaaaatgtaacaggggaaattatataccgtgactgaaaactagagtcctacttacatagttgaaatatcaaggaggtcagaagaaaattggactggtgaaaacagaaaaaacactccagtctgccatatcaccacacaataggatcccccttcttgccctccacccccataagattgtgaagggtttactgctccttccatctgcctgaccccttcactatgactacacagaatctcctgatagtaaagggggctggaggcaaggataagttatagagcagttggaggaagcatccaaagattgcaacccagggcaaatggaaaacaggagatcctaatatgaaagaaaaatggatcccaatctgagaaaaggcaaaagaatggctacttttttctatgctggagtattttctaataatcctgcttgacccttatctgacctctttggaaactataacatagctgtcacagtatagtcacaatccacaaatgatgcaggtgcaaatggtttatagccctgtgaagttcttaaagtttagaggctaacttacagaaatgaataagttgttttgttttatagcccggtagaggagttaaccccaaaggtgatatggttttatttcctgttatgtttaacttaataatcttattttggcattcttttcccattgactatatacatctctatttctcaaatgttcatggaactagctcttttattttcctgctggtttcttcagtaatgagttaaataaaacattgacacatacaaaaaaaaaa

SEQ ID NO: 386487 - DNA, 1079 bp, Homo sapiens
ggaaggtcaatgatagcatctgcctagagtcaaacctccgtgcttctcagacagtgccttttcaccatgagtgggtgcccatttttaggaaacaactttggatatacttttaaaaaactccccgtagaaggcagcgaagaagacaaatcacaaactggtgtgaatagagccagcaaaggaggtcttatctatgggaactacctgcatttggaaaaagttttgaatgcacaagaactgcaaagtgaaacaaaaggaaataaaatccatgatgaacatctttttatcataactcatcaaggtaagttgcacaaaggttttggacaatattccacaggcatttctcattgataacgaggaaagctacaatttttaaactacaaaatgatgaaagatcatggaatcacctctgttagaaatgtttgagaatattttgctgccagatgaattctcataggactgatataaggatttcaatagtcttctttatgttactcctctgctaataggtgaagtaggactttagctttgttcttaactccaaggggactttctgcctcttggaatttcactaggaattcacaagtgaagatgttacgtttctcacttcggaacactaaaaaactattttcaagatcattgaaatttatgctggattgacataatcctatacaaatctagtaataaagacaaatgtaaattgtgtccaaaaatgtatgtttatcctttccagatttctataatgatttctgggcagtgggtttttttttagcctatgtgttcatgacttcagaagtttagaaggtccctgaactccaaaattatgcacaaattttcatgaatattatcttaaagaggtctgtgaccccaaaatattagtaacatttactttaagcttttcagtaccactatactgacctcttaatgactggagcccaatcactgttgcctgccagtgccccacatctagatgtgtttccctgccttaccaattctttgtgttctttcctcaaatggatgctttccaatgtgattgagtaaattaataaactctggtaaagaaattaaaagttaaaaaactg

SEQ ID NO: 386488 - DNA, 603 bp, Homo sapiens
ggaaggtcaatgatagcatctgcctagagtcaaacctccgtgcttctcagacagtgccttttcaccatgagtgggtgcccatttttaggaaacaactttggatatacttttaaaaaactccccgtagaaggcagcgaagaagacaaatcacaaactggtgtgaatagagccagcaaaggaggtcttatctatgggaactacctgcatttggaaaaagttttgaatgcacaagaactgcaaagtgaaacaaaaggaaataaaatccatgatgaacatctttttatcataactcatcaagcttatgaactctggtttaagcaaatcctctgggagttggattctgttcgagagatctttcagaatggccatgtcagagatgaaaggaacatgcttaaggttgtttctcggatgcaccgagtgtcagtgatcctgaaactgctggtgcagcagttttccattctggagacgatgacagccttggacttcaatgacttcaggtgtgcacatttggcattttaaaaaatgtgatggaatttactttctcattttggtggggtgtcactatatggacttaggggtcttcgatcacaaagcatttgagaa

SEQ ID NO: 386489 - DNA, 935 bp, Homo sapiens
gtaacacatcttcatgtatgtttttccagtgataggtacaaggtatttgtagatttatttaatctttcaacatacctgattccccgacactggataccgaagatgaacccaaccattcacaaatttctatatacagcagaatactgtgatagctcctacttcagcagtgatgaatcagattaaaatcgtctgcaaaatctatgaagaatactggtttcacagcctattttttattttctatggattttcataaatacagtttgaatatatgtatgcatatattgttcagcaccacgatgctctgatttaattctagaaacaatttgattacctcttgtttgtgacaagactaagcattaagatgagaaagaatacatttaaatagtaacattgtacatagggtgttttcctattaaaaattcagtttcccctgagacttaatgtaaccacttaatgtaatcactatctcattgtttcatctttataaacttgtaaacttcatctatttcaaatattttatgcagtacattatattattctgtacaaaggctttcaaacaaaatttttaaaataataaagtattaatctttctccctgtaaaaaagacaaaaaaggagacaagagaacacacaagatgtagggacgaaaaaagcagcacagcagaacagcagagaacagacaagaaagaggagacagagggacacaaagaggcaaagcgaaaaagtggacaacagccggagatcaccaacgagaaaaccggcgcaaaagaagatagtaggcgaggtaatatccacacaaagaaaaaaaacagcgcgggcgaacataagagcagagcgtagtagaaagaaacgcggagagagagcacggaaggtacacgcggggaaacaaaaccggaaaacacgagaggcgcgtagataaaagaatgccggacgcgg

SEQ ID NO: 386490 - DNA, 717 bp, Homo sapiens
gcaatccatctgctgactcaacttgctagtatcgggcagcagccaggaccacagctcctccagctcctttgtgaccttttccttcagcttcttcaaatactgggttagacacctgcctggaatatagtgagtgttaggataaagtaaacatagaccagaggaagaagtcaaatacgcatttgcctcagaagaggcaatgaatccctttgtggagggaaaggttcaatatagttaagagcatgagatgggcttcacaatggaagatcaggcttccggtccattcctcgcctcttataacctgcacaactttagccaagtttcttagtcttataccttttctgtcaaatggcagcaatggtatctgccttatgaatttgttgtattaaatttgttgataatacctggagagagcttagcacattatctagatcataataagtactcaagggtattagctatttttattattctgctaatgtagtggtgatgtggtaaatagtaaaatattcaggaattttaaaaagctttaaaagtatcttaaaaaattagttcttaatggctttatatatgttcataattaggtgaattaacttttatatcctttgccaaaataatacttttggaatataggtattcaactatccagcattaatttacttacaagatgtttcaagcttcatttactattaaatcattatttaatacaacataaataac

SEQ ID NO: 386491 - DNA, 405 bp, Homo sapiens
ctcgtgccgaattcggcacgagcggcacgatgctggtgcagcagttttccattctggagacgatgacagccttggacttcaatgacttcagagagtacttatctccagcatcaggcttccagagtttgcaattccgactattagaaaacaagataggtgttcttcagaacatgagagtcccttataacagaagacattatcgtgataacttcaaaggagaagaaaatgaactgctacttaaatctgagcaggaaaagacacttctggaattagtggaggcatggctggaaagaactccaggtttagagccacatggatttaacttctggggaaagcttgaaaaaaatatcaccagaggcctggaagaggaattcataaggattcaggtatttagatgacatgagt

SEQ ID NO: 386492 - DNA, 230 bp, Homo sapiens
attcggccattatggccgggattgtacatagggtgttttcctattaaaaattcagtttcccctgagacttaatgtaaccacttaatgtaatcactatctcattgtttcatctttataaacttgtaaacttcatctatttcaaatattttatgcagtacattatattattctgtacaaaggctttcaaacaaaatttttaaaataataaagtattaatctttctccctgta

SEQ ID NO: 386493 - DNA, 405 bp, Homo sapiens
ggaaggtcaatgatagcatctgcctagagtcaaacctccgtgcttctcagacagtgccttttcaccatgagtgggtgcccatttttaggaaacaactttgggtgagtatttacctttattctaagtgggttttggcttttagaagtatcaggtgtgagcattttaatttctgaatttaaggagcattgaaaactgtcacctttattcctttgtctaacaatctactctaaagaaaatttgcaatgagaattttaatcacccatatcattagttaactgtgttttctaaagcactatttttccctcttgatttattaaatttgcagaagccagcaaaggaggtcttatctatgggaactacctgcatgtaagtggcagggtccttacagggtttggtgtccattgt

SEQ ID NO: 386494 - DNA, 2039 bp, Homo sapiens
ggaaggtcaatgatagcatctgcctagagtcaaacctccgtgcttctcagacagtgccttttcaccatgagtgggtgcccatttttaggaaacaactttggatatacttttaaaaaactccccgtagaaggcagcgaagaagacaaatcacaaactggtgtgaatagagccagcaaaggaggtcttatctatgggaactacctgcatttggaaaaagttttgaatgcacaagaactgcaaagtgaaacaaaaggaaataaaatccatgatgaacatctttttatcataactcatcaagcttatgaactctggtttaagcaaatcctctgggagttggattctgttcgagagatctttcagaatggccatgtcagagatgaaaggaacatgcttaaggttgtttctcggatgcaccgagtgtcagtgatcctgaaactgctggtgcagcagttttccattctggagacgatgacagccttggacttcaatgacttcagagagtacttatctccagcatcaggcttccagagtttgcaattccgactattagaaaacaagataggtgttcttcagaacatgagagtcccttataacagaagacattatcgtgataacttcaaaggagaagaaaatgaactgctacttaaatctgagcaggaaaagacacttctggaattagtggaggcatggctggaaagaactccaggtttagagccacatggatttaacttctggggaaagcttgaaaaaaatatcaccagaggcctggaagaggaattcataaggattcaggctaaagaagagtctgaagaaaaagaggaacaggtggctgaatttcagaagcaaaaagaggtgctactgtccttatttgatgagaaacgtcatgaacatctccttagtaaaggtgaaagacggctgtcatacagagcacttcagggagcattgatgatatatttttacagggaagagcctaggttccaggtgccttttcagttgctgacttctcttatggacatagattcactgatgaccaaatggagatataaccatgtgtgcatggtgcacagaatgctgggcagcaaagctggcaccggtggttcctcaggctatcactacctgcgatcaactgtgagtgataggtacaaggtatttgtagatttatttaatctttcaacatacctgattccccgacactggataccgaagatgaacccaaccattcacaaatttctatatacagcagaatactgtgatagctcctacttcagcagtgatgaatcagattaaaatcgtctgcaaaatctatgaagaatactggtttcacagcctattttttattttctatggattttcataaatacagtttgaatatatgtatgcatatattgttcagcaccacgatgctctgatttaattctagaaacaatttgattacctcttgtttgtgacaagactaagcattaagatgagaaagaatacatttaaatagtaacattgtacatagggtgttttcctattaaaaattcagtttcccctgagacttaatgtaaccacttaatgtaatcactatctcattgtttcatctttataaacttgtaaacttcatctatttcaaatattttatgcagtacattatattattctgtacaaaggctttcaaacaaaatttttaaaataataaagtattaatctttctccctgtaaaaaagacaaaaaaggagacaagagaacacacaagatgtagggacgaaaaaagcagcacagcagaacagcagagaacagacaagaaagaggagacagagggacacaaagaggcaaagcgaaaaagtggacaacagccggagatcaccaacgagaaaaccggcgcaaaagaagatagtaggcgaggtaatatccacacaaagaaaaaaaacagcgcgggcgaacataagagcagagcgtagtagaaagaaacgcggagagagagcacggaaggtacacgcggggaaacaaaaccggaaaacacgagaggcgcgtagataaaagaatgccggacgcgg

SEQ ID NO: 386495 - DNA, 1985 bp, Homo sapiens
ggaaggtcaatgatagcatctgcctagagtcaaacctccgtgcttctcagacagtgccttttcaccatgagtgggtgcccatttttaggaaacaactttggatatacttttaaaaaactccccgtagaaggcagcgaagaagacaaatcacaaactggtgtgaatagagccagcaaaggaggtcttatctatgggaactacctgcatttggaaaaagttttgaatgcacaagaactgcaaagtgaaacaaaaggaaataaaatccatgatgaacatctttttatcataactcatcaagcttatgaactctggtttaagcaaatcctctgggagttggattctgttcgagagatctttcagaatggccatgtcagagatgaaaggaacatgcttaaggttgtttctcggatgcaccgagtgtcagtgatcctgaaactgctggtgcagcagttttccattctggagacgatgacagccttggacttcaatgacttcagagagtacttatctccagcatcaggcttccagagtttgcaattccgactattagaaaacaagataggtgttcttcagaacatgagagtcccttataacagaagacattatcgtgataacttcaaaggagaagaaaatgaactgctacttaaatctgagcaggaaaagacacttctggaattagtggaggcatggctggaaagaactccaggtttagagccacatggatttaacttctggggaaagcttgaaaaaaatatcaccagaggcctggaagaggaattcataaggattcaggctaaagaagagtctgaagaaaaagaggaacaggtggctgaatttcagaagcaaaaagaggtgctactgtccttatttgatgagaaacgtcatgaacatctccttagtaaaggtgaaagacggctgtcatacagagcacttcagggagcattgatgatatatttttacagggaagagcctaggttccaggtgccttttcagttgctgacttctcttatggacatagattcactgatgaccaaatggagatataaccatgtgtgcatggtgcacagaatgctgggcagcaaagctggcaccggtggttcctcaggctatcactacctgcgatcaactgtgagtgataggtacaaggtatttgtagatttatttaatctttcaacatacctgattccccgacactggataccgaagatgaacccaaccattcacaaatttctatatacagcagaatactgtgatagctcctacttcagcagtgatgaatcagattaaaatcgtctgcaaaatctatgaagaatactggtttcacagcctattttttattttctatggattttcataaatacagtttgaatatatgtatgcatatattgttcagcaccacgatgctctgatttaattctagaaacaatttgattacctcttgtttgtgacaagactaagcattaagatgagaaagaatacatttaaatagtaacattgtacatagggtgttttcctattaattgtttcatctttataaacttgtaaacttcatctatttcaaatattttatgcagtacattatattattctgtacaaaggctttcaaacaaaatttttaaaataataaagtattaatctttctccctgtaaaaaagacaaaaaaggagacaagagaacacacaagatgtagggacgaaaaaagcagcacagcagaacagcagagaacagacaagaaagaggagacagagggacacaaagaggcaaagcgaaaaagtggacaacagccggagatcaccaacgagaaaaccggcgcaaaagaagatagtaggcgaggtaatatccacacaaagaaaaaaaacagcgcgggcgaacataagagcagagcgtagtagaaagaaacgcggagagagagcacggaaggtacacgcggggaaacaaaaccggaaaacacgagaggcgcgtagataaaagaatgccggacgcgg

SEQ ID NO: 386496 - DNA, 1190 bp, Homo sapiens
ggaaggtcaatgatagcatctgcctagagtcaaacctccgtgcttctcagacagtgccttttcaccatgagtgggtgcccatttttaggaaacaactttggatatacttttaaaaaactccccgtagaaggcagcgaagaagacaaatcacaaactggtgtgaatagagccagcaaaggaggtcttatctatgggaactacctgcatttggaaaaagttttgaatgcacaagaactgcaaagtgaaacaaaaggaaataaaatccatgatgaacatctttttatcataactcatcaagcttatgaactctggtttaagcaaatcctctgggagttggattctgttcgagagatctttcagaatggccatgtcagagatgaaaggaacatgcttaaggttgtttctcggatgcaccgagtgtcagtgatcctgaaactgctggtgcagcagttttccattctggagacgatgacagccttggacttcaatgacttcagagagtacttatctccagcatcaggcttccagagtttgcaattccgactattagaaaacaagataggtgttcttcagaacatgagagtcccttataacagaagacattatcgtgataacttcaaaggagaagaaaatgaactgctacttaaatctgagcaggaaaagacacttctggaattagtggaggcatggctggaaagaactccaggtttagagccacatggatttaacttctggggaaagcttgaaaaaaatatcaccagaggcctggaagaggaattcataaggattcaggctaaagaagagtctgaagaaaaagaggaacaggtggctgaatttcagaagcaaaaagaggtgctactgtccttatttgatgagaaacgtcatgaacatctccttagtaaaggtgaaagacggctgtcatacagagcacttcagggagcattgatgatatatttttacagggaagagcctaggttccaggtgccttttcagttgctgacttctcttatggacatagattcactgatgaccaaatggagatataaccatgtgtgcatggtgcacagaatgctgggcagcaaagctggcaccggtggttcctcaggctatcactacctgcgatcaactgtgagataaatggacaaatggatacatcgggaaactgaaaaacttctgtggtcccttgaaaa

SEQ ID NO: 386497 - DNA, 1663 bp, Homo sapiens
ggaaggtcaatgatagcatctgcctagagtcaaacctccgtgcttctcagacagtgccttttcaccatgagtgggtgcccatttttaggaaacaactttggatatacttttaaaaaactccccgtagaaggcagcgaagaagacaaatcacaaactggtgtgaatagagccagcaaaggaggtcttatctatgggaactacctgcatttggaaaaagttttgaatgcacaagaactgcaaagtgaaacaaaaggaaatcttatgaactctggtttaagcaaatcctctgggagttggattctgttcgagagatctttcagaatggccatgtcagagatgaaaggaacatgcttaaggttgtttctcggatgcaccgagtgtcagtgatcctgaaactgctggtgcagcagttttccattctggagacgatgacagccttggacttcaatgacttcagagagtacttatctccagcatcaggcttccagagtttgcaattccgactattagaaaacaagataggtgttcttcagaacatgagagtcccttataacagaagacattatcgtgataacttcaaaggagaagaaaatgaactgctacttaaatctgagcaggaaaagacacttctggaattagtggaggcatggctggaaagaactccaggtttagagccacatggatttaacttctggggaaagcttgaaaaaaatatcaccagaggcctggaagaggaattcataaggattcaggctaaagaagagtctgaagaaaaagaggaacaggtggctgaatttcagaagcaaaaagaggtgctactgtccttatttgatgagaaacgtcatgaacatctccttagtaaaggtgaaagacggctgtcatacagagcacttcagggagcattgatgatatatttttacagggaagagcctaggttccaggtgccttttcagttgctgacttctcttatggacatagattcactgatgaccaaatggagatataaccatgtgtgcatggtgcacagaatgctgggcagcaaagctggcaccggtggttcctcaggctatcactacctgcgatcaactgtgagtgataggtacaaggtatttgtagatttatttaatctttcaacatacctgattccccgacactggataccgaagatgaacccaaccattcacaaatttctatatacagcagaatactgtgatagctcctacttcagcagtgatgaatcagattaaaatcgtctgcaaaatctatgaagaatactggtttcacagcctattttttattttctatggattttcataaatacagtttgaatatatgtatgcatatattgttcagcaccacgatgctctgatttaattctagaaacaatttgattacctcttgtttgtgacaagactaagcattaagatgagaaagaatacatttaaatagtaacattgtacatagggtgttttcctattaaaaattcagtttcccctgagacttaatgtaaccacttaatgtaatcactatctcattgtttcatctttataaacttgtaaacttcatctatttcaaatattttatgcagtacattatattattctgtacaaaggctttcaaacaaaatttttaaaataataaagtattaatctttctccctgta

SEQ ID NO: 386498 - DNA, 1642 bp, Homo sapiens
aggatcccccgggctgcaggtttttaggacgctatcttggatatacttttaaaaaactccccgtagaaggcagcgaagaagacaaatcacaaactggtgtgaatagagccagcaaaggaggtcttatctatgggaactacctgcatttggaaaaagttttgaatgcacaagaactgcaaagtgaaacaaaaggaaataaaatccatgatgaacatctttttatcataactcatcaagcttatgaactctggtttaagcaaatcctctgggagttggattctgttcgagagatctttcagaatggccatgtcagagatgaaaggaacatgcttaaggttgtttctcggatgcaccgagtgtcagtgatcctgaaactgctggtgcagcagttttccattctggagacgatgacagccttggacttcaatgacttcagagagtacttatctccagcatcaggcttccagagtttgcaattccgactattagaaaacaagataggtgttcttcagaacatgagagtcccttataacagaagacattatcgtgataacttcaaaggagaagaaaatgaactgctacttaaatctgagcaggaaaagacacttctggaattagtggaggcatggctggaaagaactccaggtttagagccacatggatttaacttctggggaaagcttgaaaaaaatatcaccagaggcctggaagaggaattcataaggattcaggctaaagaagagtctgaagaaaaagaggaacaggtggctgaatttcagaagcaaaaagaggtgctactgtccttatttgatgagaaacgtcatgaacatctccttagtaaaggtgaaagacggctgtcatacagagcacttcagggagcattgatgatatatttttacagggaagagcctaggttccaggtgccttttcagttgctgacttctcttatggacatagattcactgatgaccaaatggagatataaccatgtgtgcatggtgcacagaatgctgggcagcaaagctggcaccggtggttcctcaggctatcactacctgcgatcaactgtgagtgataggtacaaggtatttgtagatttatttaatctttcaacatacctgattccccgacactggataccgaagatgaacccaaccattcacaaatttctatatacagcagaatactgtgatagctcctacttcagcagtgatgaatcagattaaaatcgtctgcaaaatctatgaagaatactggtttcacagcctattttttattttctatggattttcataaatacagtttgaatatatgtatgcatatattgttcagcaccacgatgctctgatttaattctagaaacaatttgattacctcttgtttgtgacaagactaagcattaagatgagaaagaatacatttaaatagtaacattgtacatagggtgttttcctattaaaaattcagtttcccctgagacttaatgtaaccacttaatgtaatcactatctcattgtttcatctttataaacttgtaaacttcatctatttcaaatattttatgcagtacattatattattctgtacaaaggctttcaaacaaaatttttaaaataataaagtattaatctttctccctgta

SEQ ID NO: 386499 - DNA, 1648 bp, Homo sapiens
ggaaggtcaatgatagcatctgcctagagtcaaacctccgtgcttctcagacagtgccttttcaccatgagtgggtgcccatttttaggaaacaactttggatatacttttaaaaaactccccgtagaaggcagcgaagaagacaaatcacaaactggtgtgaatagagccagcaaaggaggtcttatctatgggaactacctgcatttggaaaaagttttgaatgcacaagaactgcaaagtgaaacaaaaggaaataaaatccatgatgaacatctttttatcataactcatcaagcttatgaactctggtttaagcaaatcctctgggagttggattctgttcgagagatctttcagaatggccatgtcagagatgaaaggaacatgcttaaggttgtttctcggatgcaccgagtgtcagtgatcctgaaactgctggtgcagcagttttccattctggagacgatgacagccttggacttcaatgacttcagagagtacttatctccagcatcaggcttccagagtttgcaattccgactattaatcgtgataacttcaaaggagaagaaaatgaactgctacttaaatctgagcaggaaaagacacttctggaattagtggaggcatggctggaaagaactccaggtttagagccacatggatttaacttctggggaaagcttgaaaaaaatatcaccagaggcctggaagaggaattcataaggattcaggctaaagaagagtctgaagaaaaagaggaacaggtggctgaatttcagaagcaaaaagaggtgctactgtccttatttgatgagaaacgtcatgaacatctccttagtaaaggtgaaagacggctgtcatacagagcacttcagggagcattgatgatatatttttacagggaagagcctaggttccaggtgccttttcagttgctgacttctcttatggacatagattcactgatgaccaaatggagatataaccatgtgtgcatggtgcacagaatgctgggcagcaaagctggcaccggtggttcctcaggctatcactacctgcgatcaactgtgagtgataggtacaaggtatttgtagatttatttaatctttcaacatacctgattccccgacactggataccgaagatgaacccaaccattcacaaatttctatatacagcagaatactgtgatagctcctacttcagcagtgatgaatcagattaaaatcgtctgcaaaatctatgaagaatactggtttcacagcctattttttattttctatggattttcataaatacagtttgaatatatgtatgcatatattgttcagcaccacgatgctctgatttaattctagaaacaatttgattacctcttgtttgtgacaagactaagcattaagatgagaaagaatacatttaaatagtaacattgtacatagggtgttttcctattaaaaattcagtttcccctgagacttaatgtaaccacttaatgtaatcactatctcattgtttcatctttataaacttgtaaacttcatctatttcaaatattttatgcagtacattatattattctgtacaaaggctttcaaacaaaatttttaaaataataaagtattaatctttctccctgta

SEQ ID NO: 386500 - DNA, 1703 bp, Homo sapiens
ggaaggtcaatgatagcatctgcctagagtcaaacctccgtgcttctcagacagtgccttttcaccatgagtgggtgcccatttttaggaaacaactttggatatacttttaaaaaactccccgtagaaggcagcgaagaagacaaatcacaaactggtgtgaatagagccagcaaaggaggtcttatctatgggaactacctgcatttggaaaaagttttgaatgcacaagaactgcaaagtgaaacaaaaggaaataaaatccatgatgaacatctttttatcataactcatcaagcttatgaactctggtttaagcaaatcctctgggagttggattctgttcgagagatctttcagaatggccatgtcagagatgaaaggaacatgcttaaggttgtttctcggatgcaccgagtgtcagtgatcctgaaactgctggtgcagcagttttccattctggagacgatgacagccttggacttcaatgacttcagagagtacttatctccagcatcaggcttccagagtttgcaattccgactattagaaaacaagataggtgttcttcagaacatgagagtcccttataacagaagacattatcgtgataacttcaaaggagaagaaaatgaactgctacttaaatctgagcaggaaaagacacttctggaattagtggaggcatggctggaaagaactccaggtttagagccacatggatttaacttctggggaaagcttgaaaaaaatatcaccagaggcctggaagaggaattcataaggattcaggctaaagaagagtctgaagaaaaagaggaacaggtggctgaatttcagaagcaaaaagaggtgctactgtccttatttgatgagaaacgtcatgaacatctccttagtaaaggtgaaagacggctgtcatacagagcacttcagggagcattgatgatatatttttacagggaagagcctaggttccaggtgccttttcagttgctgacttctcttatggacatagattcactgatgaccaaatggagatataaccatgtgtgcatggtgcacagaatgctgggcagcaaagctggcaccggtggttcctcaggctatcactacctgcgatcaactgtgagtgataggtacaaggtatttgtagatttatttaatctttcaacatacctgattccccgacactggataccgaagatgaacccaaccattcacaaatttctatatacagcagaatactgtgatagctcctacttcagcagtgatgaatcagattaaaatcgtctgcaaaatctatgaagaatactggtttcacagcctattttttattttctatggattttcataaatacagtttgaatatatgtatgcatatattgttcagcaccacgatgctctgatttaattctagaaacaatttgattacctcttgtttgtgacaagactaagcattaagatgagaaagaatacatttaaatagtaacattgtacatagggtgttttcctattaaaaattcagtttcccctgagacttaatgtaaccacttaatgtaatcactatctcattgtttcatctttataaacttgtaaacttcatctatttcaaatattttatgcagtacattatattattctgtacaaaggctttcaaacaaaatttttaaaataataaagtattaatctttctccctgta

SEQ ID NO: 386501 - DNA, 1996 bp, Homo sapiens
ggaaggtcaatgatagcatctgcctagagtcaaacctccgtgcttctcagacagtgccttttcaccatgagtgggtgcccatttttaggaaacaactttggatatacttttaaaaaactccccgtagaaggcagcgaagaagacaaatcacaaactggtgtgaatagagccagcaaaggaggtcttatctatgggaactacctgcatttggaaaaagttttgaatgcacaagaactgcaaagtgaaacaaaaggaaataaaatccatgatgaacatctttttatcataactcatcaagcttatgaactctggtttaagcaaatcctctgggagttggattctgttcgagagatctttcagaatggccatgtcagagatgaaaggaacatgcttaaggttgtttctcggatgcaccgagtgtcagtgatcctgaaactgctggtgcagcagttttccattctggagacgatgacagccttggacttcaatgacttcagagagtacttatctccagcatcaggcttccagagtttgcaattccgactattagaaaacaagataggtgttcttcagaacatgagagtcccttataacagaagacattatcgtgataacttcaaaggagaagaaaatgaactgctacttaaatctgagcaggaaaagacacttctggaattagtggaggcatggctggaaagaactccaggtttagagccacatggatttaacttctggggaaagcttgaaaaaaatatcaccagaggcctggaagaggaattcataaggattcaggctaaagaagagtctgaagaaaaagaggaacaggtggctgaatttcagaagcaaaaagaggtgctactgtccttatttgatgagaaacgtcatgaacatctccttagtaaaggtgaaagacggctgtcatacagagcacttcagggagcattgatgatatatttttacagggaagagcctaggttccaggtgccttttcagttgctgacttctcttatggacatagattcactgatgaccaaatggagatataaccatgtgtgcatggtgcacagaatgctgggcagcaaagctggcaccggtggttcctcaggctatcactacctgcgatcaactgtgagtgataggtacaaggtatttgtagatttatttaatctttcaacatacctgattccccgacactggataccgaagatgaacccaaccattcacaaatttctatatacagcagaatactgtgatagctcctacttcagcagtgatgaatcagattaaaatcgtctgcaaaatctatgaagaatactggtttcacagcctattttttattttctatggattttcataaatacagtttgaatatatgtatgcatatattgttcagcaccacgatgctctgatttaattctagaaacaatttgattacctcttgtttgtgacaagactaagcattaagatgagaaagaatacatttaaatagtaacattgtacatagggtgttttcctattaaaaattcagtttcccctgagacttaatgtaaccacttaatgtaatcactatctcattgtttcatctttataaacttgtaaacttcatctatttcaaatattttatgcagtacattatattattctgtacaaaggctttcaaacaaaatttttaaaataataaagtattaatctttctccctgtaaaaaacaaacaagaagcagccacacacacacacaattgttggggcggccggggccatcgaaaaagctcctcaaaaaccatctgtggggcggcgcggccccataggtagcgacctgtgccaacggggtccccaagacatccgggcagacaggtgcgggatcacccaaaaaaaagccggcggcaccgaggctcgaaacaacccaggggtggaggcgaagcaccaacacgagccaggagcgataatgcccgagagagagcagacagcccacacaacacacccaccaacacggcagc

SEQ ID NO: 386502 - DNA, 1649 bp, Homo sapiens
ggaaggtcaatgatagcatctgcctagagtcaaacctccgtgcttctcagacagtgccttttcaccatgagtgggtgcccatttttaggaaacaactttggatatacttttaaaaaactccccgtagaaggcagcgaagaagacaaatcacaaactggtgtgaatagagccagcaaaggaggtcttatctatgggaactacctgcatttggaaaaagttttgaatgcacaagaactgcaaagtgaaacaaaaggaaataaaatccatgatgaacatctttttatcataactcatcaagcttatgaactctggtttaagcaaatcctctgggagttggattctgttcgagagatctttcagaatggccatgtcagagatgaaaggaacatgcttaaggttgtttctcggatgcaccgagtgtcagtgatcctgaaactgctggtgcagcagttttccattctggagacgatgacagccttggacttcaatgacttcagagagtacttatctccagcatcaggcttccagagtttgcaattccgactattagaaaacaagataggtgttcttcagaacatgagagtcccttataacagaagacattatcgtgataacttcaaaggagaagaaaatgaactgctacttaaatctgagcaggaaaagacacttctggaattagtggaggcatggctggaaagaactccaggtttagagccacatggatttaacttctggggaaagcttgaaaaaaatatcaccagaggcctggaagaggaattcataaggattcaggctaaagaagagtctgaagaaaaagaggaacaggtggctgaatttcagaagcaaaaaggtgaaagacggctgtcatacagagcacttcagggagcattgatgatatatttttacagggaagagcctaggttccaggtgccttttcagttgctgacttctcttatggacatagattcactgatgaccaaatggagatataaccatgtgtgcatggtgcacagaatgctgggcagcaaagctggcaccggtggttcctcaggctatcactacctgcgatcaactgtgagtgataggtacaaggtatttgtagatttatttaatctttcaacatacctgattccccgacactggataccgaagatgaacccaaccattcacaaatttctatatacagcagaatactgtgatagctcctacttcagcagtgatgaatcagattaaaatcgtctgcaaaatctatgaagaatactggtttcacagcctattttttattttctatggattttcataaatacagtttgaatatatgtatgcatatattgttcagcaccacgatgctctgatttaattctagaaacaatttgattacctcttgtttgtgacaagactaagcattaagatgagaaagaatacatttaaatagtaacattgtacatagggtgttttcctattaaaaattcagtttcccctgagacttaatgtaaccacttaatgtaatcactatctcattgtttcatctttataaacttgtaaacttcatctatttcaaatattttatgcagtacattatattattctgtacaaaggctttcaaacaaaatttttaaaataataaagtattaatctttctccctgta

SEQ ID NO: 386503 - DNA, 1649 bp, Homo sapiens
ggaaggtcaatgatagcatctgcctagagtcaaacctccgtgcttctcagacagtgccttttcaccatgagtgggtgcccatttttaggaaacaactttggatatacttttaaaaaactccccgtagaaggcagcgaagaagacaaatcacaaactggtgtgaatagagccagcaaaggaggtcttatctatgggaactacctgcatttggaaaaagttttgaatgcacaagaactgcaaagtgaaacaaaaggaaataaaatccatgatgaacatctttttatcataactcatcaagcttatgaactctggtttaagcaaatcctctgggagttggattctgttcgagagatctttcagaatggccatgtcagagatgaaaggaacatgcttaaggttgtttctcggatgcaccgagtgtcagtgatcctgaaactgctggtgcagcagttttccattctggagacgatgacagccttggacttcaatgacttcagagagtacttatctccagcatcaggcttccagagtttgcaattccgactattagaaaacaagataggtgttcttcagaacatgagagtcccttataacagaagacattatcgtgataacttcaaaggagaagaaaatgaactgctacttaaatctgagcaggaaaagacacttctggaattagtggaggcatggctggaaagaactccaggtttagagccacatggatttaacttctggggaaagcttgaaaaaaatatcaccagaggcctggaagaggaattcataaggattcaggctaaagaagagtctgaagaaaaagaggaacaggtggctgaatttcagaagcaaaaagaggtgctactgtccttatttgatgagaaacgtcatgaacatctccttagtaaaggtgaaagacggctgtcatacagagcacttcagggagcattgatgatatatttttacagggaagagcctaggttccaggtgccttttcagttgctgacttctcttatggacatagattcactgatgaccaaatggagatataaccatgtgtgcatggtgcacagaatgctgggcagcaaagctggcaccggtggttcctcaggctatcactacctgcgatcaactgtgagtgataggtacaaggtatttgtagatttatttaatctttcaacatacctgattccccgacactggataccgaagatgaacccaaccattcacaaatttctatatacagcagaatactgtgatagctcctacttcagcagtgatgaatcagattaaaatcgtctgctcataaatacagtttgaatatatgtatgcatatattgttcagcaccacgatgctctgatttaattctagaaacaatttgattacctcttgtttgtgacaagactaagcattaagatgagaaagaatacatttaaatagtaacattgtacatagggtgttttcctattaaaaattcagtttcccctgagacttaatgtaaccacttaatgtaatcactatctcattgtttcatctttataaacttgtaaacttcatctatttcaaatattttatgcagtacattatattattctgtacaaaggctttcaaacaaaatttttaaaataataaagtattaatctttctccctgta

SEQ ID NO: 386504 - DNA, 1790 bp, Homo sapiens
gcaatccatctgctgactcaacttgctagtatcgggcagcagccaggaccacagctcctccagctcctttgtgaccttttccttcagcttcttcaaatactgggttagacacctgcctggaatatagtgagtgttaggataaagtaaacatagaccagaggaagaagtcaaatacgcatttgcctcagatatacttttaaaaaactccccgtagaaggcagcgaagaagacaaatcacaaactggtgtgaatagagccagcaaaggaggtcttatctatgggaactacctgcatttggaaaaagttttgaatgcacaagaactgcaaagtgaaacaaaaggaaataaaatccatgatgaacatctttttatcataactcatcaagcttatgaactctggtttaagcaaatcctctgggagttggattctgttcgagagatctttcagaatggccatgtcagagatgaaaggaacatgcttaaggttgtttctcggatgcaccgagtgtcagtgatcctgaaactgctggtgcagcagttttccattctggagacgatgacagccttggacttcaatgacttcagagagtacttatctccagcatcaggcttccagagtttgcaattccgactattagaaaacaagataggtgttcttcagaacatgagagtcccttataacagaagacattatcgtgataacttcaaaggagaagaaaatgaactgctacttaaatctgagcaggaaaagacacttctggaattagtggaggcatggctggaaagaactccaggtttagagccacatggatttaacttctggggaaagcttgaaaaaaatatcaccagaggcctggaagaggaattcataaggattcaggctaaagaagagtctgaagaaaaagaggaacaggtggctgaatttcagaagcaaaaagaggtgctactgtccttatttgatgagaaacgtcatgaacatctccttagtaaaggtgaaagacggctgtcatacagagcacttcagggagcattgatgatatatttttacagggaagagcctaggttccaggtgccttttcagttgctgacttctcttatggacatagattcactgatgaccaaatggagatataaccatgtgtgcatggtgcacagaatgctgggcagcaaagctggcaccggtggttcctcaggctatcactacctgcgatcaactgtgagtgataggtacaaggtatttgtagatttatttaatctttcaacatacctgattccccgacactggataccgaagatgaacccaaccattcacaaatttctatatacagcagaatactgtgatagctcctacttcagcagtgatgaatcagattaaaatcgtctgcaaaatctatgaagaatactggtttcacagcctattttttattttctatggattttcataaatacagtttgaatatatgtatgcatatattgttcagcaccacgatgctctgatttaattctagaaacaatttgattacctcttgtttgtgacaagactaagcattaagatgagaaagaatacatttaaatagtaacattgtacatagggtgttttcctattaaaaattcagtttcccctgagacttaatgtaaccacttaatgtaatcactatctcattgtttcatctttataaacttgtaaacttcatctatttcaaatattttatgcagtacattatattattctgtacaaaggctttcaaacaaaatttttaaaataataaagtattaatctttctccctgta

SEQ ID NO: 386505 - DNA, 1649 bp, Homo sapiens
aggtttgctgtttattttctattttcacattctatattgtggtttagcctgagagaggctaacgttttctttgatcatatcactcaatgtggccattaatatttctggagaagacacaaacctatttatcatacttcataaagatccgaagtgatcctacgaaggaggttacattgaaggtaacacttaagagttgacataacattctgaatgcactcaacatgataaagattcgttaatacaacttatgaactctggtttaagcaaatcctctgggagttggattctgttcgagagatctttcagaatggccatgtcagagatgaaaggaacatgcttaaggttgtttctcggatgcaccgagtgtcagtgatcctgaaactgctggtgcagcagttttccattctggagacgatgacagccttggacttcaatgacttcagagagtacttatctccagcatcaggcttccagagtttgcaattccgactattagaaaacaagataggtgttcttcagaacatgagagtcccttataacagaagacattatcgtgataacttcaaaggagaagaaaatgaactgctacttaaatctgagcaggaaaagacacttctggaattagtggaggcatggctggaaagaactccaggtttagagccacatggatttaacttctggggaaagcttgaaaaaaatatcaccagaggcctggaagaggaattcataaggattcaggctaaagaagagtctgaagaaaaagaggaacaggtggctgaatttcagaagcaaaaagaggtgctactgtccttatttgatgagaaacgtcatgaacatctccttagtaaaggtgaaagacggctgtcatacagagcacttcagggagcattgatgatatatttttacagggaagagcctaggttccaggtgccttttcagttgctgacttctcttatggacatagattcactgatgaccaaatggagatataaccatgtgtgcatggtgcacagaatgctgggcagcaaagctggcaccggtggttcctcaggctatcactacctgcgatcaactgtgagtgataggtacaaggtatttgtagatttatttaatctttcaacatacctgattccccgacactggataccgaagatgaacccaaccattcacaaatttctatatacagcagaatactgtgatagctcctacttcagcagtgatgaatcagattaaaatcgtctgcaaaatctatgaagaatactggtttcacagcctattttttattttctatggattttcataaatacagtttgaatatatgtatgcatatattgttcagcaccacgatgctctgatttaattctagaaacaatttgattacctcttgtttgtgacaagactaagcattaagatgagaaagaatacatttaaatagtaacattgtacatagggtgttttcctattaaaaattcagtttcccctgagacttaatgtaaccacttaatgtaatcactatctcattgtttcatctttataaacttgtaaacttcatctatttcaaatattttatgcagtacattatattattctgtacaaaggctttcaaacaaaatttttaaaataataaagtattaatctttctccctgta

SEQ ID NO: 386506 - DNA, 338 bp, Homo sapiens
gagccggacccagttcgctctgaaacagttcttctttattaagctgcatgaggtactttgtattgtattagtattcacgtttcacagataaaaataccacatcttcacataaatggcttggttaaagctcacagccagtaaataagagagctggttaggaatctagttctgatttcagagtcactgttttgtctgtctgtttgtttgtttgtttctttgtttgagacaaagtctcgctctgttgcccaagctggagtgcagtggtgggctcactgcagccttgacctcccagactcaagtcattctcccacttcagcctcccaagtagctgggactac

SEQ ID NO: 386507 - DNA, 1143 bp, Homo sapiens
ggaaagggtaagtggtgggaataatgcaaaatgatagtttaaaaatccttcatgccctgtttactttcctaatatggagataattgaaatctggactgggaataatttttttttaaaaaaactggattttccttgggcattgccatttactaatctcatgatcctgggcgagtcatgtaatctctttaaaacttattaactcataaaaatagaagtaacaatgtccaaacttcctattttagagttttcacgaggcgcaatagatgtaactgaaagcttcgagaagtttaaaggacttgcaaggaaatctactgaaataagccccattccacctgggcagaagcactcagacgccaaaccccaccttctgtcctgaaattcaccttccactaggagagtttgcttttctaatgcttcaaatgcacaacgggagatgttctgacttcagggtttctacccttcactgctgtaatctgctgcctgtatgacatgcgatctggtttacaccgtacagcttatcatcttcagcttgtggccccttccttgtttccaccttgctattcaggagggcctgtaagggtatctggattccttgagctgtagatgcaggacagtgagagggagggaggtagttctctggtctaatttcagtttcctaactgagggtacatgccttccctgaatgatcatcatcaaaaatatccagcccttcatggaagacaccacccctcctcatagatgagtccctgagcttatgatctcaaaaggaaatccttatcagaatacaacagaataaggacatagtttcattacagttataataataaaagtagttcttctttattaagctgcatgaggtactttgtattgtattagtattcacgtttcacagataaaaataccacatcttcacataaatggcttggttaaagctcacagccagtaaataagagagctggttaggaatctagttctgatttcagagtcactgttttgtctgtctgtttgtttgtttgtttctttgtttgagacaaagtctcgctctgttgcccaagctggagtgcagtggtgggctcactgcagccttgacctcccagactcaagtcattctcccacttcagcctcccaagtagctgggactac

SEQ ID NO: 386508 - DNA, 1234 bp, Homo sapiens
tatgagcaggcgctaaacctggtttaggtatttaggcagcgcgcggcccggctcgtaactcctcctgctgcagcaggcgtatcgttggcctcgcctcgaccccggaagtgacttctggaagtgacccaggaagtgacattttagctttaggtttaattggttcgactgccttctccacaatttgggcgagaatttcctttgccttctcagcaaaagttgttctgcggacccgtctgggtcaactttcatgagggacattgagacaaacaaatgaaatatgggttaaagtactctgagcagctacaaaaagaagaccagtctatcctgctggagacagtggccacgtgaagaaagagctcttgcagtatgaaagaccacatggaaagagaggccacatggaaccaacagtcagcatcttggtttcggacacgtgaagaaattcatctcagactgtgtatcctaaatcaggcacttgctgaatctaactacatgagtgagaccagttgacaacacatggagcagacatgagctgttctcagtgagtcctacacaaattcctgactcacaacactgtgagcaataaaatggttgttattttaagccactgaagtttgcagtgatttcttacataggaatagataaatgaaacacaaacattgatcatttgcatcttctatcttttttatgactagtcttattggaaattaccagtttatttctgccatggttagaaaacaaactctgaaattttgatactttaaaatttttttgagacttactgtgcccagaatatagtctatcttggtgaatgttctgtgagcactagacaagaatatgtattctgtagttattgagcattgtgtccatcaatgtcaacgtgattaaggtggttaatagttgtcttcagatcttctatattgtattgattgttttatgtgtagtgttgctattaattattgatacaggagtgtaaaacttaaactatggctgtgaatttgccacttactttagttttgtcagcttttcttttgcatttttgaagctctgttattgggcatataaacatttatggttcgtgtgtcttcctgatgaattgaccattttatcattatgaaatgtctttattgctgataatactccttatcttgaagtctaattcatccgatattagtatagccactgcagccttcctagcttactgtttactggtatatttttatccatgtttttactt

SEQ ID NO: 386509 - DNA, 356 bp, Homo sapiens
caacctgtgttttttaatttaatgtgcttctcttatagacaacagatagttgagtttgtctatcattttgctatttgttttcgatttgtcccattcagttttgtgttcctttgttctttacttcctgctttcttttgggttaattaatgtttttgtatttcatcttaattcctctgttggctttaactgtatctttttgcattattgctttacagtgtttctgagaattatgatatacattcttaacttatcacagccttagagttaaaattatgatacttcatgtaaaatctttgttgtcatatatatcatatctatgcacattgttatttttgccttagtcatatgtatcgcaa

SEQ ID NO: 386510 - DNA, 1432 bp, Homo sapiens
aagcagtggtatcaacgcagagtgcccattacggccggggagtgagctgcctctctgcgattggttttgcccgagttttatttttgtctgtctcagctagaaagtgggagactttcatttaaaatggaaattggggcgaggggttggcggctgggcgaagggagcattcaaaagcggagaatgtcactttacccgagaaattcactacgatgggccattggtttctgctcggctcgcaggcgcactgcacgagtggaggtgtggctagtggctgtgatgagataaatccatgcatagccttttcattgcgagcttgaaagttcttttctattacagttttagctttaggtttaattggttcgactgccttctccacaatttgggcgagaatttcctttgccttctcagcaaaagttgttctgcggacccgtctgggtcaactttcatgagggacattgagacaaacaaatgaaatatgggttaaagtactctgagcagctacaaaaagaagaccagtctatcctgctggagacagtggccacgtgaagaaagagctcttgcagtatgaaagaccacatggaaagagaggccacatggaaccaacagtcagcatcttggtttcggacacgtgaagaaattcatctcagactgtgtatcctaaatcaggcacttgctgaatctaactacatgagtgagaccagttgacaacacatggagcagacatgagctgttctcagtgagtcctacacaaattcctgactcacaacactgtgagcaataaaatggttgttattttaagccactgaagtttgcagtgatttcttacataggaatagataaatgaaacacaaacattgatcatttgcatcttctatcttttttatgactagtcttattggaaattaccagtttatttctgccatggttagaaaacaaactctgaaattttgatactttaaaatttttttgagacttactgtgcccagaatatagtctatcttggtgaatgttctgtgagcactagacaagaatatgtattctgtagttattgagcattgtgtccatcaatgtcaacgtgattaaggtggttaatagttgtcttcagatcttctatattgtattgattgttttatgtgtagtgttgctattaattattgatacaggagtgtaaaacttaaactatggctgtgaatttgccacttactttagttttgtcagcttttcttttgcatttttgaagctctgttattgggcatataaacatttatggttcgtgtgtcttcctgatgaattgaccattttatcattatgaaatgtctttattgctgataatactccttatcttgaagtctaattcatccgatattagtatagccactgcagccttcctagcttactgtttactggtatatttttatccatgtttttactt

SEQ ID NO: 386511 - DNA, 1084 bp, Homo sapiens
tatgagcaggcgctaaacctggtttaggtatttaggcagcgcgcggcccggctcgtaactcctcctgctgcagcaggcgtatcgttggcctcgcctcgaccccggaagtgacttctggaagtgacccaggaagtgacatactctgagcagctacaaaaagaagaccagtctatcctgctggagacagtggccacgtgaagaaagagctcttgcagtatgaaagaccacatggaaagagaggccacatggaaccaacagtcagcatcttggtttcggacacgtgaagaaattcatctcagactgtgtatcctaaatcaggcacttgctgaatctaactacatgagtgagaccagttgacaacacatggagcagacatgagctgttctcagtgagtcctacacaaattcctgactcacaacactgtgagcaataaaatggttgttattttaagccactgaagtttgcagtgatttcttacataggaatagataaatgaaacacaaacattgatcatttgcatcttctatcttttttatgactagtcttattggaaattaccagtttatttctgccatggttagaaaacaaactctgaaattttgatactttaaaatttttttgagacttactgtgcccagaatatagtctatcttggtgaatgttctgtgagcactagacaagaatatgtattctgtagttattgagcattgtgtccatcaatgtcaacgtgattaaggtggttaatagttgtcttcagatcttctatattgtattgattgttttatgtgtagtgttgctattaattattgatacaggagtgtaaaacttaaactatggctgtgaatttgccacttactttagttttgtcagcttttcttttgcatttttgaagctctgttattgggcatataaacatttatggttcgtgtgtcttcctgatgaattgaccattttatcattatgaaatgtctttattgctgataatactccttatcttgaagtctaattcatccgatattagtatagccactgcagccttcctagcttactgtttactggtatatttttatccatgtttttactt

SEQ ID NO: 386512 - DNA, 198 bp, Homo sapiens
tcagctagaaagtgggagactttcatttaaaatggaaattggggcgaggggttggcggctgggcgaagggagcattcaaaagcggagaatgtcactttacccgagaaattcactacgatgggccattggtttctgctcggctcgcaggcgcactgcacgagtggaggtgtggctagtggctgtgatgagataaatcca

SEQ ID NO: 386513 - DNA, 541 bp, Homo sapiens
tttgcatttttgaagctctgttattgggcatataaacatttatggttcgtgtgtcttcctgatgaattgaccattttatcattatgaaatgtctttattgctgataatactccttatcttgaagtctaattcatccgatattagtatagccactgcagccttcctagcttactgtttactggtatatttttatccatgtttttactttcaacctgtgttttttaatttaatgtgcttctcttatagacaacagatagttgagtttgtctatcattttgctatttgttttcgatttgtcccattcagttttgtgttcctttgttctttacttcctgctttcttttgggttaattaatgtttttgtatttcatcttaattcctctgttggctttaactgtatctttttgcattattgctttacagtgtttctgagaattatgatatacattcttaacttatcacagccttagagttaaaattatgatacttcatgtaaaataaaagagccttgcaatagtaaagttctacttaccacctcccc

SEQ ID NO: 386514 - DNA, 237 bp, Homo sapiens
ttatggatttgagttaccatctggtatcactccctttcagcttgaagaatttcctttagtattttaaagcaggtccactcacaataaattctgtctttttaatgtggaactctttgtcttcatttttgaagaacagttttgctagatacagaacatttaacaatttttttttttttgagatagtctcgccctgtcgccaggctggagtgcagtggcgcaatcttggctcattgcaac

SEQ ID NO: 386515 - DNA, 416 bp, Homo sapiens
aatttttttttccttcctgctgcaagcttgttaacagccatatcttcagagatgggccaacatgtgataatgaagaaaagggattatacagcactttgtgaaagcccttcctagatgcagaaaagtataaagagaaacagcacagtgactggtactttcttttttttttgagacagagttttgctctgtcacccaggctggagtgcagtggcacgatcttggcttactgcaacctctgtctcccggtttcaagcgattctcgtgcctcagcctcccaagtagctgatattacaggcacacgccaccttgcccagctaatttttgtatttttagtagaggcagagtttcaccatgttggccaggagttcgagacccagtgtggggagcgtagccagaccctaactctgttatttgga

SEQ ID NO: 386516 - DNA, 1298 bp, Homo sapiens
taagaggctggggaggcaggcatagcaaccagagctggagactgatgtgaacttcatctctctccccagaaaaggctcaacatcaactatatagccaacatgtccaaggtgtttaagaagaccagctccaatgggaagctctccatctacctggggaaacgggacttcgtggaccatgtggacacggtggaacccattgacggtgttgtcctggttgatcctgagtacttaaaatgtcgaaagttgtttgtcatgttgacatgtgcctttcgctatggccgtgatgacttggaagtgattggtctgacgttccgaaaagatctgtatgtgcagaccctgcaagtggtcccagctgaatccagcagccctcaggggcccctcacagtcctacaggagcgactactgcacaagctaggggacaatgcctacccctttaccctgcagatggtgaccaacctgccctgttctgtgacactgcagccaggtcctgaagatgcaggaaagccctgtgggattgactttgaagtgaagagtttctgtgctgaaaacccagaggagacagtctccaagagagactatgtgcggctggttgtccggaaagtacaatttgcaccaccggaggcaggccctggcccctcagcccagaccatccgccgcttccttctgtcagctcagcccctacaactccaggcctggatggacagggaggttcactaccacggagaacccatctctgtcaatgtttctatcaacaactgcaccaacaaggtcatcaaaaaaatcaagatttcagttgaccagatcacagatgttgtcctgtattcactagacaagtacaccaagactgtgttcattcaggaattcacggagactgtagctgctaattccagcttctcccagagctttgcagtaaccccaatcctggctgccagctgccagaaacggggcctggcactggatggcaaacttaagcatgaagataccaacctggcctctagcacaattattagaccgggaatggacaaagagctgctggggatcctggtgtcctacaaagtcagagtcaacctgatggtgtcctgtggtggcatcctaggagacctgacagccagcgatgttggtgtggagctacccttggtcctgatccatccgaagccatctcatgaggccgctaggtaatggaatacaagattgggaagccccattcccctcttcccatttccaccctccatgttatgacgatagaaatgtgaaaatgcttccttggggtgctttcaatacatgtgcagtggaaacat

SEQ ID NO: 386517 - DNA, 1348 bp, Homo sapiens
tgagcctttcttctttcccttttcccagaaaaggctcaacatcaactatatagccaacatgtccaaggtgtttaagaagaccagctccaatgggaaggtgagagaacctggcccagctgggcaaatgagagggcaaaagggatagctctccatctacctggggaaacgggacttcgtggaccatgtggacacggtggaacccattgacggtgttgtcctggttgatcctgagtacttaaaatgtcgaaagttgtttgtcatgttgacatgtgcctttcgctatggccgtgatgacttggaagtgattggtctgacgttccgaaaagatctgtatgtgcagaccctgcaagtggtcccagctgaatccagcagccctcaggggcccctcacagtcctacaggagcgactactgcacaagctaggggacaatgcctacccctttaccctgcagatggtgaccaacctgccctgttctgtgacactgcagccaggtcctgaagatgcaggaaagccctgtgggattgactttgaagtgaagagtttctgtgctgaaaacccagaggagacagtctccaagagagactatgtgcggctggttgtccggaaagtacaatttgcaccaccggaggcaggccctggcccctcagcccagaccatccgccgcttccttctgtcagctcagcccctacaactccaggcctggatggacagggaggttcactaccacggagaacccatctctgtcaatgtttctatcaacaactgcaccaacaaggtcatcaaaaaaatcaagatttcagttgaccagatcacagatgttgtcctgtattcactagacaagtacaccaagactgtgttcattcaggaattcacggagactgtagctgctaattccagcttctcccagagctttgcagtaaccccaatcctggctgccagctgccagaaacggggcctggcactggatggcaaacttaagcatgaagataccaacctggcctctagcacaattattagaccgggaatggacaaagagctgctggggatcctggtgtcctacaaagtcagagtcaacctgatggtgtcctgtggtggcatcctaggagacctgacagccagcgatgttggtgtggagctacccttggtcctgatccatccgaagccatctcatgaggccgctagctctgaggacatagtcatcgaggagtttacgcggaaaggcgaggaggagagccagaaggctgtggaggctgagggagatgaggggagctgagcacctcgctctggtgcccgtctgtgtgggagcccccactgtaacactctaataaatcagtttgttcagatgtga

SEQ ID NO: 386518 - DNA, 1341 bp, Homo sapiens
taagaggctggggaggcaggcatagcaaccagagctggagactgatgtgaacttcatctctctccccagaaaaggctcaacatcaactatatagccaacatgtccaaggtgtttaagaagaccagctccaatgggaagctctccatctacctggggaaacgggacttcgtggaccatgtggacacggtggaacccattgacggtgttgtcctggttgatcctgagtacttaaaatgtcgaaagttgtttgtcatgttgacatgtgcctttcgctatggccgtgatgacttggaagtgattggtctgacgttccgaaaagatctgtatgtgcagaccctgcaagtggtcccagctgaatccagcagccctcaggggcccctcacagtcctacaggagcgactactgcacaagctaggggacaatgcctacccctttaccctgcagatggtgaccaacctgccctgttctgtgacactgcagccaggtcctgaagatgcaggaaagccctgtgggattgactttgaagtgaagagtttctgtgctgaaaacccagaggagacagtctccaagagagactatgtgcggctggttgtccggaaagtacaatttgcaccaccggaggcaggccctggcccctcagcccagaccatccgccgcttccttctgtcagctcagcccctacaactccaggcctggatggacagggaggttcactaccacggagaacccatctctgtcaatgtttctatcaacaactgcaccaacaaggtcatcaaaaaaatcaagatttcagttgaccagatcacagatgttgtcctgtattcactagacaagtacaccaagactgtgttcattcaggaattcacggagactgtagctgctaattccagcttctcccagagctttgcagtaaccccaatcctggctgccagctgccagaaacggggcctggcactggatggcaaacttaagcatgaagataccaacctggcctctagcacaattattagaccgggaatggacaaagagctgctggggatcctggtgtcctacaaagtcagagtcaacctgatggtgtcctgtggtggcatcctaggagacctgacagccagcgatgttggtgtggagctacccttggtcctgatccatccgaagccatctcatgaggccgctagctctgaggacatagtcatcgaggagtttacgcggaaaggcgaggaggagagccagaaggctgtggaggctgagggagatgaggggagctgagcacctcgctctggtgcccgtctgtgtgggagcccccactgtaacactctaataaatcagtttgttcagatgtga

SEQ ID NO: 386519 - DNA, 758 bp, Homo sapiens
ctgcctgggcgatagagtgaggctctgtctcaaaaataaaaaataaaaataataattttatagttaagttgccctgtgtttttcctgtgattaaaaaaaaaaatacctgtttggtatttaactttggggtgggataaggtatagcccacttagtcagttgtgtctaagccacttgatgaaccagtcaatccagtcttcacctttaacaaatgctgatttcttcaagtgagcaaaatatctcttaaactttttcctattttctctataaagttgcttttttctgaattttttctttatgaggcttgatgggcagccctatcagcagacaatcattcattcacccaacaaatatttgagtatctgcttcaagccaggggcagtgctaagccctggaagtggtatcttctccttatccgggagtggggctacagtgttcattccagaagactcaagaaaatagcagatcatcacaaaagtaggttttacataaatgaggaggaatccacagggttgtgtatatgtgtgtgtattttaaattctgacataagttggagctttagggtagactgtgacataagagtagtttgttttccaactcatgtaattgccggctgatttttgtcttgaattatgataatggtaacttctgttgaaacaattctgtattcatcttagcttggttgggatgcaataaaagttttgtactggtaaaaatgataattttcttccatgatgattttgaagcttttctgtaacac

SEQ ID NO: 386520 - DNA, 212 bp, Homo sapiens
attcatcttccatccattctttcattcatccatccacctgccatctttctgtcagtccatccacccatcatgcatccattcaacaggaggtgaggctgcttagtccatgccctgcttaagtgctccctggctccccagctggcccaggatgagcccctgcccgtcatcacagcccaggtcctgtggcctctgcttcctgcctgcattctcac

SEQ ID NO: 386521 - DNA, 986 bp, Homo sapiens
cttacacgcgtcctggcgtgtggctctcctgcgtcctcgtttttctcgtgagccctggatctggacagtgggcccggcgcgaggccctcaactccggctgggctcccggtggcactttctgccgaccctgagatgtacccgccacgcctgcgggactgacctctagatctgaagacagcatgtacacagccattccccagagtggctctccattcccaggctcagtgcaggatccaggcctgcatgtgtggcgggtggagaagctgaagccggtgcctgtggcgcaagagaaccagggcgtcttcttctcgggggactcctacctagtgctgcacaatggcccagaagaggtttcccatctgcacctgtggataggccagcagtcatcccgggatgagcagggggcctgtgccgtgctggctgtgcacctcaacacgctgctgggagagcggcctgtgcagcaccgcgaggtgcagggcaatgagtctgacctcttcatgagctacttcccacggggcctcaagtaccaggaaggtggtgtggagtcagcatttcacaagacctccacaggagccccagctgccatcaagaaactctaccaggtgaaggggaagaagaacatccgtgccaccgagcgggcactgaactgggacagcttcaacactggggactgcttcatcctggacctgggccagaacatcttcgcctggtgtggtggaaagtccaacatcctggaacgcaacaaggcgagggacctggccctggccatccgggacagtgagcgacagggcaaggcccaggtggagattgtcactgatggggaggagcctgctgagatgatccaggtcctgggccccaagcctgctctgaaggagggcaaccctgaggaagacctcacagctgacaaggcaaatgcccaggccgcagctctgtataaggtctctgatgccactggacagatgttcaataaaggagacaagtgctta

SEQ ID NO: 386522 - DNA, 477 bp, Homo sapiens
gcctgtgcagcaccgcgaggtgcagggcaatgagtctgacctcttcatgagctacttcccacggggcctcaagtaccaggaaggtggtgtggagtcagcatttcacaagacctccactgtggcgcaagagaaccagggcgtcttcttctcgggggactcctacctagtgctgcacaatggcccagaagaggtttcccatctgcacctgtggatagccctgcaggtggccgagggcttcatctcgcgcatgcagtacgccccgaacactcaggtggagattctgcctcagggccgtgagagtcccatcttcaagcaatttttcaaggactggaaatgagggtgggcgtcttcctgccccatgctcccctgccccccaccacctgcctgcttgcttctctggctgcctggtcagtgcagaggtgccccctgcagatgttcaataaaggagacaagtgctttcccagctcttttcctgca

SEQ ID NO: 386523 - DNA, 1562 bp, Homo sapiens
tttccttgctggtctcagactcagagatgccctccctgatttgccttggctgtgacctgcagcgggctgaggccactgtggtggggctgtgtggacctccagcctccctgtgtgcccctctgaggagacggcctggcatacccactgcccaccccagtgactgctcttctgcttcaggcctgctggctcccagcactgcctgcccctccctgtcgggggacatcgcctccacaccggctggggaaggagcccaggggtggggctggtgggtggggctggtggttggggcagccagagaagtaagagggaagtgagaagccgggtggggcaggctggaaggaagacgaacctacgaagcagagatctgaagacagcatgtacacagccattccccagagtggctctccattcccaggctcagtgcaggatccaggcctgcatgtgtggcgggtggagaagctgaagccggtgcctgtggcgcaagagaaccagggcgtcttcttctcgggggactcctacctagtgctgcacaatggcccagaagaggtttcccatctgcacctgtggataggccagcagtcatcccgggatgagcagggggcctgtgccgtgctggctgtgcacctcaacacgctgctgggagagcggcctgtgcagcaccgcgaggtgcagggcaatgagtctgacctcttcatgagctacttcccacggggcctcaagtaccaggaaggtggtgtggagtcagcatttcacaagacctccacaggagccccagctgccatcaagaaactctaccaggtgaaggggaagaagaacatccgtgccaccgagcgggcactgaactgggacagcttcaacactggggactgcttcatcctggacctgggccagaacatcttcgcctggtgtggtggaaagtccaacatcctggaacgcaacaaggcgagggacctggccctggccatccgggacagtgagcgacagggcaaggcccaggtggagattgtcactgatggggaggagcctgctgagatgatccaggtcctgggccccaagcctgctctgaaggagggcaaccctgaggaagacctcacagctgacaaggcaaatgcccaggccgcagctctgtataaggtctctgatgccactggacagatgaacctgaccaaggtggctgactccagcccatttgcccttgaactgctgatatctgatgactgctttgtgctggacaacgggctctgtggcaagatctatatctggaaggggcgaaaagcgaatgagaaggagcggcaggcagccctgcaggtggccgagggcttcatctcgcgcatgcagtacgccccgaacactcaggtggagattctgcctcagggccgtgagagtcccatcttcaagcaatttttcaaggactggaaatgagggtgggcgtcttcctgccccatgctcccctgccccccaccacctgcctgcttgcttctctggctgcctggtcagtgcagaggtgccccctgcagatgttcaataaaggagacaagtgctttcccagctcttttcctgca

SEQ ID NO: 386524 - DNA, 1268 bp, Homo sapiens
ggtggcacatttgattattttgcaaactctggaagaccttggctgagggtctaggtggactgtctgagatctgaagacagcatgtacacagccattccccagagtggctctccattcccaggctcagtgcaggatccaggcctgcatgtgtggcgggtggagaagctgaagccggtgcctgtggcgcaagagaaccagggcgtcttcttctcgggggactcctacctagtgctgcacaatggcccagaagaggtttcccatctgcacctgtggataggccagcagtcatcccgggatgagcagggggcctgtgccgtgctggctgtgcacctcaacacgctgctgggagagcggcctgtgcagcaccgcgaggtgcagggcaatgagtctgacctcttcatgagctacttcccacggggcctcaagtaccaggaaggtggtgtggagtcagcatttcacaagacctccacaggagccccagctgccatcaagaaactctaccaggtgaaggggaagaagaacatccgtgccaccgagcgggcactgaactgggacagcttcaacactggggactgcttcatcctggacctgggccagaacatcttcgcctggtgtggtggaaagtccaacatcctggaacgcaacaaggcgagggacctggccctggccatccgggacagtgagcgacagggcaaggcccaggtggagattgtcactgatggggaggagcctgctgagatgatccaggtcctgggccccaagcctgctctgaaggagggcaaccctgaggaagacctcacagctgacaaggcaaatgcccaggccgcagctctgtataaggtctctgatgccactggacagatgaacctgaccaaggtggctgactccagcccatttgcccttgaactgctgatatctgatgactgctttgtgctggacaacgggctctgtggcaagatctatatctggaaggggcgaaaagcgaatgagaaggagcggcaggcagccctgcaggtggccgagggcttcatctcgcgcatgcagtacgccccgaacactcaggtggagattctgcctcagggccgtgagagtcccatcttcaagcaatttttcaaggactggaaatgagggtgggcgtcttcctgccccatgctcccctgccccccaccacctgcctgcttgcttctctggctgcctggtcagtgcagaggtgccccctgcagatgttcaataaaggagacaagtgctttcccagctcttttcctgca

SEQ ID NO: 386525 - DNA, 2161 bp, Homo sapiens
tttccttgctggtctcagactcagagatgccctccctgatttgccttggctgtgacctgcagcgggctgaggccactgtggtggggctgtgtggacctccagcctccctgtgtgcccctctgaggagacggcctggcatacccactgcccaccccagtgactgctcttctgcttcaggcctgctggctcccagcactgcctgcccctccctgtcgggggacatcgcctccacaccggctggggaaggagcccaggggtggggctggtgggtggggctggtggttggggcagccagagaagtaagagggaagtgagaagccgggtggggcaggctggaaggaagacgaacctacgaagcagagatctgaagacagcatgtacacagccattccccagagtggctctccattcccaggctcagtgcaggatccaggcctgcatgtgtggcgggtggagaagctgaagccggtgcctgtggcgcaagagaaccagggcgtcttcttctcgggggactcctacctagtgctgcacaatggcccagaagaggtttcccatctgcacctgtggataggccagcagtcatcccgggatgagcagggggcctgtgccgtgctggctgtgcacctcaacacgctgctgggagagcggcctgtgcagcaccgcgaggtgcagggcaatgagtctgacctcttcatgagctacttcccacggggcctcaagtaccaggaaggtggtgtggagtcagcatttcacaagacctccacaggagccccagctgccatcaagaaactctaccaggtgaaggggaagaagaacatccgtgccaccgagcgggcactgaactgggacagcttcaacactggggactgcttcatcctggacctgggccagaacatcttcgcctggtgtggtggaaagtccaacatcctggaacgcaacaaggcgagggacctggccctggccatccgggacagtgagcgacagggcaaggcccaggtggagattgtcactgatggggaggagcctgctgagatgatccaggtcctgggccccaagcctgctctgaaggagggcaaccctgaggaagacctcacagctgacaaggcaaatgcccaggccgcagctctgtataaggtctctgatgccactggacagatgaacctgaccaaggtggctgactccagcccatttgcccttgaactgctgatatctgatgactgctttgtgctggacaacgggctctgtggcaagatctatatctggaaggggcgaaaagcgaatgagaaggagcggcaggcagccctgcaggtggccgagggcttcatctcgcgcatgcagtacgccccgaacactcaggtggagattctgcctcagggccgtgagagtcccatcttcaagcaatttttcaaggactggaaatgagggtgggcgtcttcctgccccatgctcccctgccccccaccacctgcctgcttgcttctctggctgcctggtcagtgcagaggtgccccctgcagatgttcaataaaggagacaagtgctttcccagctcttttcctgcagaaaaaaaaaaaaaagaaaaaaaaaatgggggggtttttttgtcgggcgggcgggcgcaaaggggttcaacggaagggcgcctgggggccataagcttgttctcgggcacccgagttcttcttgggccaaggggggaagacttgcgcggggacccccatatggggagacggatataagttcagaaaagccagtgtaacccgggtattgacctcgcggacaaaagtcagacacgcgagacggttggtcgaatgcaggacggacccacttgtcagcaacagcgggcccagaggacaagttgtggaacccccgaccagagcgtacacacggccggcccagaaagagaggggaattaatacggacgagaggagaaggagtaaacgtcgccgatatgacgtaaagaaggcgagagacgggcaccaggcaggcgagggaggacagtgcaggagggcaaagaggagtacaacgccgaagaccgacgagcagggaggatcacgcagaagagccgaagaggaaacgaagcaaggcgcggaagagacacaggcgccagaggccacacaaggcccacgagaaggacacaggcgggagaaaaaggaataca

SEQ ID NO: 386526 - DNA, 1601 bp, Homo sapiens
tttccttgctggtctcagactcagagatgccctccctgatttgccttggctgtgacctgcagcgggctgaggccactgtggtggggctgtgtggacctccagcctccctgtgtgcccctctgaggagacggcctggcatacccactgcccaccccagtgactgctcttctgcttcaggcctgctggctcccagcactgcctgcccctccctgtcgggggacatcgcctccacaccggctggggaaggagcccaggggtggggctggtgggtggggctggtggttggggcagccagagaagtaagagggaagtgagaagccgggtggggcaggctggaaggaagacgaacctacgaagcagagatctgaagacagcatgtacacagccattccccagagtggctctccattcccaggctcagtgcaggatccaggcctgcatgtgtggcgggtggagaagctgaagccggtgcctgtggcgcaagagaaccagggcgtcttcttctcgggggactcctacctagtgctgcacaatggcccagaagaggtttcccatctgcacctgtggataggccagcagtcatcccgggatgagcagggggcctgtgccgtgctggctgtgcacctcaacacgctgctgggagagcggcctgtgcagcaccgcgaggtgcagggcaatgagtctgacctcttcatgagctacttcccacggggcctcaagtaccaggaaggtggtgtggagtcagcatttcacaagacctccacaggagccccagctgccatcaagaaactctaccaggtgaaggggaagaagaacatccgtgccaccgagcgggcactgaactgggacagcttcaacactggggactgcttcatcctggacctgggccagaacatcttcgcctggtgtggtggaaagtccaacatcctggaacgcaacaaggcgagggacctggccctggccatccgggacagtgagcgacagggcaaggcccaggtggagattgtcactgatggggaggagcctgctgagatgatccaggtcctgggccccaagcctgctctgaaggagggcaaccctgaggaagacctcacagctgacaaggcaaatgcccaggccgcagctctgtataaggtctctgatgccactggacagatgaacctgaccaaggtggctgactccagcccatttgcccttgaactgctgatatctgatgactgctttgtgctggacaacgggctctgtggcaagatctatatctggaaggggcgaaaagcgaatgagaaggagcggcaggcagccctgcaggtggccgagggcttcatctcgcgcatgcagtacgccccgaacactcaggtggagattctgcctcagggccgtgagagtcccatcttcaagcaatttttcaaggactggaaatgagggtgggcgtcttcctgccccatgctcccctgccccccaccacctgcctgcttgcttctctggctgcctggtcagtgcagaggtgccccctgcagatgttcaataaaggagacaagtgctttcccagctcttttcctgcatttcagcggtgtgtttggtcccttgttgttggtgtgtat

SEQ ID NO: 386527 - DNA, 1329 bp, Homo sapiens
acacaaactctgtccaaatggatgcacagcatgaattgtattatgtacgaagtgcatgctggctctgtgatctctgcattttgagccaaaaaaagaaatcctctagtgatgggaacctacgaagcagagatctgaagacagcatgtacacagccattccccagagtggctctccattcccaggctcagtgcaggatccaggcctgcatgtgtggcgggtggagaagctgaagccggtgcctgtggcgcaagagaaccagggcgtcttcttctcgggggactcctacctagtgctgcacaatggcccagaagaggtttcccatctgcacctgtggataggccagcagtcatcccgggatgagcagggggcctgtgccgtgctggctgtgcacctcaacacgctgctgggagagcggcctgtgcagcaccgcgaggtgcagggcaatgagtctgacctcttcatgagctacttcccacggggcctcaagtaccaggaaggtggtgtggagtcagcatttcacaagacctccacaggagccccagctgccatcaagaaactctaccaggtgaaggggaagaagaacatccgtgccaccgagcgggcactgaactgggacagcttcaacactggggactgcttcatcctggacctgggccagaacatcttcgcctggtgtggtggaaagtccaacatcctggaacgcaacaaggcgagggacctggccctggccatccgggacagtgagcgacagggcaaggcccaggtggagattgtcactgatggggaggagcctgctgagatgatccaggtcctgggccccaagcctgctctgaaggagggcaaccctgaggaagacctcacagctgacaaggcaaatgcccaggccgcagctctgtataaggtctctgatgccactggacagatgaacctgaccaaggtggctgactccagcccatttgcccttgaactgctgatatctgatgactgctttgtgctggacaacgggctctgtggcaagatctatatctggaaggggcgaaaagcgaatgagaaggagcggcaggcagccctgcaggtggccgagggcttcatctcgcgcatgcagtacgccccgaacactcaggtggagattctgcctcagggccgtgagagtcccatcttcaagcaatttttcaaggactggaaatgagggtgggcgtcttcctgccccatgctcccctgccccccaccacctgcctgcttgcttctctggctgcctggtcagtgcagaggtgccccctgcagatgttcaataaaggagacaagtgctttcccagctcttttcctgca

SEQ ID NO: 386528 - DNA, 1593 bp, Homo sapiens
tttccttgctggtctcagactcagagatgccctccctgatttgccttggctgtgacctgcagcgggctgaggccactgtggtggggctgtgtggacctccagcctccctgtgtgcccctctgaggagacggcctggcatacccactgcccaccccagtgactgctcttctgcttcaggcctgctggctcccagcactgcctgcccctccctgtcgggggacatcgcctccacaccggctggggaaggagcccaggggtggggctggtgggtggggctggtggttggggcagccagagaagtaagagggaagtgagaagccgggtggggcaggctggaaggaagacgaacctacgaagcagagatctgaagacagcatgtacacagccattccccagagtggctctccattcccaggctcagtgcaggatccaggcctgcatgtgtggcgggtggagaagctgaagccggtgcctgtggcgcaagagaaccagggcgtcttcttctcgggggactcctacctagtgctgcacaatggcccagaagaggtttcccatctgcacctgtggataggccagcagtcatcccgggatgagcagggggcctgtgccgtgctggctgtgcacctcaacacgctgctgggagagcggcctgtgcagcaccgcgaggtgcagggcaatgagtctgacctcttcatgagctacttcccacggggcctcaagtaccaggaaggtggtgtggagtcagcatttcacaagacctccacaggagccccagctgccatcaagaaactctaccaggtgaaggggaagaagaacatccgtgccaccgagcgggcactgaactgggacagcttcaacactggggactgcttcatcctggacctgggccagaacatcttcgcctggtgtggtggaaagtccaacatcctggaacgcaacaaggcgagggacctggccctggccatccgggacagtgagcgacagggcaaggcccaggtggagattgtcactgatggggaggagcctgctgagatgatccaggtcctgggccccaagcctgctctgaaggagggcaaccctgaggaagacctcacagctgacaaggcaaatgcccaggccgcagctctgtataaggtctctgatgccactggacagatgaacctgaccaaggtggctgactccagcccatttgcccttgaactgctgatatctgatgactgctttgtgctggacaacgggctctgtggcaagatctatatctggaaggtttttcagaaaaggcttgatgaattcaagagggcgaaaagcgaatgagaaggagcggcaggcagccctgcaggtggccgagggcttcatctcgcgcatgcagtacgccccgaacactcaggtggagattctgcctcagggccgtgagagtcccatcttcaagcaatttttcaaggactggaaatgagggtgggcgtcttcctgccccatgctcccctgccccccaccacctgcctgcttgcttctctggctgcctggtcagtgcagaggtgccccctgcagatgttcaataaaggagacaagtgctttcccagctcttttcctgca

SEQ ID NO: 386529 - DNA, 1458 bp, Homo sapiens
  misc_feature (1273)..(1274): n is a, c, g, or t
  misc_feature (1291)..(1291): n is a, c, g, or t
  misc_feature (1293)..(1293): n is a, c, g, or t
  misc_feature (1300)..(1300): n is a, c, g, or t
  misc_feature (1307)..(1308): n is a, c, g, or t
  misc_feature (1316)..(1316): n is a, c, g, or t
  misc_feature (1319)..(1319): n is a, c, g, or t
  misc_feature (1325)..(1325): n is a, c, g, or t
tttccttgctggtctcagactcagagatgccctccctgatttgccttggctgtgacctgcagcgggctgaggccactgtggtggggctgtgtggacctccagcctccctgtgtgcccctctgaggagacggcctggcatacccactgcccaccccagtgactgctcttctgcttcaggcctgctggctcccagcactgcctgcccctccctgtcgggggacatcgcctccacaccggctggggaaggagcccaggggtggggctggtgggtggggctggtggttggggcagccagagaagtaagagggaagtgagaagccgggtggggcaggctggaaggaagacgaacctacgaagcagagatctgaagacagcatgtacacagccattccccagagtggctctccattcccaggctcagtgcaggatccaggcctgcatgtgtggcgggtggagaagctgaagccggtgcctgtggcgcaagagaaccagggcgtcttcttctcgggggactcctacctagtgctgcacaatggcccagaagaggtttcccatctgcacctgtggataggccagcagtcatcccgggatgagcagggggcctgtgccgtgctggctgtgcacctcaacacgctgctgggagagcggcctgtgcagcaccgcgaggtgcagggcaatgagtctgacctcttcatgagctacttcccacggggcctcaagtaccaggaaggtggtgtggagtcagcatttcacaagacctccacaggagccccagctgccatcaagaaactctaccaggtgaaggggaagaagaacatccgtgccaccgagcgggcactgaactgggacagcttcaacactggggactgcttcatcctggacctgggccagaacatcttcgcctggtgtggtggaaagtccaacatcctggaacgcaacaaggcgagggacctggccctggccatccgggacagtgagcgacagggcaaggcccaggtggagattgtcactgatggggaggagcctgctgagatgatccaggtcctgggccccaagcctgctctgaaggagggcaaccctgaggaagacctcacagctgacaaggcaaatgcccaggccgcagctctgtataaggtctctgatgccactggacagatgaacctgaccaaggtggctgactccagcccatttgcccttgaactgctgatatctgatgactgctttgtgctggacaacgggctctgtggcaagatctatatctggaaggggaaanngaatgaaagagggaggncncctgagntggcganngttaatcnggntgagangccgaactcaggtggaggggcgacagggcctttaggttctgggcctgaccaaaggagaggcggactctgtggaaacagccttaccacggggcctctcagaattataagaggggccgggagagaacacggacgc

SEQ ID NO: 386530 - DNA, 1393 bp, Homo sapiens
gactcaccgggggcggctcctggccgcgcacctccagggggcggggggcggctgagacagcgcccagggcctcggagcaaggcgttggcaggagaggctttagcctagacagctgagtgtgaggaacagtgattcccattgatccttgttccctccgtgggtcacagagtccagaacttaagagccacccaagatctgaagacagcatgtacacagccattccccagagtggctctccattcccaggctcagtgcaggatccaggcctgcatgtgtggcgggtggagaagctgaagccggtgcctgtggcgcaagagaaccagggcgtcttcttctcgggggactcctacctagtgctgcacaatggcccagaagaggtttcccatctgcacctgtggataggccagcagtcatcccgggatgagcagggggcctgtgccgtgctggctgtgcacctcaacacgctgctgggagagcggcctgtgcagcaccgcgaggtgcagggcaatgagtctgacctcttcatgagctacttcccacggggcctcaagtaccaggaaggtggtgtggagtcagcatttcacaagacctccacaggagccccagctgccatcaagaaactctaccaggtgaaggggaagaagaacatccgtgccaccgagcgggcactgaactgggacagcttcaacactggggactgcttcatcctggacctgggccagaacatcttcgcctggtgtggtggaaagtccaacatcctggaacgcaacaaggcgagggacctggccctggccatccgggacagtgagcgacagggcaaggcccaggtggagattgtcactgatggggaggagcctgctgagatgatccaggtcctgggccccaagcctgctctgaaggagggcaaccctgaggaagacctcacagctgacaaggcaaatgcccaggccgcagctctgtataaggtctctgatgccactggacagatgaacctgaccaaggtggctgactccagcccatttgcccttgaactgctgatatctgatgactgctttgtgctggacaacgggctctgtggcaagatctatatctggaaggggcgaaaagcgaatgagaaggagcggcaggcagccctgcaggtggccgagggcttcatctcgcgcatgcagtacgccccgaacactcaggtggagattctgcctcagggccgtgagagtcccatcttcaagcaatttttcaaggactggaaatgagggtgggcgtcttcctgccccatgctcccctgccccccaccacctgcctgcttgcttctctggctgcctggtcagtgcagaggtgccccctgcagatgttcaataaaggagacaagtgctttcccagctcttttcctgca

SEQ ID NO: 386531 - DNA, 1653 bp, Homo sapiens
  misc_feature (245)..(245): n is a, c, g, or t
  misc_feature (410)..(410): n is a, c, g, or t
tttccttgctggtctcagactcagagatgccctccctgatttgccttggctgtgacctgcagcgggctgaggccactgtggtggggctgtgtggacctccagcctccctgtgtgcccctctgaggagacggcctggcatacccactgcccaccccagtgactgctcttctgcttcaggcctgctggctcccagcactgcctgcccctccctgtcgggggacatcgcctttcccaacaacccgtgnccttgggcggggaaaagggcacgccccccaatgtggggggtttggggggtgcttttgggtcggggtggcgagagctttgggtacgggttagggcggcaatgccacgacgaaaccgtacaccgaacggggacacgggttgaacgcgaaaaacgggccccggggggntggggaggcaaggctggaaggaagacgaacctacgaagcagagatctgaagacagcatgtacacagccattccccagagtggctctccattcccaggctcagtgcaggatccaggcctgcatgtgtggcgggtggagaagctgaagccggtgcctgtggcgcaagagaaccagggcgtcttcttctcgggggactcctacctagtgctgcacaatggcccagaagaggtttcccatctgcacctgtggataggccagcagtcatcccgggatgagcagggggcctgtgccgtgctggctgtgcacctcaacacgctgctgggagagcggcctgtgcagcaccgcgaggtgcagggcaatgagtctgacctcttcatgagctacttcccacggggcctcaagtaccaggaaggtggtgtggagtcagcatttcacaagacctccacaggagccccagctgccatcaagaaactctaccaggtgaaggggaagaagaacatccgtgccaccgagcgggcactgaactgggacagcttcaacactggggactgcttcatcctggacctgggccagaacatcttcgcctggtgtggtggaaagtccaacatcctggaacgcaacaaggcgagggacctggccctggccatccgggacagtgagcgacagggcaaggcccaggtggagattgtcactgatggggaggagcctgctgagatgatccaggtcctgggccccaagcctgctctgaaggagggcaaccctgaggaagacctcacagctgacaaggcaaatgcccaggccgcagctctgtataaggtctctgatgccactggacagatgaacctgaccaaggtggctgactccagcccatttgcccttgaactgctgatatctgatgactgctttgtgctggacaacgggctctgtggcaagatctatatctggaaggggcgaaaagcgaatgagaaggagcggcaggcagccctgcaggtggccgagggcttcatctcgcgcatgcagtacgccccgaacactcaggtggagattctgcctcagggccgtgagagtcccatcttcaagcaatttttcaaggactggaaatgagggtgggcgtcttcctgccccatgctcccctgccccccaccacctgcctgcttgcttctctggctgcctggtcagtgcagaggtgccccctgcagatgttcaataaaggagacaagtgctttcccagctcttttcctgca

SEQ ID NO: 386532 - DNA, 1727 bp, Homo sapiens
tttccttgctggtctcagactcagagatgccctccctgatttgccttggctgtgacctgcagcgggctgaggccactgtggtggggctgtgtggacctccagcctccctgtgtgcccctctgaggagacggcctggcatacccactgcccaccccagtgactgctcttctgcttcaggcctgctggctcccagcactgcctgcccctccctgtcgggggacatcgcctccacaccggctggggaaggagcccaggggtggggctggtgggtggggctggtggttggggcagccagagaagtaagagggaagtgagaagccgggtggggcaggctggaaggaagacgaacctacgaagcagagatctgaagacagcatgtacacagccattccccagaggtaagctgcatgccccatctcctttcacaacttccccttctttacctccaagggctgcccctccccactgctctcctcatccccagactgcagtcgccaggcctgcccagggctgtgcttgggcaagtgggtccaggctgctgtcaaccctctctcttctcgcagtggctctccattcccaggctcagtgcaggatccaggcctgcatgtgtggcgggtggagaagctgaagccggtgcctgtggcgcaagagaaccagggcgtcttcttctcgggggactcctacctagtgctgcacaatggcccagaagaggtttcccatctgcacctgtggataggccagcagtcatcccgggatgagcagggggcctgtgccgtgctggctgtgcacctcaacacgctgctgggagagcggcctgtgcagcaccgcgaggtgcagggcaatgagtctgacctcttcatgagctacttcccacggggcctcaagtaccaggaaggtggtgtggagtcagcatttcacaagacctccacaggagccccagctgccatcaagaaactctaccaggtgaaggggaagaagaacatccgtgccaccgagcgggcactgaactgggacagcttcaacactggggactgcttcatcctggacctgggccagaacatcttcgcctggtgtggtggaaagtccaacatcctggaacgcaacaaggcgagggacctggccctggccatccgggacagtgagcgacagggcaaggcccaggtggagattgtcactgatggggaggagcctgctgagatgatccaggtcctgggccccaagcctgctctgaaggagggcaaccctgaggaagacctcacagctgacaaggcaaatgcccaggccgcagctctgtataaggtctctgatgccactggacagatgaacctgaccaaggtggctgactccagcccatttgcccttgaactgctgatatctgatgactgctttgtgctggacaacgggctctgtggcaagatctatatctggaaggggcgaaaagcgaatgagaaggagcggcaggcagccctgcaggtggccgagggcttcatctcgcgcatgcagtacgccccgaacactcaggtggagattctgcctcagggccgtgagagtcccatcttcaagcaatttttcaaggactggaaatgagggtgggcgtcttcctgccccatgctcccctgccccccaccacctgcctgcttgcttctctggctgcctggtcagtgcagaggtgccccctgcagatgttcaataaaggagacaagtgctttcccagctcttttcctgca

SEQ ID NO: 386533 - DNA, 1829 bp, Homo sapiens
tttccttgctggtctcagactcagagatgccctccctgatttgccttggctgtgacctgcagcgggctgaggccactgtggtggggctgtgtggacctccagcctccctgtgtgcccctctgaggagacggcctggcatacccactgcccaccccagtgactgctcttctgcttcaggcctgctggctcccagcactgcctgcccctccctgtcgggggacatcgcctccacaccggctggggaaggagcccaggggtggggctggtgggtggggctggtggttggggcagccagagaagtaagagggaagtgagaagccgggtggggcaggctggaaggaagacgaacctacgaagcagagatctgaagacagcatgtacacagccattccccagaggtaagctgcatgccccatctcctttcacaacttccccttctttacctccaagggctgcccctccccactgctctcctcatccccagactgcagtcgccaggcctgcccagggctgtgcttgggcaagtgggtccaggctgctgtcaaccctctctcttctcgcagtggctctccattcccaggctcagtgcaggatccaggcctgcatgtgtggcgggtggagaagctgaagccggtgcctgtggcgcaagagaaccagggcgtcttcttctcgggggactcctacctagtgctgcacaatggcccagaagaggtttcccatctgcacctgtggatagggtaaggggatctggatgggggaaggttgggcccaggaaggggagggagggggctggtatggatcacaagggccttgccctgccctctcccacttgtcccaggccagcagtcatcccgggatgagcagggggcctgtgccgtgctggctgtgcacctcaacacgctgctgggagagcggcctgtgcagcaccgcgaggtgcagggcaatgagtctgacctcttcatgagctacttcccacggggcctcaagtaccaggaaggtggtgtggagtcagcatttcacaagacctccacaggagccccagctgccatcaagaaactctaccaggtgaaggggaagaagaacatccgtgccaccgagcgggcactgaactgggacagcttcaacactggggactgcttcatcctggacctgggccagaacatcttcgcctggtgtggtggaaagtccaacatcctggaacgcaacaaggcgagggacctggccctggccatccgggacagtgagcgacagggcaaggcccaggtggagattgtcactgatggggaggagcctgctgagatgatccaggtcctgggccccaagcctgctctgaaggagggcaaccctgaggaagacctcacagctgacaaggcaaatgcccaggccgcagctctgtataaggtctctgatgccactggacagatgaacctgaccaaggtggctgactccagcccatttgcccttgaactgctgatatctgatgactgctttgtgctggacaacgggctctgtggcaagatctatatctggaaggggcgaaaagcgaatgagaaggagcggcaggcagccctgcaggtggccgagggcttcatctcgcgcatgcagtacgccccgaacactcaggtggagattctgcctcagggccgtgagagtcccatcttcaagcaatttttcaaggactggaaatgagggtgggcgtcttcctgccccatgctcccctgccccccaccacctgcctgcttgcttctctggctgcctggtcagtgcagaggtgccccctgcagatgttcaataaaggagacaagtgctttcccagctcttttcctgca

SEQ ID NO: 386534 - DNA, 1182 bp, Homo sapiens
tttccttgctggtctcagactcagagatgccctccctgatttgccttggctgtgacctgcagcgggctgaggccactgtggtggggctgtgtggacctccagcctccctgtgtgcccctctgaggagacggcctggcatacccactgcccaccccagtgactgctcttctgcttcaggcctgctggctcccagcactgcctgcccctccctgtcgggggacatcgcctccacaccggctggggaaggagcccaggggtggggctggtgggtggggctggtggttggggcagccagagaagtaagagggaagtgagaagccgggtggggcaggctggaaggaagacgaacctacgaagcagagatctgaagacagcatgtacacagccattccccagagtggctctccattcccaggctcagtgcaggatccaggcctgcatgtgtggcgggtggagaagctgaagccggtgcctgtggcgcaagagaaccagggcgtcttcttctcgggggactcctacctagtgctgcacaatggcccagaagaggtttcccatctgcacctgtggataggccagcagtcatcccgggatgagcagggggcctgtgccgtgctggctgtgcacctcaacacgctgctgggagagcggcctgtgcagcaccgcgaggtgcagggcaatgagtctgacctcttcatgagctacttcccacggggcctcaagtaccaggaaggtggtgtggagtcagcatttcacaagacctccacaggagccccagctgccatcaagaaactctaccaggtgaaggggaagaagaacatccgtgccaccgagcgggcactgaactgggacagcttcaacactggggactgcttcatcctggacctgggccagaacatcttcgcctggtgtggtggaaagtccaacatcctggaacgcaacaaggcgagggacctggccctggccatccgggacagtgagcgacagggcaaggcccaggtggagattgtcactgatggggaggagcctgctgagatgatccaggtcctgggccccaagcctgctctgaaggagggcaaccctgaggaagacctcacagctgacaaggcaaatgcccaggccgcagctctgtataaggtctctgatgccactggacagatgttcaataaaggagacaagtgctta

SEQ ID NO: 386535 - DNA, 1474 bp, Homo sapiens
  misc_feature (245)..(245): n is a, c, g, or t
  misc_feature (410)..(410): n is a, c, g, or t
tttccttgctggtctcagactcagagatgccctccctgatttgccttggctgtgacctgcagcgggctgaggccactgtggtggggctgtgtggacctccagcctccctgtgtgcccctctgaggagacggcctggcatacccactgcccaccccagtgactgctcttctgcttcaggcctgctggctcccagcactgcctgcccctccctgtcgggggacatcgcctttcccaacaacccgtgnccttgggcggggaaaagggcacgccccccaatgtggggggtttggggggtgcttttgggtcggggtggcgagagctttgggtacgggttagggcggcaatgccacgacgaaaccgtacaccgaacggggacacgggttgaacgcgaaaaacgggccccggggggntggggaggcaaggctggaaggaagacgaacctacgaagcagagatctgaagacagcatgtacacagccattccccagagtggctctccattcccaggctcagtgcaggatccaggcctgcatgtgtggcgggtggagaagctgaagccggtgcctgtggcgcaagagaaccagggcgtcttagtctgacctcttcatgagctacttcccacggggcctcaagtaccaggaaggtggtgtggagtcagcatttcacaagacctccacaggagccccagctgccatcaagaaactctaccaggtgaaggggaagaagaacatccgtgccaccgagcgggcactgaactgggacagcttcaacactggggactgcttcatcctggacctgggccagaacatcttcgcctggtgtggtggaaagtccaacatcctggaacgcaacaaggcgagggacctggccctggccatccgggacagtgagcgacagggcaaggcccaggtggagattgtcactgatggggaggagcctgctgagatgatccaggtcctgggccccaagcctgctctgaaggagggcaaccctgaggaagacctcacagctgacaaggcaaatgcccaggccgcagctctgtataaggtctctgatgccactggacagatgaacctgaccaaggtggctgactccagcccatttgcccttgaactgctgatatctgatgactgctttgtgctggacaacgggctctgtggcaagatctatatctggaaggggcgaaaagcgaatgagaaggagcggcaggcagccctgcaggtggccgagggcttcatctcgcgcatgcagtacgccccgaacactcaggtggagattctgcctcagggccgtgagagtcccatcttcaagcaatttttcaaggactggaaatgagggtgggcgtcttcctgccccatgctcccctgccccccaccacctgcctgcttgcttctctggctgcctggtcagtgcagaggtgccccctgcagatgttcaataaaggagacaagtgctttcccagctcttttcctgca

SEQ ID NO: 386536 - DNA, 1042 bp, Homo sapiens
cgagtgggtccctgctttggctctccttgcaaagttatttctagttaattcattatgcagaaggtataaggggttagtccttgctatattatgcttggttataatttttcatctttcccttgcggtactatatctattgcgtcaggtttcaatttctatcgcctatactttatttgggtaaatggtttggctaaggttgtctggtagaaggtggtgtggagtcagcatttcacaagacctccacaggagccccagctgccatcaagaaactctaccaggtgaaggggaagaagaacatccgtgccaccgagcgggcactgaactgggacagcttcaacactggggactgcttcatcctggacctgggccagaacatcttcgcctggtgtggtggaaagtccaacatcctggaacgcaacaaggcgagggacctggccctggccatccgggacagtgagcgacagggcaaggcccaggtggagattgtcactgatggggaggagcctgctgagatgatccaggtcctgggccccaagcctgctctgaaggagggcaaccctgaggaagacctcacagctgacaaggcaaatgcccaggccgcagctctgtataaggtctctgatgccactggacagatgaacctgaccaaggtggctgactccagcccatttgcccttgaactgctgatatctgatgactgctttgtgctggacaacgggctctgtggcaagatctatatctggaaggggcgaaaagcgaatgagaaggagcggcaggcagccctgcaggtggccgagggcttcatctcgcgcatgcagtacgccccgaacactcaggtggagattctgcctcagggccgtgagagtcccatcttcaagcaatttttcaaggactggaaatgagggtgggcgtcttcctgccccatgctcccctgccccccaccacctgcctgcttgcttctctggctgcctggtcagtgcagaggtgccccctgcagatgttcaataaaggagacaagtgctttcccagctcttttcctgca

SEQ ID NO: 386537 - DNA, 1220 bp, Homo sapiens
ggtggcacatttgattattttgcaaactctggaagaccttggctgagggtctaggtggactgtctgagatctgaagacagcatgtacacagccattccccagagtggctctccattcccaggctcagtgcaggatccaggcctgcatgtgtggcgggtggagaagctgaagccggtgcctgtggcgcaagagaaccagggcgtcttcttctcgggggactcctacctagtgctgcacaatggcccagaagaggtttcccatctgcacctgtggataggccagcagtcatcccgggatgagcagggggcctgtgccgtgctggctgtgcacctcaacacgctgctgggagagcggcctgtgcagcaccgcgaggtgcagggcaatgagtctgacctcttcatgagctacttcccacggggcctcaagtaccaggaaggtggtgtggagtcagcatttcacaagacctccacaggagccccagctgccatcaagaaactctaccaggtgaaggggaagaagaacatccgtgccaccgagcgggcactgaactgggacagcttcaacactggggactgcttcatcctggacctgggccagaacatcttcgcctggtgtggtggaaagtccaacatcctggaacgcaacaaggcccaggtggagattgtcactgatggggaggagcctgctgagatgatccaggtcctgggccccaagcctgctctgaaggagggcaaccctgaggaagacctcacagctgacaaggcaaatgcccaggccgcagctctgtataaggtctctgatgccactggacagatgaacctgaccaaggtggctgactccagcccatttgcccttgaactgctgatatctgatgactgctttgtgctggacaacgggctctgtggcaagatctatatctggaaggggcgaaaagcgaatgagaaggagcggcaggcagccctgcaggtggccgagggcttcatctcgcgcatgcagtacgccccgaacactcaggtggagattctgcctcagggccgtgagagtcccatcttcaagcaatttttcaaggactggaaatgagggtgggcgtcttcctgccccatgctcccctgccccccaccacctgcctgcttgcttctctggctgcctggtcagtgcagaggtgccccctgcagatgttcaataaaggagacaagtgctttcccagctcttttcctgca

SEQ ID NO: 386538 - DNA, 852 bp, Homo sapiens
  misc_feature (245)..(245): n is a, c, g, or t
  misc_feature (410)..(410): n is a, c, g, or t
tttccttgctggtctcagactcagagatgccctccctgatttgccttggctgtgacctgcagcgggctgaggccactgtggtggggctgtgtggacctccagcctccctgtgtgcccctctgaggagacggcctggcatacccactgcccaccccagtgactgctcttctgcttcaggcctgctggctcccagcactgcctgcccctccctgtcgggggacatcgcctttcccaacaacccgtgnccttgggcggggaaaagggcacgccccccaatgtggggggtttggggggtgcttttgggtcggggtggcgagagctttgggtacgggttagggcggcaatgccacgacgaaaccgtacaccgaacggggacacgggttgaacgcgaaaaacgggccccggggggntggggaggcaaggctggaaggaagacgaacctacgaagcagagatctgaagacagcatgtacacagccattccccagagtggctctccattcccaggctcagtgcaggatccaggcctgcatgtgtggcgggtggagaagctgaagccggtgcctgtggcgcaagagaaccagggcgtcttcttctcgggggactcctacctagtgctgcacaatggcccagaagaggtttcccatctgcacctgtggatagtcaacacgctgctgggagagcggcctgtgcagcaccgcgaggtgcagggcaatgagtctgacctcttcatgagctacttcccacggggcctcaagtaccagttgcttctctggctgcctggtcagtgcagaggtgccccctgcagatgttcaataaaggagacaagtgctttcccagctcttttcctgca

SEQ ID NO: 386539 - DNA, 1215 bp, Homo sapiens
tttccttgctggtctcagactcagagatgccctccctgatttgccttggctgtgacctgcagcgggctgaggccactgtggtggggctgtgtggacctccagcctccctgtgtgcccctctgaggagacggcctggcatacccactgcccaccccagtgactgctcttctgcttcaggcctgctggctcccagcactgcctgcccctccctgtcgggggacatcgcctccacaccggctggggaaggagcccaggggtggggctggtgggtggggctggtggttggggcagccagagaagtaagagggaagtgagaagccgggtggggcaggctggaaggaagacgaacctacgaagcagagatctgaagacagcatgtacacagccattccccagagtggctctccattcccaggctcagtgcaggatccaggcctgcatgtgtggcgggtggagaagctgaagccggtgcctgtggcgcaagagaaccagggcgtcttcttctcgggggactcctacctagtgctgcacaatggcccagaagaggtttcccatctgcacctgtggataggccagcagtcatcccgggatgagcagggggcctgtgccgtgctggctgtgcaccttgcttctctggctgcctggtcagtgcagaggtgccccctgcagatgttcaataaaggagacaagtgctttcccagctcttttcctgcagctcttttcctgcaccacctgccctgggctgattctcactgtcacccacctattcacctgggttcatccccatgctgggggtggagtagcacacagatgacaattggacagccttggaggggccagagctgctttgcatgacagaggagtcccagccaggcttgcagggactgccatgaacccaatagggaggtggcacagtgccaggcctcaggatcagttgcatccgggtgttcagttcagtctcacattcccaacagggagaaggttgtggcaatgggcttgggatgcagttccatttaaggcagtatttcttcggatgccctaataaagcactgccaggcagcttcaagtgacatatgcccactgagcaagagaggacagcctttcacaattgtaccaagcctggcttattacttcgtaggcacattgcccagcatgtttggctggtgagcccagggccactgcagggctgtgcgaaaagcaccaggctagcatgga

SEQ ID NO: 386540 - DNA, 613 bp, Homo sapiens
gggcaggtggctgccagcgcggctggctgctcccctcttcaactttagcactttctaatgctgacatctgtgattctgtgacattccccacttagaggaagttcgtctgcggtttcactgggtatggtggctcccttgttcactgcaccctgcagctaaaccataaaacatgggctattctttgtctctgtgcatgtcacccccagtgccaagcccccagcacagacgttgagtggaatggaatagactctttgctgggctgcttgaggaacagaggcatcaggtgtgtccttgctccagttgagatgtgaagcagccagtttatgctataaaacaggctaaagtatgtgctcccaggggagagggctgggagaactcccagagaaggcggaggccacttaatgtcctggaagtttccttggacagctggggcttgatacgggcctggaaggataagggggcttgtgtgtgtgtgtgtgtgtgtgtgtgtgtgtgtgtgtgtgtgagaggctgaggcaggagaattgcttcaactcaggaggcagaggttgcaatgagctgagactgtgccactgcgctccagcctgggcagcagagtgaaactctgtctcaa

SEQ ID NO: 386541 - DNA, 1124 bp, Homo sapiens
  misc_feature (939)..(940): n is a, c, g, or t
  misc_feature (957)..(957): n is a, c, g, or t
  misc_feature (959)..(959): n is a, c, g, or t
  misc_feature (966)..(966): n is a, c, g, or t
  misc_feature (973)..(974): n is a, c, g, or t
  misc_feature (982)..(982): n is a, c, g, or t
  misc_feature (985)..(985): n is a, c, g, or t
  misc_feature (991)..(991): n is a, c, g, or t
gaagaaaggaaagtaggagtgttgaaagatctgaagacagcatgtacacagccattccccagagtggctctccattcccaggctcagtgcaggatccaggcctgcatgtgtggcgggtggagaagctgaagccggtgcctgtggcgcaagagaaccagggcgtcttcttctcgggggactcctacctagtgctgcacaatggcccagaagaggtttcccatctgcacctgtggataggccagcagtcatcccgggatgagcagggggcctgtgccgtgctggctgtgcacctcaacacgctgctgggagagcggcctgtgcagcaccgcgaggtgcagggcaatgagtctgacctcttcatgagctacttcccacggggcctcaagtaccaggaaggtggtgtggagtcagcatttcacaagacctccacaggagccccagctgccatcaagaaactctaccaggtgaaggggaagaagaacatccgtgccaccgagcgggcactgaactgggacagcttcaacactggggactgcttcatcctggacctgggccagaacatcttcgcctggtgtggtggaaagtccaacatcctggaacgcaacaaggcgagggacctggccctggccatccgggacagtgagcgacagggcaaggcccaggtggagattgtcactgatggggaggagcctgctgagatgatccaggtcctgggccccaagcctgctctgaaggagggcaaccctgaggaagacctcacagctgacaaggcaaatgcccaggccgcagctctgtataaggtctctgatgccactggacagatgaacctgaccaaggtggctgactccagcccatttgcccttgaactgctgatatctgatgactgctttgtgctggacaacgggctctgtggcaagatctatatctggaaggggaaanngaatgaaagagggaggncncctgagntggcganngttaatcnggntgagangccgaactcaggtggaggggcgacagggcctttaggttctgggcctgaccaaaggagaggcggactctgtggaaacagccttaccacggggcctctcagaattataagaggggccgggagagaacacggacgc

SEQ ID NO: 386542 - DNA, 923 bp, Homo sapiens
gctggtaccggtcccgagtcgtatggatcagagatctgaagacagcatgtacacagccattccccagagtggctctccattcccaggctcagtgcaggatccaggcctgcatgtgtggcgggtggagaagctgaagccggtgcctgtggcgcaagagaaccagggcgtcttcttctcgggggactcctacctagtgctgcacaatggcccagaagaggtttcccatctgcacctgtggataggccagcagtcatcccgggatgagcagggggcctgtgccgtgctggctgtgcacctcaacacgctgctgggagagcggcctgtgcagcaccgcgaggtgcagggcaatgagtctgacctcttcatgagctacttcccacggggcctcaagtaccaggaaggtggtgtggagtcagcatttcacaagacctccacaggagccccagctgccatcaagaaactctaccaggtgaaggggaagaagaacatccgtgccaccgagcgggcactgaactgggacagcttcaacactggggactgcttcatcctggacctgggccagaacatcttcgcctggtgtggtggaaagtccaacatcctggaacgcaacaaggcgagggacctggccctggccatccgggacagtgagcgacagggcaaggcccaggtggagattgtcactgatggggaggagcctgctgagatgatccaggtcctgggccccaagcctgctctgaaggagggcaaccctgaggaagacctcacagctgacaaggcaaatgcccaggccgcagctctgtataaggtctctgatgccactgggcgattactggccaggggggggtccagccattgcttgaagggggattccgcgaggggggggcacgggcggggggaccttttgggggggagtttagaggggg

SEQ ID NO: 386543 - DNA, 804 bp, Homo sapiens
tctagtagaggctggtgttatatccgacgagagtggctctccattcccaggctcagtgcaggatccaggcctgcatgtgtggcgggtggagaagctgaagccggtgcctgtggcgcaagagaaccagggcgtcttcttctcgggggactcctacctagtgctgcacaatggcccagaagaggtttcccatctgcacctgtggataggccagcagtcatcccgggatgagcagggggcctgtgccgtgctggctgtgcacctcaacacgctgctgggagagcggcctgtgcagcaccgcgaggtgcagggcaatgagtctgacctcttcatgagctacttcccacggggcctcaagtaccaggtctccgagctacgccagcgtagacggctgtgtgctggcacgttcacgcattgtcaccagacgacccttccatgcaggccagccccagactgctgcattctggatgaactctagccaggcgtgacacgcgggaccgaccgacacagtccgctgccacccgactgcgggcacctgaacctgggagcacgcgtttcaacactgtgcggactgcattcatccatggaccttgggccagaacatcttcgcctggtgtggtggaaagtccaacatcctggaacgcaacaaggcgagggacctggccctggccatccgggacagtgagcgacagggcaaggcccaggtggagattgtcactgatggggaggagcctgctgagatgatccaggtcctggcccccaagcctgctcttgaggaggcaccttagagacctcccgttgcacgcc

SEQ ID NO: 386544 - DNA, 2137 bp, Homo sapiens
  misc_feature (1595)..(1595): n is a, c, g, or t
  misc_feature (1603)..(1603): n is a, c, g, or t
  misc_feature (1608)..(1608): n is a, c, g, or t
  misc_feature (1618)..(1619): n is a, c, g, or t
  misc_feature (1640)..(1640): n is a, c, g, or t
  misc_feature (1651)..(1651): n is a, c, g, or t
  misc_feature (1653)..(1653): n is a, c, g, or t
  misc_feature (1664)..(1664): n is a, c, g, or t
  misc_feature (1666)..(1666): n is a, c, g, or t
  misc_feature (1671)..(1671): n is a, c, g, or t
  misc_feature (1683)..(1684): n is a, c, g, or t
  misc_feature (1687)..(1687): n is a, c, g, or t
  misc_feature (1690)..(1691): n is a, c, g, or t
  misc_feature (1694)..(1696): n is a, c, g, or t
tttccttgctggtctcagactcagagatgccctccctgatttgccttggctgtgacctgcagcgggctgaggccactgtggtggggctgtgtggacctccagcctccctgtgtgcccctctgaggagacggcctggcatacccactgcccaccccagtgactgctcttctgcttcaggcctgctggctcccagcactgcctgcccctccctgtcgggggacatcgcctccacaccggctggggaaggagcccaggggtggggctggtgggtggggctggtggttggggcagccagagaagtaagagggaagtgagaagccgggtggggcaggctggaaggaagacgaacctacgaagcagagatctgaagacagcatgtacacagccattccccagagtggctctccattcccaggctcagtgcaggatccaggcctgcatgtgtggcgggtggagaagctgaagccggtgcctgtggcgcaagagaaccagggcgtcttcttctcgggggactcctacctagtgctgcacaatggcccagaagaggtttcccatctgcacctgtggataggccagcagtcatcccgggatgagcagggggcctgtgccgtgctggctgtgcacctcaacacgctgctgggagagcggcctgtgcagcaccgcgaggtgcagggcaatgagtctgacctcttcatgagctacttcccacggggcctcaagtaccaggaaggtggtgtggagtcagcatttcacaagacctccacaggagccccagctgccatcaagaaactctaccaggtgaaggggaagaagaacatccgtgccaccgagcgggcactgaactgggacagcttcaacactggggactgcttcatcctggacctgggccagaacatcttcgcctggtgtggtggaaagtccaacatcctggaacgcaacaaggcgagggacctggccctggccatccgggacagtgagcgacagggcaaggcccaggtggagattgtcactgatggggaggagcctgctgagatgatccaggtcctgggccccaagcctgctctgaaggagggcaaccctgaggaagacctcacagctgacaaggcaaatgcccaggccgcagctctgtataaggtctctgatgccactggacagatgaacctgaccaaggtggctgactccagcccatttgcccttgaactgctgatatctgatgactgctttgtgctggacaacgggctctgtggcaagatctatatctggaaggggcgaaaagcgaatgagaaggagcggcaggcagccctgcaggtggccgagggcttcatctcgcgcatgcagtacgccccgaacactcaggtggagattctgcctcagggccgtgagagtcccatcttcaagcaatttttcaaggactggaaatgagggtgggcgtcttcctgccccatgctcccctgccccccaccacctgcctgcttgcttctctggctgcctggtcagtgcagaggtgccccctgcagatgttcaataaaggagacaagtgctttcccagctcttttcctgcaaaaaaaaaaaaaaacaaaaaaaaaaaaaacatngtgtgggnggccntggggccccnnaaaaagtttttaaaaccattngttgtgggggngngggccccaatngngttangggaacgtgggnnaanagnngtnnnccagagagaacccgggccaaaaaaaagtgggggtgggattccccccaaataaaaaaaagccgccggggggggaaacacagagcgtgtccgggagcaaaatccccacgaggaggtcccgaggggggcaactacgggggaatcaacaccaacagggggggttacagcgagagcccgaataataaattagccccggcagcggagagaagaaataaccgaacaacaacaaagaacagcaacagagcaatagccacagacaagtcgcgacagcagacgagacatgacacaacgagacagccagagacaacaccgaagcagaaacgcacgcaaaccacaccaaacagacagtacaagacacgcaaccagccacacagacacaacagataggacaagaacacagacagatacgagacagaagaaggcgacagacgaaaagcaggaaac

SEQ ID NO: 386545 - DNA, 2063 bp, Homo sapiens
tttccttgctggtctcagactcagagatgccctccctgatttgccttggctgtgacctgcagcgggctgaggccactgtggtggggctgtgtggacctccagcctccctgtgtgcccctctgaggagacggcctggcatacccactgcccaccccagtgactgctcttctgcttcaggcctgctggctcccagcactgcctgcccctccctgtcgggggacatcgcctccacaccggctggggaaggagcccaggggtggggctggtgggtggggctggtggttggggcagccagagaagtaagagggaagtgagaagccgggtggggcaggctggaaggaagacgaacctacgaagcagagatctgaagacagcatgtacacagccattccccagagtggctctccattcccaggctcagtgcaggatccaggcctgcatgtgtggcgggtggagaagctgaagccggtgcctgtggcgcaagagaaccagggcgtcttcttctcgggggactcctacctagtgctgcacaatggcccagaagaggtttcccatctgcacctgtggataggccagcagtcatcccgggatgagcagggggcctgtgccgtgctggctgtgcacctcaacacgctgctgggagagcggcctgtgcagcaccgcgaggtgcagggcaatgagtctgacctcttcatgagctacttcccacggggcctcaagtaccaggaaggtggtgtggagtcagcatttcacaagacctccacaggagccccagctgccatcaagaaactctaccaggtgaaggggaagaagaacatccgtgccaccgagcgggcactgaactgggacagcttcaacactggggactgcttcatcctggacctgggccagaacatcttcgcctggtgtggtggaaagtccaacatcctggaacgcaacaaggcgagggacctggccctggccatccgggacagtgagcgacagggcaaggcccaggtggagattgtcactgatggggaggagcctgctgagatgatccaggtcctgggccccaagcctgctctgaaggagggcaaccctgaggaagacctcacagctgacaaggcaaatgcccaggccgcagctctgtataaggtctctgatgccactggacagatgaacctgaccaaggtggctgactccagcccatttgcccttgaactgctgatatctgatgactgctttgtgctggacaacgggctctgtggcaagatctatatctggaaggggcgaaaagcgaatgagaaggagcggcaggcagccctgcaggtggccgagggcttcatctcgcgcatgcagtacgccccgaacactcaggtggagattctgcctcagggccgtgagagtcccatcttcaagcaatttttcaaggactggaaatgagggtgggcgtcttcctgccccatgctcccctgccccccaccacctgcctgcttgcttctctggctgcctggtcagtgcagaggtgccccctgcagatgttcaataaaggagacaagtgctttcccagctcttttcctgcagctcttttcctgcaccacctgccctgggctgattctcactgtcacccacctattcacctgggttcatccccatgctgggggtggagtagcacacagatgacaattggacagccttggaggggccagagctgctttgcatgacagaggagtcccagccaggcttgcagggactgccatgaacccaatagggaggtggcacagtgccaggcctcaggatcagttgcatccgggtgttcagttcagtctcacattcccaacagggagaaggttgtggcaatgggcttgggatgcagttccatttaaggcagtatttcttcggatgccctaataaagcactgccaggcagcttcaagtgacatatgcccactgagcaagagaggacagcctttcacaattgtaccaagcctggcttattacttcgtaggcacattgcccagcatgtttggctggtgagcccagggccactgcagggctgtgcgaaaagcaccaggctagcatgga

SEQ ID NO: 386546 - DNA, 1291 bp, Homo sapiens
gactcaccgggggcggctcctggccgcgcacctccagggggcggggggcggctgagacagcgcccagggcctcggagcaaggcgttggcagatctgaagacagcatgtacacagccattccccagagtggctctccattcccaggctcagtgcaggatccaggcctgcatgtgtggcgggtggagaagctgaagccggtgcctgtggcgcaagagaaccagggcgtcttcttctcgggggactcctacctagtgctgcacaatggcccagaagaggtttcccatctgcacctgtggataggccagcagtcatcccgggatgagcagggggcctgtgccgtgctggctgtgcacctcaacacgctgctgggagagcggcctgtgcagcaccgcgaggtgcagggcaatgagtctgacctcttcatgagctacttcccacggggcctcaagtaccaggaaggtggtgtggagtcagcatttcacaagacctccacaggagccccagctgccatcaagaaactctaccaggtgaaggggaagaagaacatccgtgccaccgagcgggcactgaactgggacagcttcaacactggggactgcttcatcctggacctgggccagaacatcttcgcctggtgtggtggaaagtccaacatcctggaacgcaacaaggcgagggacctggccctggccatccgggacagtgagcgacagggcaaggcccaggtggagattgtcactgatggggaggagcctgctgagatgatccaggtcctgggccccaagcctgctctgaaggagggcaaccctgaggaagacctcacagctgacaaggcaaatgcccaggccgcagctctgtataaggtctctgatgccactggacagatgaacctgaccaaggtggctgactccagcccatttgcccttgaactgctgatatctgatgactgctttgtgctggacaacgggctctgtggcaagatctatatctggaaggggcgaaaagcgaatgagaaggagcggcaggcagccctgcaggtggccgagggcttcatctcgcgcatgcagtacgccccgaacactcaggtggagattctgcctcagggccgtgagagtcccatcttcaagcaatttttcaaggactggaaatgagggtgggcgtcttcctgccccatgctcccctgccccccaccacctgcctgcttgcttctctggctgcctggtcagtgcagaggtgccccctgcagatgttcaataaaggagacaagtgctttcccagctcttttcctgca

SEQ ID NO: 386547 - DNA, 1321 bp, Homo sapiens
gggcaggtggctgccagcgcggctggctgctcccctcttcaactttagcactttctaatgctgacatctgtgattctgtgacattccccacttagaggaagttcgtctgcggtttcactggatctgaagacagcatgtacacagccattccccagagtggctctccattcccaggctcagtgcaggatccaggcctgcatgtgtggcgggtggagaagctgaagccggtgcctgtggcgcaagagaaccagggcgtcttcttctcgggggactcctacctagtgctgcacaatggcccagaagaggtttcccatctgcacctgtggataggccagcagtcatcccgggatgagcagggggcctgtgccgtgctggctgtgcacctcaacacgctgctgggagagcggcctgtgcagcaccgcgaggtgcagggcaatgagtctgacctcttcatgagctacttcccacggggcctcaagtaccaggaaggtggtgtggagtcagcatttcacaagacctccacaggagccccagctgccatcaagaaactctaccaggtgaaggggaagaagaacatccgtgccaccgagcgggcactgaactgggacagcttcaacactggggactgcttcatcctggacctgggccagaacatcttcgcctggtgtggtggaaagtccaacatcctggaacgcaacaaggcgagggacctggccctggccatccgggacagtgagcgacagggcaaggcccaggtggagattgtcactgatggggaggagcctgctgagatgatccaggtcctgggccccaagcctgctctgaaggagggcaaccctgaggaagacctcacagctgacaaggcaaatgcccaggccgcagctctgtataaggtctctgatgccactggacagatgaacctgaccaaggtggctgactccagcccatttgcccttgaactgctgatatctgatgactgctttgtgctggacaacgggctctgtggcaagatctatatctggaaggggcgaaaagcgaatgagaaggagcggcaggcagccctgcaggtggccgagggcttcatctcgcgcatgcagtacgccccgaacactcaggtggagattctgcctcagggccgtgagagtcccatcttcaagcaatttttcaaggactggaaatgagggtgggcgtcttcctgccccatgctcccctgccccccaccacctgcctgcttgcttctctggctgcctggtcagtgcagaggtgccccctgcagatgttcaataaaggagacaagtgctttcccagctcttttcctgca

SEQ ID NO: 386548 - DNA, 1228 bp, Homo sapiens
gaagaaaggaaagtaggagtgttgaaagatctgaagacagcatgtacacagccattccccagagtggctctccattcccaggctcagtgcaggatccaggcctgcatgtgtggcgggtggagaagctgaagccggtgcctgtggcgcaagagaaccagggcgtcttcttctcgggggactcctacctagtgctgcacaatggcccagaagaggtttcccatctgcacctgtggataggccagcagtcatcccgggatgagcagggggcctgtgccgtgctggctgtgcacctcaacacgctgctgggagagcggcctgtgcagcaccgcgaggtgcagggcaatgagtctgacctcttcatgagctacttcccacggggcctcaagtaccaggaaggtggtgtggagtcagcatttcacaagacctccacaggagccccagctgccatcaagaaactctaccaggtgaaggggaagaagaacatccgtgccaccgagcgggcactgaactgggacagcttcaacactggggactgcttcatcctggacctgggccagaacatcttcgcctggtgtggtggaaagtccaacatcctggaacgcaacaaggcgagggacctggccctggccatccgggacagtgagcgacagggcaaggcccaggtggagattgtcactgatggggaggagcctgctgagatgatccaggtcctgggccccaagcctgctctgaaggagggcaaccctgaggaagacctcacagctgacaaggcaaatgcccaggccgcagctctgtataaggtctctgatgccactggacagatgaacctgaccaaggtggctgactccagcccatttgcccttgaactgctgatatctgatgactgctttgtgctggacaacgggctctgtggcaagatctatatctggaaggggcgaaaagcgaatgagaaggagcggcaggcagccctgcaggtggccgagggcttcatctcgcgcatgcagtacgccccgaacactcaggtggagattctgcctcagggccgtgagagtcccatcttcaagcaatttttcaaggactggaaatgagggtgggcgtcttcctgccccatgctcccctgccccccaccacctgcctgcttgcttctctggctgcctggtcagtgcagaggtgccccctgcagatgttcaataaaggagacaagtgctttcccagctcttttcctgca

SEQ ID NO: 386549 - DNA, 1366 bp, Homo sapiens
cttacacgcgtcctggcgtgtggctctcctgcgtcctcgtttttctcgtgagccctggatctggacagtgggcccggcgcgaggccctcaactccggctgggctcccggtggcactttctgccgaccctgagatgtacccgccacgcctgcgggactgacctctagatctgaagacagcatgtacacagccattccccagagtggctctccattcccaggctcagtgcaggatccaggcctgcatgtgtggcgggtggagaagctgaagccggtgcctgtggcgcaagagaaccagggcgtcttcttctcgggggactcctacctagtgctgcacaatggcccagaagaggtttcccatctgcacctgtggataggccagcagtcatcccgggatgagcagggggcctgtgccgtgctggctgtgcacctcaacacgctgctgggagagcggcctgtgcagcaccgcgaggtgcagggcaatgagtctgacctcttcatgagctacttcccacggggcctcaagtaccaggaaggtggtgtggagtcagcatttcacaagacctccacaggagccccagctgccatcaagaaactctaccaggtgaaggggaagaagaacatccgtgccaccgagcgggcactgaactgggacagcttcaacactggggactgcttcatcctggacctgggccagaacatcttcgcctggtgtggtggaaagtccaacatcctggaacgcaacaaggcgagggacctggccctggccatccgggacagtgagcgacagggcaaggcccaggtggagattgtcactgatggggaggagcctgctgagatgatccaggtcctgggccccaagcctgctctgaaggagggcaaccctgaggaagacctcacagctgacaaggcaaatgcccaggccgcagctctgtataaggtctctgatgccactggacagatgaacctgaccaaggtggctgactccagcccatttgcccttgaactgctgatatctgatgactgctttgtgctggacaacgggctctgtggcaagatctatatctggaaggggcgaaaagcgaatgagaaggagcggcaggcagccctgcaggtggccgagggcttcatctcgcgcatgcagtacgccccgaacactcaggtggagattctgcctcagggccgtgagagtcccatcttcaagcaatttttcaaggactggaaatgagggtgggcgtcttcctgccccatgctcccctgccccccaccacctgcctgcttgcttctctggctgcctggtcagtgcagaggtgccccctgcagatgttcaataaaggagacaagtgctttcccagctcttttcctgca

SEQ ID NO: 386550 - DNA, 1451 bp, Homo sapiens
tttccttgctggtctcagactcagagatgccctccctgatttgccttggctgtgacctgcagcgggctgaggccactgtggtggggctgtgtggacctccagcctccctgtgtgcccctctgaggagacggcctggcatacccactgcccaccccagtgactgctcttctgcttcaggcctgctggctcccagcactgcctgcccctccctgtcgggggacatcgcctccacaccggctggggaaggagcccaggggtggggctggtgggtggggctggtggttggggcagccagagaagtaagagggaagtgagaagccgggtggggcaggctggaaggaagacgaacctacgaagcagagtgtggcgcaagagaaccagggcgtcttcttctcgggggactcctacctagtgctgcacaatggcccagaagaggtttcccatctgcacctgtggataggccagcagtcatcccgggatgagcagggggcctgtgccgtgctggctgtgcacctcaacacgctgctgggagagcggcctgtgcagcaccgcgaggtgcagggcaatgagtctgacctcttcatgagctacttcccacggggcctcaagtaccaggaaggtggtgtggagtcagcatttcacaagacctccacaggagccccagctgccatcaagaaactctaccaggtgaaggggaagaagaacatccgtgccaccgagcgggcactgaactgggacagcttcaacactggggactgcttcatcctggacctgggccagaacatcttcgcctggtgtggtggaaagtccaacatcctggaacgcaacaaggcgagggacctggccctggccatccgggacagtgagcgacagggcaaggcccaggtggagattgtcactgatggggaggagcctgctgagatgatccaggtcctgggccccaagcctgctctgaaggagggcaaccctgaggaagacctcacagctgacaaggcaaatgcccaggccgcagctctgtataaggtctctgatgccactggacagatgaacctgaccaaggtggctgactccagcccatttgcccttgaactgctgatatctgatgactgctttgtgctggacaacgggctctgtggcaagatctatatctggaaggggcgaaaagcgaatgagaaggagcggcaggcagccctgcaggtggccgagggcttcatctcgcgcatgcagtacgccccgaacactcaggtggagattctgcctcagggccgtgagagtcccatcttcaagcaatttttcaaggactggaaatgagggtgggcgtcttcctgccccatgctcccctgccccccaccacctgcctgcttgcttctctggctgcctggtcagtgcagaggtgccccctgcagatgttcaataaaggagacaagtgctttcccagctcttttcctgca

SEQ ID NO: 386551 - DNA, 1252 bp, Homo sapiens
tttccttgctggtctcagactcagagatgccctccctgatttgccttggctgtgacctgcagcgggctgaggccactgtggtggggctgtgtggacctccagcctccctgtgtgcccctctgaggagacggcctggcatacccactgcccaccccagtgactgctcttctgcttcaggcctgctggctcccagcactgcctgcccctccctgtcgggggacatcgcctccacaccggctggggaaggagcccaggggtggggctggtgggtggggctggtggttggggcagccagagaagtaagagggaagtgagaagccgggtggggcaggctggaaggaagacgaacctacgaagcagagatctgaagacagcatgtacacagccattccccagagtggctctccattcccaggctcagtgcaggatccaggcctgcatgtgtggcgggtggagaagctgaagccggtgcctgtggcgcaagagaaccagggcgtcttcttctcgggggactcctacctagtgctgcacaatggcccagaagaggtttcccatctgcacctgtggataggccagcagtcatcccgggatgagcagggggcctgtgccgtgctggctgtgcacctcaacacgctgctgggagagcggcctgtgcagcaccgcgaggtgcagggcaatgagtctgacctcttcatgagctacttcccacggggcctcaagtaccaggaaggtggtgtggagtcagcatttcacaagacctccacaggagccccagctgccatcaagaaactctaccaggtgaaggggaagaagaacatccgtgccaccgagcgggcactgaactgggacagcttcaacactggggactgcttcatcctggacctgggccagaacatcttcgcctggtgtggtggaaagtccaacatcctggaacgcaacaaggcgagggacctggccctggccatccgggacagtgagcgacagggcaaggcccaggtggagattgtcactgatggggaggagcctgctgagatgatccaggtcctgggccccaagcctgctctgaaggagggcaaccctgaggaagacctcacagctgacaaggcaaatgcccaggccgcagctctgtataaggtctctgatgccactgggcgattactggccaggggggggtccagccattgcttgaagggggattccgcgaggggggggcacgggcggggggaccttttgggggggagtttagaggggg

SEQ ID NO: 386552 - DNA, 1701 bp, Homo sapiens
  misc_feature (245)..(245): n is a, c, g, or t
  misc_feature (410)..(410): n is a, c, g, or t
tttccttgctggtctcagactcagagatgccctccctgatttgccttggctgtgacctgcagcgggctgaggccactgtggtggggctgtgtggacctccagcctccctgtgtgcccctctgaggagacggcctggcatacccactgcccaccccagtgactgctcttctgcttcaggcctgctggctcccagcactgcctgcccctccctgtcgggggacatcgcctttcccaacaacccgtgnccttgggcggggaaaagggcacgccccccaatgtggggggtttggggggtgcttttgggtcggggtggcgagagctttgggtacgggttagggcggcaatgccacgacgaaaccgtacaccgaacggggacacgggttgaacgcgaaaaacgggccccggggggntggggaggcaaggctggaaggaagacgaacctacgaagcagagatctgaagacagcatgtacacagccattccccagagtggctctccattcccaggctcagtgcaggatccaggcctgcatgtgtggcgggtggagaagctgaagccggtgcctgtggcgcaagagaaccagggcgtcttcttctcgggggactcctacctagtgctgcacaatggcccagaagaggtttcccatctgcacctgtggatagggtaaggggatctggatgggggaaggttgggcccaggaaggggagggagggggctggtatggatcacaagggccttgccctgccctctcccacttgtcccaggccagcagtcatcccgggatgagcagggggcctgtgccgtgctggctgtgcaccagtctgacctcttcatgagctacttcccacggggcctcaagtaccaggaaggtggtgtggagtcagcatttcacaagacctccacaggagccccagctgccatcaagaaactctaccaggtgaaggggaagaagaacatccgtgccaccgagcgggcactgaactgggacagcttcaacactggggactgcttcatcctggacctgggccagaacatcttcgcctggtgtggtggaaagtccaacatcctggaacgcaacaaggcgagggacctggccctggccatccgggacagtgagcgacagggcaaggcccaggtggagattgtcactgatggggaggagcctgctgagatgatccaggtcctgggccccaagcctgctctgaaggagggcaaccctgaggaagacctcacagctgacaaggcaaatgcccaggccgcagctctgtataaggtctctgatgccactggacagatgaacctgaccaaggtggctgactccagcccatttgcccttgaactgctgatatctgatgactgctttgtgctggacaacgggctctgtggcaagatctatatctggaaggggcgaaaagcgaatgagaaggagcggcaggcagccctgcaggtggccgagggcttcatctcgcgcatgcagtacgccccgaacactcaggtggagattctgcctcagggccgtgagagtcccatcttcaagcaatttttcaaggactggaaatgagggtgggcgtcttcctgccccatgctcccctgccccccaccacctgcctgcttgcttctctggctgcctggtcagtgcagaggtgccccctgcagatgttcaataaaggagacaagtgctttcccagctcttttcctgca

SEQ ID NO: 386553 - DNA, 843 bp, Homo sapiens
aggacaactttctccagccaaaacgtaacccgttcactagccaagcggagccccagctgccatcaagaaactctaccaggtgaaggggaagaagaacatccgtgccaccgagcgggcactgaactgggacagcttcaacactggggactgcttcatcctggacctgggccagaacatcttcgcctggtgtggtggaaagtccaacatcctggaacgcaacaaggcgagggacctggccctggccatccgggacagtgagcgacagggcaaggcccaggtggagattgtcactgatggggaggagcctgctgagatgatccaggtcctgggccccaagcctgctctgaaggagggcaaccctgaggaagacctcacagctgacaaggcaaatgcccaggccgcagctctgtataaggtctctgatgccactggacagatgaacctgaccaaggtggctgactccagcccatttgcccttgaactgctgatatctgatgactgctttgtgctggacaacgggctctgtggcaagatctatatctggaaggggcgaaaagcgaatgagaaggagcggcaggcagccctgcaggtggccgagggcttcatctcgcgcatgcagtacgccccgaacactcaggtggagattctgcctcagggccgtgagagtcccatcttcaagcaatttttcaaggactggaaatgagggtgggcgtcttcctgccccatgctcccctgccccccaccacctgcctgcttgcttctctggctgcctggtcagtgcagaggtgccccctgcagatgttcaataaaggagacaagtgctttcccagctcttttcctgca

SEQ ID NO: 386554 - DNA, 571 bp, Homo sapiens
agaggatctttggatcgctgtattgggggagcagctgcttagatatccaggtcctgggccccaagcctgctctgaaggagggcaaccctgaggaagacctcacagctgacaaggcaaatgcccaggccgcagctctgtataaggtctctgatgccactggacagatgaacctgaccaaggtggctgactccagcccatttgcccttgaactgctgatatctgatgactgctttgtgctggacaacgggctctgtggcaagatctatatctggaaggggcgaaaagcgaatgagaaggagcggcaggcagccctgcaggtggccgagggcttcatctcgcgcatgcagtacgccccgaacactcaggtggagattctgcctcagggccgtgagagtcccatcttcaagcaatttttcaaggactggaaatgagggtgggcgtcttcctgccccatgctcccctgccccccaccacctgcctgcttgcttctctggctgcctggtcagtgcagaggtgccccctgcagatgttcaataaaggagacaagtgctttcccagctcttttcctgca

SEQ ID NO: 386555 - DNA, 805 bp, Homo sapiens
  misc_feature (245)..(245): n is a, c, g, or t
  misc_feature (410)..(410): n is a, c, g, or t
tttccttgctggtctcagactcagagatgccctccctgatttgccttggctgtgacctgcagcgggctgaggccactgtggtggggctgtgtggacctccagcctccctgtgtgcccctctgaggagacggcctggcatacccactgcccaccccagtgactgctcttctgcttcaggcctgctggctcccagcactgcctgcccctccctgtcgggggacatcgcctttcccaacaacccgtgnccttgggcggggaaaagggcacgccccccaatgtggggggtttggggggtgcttttgggtcggggtggcgagagctttgggtacgggttagggcggcaatgccacgacgaaaccgtacaccgaacggggacacgggttgaacgcgaaaaacgggccccggggggntggggaggcaaggctggaaggaagacgaacctacgaagcagagatctgaagacagcatgtacacagccattccccagagtggctctccattcccaggctcagtgcaggatccaggcctgcatgtgtggcgggtggagaagctgaagccggtgcctgtggcgcaagagaaccagggcgtcttcttctcgggggactcctacctagtgctgcacaatggcccagaagaggtttcccatctgcacctgtggataggccagcagtcatcccgggatgagcagggggcctgtgccgtgctggctgtgcaccttgcttctctggctgcctggtcagtgcagaggtgccccctgcagatgttcaataaaggagacaagtgctttcccagctcttttcctgca

SEQ ID NO: 386556 - DNA, 2332 bp, Homo sapiens
  misc_feature (8)..(8): n is a, c, g, or t
  misc_feature (10)..(11): n is a, c, g, or t
  misc_feature (2331)..(2332): n is a, c, g, or t
aagcttanannaaaatattatggtttaagctgatttattttaaccgtagcactactgctttattttagttatatatcaataatggaaaatagtggccacttttcattattaatcataagataattcattgtatttgtctttcctaataaaatggcattatattaaggcccaaaatgtttactatggcccagtaaaatatagggttgttctgtgagctatttcttaggatagaaaattattccagaaagctattagttcaaaagtctctagcagtgccaaggtttcaatagtctctttaattttgaatctatgcgattgaagataagactgcatctagtttgggggttgcatgtttgtggacattcatgtttctatgtacctggaacttcttattctcaccatcacacagaattttcaagaactagttaagcaaagaaagcaaagcccagcaggtgtcagaattgggtccccaagctgagggtcattagggtgcatgtcagtgtgccaactccaatatccacacctagagaacgcacatcttcccaaaagaaatgaagcacagatgatacttgatcctcaactttgtctccagaaattttttcaggaacttgagttctttatcaaatgctcacatcctacagagaaataaagtgttccattttcaaggttcatgaagctcgtcaatgctgggagcaggcacacacttgtatttttatactcagggatcccaacaggcaactaaaactagacaaggacaaaactccactcaaaatattctgaaagttagctgatgccccatattttattactccaaatgtgtattcacttgcctgagtgctggccatgagcactcagtgaacacttgcagtacagtgagtgatgtccttgacaagttactatgaagactctgagaaaaagtaacatcccccactgtcctcaacaagcctgtaatcccatggctgccagcccttaccatgcaacaacactgcgctaagtgcatcgaaccacacaaaaccctgtgagaaaatactgcttcccacttcacacgtgaagtaactgagtctagttttagaaatacctaaacgaagagggacaggcacaacaaatttgctggaatgtaaagaaagtagatcagtttctgcgtaagcagtaagaaatggcctcatgaggaagaaagggacatttgccctgacatttctcaaagactgcttaggttttggagacagagatccaagggcaggcaagcacaatggttcatgcctgtaattccagcactttgagaggccaaggtgggaggattgcttgagcccaggaattcaagattagcctgtgcaacacagcaagaccccatctctattttaaaaagagagagagagatccaaaagcaaaggcatttcagtttgcaaggccagcatgggagagggtcttaaaacagaaacacacaaggtaagattgggggatggtacctagaccagcctaggatcataggatttgataaaatatgcatttggaaaactggtgctaatttatagagacttagaatttcaggctaaggacaaggactaagaaacgaatagcatgaacagtattattgataaacccatcattgcatcttaaaggctctgaagtctttagtattgaattaaaaaataattttcactggacaaaaccaaaaggtctttacacaactgtcaagcactttgaaatgattcagcaaaaagcagaataaatcactagtggaatttcaatagcatgtagttgtaaaccatcatgtgtccagcaaaatcacaaaacaagagtttattttagaagggacttagggatattaagaaatataacatacaaaataactaaagttttctccaagcaaaaccaatgatcctttagggatgaacagaaagaaaacaagaaatgcttctttcaaaagttgctaccaaggcttctaagatttctttggaataaagtcactaagatttgcttctgaggtcaatcttgccaacttttccaccatgctttttaggaaggaacaccaggtagggctcaagtactggtttggctcctgtcccattttttggtccttttgtaactccctttactcaactccaagtatgtctgtgcacggacaatgagacgaaagcatgctcaatgcgaaagcacaaattatgtattgagaaatcactacaatgccaaatttttttaaaataaaaaaaaatatatatatatatatatatatatatctttaagaactcgctgtgttagggaaactgtttacatattgaggtgttcctctttttttgactggaacaataaaagaaaaatttgataaaaaann

SEQ ID NO: 386557 - DNA, 2278 bp, Homo sapiens
  misc_feature (8)..(8): n is a, c, g, or t
  misc_feature (10)..(11): n is a, c, g, or t
  misc_feature (2277)..(2278): n is a, c, g, or t
aagcttanannaaaatattatggtttaagctgatttattttaaccgtagcactactgctttattttagttatatatcaataatggaaaatagtggccacttttcattattaatcataagataattcattgtatttgtctttcctaataaaatggcattatattaaggcccaaaatgtttactatggcccagtaaaatatagggttgttctgtgagctatttcttaggatagaaaattattccagaaagctattagttcaaaagtctctagcagtgccaaggtttcaatagtctctttaattttgaatctatgcgattgaagataagactgcatctagtttgggggttgcatgtttgtggacattcatgtttctatgtacctggaacttcttattctcaccatcacacagaattttcaagaactagttaagcaaagaaagcaaagcccagcaggtgtcagaattgggtccccaagctgagggtcattagggtgcatgtcagtgtgccaactccaatatccacacctagagaacgcacatcttcccaaaagaaatgaagcacagatgatacttgatcctcaactttgtctccagaaattttttcaggaacttgagttctttatcaaatgctcacatcctacagagaaataaagtgttccattttcaaggttcatgaagctcgtcaatgctgggagcaggcacacacttgtatttttatactcagggatcccaacaggcaactaaaactagacaaggacaaaactccactcaaaatattctgaaagttagctgatgccccatattttattactccaaatgtgtattcacttgcctgagtgctggccatgagcactcagtgaacacttgcagtacagtgagtgatgtccttgacaagttactatgaagactctgagaaaaagtaacatcccccactgtcctcaacaagcctgtaatcccatggctgccagcccttaccatgcaacaacactgcgctaagtgcatcgaaccacacaaaaccctgtgagaaaatactgcttcccacttcacacgtgaagtaactgagtctagttttagaaatacctaaacgaagagggacaggcacaacaaatttgctggaatgtaaagaaagtagatcagtttctgcgtaagcagtaagaaatggcctcatgaggaagaaagggacatttgccctgacatttctcaaagactgcttaggttttggagacagagatccaagggcaggcaagcacaatggttcatgcctgtaattccagcactttgagaggccaaggtgggaggattgcttgagcccaggaattcaagattagcctgtgcaacacagcaagaccccatctctattttaaaaagagagagagagatccaaaagcaaaggcatttcagtttgcaaggccagcatgggagagggtcttaaaacagaaacacacaaggtaagattgggggatggtacctagaccagcctaggatcataggatttgataaaatatgcatttggaaaaacgaatagcatgaacagtattattgataaacccatcattgcatcttaaaggctctgaagtctttagtattgaattaaaaaataattttcactggacaaaaccaaaaggtctttacacaactgtcaagcactttgaaatgattcagcaaaaagcagaataaatcactagtggaatttcaatagcatgtagttgtaaaccatcatgtgtccagcaaaatcacaaaacaagagtttattttagaagggacttagggatattaagaaatataacatacaaaataactaaagttttctccaagcaaaaccaatgatcctttagggatgaacagaaagaaaacaagaaatgcttctttcaaaagttgctaccaaggcttctaagatttctttggaataaagtcactaagatttgcttctgaggtcaatcttgccaacttttccaccatgctttttaggaaggaacaccaggtagggctcaagtactggtttggctcctgtcccattttttggtccttttgtaactccctttactcaactccaagtatgtctgtgcacggacaatgagacgaaagcatgctcaatgcgaaagcacaaattatgtattgagaaatcactacaatgccaaatttttttaaaataaaaaaaaatatatatatatatatatatatatatctttaagaactcgctgtgttagggaaactgtttacatattgaggtgttcctctttttttgactggaacaataaaagaaaaatttgataaaaaann

SEQ ID NO: 386558 - DNA, 369 bp, Homo sapiens
tctgaggagcagagccatttccccagtgtggccagagggcccagacgtatgtgacatctggtttttcaacagcaaagctgatccatttctctacccatcctgggtgtgcagctcccaggctcctctgcgcctctcccagacccagccctcctgcaaggacctggaccctctgaggggcgctggggggacccaggaggaggcagggtgggagccctcatcaggcccccagaagccaggctaatctgcagagccctcgagtggctttgtctccaagctctggtgcatccatggctcccgtcacccgcgtctcatccgcctgcggctccgtctcccttctcgctagcgcatgtcacgttgttccttccatct

SEQ ID NO: 386559 - DNA, 375 bp, Homo sapiens
tttgttaggtgcacagatatcatctatataattttattttaaatattttcaaatagttccaaaattacaatttaaaataaaaattgaaaaggggaagaaagataagtttggatttatgccaagccagatgcatccatccagctttttcaaaattacaaatttttttctttcaaaattacattttaaatgttctgaatattttaaagcgcattctctcacactattcacaacatatagttctaactgcaagggaggaaacatacacagatactcaaaaaataatcttgtctgtaacccatgatttatctttgactactaaataacttgaaaatgtggttccgacatttgcttatttttgtattctaatactcagga

SEQ ID NO: 386560 - DNA, 663 bp, Homo sapiens
tggcggatgcctgtagtcccagcttcctgggaggctgaggcaggagaatcacttgaatccaggagtcggaggctgcagtgagccaagattgtaccactgcactccagcctgggcgacacagcaagattctgtctcaaaaagaaagaagaagtccattctccccaaactgatatacacaatcaatgcaaactcaaacaaaacactagcaacatttttgtggaacattatggttcaaaatatttatcaaatgcaaagagctaagaagtggcaagatacttaaaacaacaacaaaaaaggaacacaatatagaaggattaattctttctggtatcttgtatccagagttattattaatatgaagctatagtaattttaaaactgtggttctcgcacaaaggcacataaaaagaacacaaagttcagaaagaaatgcatacaaatattaacagctgatttatgacatagtgccactgtggaactgagaggaatagtgtcaaaacaaatagatgtctctacttaaaatttaaaaaaataaaaattttttgaaaagaggttgggcacaatgactcatgcctgtaatcccagcaccttgggaggccaaggagggaggactgcgtgaggccaggagttcaagaccagcctgggcaacatagcaaaacccca

SEQ ID NO: 386561 - DNA, 211 bp, Homo sapiens
ctttgaacttcccatggcacgtggggagtgggcatcaagtggatggggctgtaatgtttttaggcactacaatgaactgaatgattatatttctccccagactcatatgttcaaatcctaactccaaatgtgatggtattaggaggtgagacctttgcaaagtgattagatcatgaggatggaaccctcatgaatgggactagtgccctaa

SEQ ID NO: 386562 - DNA, 1005 bp, Homo sapiens
tgagcctgtgggaaggccactggaagctcagcctccgggtggcatgactttgccccttgcatggggcttccctggttggggaccaggcagctgaccagggtggcaggtgttggctcagggaagaggctgctcactcttggcatcttgacccctttgtccaggatcctgctctgcaacatccacttcctgctcccgatctccctgaaggggctgctgctcgtgggcctgctctgcactgtgctgcaagtgagcagtgctaagggggcctccagggggaaataaagtcacagcctgagccggggaaccgcagctcccacaccatcaacaccctcggagggggcaagcagaacctctggcctcctatcaggagcagataaaagaaaggacatcccccttgcacactgattccttggaggcatctgcatctcaccttcatggatcctccctcaggcctcctttccttgtggctccaggatgaccctgtcagagatactggactatcgttcagttgcagaggccccagggcctgtctggacttttccatcccaagaggggctcggctctatcccctttgtgcctgtgaccctctccatcccccacccggctcagaactggcacagccaccaccaaccactcctgattcaacccaagcttcgccctttccacctctcgagctgtgcaacaacaaatgcaggatgctcagccctcatgtgtcagtcccctcaattcacttgtaattaaataacaacacacctctttttctaattttcaaaggtgtatatatttcccctcaataaagttgttaggattatttttctcttccacttacattcttcctgaactctgcctgctcttttttcttccatattttactttaaatacttttttttgaattactatatttcttttcttagctcctttttttggagagatcttgttgtcttaacttctctaagaaggaggggaattttccatctgaactcttcctctattgccttgagcact

SEQ ID NO: 386563 - DNA, 291 bp, Homo sapiens
ctctgcacagcacagggatgctgacggggcctctctgccttctgccacctctgcctcaggagcagataaaagaaaggacatcccccttgcacactgattccttggaggcatctgcatctcaccttcatggatcctccctcaggcctcctttccttgtggctccaggatgaccctgtcagagatactggactatcgttcagttgcagaggccccagggcctgtctggacttttccatcccaagaggggctcggctctatcccctttgtgcctgtgaccctctccatccccca

SEQ ID NO: 386564 - DNA, 585 bp, Homo sapiens
gtgcattctgggtgtccacatatttgttgttgctttaggaagaggagctgggaggttggagtcgccacacatgttgaaagatgtggcaaaaaacaaacaaacaaaacacctcatagagagaaatcctgactttgtgcacaagaaaagggagtgaagtgtgtggggtttttaaagtggtggtgggggggcattaggagatacccagaagctctcaagattccaaacagtctgcttttcttttcagacattacactccaagaaaagaaactctagtgtataacagaggggctctgtcaaaatttaacaacataaatattgggcaaatgaagttgtttctctggtgctatctcaacctgccaatggagaaatatctcaaaaagtcaagaattgaagccattactcagagacagcatcctatggcatggtgatccaaaacaagtacacctctaccttttccctttcagccccaaaccccaaaacactggagaatattggggcaggcaaggcccgtgaataggtgagcagagctggaagaagagactcctgcccctggtgggcctcaggctatttgtggaatgatgtttg

SEQ ID NO: 386565 - DNA, 231 bp, Homo sapiens
ataatggcagtttgaaaattttatgtccatgacagaaatacaaggtacaactttctattttacagccaaaggatttgaagaacctggaaaactttcatgaagagctacaacagtcattcattagcagctgaataatgcctgtatttggaatttaatatatgtattttcttaagatatctgagaatgactcaattaattctatagagaataaaatgttatctgaagacaact

SEQ ID NO: 386566 - DNA, 459 bp, Homo sapiens
agcattactgagctaccaacacaggccatgggcttcaaagctgtttacctactagatctgctgggcttaccctgacccagcatcagtgtctcacaaagtctcctgttgtgaccaaagacatgtccttaaaatgtggctggcctcccaggctgtggtcatggaagaatggagaagtgaccctaaagggtctaatccactgacctttactttgctctaaccaactgcccaaataaataaaaacagcagggtggcgcagtttcccagatgaattccaatttatccctaaatatccaggcttggttcaatgattaaagtcttcagaccatccaaaactctgtcaaatggctctcaacccggggtgattttgcccccaggggacatttggcaatgtctggagacattttgggctgtctcaactggaggaggggatgttactggcatctagtgggtagaggccag

SEQ ID NO: 386567 - DNA, 239 bp, Homo sapiens
ctcaataaataaaatttacttttgttacttataaaaagttaagggaacaataactaaagtaagcctatatatggttctcccatagaagctaatggaatgttttaactaaataaaatgtaacaatacacaaattgtggaattatatctaaaaataattttgtttgcatgatgaaattttacaaaaattattcttttaactacaaatcagctcagattaaatacttcataaactataaaac

SEQ ID NO: 386568 - DNA, 1314 bp, Homo sapiens
tctttggtttcttgttaaacaaacacctaatttatttcttggaggttttgttcagctgtcctaatttatgactttacattccttctggtgctaaactgctcaagtagcctcttgtatcaagtgtgacctgattccttaagaattttacttaatgagaacctctaagctagaaactcttgctaggtgtttcatgcaccttattttctttaatcattacaacaactctaagattgggttctctccaccttataaatgatgactgttttagagaggttaaggttgcttaaaattggtgagttagtgaggggtagagccacgaatggatttctggtcgctgcctccatcgtcagggcaagcttttcccacgactccagcgcttccatttgtcagtccccaggctagaaagccacagtgctaatttagtatttatcaagcgtttgtagtgtcctgggatctggcacttcgatgagaaagctgtgacggccccaacttctaacagcgagtggtaaggaggacgagggacacaggagggaggagactctcgccaaagcttagcaccaacagaagtggtcccccgcaggttgctctgcgagcgccacctcttccctccaaccgaggagaaagtggcgcgcctttgaggagtccgaggtcccggcccaggcggcagcttgggtcctggcgggttccggacgggcgcctcagggacctggaagcaaccgcaccgaacgcgacggagagcggcgagacgactccaggaggcgcccgagctacatcccccggccacaccaaacccgggtttgctggcagatgcggctcacgacaccccttagggtcgcagcccctcccccggaagtgacgtgtagcgactacggcgtctgggagggacccaggagcagtcggggggtttgagagtggcggcggccgcggagggcctggcaggccccgccgctgcaaggaacgccccgaacgcgcgcgcccggcgtgtagcggccccaagacccgcgccgccgctgccgcgtgcgggggcggggagggcggggcgccaggagccgcggcggcgggagatgcgggcggctgcgggcacccggcgggctcggcttggccgccgccgccttctacgctccgccgcgggggtcgcagcggctgccgcgccgtcctcgagtttccagcgtgaggaggaggctgagggcggagaggcgcatcgtgttcgaggcggagaccgagggggagccccgcgcgcggcgtcggtaaacagtcagccccacacaccccctcaaaatctcacaaccacagccccaccaacccctcatgcca

SEQ ID NO: 386569 - DNA, 392 bp, Homo sapiens
cttgtttcctgcacttccaggagcccacaccatctgtcatcaaatttgtcacgacaccttccaaaaagccaccggttgaacctgttgctgccaccatttcaattggcccaagtatttctccatcttcagaagaaactatccaagctttggagacattggtttccccaaaactgccttccctggaagccccaacctctgcctctaacgtaatgactgcttttgccaccacacctggttgatttttgtgtttttagtgagacagggtttgaccatgttgtccagactggtctccaactcctgacctcaggtgatccgcccaccttggcctcccaaagtgttgggattacaggcatgagccattgtgccctgcccaatgaatattctttagattt

SEQ ID NO: 386570 - DNA, 3671 bp, Homo sapiens
tctttggtttcttgttaaacaaacacctaatttatttcttggaggttttgttcagctgtcctaatttatgactttacattccttctggtgctaaactgctcaagtagcctcttgtatcaagtgtgacctgattccttaagaattttacttaatgagaacctctaagctagaaactcttgctaggtgtttcatgcaccttattttctttaatcattacaacaactctaagattgggttctctccaccttataaatgatgactgttttagagaggttaaggttgcttaaaattggtgagttagtgaggggtagagccacgaatggatttctggtcgctgcctccatcgtcagggcaagcttttcccacgactccagcgcttccatttgtcagtccccaggctagaaagccacagtgctaatttagtatttatcaagcgtttgtagtgtcctgggatctggcacttcgatgagaaagctgtgacggccccaacttctaacagcgagtggtaaggaggacgagggacacaggagggaggagactctcgccaaagcttagcaccaacagaagtggtcccccgcaggttgctctgcgagcgccacctcttccctccaaccgaggagaaagtggcgcgcctttgaggagtccgaggtcccggcccaggcggcagcttgggtcctggcgggttccggacgggcgcctcagggacctggaagcaaccgcaccgaacgcgacggagagcggcgagacgactccaggaggcgcccgagctacatcccccggccacaccaaacccgggtttgctggcagatgcggctcacgacaccccttagggtcgcagcccctcccccggaagtgacgtgtagcgactacggcgtctgggagggacccaggagcagtcggggggtttgagagtggcggcggccgcggagggcctggcaggccccgccgctgcaaggaacgccccgaacgcgcgcgcccggcgtgtagcggccccaagacccgcgccgccgctgccgcgtgcgggggcggggagggcggggcgccaggagccgcggcggcgggagatgcgggcggctgcgggcacccggcgggctcggcttggccgccgccgccttctacgctccgccgcgggggtcgcagcggctgccgcgccgtcctcgagtttccagcgtgaggaggaggctgagggcggagaggcgcatcgtgttcgaggcggagaccgagggggagccccgcgcgcggcgtcgctcattgctatggacagtgctatcaccctgtggcagttccttcttcagctcctgcagaagcctcagaacaagcacatgatctgttggacctctaatgatgggcagtttaagcttttgcaggcagaagaggtggctcgtctctgggggattcgcaagaacaagcctaacatgaattatgacaaactcagccgagccctcagatactattatgtaaagaatatcatcaaaaaagtgaatggtcagaagtttgtgtacaagtttgtctcttatccagagattttgaacatggatccaatgacagtgggcaggattgagggtgactgtgaaagtttaaacttcagtgaagtcagcagcagttccaaagatgtggagaatggagggaaagataaaccacctcagcctggtgccaagacctctagccgcaatgactacatacactctggcttatattcttcatttactctcaactctttgaactcctccaatgtaaagcttttcaaattgataaagactgagaatccagccgagaaactggcagagaaaaaatctcctcaggagcccacaccatctgtcatcaaatttgtcacgacaccttccaaaaagccaccggttgaacctgttgctgccaccatttcaattggcccaagtatttctccatcttcagaagaaactatccaagctttggagacattggtttccccaaaactgccttccctggaagccccaacctctgcctctaacgtaatgactgcttttgccaccacaccacccatttcgtccataccccctttgcaggaacctcccagaacaccttcaccaccactgagttctcacccagacatcgacacagacattgattcagtggcttctcagccaatggaacttccagagaatttgtcactggagcctaaagaccaggattcagtcttgctagaaaaggacaaagtaaataattcatcaagatccaagaaacccaaagggttagaactggcacccacccttgtgatcacgagcagtgatccaagcccactgggaatactgagcccatctctccctacagcttctcttacaccagcatttttttcacagacacccatcatactgactccaagccccttgctctccagtatccacttctggagtactctcagtcctgttgctcccctaagtccagccagactgcaaggtgctaacacacttttccagtttccttctgtactgaacagtcatgggccattcactctgtctgggctggatggaccttccacccctggcccattttccccagacctacagaagacataacctatgcacttgtggaatgagagaaccgaggaacgaagaaacagacattcaacatgattgcatttgaagtgagcaattgatagttctacaatgctgataatagactattgtgatttttgccattccccattgaaaacatctttttaggattctctttgaataggactcaagttggactatatgtataaaaatgccttaattggagtctaaactccacctccctctgtcttttccttttctttttctttccttccttccttttcttttctcctttaaaaatattttgagctttgtgctgaagaagtttttggtgggctttagtgactgtgctttgcaaaagcaattaagaacaaagttactccttctggctattgggaccctttggccaggaaaaattatgcttagaatctattatttaaagaaatatttgtgaaatgaattggcatctttaggactaagtgtgctctgttgaatgacttaaagtgagctgttcctaagcagtggaagaagaagaatcattcctattcatacaaagtaagattggagcagtcatactggggagattgttttgtgtgaactataacgtgtaagcaactccatgaaaaggcatcttgtttacctttattcagggtggatctcttagccatatgtatgatcctgtctgaacctgtcaacagagcatggagctagtctatttcactatagaaagatttttagacctggggtttaagacagtttttggaacacctagtaagaatatgggacctcacatctagcacagaaatgctctttgccctctgggtggtatgattatatgcccatggaatacagcatgggaaatgatcacttttaggaggatgaacttggattttgaatatttgaaacatctctgagtaaaagattcgatcagataacttgaaacaacatgtagtggttttctcaattagaagataaccaagtgaaggacctgtctttttcctgttcattttacctcattttctactatacatttatcacctttcctttatgtttaaggttgttagaggttatgatagttttaaagatgcagttaggaaggtagaattcaaagtgaagcctccccagtcaggagcgaagatg

SEQ ID NO: 386571 - DNA, 3763 bp, Homo sapiens
tctttggtttcttgttaaacaaacacctaatttatttcttggaggttttgttcagctgtcctaatttatgactttacattccttctggtgctaaactgctcaagtagcctcttgtatcaagtgtgacctgattccttaagaattttacttaatgagaacctctaagctagaaactcttgctaggtgtttcatgcaccttattttctttaatcattacaacaactctaagattgggttctctccaccttataaatgatgactgttttagagaggttaaggttgcttaaaattggtgagttagtgaggggtagagccacgaatggatttctggtcgctgcctccatcgtcagggcaagcttttcccacgactccagcgcttccatttgtcagtccccaggctagaaagccacagtgctaatttagtatttatcaagcgtttgtagtgtcctgggatctggcacttcgatgagaaagctgtgacggccccaacttctaacagcgagtggtaaggaggacgagggacacaggagggaggagactctcgccaaagcttagcaccaacagaagtggtcccccgcaggttgctctgcgagcgccacctcttccctccaaccgaggagaaagtggcgcgcctttgaggagtccgaggtcccggcccaggcggcagcttgggtcctggcgggttccggacgggcgcctcagggacctggaagcaaccgcaccgaacgcgacggagagcggcgagacgactccaggaggcgcccgagctacatcccccggccacaccaaacccgggtttgctggcagatgcggctcacgacaccccttagggtcgcagcccctcccccggaagtgacgtgtagcgactacggcgtctgggagggacccaggagcagtcggggggtttgagagtggcggcggccgcggagggcctggcaggccccgccgctgcaaggaacgccccgaacgcgcgcgcccggcgtgtagcggccccaagacccgcgccgccgctgccgcgtgcgggggcggggagggcggggcgccaggagccgcggcggcgggagatgcgggcggctgcgggcacccggcgggctcggcttggccgccgccgccttctacgctccgccgcgggggtcgcagcggctgccgcgccgtcctcgagtttccagcgtgaggaggaggctgagggcggagaggcgcatcgtggtgactgtctctgtacaaccagcttcaaagtgataatcgtgaggattactggaggacattttgagtgtttcagaaaagttatagaaacccaactattttccactacagtttcttatctctgccctttttggaactcattgctatggacagtgctatcaccctgtggcagttccttcttcagctcctgcagaagcctcagaacaagcacatgatctgttggacctctaatgatgggcagtttaagcttttgcaggcagaagaggtggctcgtctctgggggattcgcaagaacaagcctaacatgaattatgacaaactcagccgagccctcagatactattatgtaaagaatatcatcaaaaaagtgaatggtcagaagtttgtgtacaagtttgtctcttatccagagattttgaacatggatccaatgacagtgggcaggattgagggtgactgtgaaagtttaaacttcagtgaagtcagcagcagttccaaagatgtggagaatggagggaaagataaaccacctcagcctggtgccaagacctctagccgcaatgactacatacactctggcttatattcttcatttactctcaactctttgaactcctccaatgtaaagcttttcaaattgataaagactgagaatccagccgagaaactggcagagaaaaaatctcctcaggagcccacaccatctgtcatcaaatttgtcacgacaccttccaaaaagccaccggttgaacctgttgctgccaccatttcaattggcccaagtatttctccatcttcagaagaaactatccaagctttggagacattggtttccccaaaactgccttccctggaagccccaacctctgcctctaacgtaatgactgcttttgccaccacaccacccatttcgtccataccccctttgcaggaacctcccagaacaccttcaccaccactgagttctcacccagacatcgacacagacattgattcagtggcttctcagccaatggaacttccagagaatttgtcactggagcctaaagaccaggattcagtcttgctagaaaaggacaaagtaaataattcatcaagatccaagaaacccaaagggttagaactggcacccacccttgtgatcacgagcagtgatccaagcccactgggaatactgagcccatctctccctacagcttctcttacaccagcatttttttcacagacacccatcatactgactccaagccccttgctctccagtatccacttctggagtactctcagtcctgttgctcccctaagtccagccagactgcaaggtgctaacacacttttccagtttccttctgtactgaacagtcatgggccattcactctgtctgggctggatggaccttccacccctggcccattttccccagacctacagaagacataacctatgcacttgtggaatgagagaaccgaggaacgaagaaacagacattcaacatgattgcatttgaagtgagcaattgatagttctacaatgctgataatagactattgtgatttttgccattccccattgaaaacatctttttaggattctctttgaataggactcaagttggactatatgtataaaaatgccttaattggagtctaaactccacctccctctgtcttttccttttctttttctttccttccttccttttcttttctcctttaaaaatattttgagctttgtgctgaagaagtttttggtgggctttagtgactgtgctttgcaaaagcaattaagaacaaagttactccttctggctattgggaccctttggccaggaaaaattatgcttagaatctattatttaaagaaatatttgtgaaatgaattggcatctttaggactaagtgtgctctgttgaatgacttaaagtgagctgttcctaagcagtggaagaagaagaatcattcctattcatacaaagtaagattggagcagtcatactggggagattgttttgtgtgaactataacgtgtaagcaactccatgaaaaggcatcttgtttacctttattcagggtggatctcttagccatatgtatgatcctgtctgaacctgtcaacagagcatggagctagtctatttcactatagaaagatttttagacctggggtttaagacagtttttggaacacctagtaagaatatgggacctcacatctagcacagaaatgctctttgccctctgggtggtatgattatatgcccatggaatacagcatgggaaatgatcacttttaggaggatgaacttggattttgaatatttgaaacatctctgagtaaaagattcgatcagataacttgaaacaacatgtagtggttttctcaattagaagataaccaagtgaaggacctgtctttttcctgttcattttacctcattttctactatacatttatcacctttcctttatgtttaaggttgttagaggttatgatagttttaaagatgcagttaggaaggtagaattcaaagtgaagcctccccagtcaggagcgaagatg

SEQ ID NO: 386572 - DNA, 2109 bp, Homo sapiens
tctttggtttcttgttaaacaaacacctaatttatttcttggaggttttgttcagctgtcctaatttatgactttacattccttctggtgctaaactgctcaagtagcctcttgtatcaagtgtgacctgattccttaagaattttacttaatgagaacctctaagctagaaactcttgctaggtgtttcatgcaccttattttctttaatcattacaacaactctaagattgggttctctccaccttataaatgatgactgttttagagaggttaaggttgcttaaaattggtgagttagtgaggggtagagccacgaatggatttctggtcgctgcctccatcgtcagggcaagcttttcccacgactccagcgcttccatttgtcagtccccaggctagaaagccacagtgctaatttagtatttatcaagcgtttgtagtgtcctgggatctggcacttcgatgagaaagctgtgacggccccaacttctaacagcgagtggtaaggaggacgagggacacaggagggaggagactctcgccaaagcttagcaccaacagaagtggtcccccgcaggttgctctgcgagcgccacctcttccctccaaccgaggagaaagtggcgcgcctttgaggagtccgaggtcccggcccaggcggcagcttgggtcctggcgggttccggacgggcgcctcagggacctggaagcaaccgcaccgaacgcgacggagagcggcgagacgactccaggaggcgcccgagctacatcccccggccacaccaaacccgggtttgctggcagatgcggctcacgacaccccttagggtcgcagcccctcccccggaagtgacgtgtagcgactacggcgtctgggagggacccaggagcagtcggggggtttgagagtggcggcggccgcggagggcctggcaggccccgccgctgcaaggaacgccccgaacgcgcgcgcccggcgtgtagcggccccaagacccgcgccgccgctgccgcgtgcgggggcggggagggcggggcgccaggagccgcggcggcgggagatgcgggcggctgcgggcacccggcgggctcggcttggccgccgccgccttctacgctccgccgcgggggtcgcagcggctgccgcgccgtcctcgagtttccagcgtgaggaggaggctgagggcggagaggcgcatcgtgttcgaggcggagaccgagggggagccccgcgcgcggcgtcgctcattgctatggacagtgctatcaccctgtggcagttccttcttcagctcctgcagaagcctcagaacaagcacatgatctgttggacctctaatgatgggcagtttaagcttttgcaggcagaagaggtggctcgtctctgggggattcgcaagaacaagcctaacatgaattatgacaaactcagccgagccctcagatactattatgtaaagaatatcatcaaaaaagtgaatggtcagaagtttgtgtacaagtttgtctcttatccagagattttgaacatggatccaatgacagtgggcaggattgagggtgactgtgaaagtttaaacttcagtgaagtcagcagcagttccaaagatgtggagaatggagggaaagataaaccacctcagcctggtgccaagacctctagccgcaatgactacatacactctggcttatattcttcatttactctcaactctttgaactcctccaatgtaaagcttttcaaattgataaagactgagaatccagccgagaaactggcagagaaaaaatctcctcaggagcccacaccatctgtcatcaaatttgtcacgacaccttccaaaaagccaccggttgaacctgttgctgccaccatttcaattggcccaagtatttctccatcttcagaagaaactatccaagctttggagacattggtttccccaaaactgccttccctggaagccccaacctctgcctctaacgtaatgactgcttttgccaccacaccacccatttcgtccataccccctttgcaggaacctcccagaacaccttcaccacccatttcgtccataccccctttgcaggaacctgccacaacct

SEQ ID NO: 386573 - DNA, 2363 bp, Homo sapiens
  misc_feature (51)..(51): n is a, c, g, or t
  misc_feature (63)..(63): n is a, c, g, or t
  misc_feature (80)..(80): n is a, c, g, or t
aggatcccccgcgggattgagggtgactgtgaaagtttaaacttcagtgangtcagcagcagntccaaagatgtggagantgggggattcgcaagaacaagcctaacatgaattatgacaaactcagccgagccctcagatactattatgtaaagaatatcatcaaaaaagtgaatggtcagaagtttgtgtacaagtttgtctcttatccagagattttgaacatggatccaatgacagtgggcaggattgagggtgactgtgaaagtttaaacttcagtgaagtcagcagcagttccaaagatgtggagaatggagggaaagataaaccacctcagcctggtgccaagacctctagccgcaatgactacatacactctggcttatattcttcatttactctcaactctttgaactcctccaatgtaaagcttttcaaattgataaagactgagaatccagccgagaaactggcagagaaaaaatctcctcaggagcccacaccatctgtcatcaaatttgtcacgacaccttccaaaaagccaccggttgaacctgttgctgccaccatttcaattggcccaagtatttctccatcttcagaagaaactatccaagctttggagacattggtttccccaaaactgccttccctggaagccccaacctctgcctctaacgtaatgactgcttttgccaccacaccacccatttcgtccataccccctttgcaggaacctcccagaacaccttcaccaccactgagttctcacccagacatcgacacagacattgattcagtggcttctcagccaatggaacttccagagaatttgtcactggagcctaaagaccaggattcagtcttgctagaaaaggacaaagtaaataattcatcaagatccaagaaacccaaagggttagaactggcacccacccttgtgatcacgagcagtgatccaagcccactgggaatactgagcccatctctccctacagcttctcttacaccagcatttttttcacagacacccatcatactgactccaagccccttgctctccagtatccacttctggagtactctcagtcctgttgctcccctaagtccagccagactgcaaggtgctaacacacttttccagtttccttctgtactgaacagtcatgggccattcactctgtctgggctggatggaccttccacccctggcccattttccccagacctacagaagacataacctatgcacttgtggaatgagagaaccgaggaacgaagaaacagacattcaacatgattgcatttgaagtgagcaattgatagttctacaatgctgataatagactattgtgatttttgccattccccattgaaaacatctttttaggattctctttgaataggactcaagttggactatatgtataaaaatgccttaattggagtctaaactccacctccctctgtcttttccttttctttttctttccttccttccttttcttttctcctttaaaaatattttgagctttgtgctgaagaagtttttggtgggctttagtgactgtgctttgcaaaagcaattaagaacaaagttactccttctggctattgggaccctttggccaggaaaaattatgcttagaatctattatttaaagaaatatttgtgaaatgaattggcatctttaggactaagtgtgctctgttgaatgacttaaagtgagctgttcctaagcagtggaagaagaagaatcattcctattcatacaaagtaagattggagcagtcatactggggagattgttttgtgtgaactataacgtgtaagcaactccatgaaaaggcatcttgtttacctttattcagggtggatctcttagccatatgtatgatcctgtctgaacctgtcaacagagcatggagctagtctatttcactatagaaagatttttagacctggggtttaagacagtttttggaacacctagtaagaatatgggacctcacatctagcacagaaatgctctttgccctctgggtggtatgattatatgcccatggaatacagcatgggaaatgatcacttttaggaggatgaacttggattttgaatatttgaaacatctctgagtaaaagattcgatcagataacttgaaacaacatgtagtggttttctcaattagaagataaccaagtgaaggacctgtctttttcctgttcattttacctcattttctactatacatttatcacctttcctttatgtttaaggttgttagaggttatgatagttttaaagatgcagttaggaaggtagaattcaaagtgaagcctccccagtcaggagcgaagatg

SEQ ID NO: 386574 - DNA, 488 bp, Homo sapiens
ggtagtcgttataaaccacgctatggtgaacctcccagaacaccttcaccaccactgagttctcacccagacatcgacacagacattgattcagtggcttctcagccaatggaacttccagagaatttgtcactggagcctaaagaccaggattcagtcttgctagaaaaggacaaagtaaataattcatcaagatccaagaaacccaaagggttagaactggcacccacccttgtgatcacgagcagtgatccaagcccactgggaatactgagcccatctctccctacagcttctcttacaccagcatttttttcacagacacccatcatactgactccaagccccttgctctccagtatccacttctggagtactctcagtcctgttgctccccttatctgccaggctggagtgcaatggtgcattcagcttaccacagcctcaaattcctgggctcgagtgatcctcccacctctgcctcttga

SEQ ID NO: 386575 - DNA, 3032 bp, Homo sapiens
tctttggtttcttgttaaacaaacacctaatttatttcttggaggttttgttcagctgtcctaatttatgactttacattccttctggtgctaaactgctcaagtagcctcttgtatcaagtgtgacctgattccttaagaattttacttaatgagaacctctaagctagaaactcttgctaggtgtttcatgcaccttattttctttaatcattacaacaactctaagattgggttctctccaccttataaatgatgactgttttagagaggttaaggttgcttaaaattggtgagttagtgaggggtagagccacgaatggatttctggtcgctgcctccatcgtcagggcaagcttttcccacgactccagcgcttccatttgtcagtccccaggctagaaagccacagtgctaatttagtatttatcaagcgtttgtagtgtcctgggatctggcacttcgatgagaaagctgtgacggccccaacttctaacagcgagtggtaaggaggacgagggacacaggagggaggagactctcgccaaagcttagcaccaacagaagtggtcccccgcaggttgctctgcgagcgccacctcttccctccaaccgaggagaaagtggcgcgcctttgaggagtccgaggtcccggcccaggcggcagcttgggtcctggcgggttccggacgggcgcctcagggacctggaagcaaccgcaccgaacgcgacggagagcggcgagacgactccaggaggcgcccgagctacatcccccggccacaccaaacccgggtttgctggcagatgcggctcacgacaccccttagggtcgcagcccctcccccggaagtgacgtgtagcgactacggcgtctgggagggacccaggagcagtcggggggtttgagagtggcggcggccgcggagggcctggcaggccccgccgctgcaaggaacgccccgaacgcgcgcgcccggcgtgtagcggccccaagacccgcgccgccgctgccgcgtgcgggggcggggagggcggggcgccaggagccgcggcggcgggagatgcgggcggctgcgggcacccggcgggctcggcttggccgccgccgccttctacgctccgccgcgggggtcgcagcggctgccgcgccgtcctcgagtttccagcgtgaggaggaggctgagggcggagaggcgcatcgtgttcgaggcggagaccgagggggagccccgcgcgcggcgtcgctcattgctatggacagtgctatcaccctgtggcagttccttcttcagctcctgcagaagcctcagaacaagcacatgatctgttggacctctaatgatgggcagtttaagcttttgcaggcagaagaggtggctcgtctctgggggattcgcaagaacaagcctaacatgaattatgacaaactcagccgagccctcagatactattatgtaaagaatatcatcaaaaaagtgaatggtcagaagtttgtgtacaagtttgtctcttatccagagattttgaacatggatccaatgacagtgggcaggattgagggtgactgtgaaagtttaaacttcagtgaagtcagcagcagttccaaagatgtggagaatggagggaaagataaaccacctcagcctggtgccaagacctctagccgcaatgactacatacactctggcttatattcttcatttactctcaactctttgaactcctccaatgtaaagcttttcaaattgataaagactgagaatccagccgagaaactggcagagaaaaaatctcctcaggagcccacaccatctgtcatcaaatttgtcacgacaccttccaaaaagccaccggttgaacctgttgctgccaccatttcaattggcccaagtatttctccatcttcagaagaaactatccaagctttggagacattggtttccccaaaactgccttccctggaagccccaacctctgcctctaacgtaatgactgcttttgccaccacaccacccatttcgtccataccccctttgcaggaacctcccagaacaccttcaccaccactgagttctcacccagacatcgacacagacattgattcagtggcttctcagccaatggaacttccagagaatttgtcactggagcctaaagaccaggattcagtcttgctagaaaaggacaaagtaaataattcatcaagatccaagaaacccaaagggttagaactggcacccacccttgtgatcacgagcagtgatccaagcccactgggaatactgagcccatctctccctacagcttctcttacaccagcatttttttcacaggtagcttgctcgctctttatggtgtcaccattgctttcatttatttgcccttttaagcaaatccagaatttatacactcaagtttgctttctgttacttaggtttgtcttagaaaggttatgtgtgactgtcatgtgaaagttaccccatttctcatcttaattaggattgctaaaatagaaagtttggagtattttcttaaaaaattcattgctctacaagtaaataaatattttgatttttctatttcctcctaaagaaagtacacacactctctcgctctctctcggtcttataaaactcgttggtgtcttataaaacaaacagtgataatctcaagttagaaaacagtaggtcctgagaaccataagaaaaatgactggtgtgatgttgagtaacaagttggtacagttactttagctatttattaacttgctcatctcatagaacattttaatagatttttcacacacctcattattaaaaaaaaacaaacatgctggtgtcttggttacccattattcctctgtacctgaattcaggttggtttttctatttggaaaagactttataaatgttggcttaaaaagaggttgagcaccagaatctcagaatttaccaccaaagaactcatccatgtaaccaaaaaccacttgtacccccaaaaactattgaaataaaaatttaaaaaatttt

SEQ ID NO: 386576 - DNA, 1119 bp, Homo sapiens
ggtgcttccttaattaactttaattgaagaagttttttttccagacagtgattataaaatacaccagagaggaaaaattattttggcttaaaattcagagcaatatgtattctgcaaggagctggtccaaacaccagaatcttaaacaattatacaaaaggcagatttcatgagcttttatcaattaaggaacaccttttccaaaggtggctcacgcctgtaatcccaacactttgggaggtcaaggtgggcagatcacctgaggtcaggagtttgagaccagcctggccaacatggcgaaaccccgtctctactaaatacacaaagattagcaaggcatggtggcacacgcctgtaatcccagctactcaggtgcctgaggcaggagaatcgcttgaacccggcaggcagaggttgcagtaagtcgagatcccatcactgcactccagcctgggtgacagagtgagattttgtctcaaaaaaaaattgatatattctctcttctttctctattacatattccatatcaatttttataagtctagaaataatacatttatcaaagaccaataaaattacttgaggttaaaaatattaaaagaaaataagtagactgggtgtagagatcaagaatgaaaattatatgaagctattttctgacctgtgtttgtgacaggtcatcaaacatattagacagttgctatgcctcaggcggtaattgcaataactcatgtctcgtcatgtcctctctgaaaaaacaatgtatgtgtggagattacagctagtcctgaaagatgttgccatgagtttacttcacagtctagaggccacaagtaccttgttcaatgaccttcagattgggttttctccggacccttaataccctctgattaaaagccttattatggggatgaaacgtttactgttatattggtaaagtttaggaccttaacaggtagtaggggttgccagtgctgccagattcaatatacagctagccagagttttcttttcaaagataactttacctctatctaagatctcagtccacacaaatataacagcaatagggctatttaccaagagttcaaagcatcatttgatcaaccgctttttttt

SEQ ID NO: 386577 - DNA, 852 bp, Homo sapiens
aacagtagtctaagccaagctagaatcagtttctttactgcagaatttcaggtctttaatatacattgtgaatctctaaatccacgggaaatgatataagaaaataaaagggtttcaaagttagtggctattggtcttctcatccattattaaatgtaacatttagttatatctctctgtatacctgttagagttataattactagtaatatctcctagtattttgtggttcattttcagaaaaactgatttgctctttttattctataggtaagaaaattgggcttgagagagaaaaataatttaatctcatggctaattaaaagcaaaggggattagaacccaagtgagggaactcccaggagactgtttttccattaccctttactattacctcccaatgtgaaattcactttccgaaattacattccttctaatgagcagtggtttgcttcagtctcaattaataattattaatttgtctttaatgtctcagtgttgtatatgtacgtgtatgtatgtttgcataagtttttagatgtaacagaggatattttgttcttgatccaatattttagggctgcatattagcttatctcaattttcgagctagaaaatcacataaaggtgaaatctatttcttcttttgcagcggctctaattagaggaaatcgtaaaaactgtgctcaattttctggctccctcgactggttgatcagcagattggaaagactggaagcttcttcaggtatgttttctagttttttccttgttgtgatagatcactcaaatttgcgcgttgtccccttaattctgcgtgggcgcgtgagcattaataataatatatcttta

SEQ ID NO: 386578 - DNA, 411 bp, Homo sapiens
tactagaaataaaaaagaaaattagttgggcgtggtggcactcgcctttagtgccagttattcgggaggctgaggtgggaggattccttgagcctgggagatggtggctgcaataaactatgattgcactactgcgcttcagcctgggcaacggagcaagactctgtctcaataaaattaaatgaaatacacaagtgaaattgtgagatgtaaatgaaaacaatgaaaggtttttttggactttccttacatgtgattcccgtctctttaaagcatgagacccaatatttttctgggcgtcagtgaaggctctgctcagtataagaaatggtactatgaattgatggtggaccacacagagccctttgtgacagccatttaggtaacagccatttaggtaacagacattag

SEQ ID NO: 386579 - DNA, 1139 bp, Homo sapiens
aacagtagtctaagccaagctagaatcagtttctttactgcagaatttcaggtctttaatatacattgtgaatctctaaatccacgggaaatgatataagaaaataaaagggtttcaaagttagtggctattggtcttctcatccattattaaatgtaacatttagttatatctctctgtatacctgttagagttataattactagtaatatctcctagtattttgtggttcattttcagaaaaactgatttgctctttttattctataggtaagaaaattgggcttgagagagaaaaataatttaatctcatggctaattaaaagcaaaggggattagaacccaagtgagggaactcccaggagactgtttttccattaccctttactattacctcccaatgtgaaattcactttccgaaattacattccttctaatgagcagtggtttgcttcagtctcaattaataattattaatttgtctttaatgtctcagtgttgtatatgtacgtgtatgtatgtttgcataagtttttagatgtaacagaggatattttgttcttgatccaatattttagggctgcatattagcttatctcaattttcgagctagaaaatcacataaaggtgaaatctatttcttcttttgcagcggctctaattagaggaaatcgtaaaaactgtgctcaattttctggctccctcgactggttgatcagcagattggaaagactggaagcttcttcaggcattctggaagttttacactgtgttttagtagaaagtccagaagctctaaatattattaaagaaggacatattaaatctattatctcacttttagacaaacatggaagaaatcacaaggttctggatgtcttgtgctcactctgtgtttgccacggggttgcagtccgttctaaccagcatctcatctgtgacaatctcctaccaggaagagacttgttattgcagacacgtcttgtgaaccatgtcagcagcatgagacccaatatttttctgggcgtcagtgaaggctctgctcagtataagaaatggtactatgaattgatggtggaccacacagagccctttgtgacagccatttaggtaacagccatttaggtaacagacattag

SEQ ID NO: 386580 - DNA, 713 bp, Homo sapiens
aaaataaaagggtttcaaagttagtggctattggtcttctcatccattattaaatgtaacatttagttatatctctctgtatacctgttagagttataattactagtaatatctcctagtattttgtggttcattttcagaaaaactgatttgctctttttattctataggtaagaaaattgggcttgagagagaaaaataatttaatctcatggctaattaaaagcaaaggggattagaacccaagtgagggaactcccaggagactgtttttccattaccctttactattacctcccaatgtgaaattcactttccgaaattacattccttctaatgagcagtggtttgcttcagtctcaattaataattattaatttgtctttaatgtctcagtgttgtatatgtacgtgtatgtatgtttgcataagtttttagatgtaacagaggatattttgttcttgatccaatattttagggctgcatattagcttatctcaattttcgagctagaaaatcacataaaggtgaaatctatttcttcttttgcagcggctctaattagaggaaatcgtaaaaactgtgctcaattttctggctccctcgactggttgatcagcagattggaaagactggaagcttcttcaggtatgttttctagttttttccttgttgtgatagatcactcctatttttctttgcttcgtatcctt

SEQ ID NO: 386581 - DNA, 454 bp, Homo sapiens
ttgaccacccatgtacattaaatgagcacggagtatgaaagttgcacgaaattttagaactctgaaggtaaaagtttctataggccaagttcctatacaaaaaaatctctaacaaaaggcctcatctaatgtttcagatggtatttggaaatgcttacgacaaattctgatctgtcattaacttgcttttatatctcagatagtaaagtggtaagaggacacccttgctttacctataattgttctataaatacaggataagtgaaggacacagattcattcatatcatatacttatgattaaaatacctaactaacatgttattggcttatttcatttaacttctatttacccaagcacttttatttaaatagttgtcaaaattaagtgaggaaaatttctaaaccaataaagcctctgtcccatctttttttaacctattatacgacatcta

SEQ ID NO: 386582 - DNA, 431 bp, Homo sapiens
ctggtgccaccagcttaaccacagcacacactgcaactcattcatacgagaaacacatgaaatgtaggctgtgttgagaaataaatagcagaattgtaattaggggccagaggaaaagggtgtgaagaccatgtcaagatttatgcctgtgagatgggttgcagaattgacctgagcagaccaggcttccgagggtcaaaaaagcgtctgaaggagagacactgagtgcattctgggttcacattcccctcctctactgcattcctgaattttctgcctcacagcggcatctgaagcagtggctgtatgtgtccttaaccacccttcaagtccacaacatgtcatattacctcattttggctccctgggactattttggaggacctgaattagtcatgtggggtacttgattaaaaatcacttgaacagcc

SEQ ID NO: 386583 - DNA, 596 bp, Homo sapiens
caaactctgggcccacgggccaaatctgacccatcacctgtttttgtaaagaaactttgatgctgggattacaggcgtgagccaccacactcggcctacgaacttctttattaatgtaatagcgcacatatacttaacttctggtttctacttaagagcatctcaataacctccgatatagaatacgatgaaaaatgaaacctgtgtgcataatgtgcttgtatctacctgtcagaagccctttgctttgatagcatttgctgcctcagtcttcctcatcacccaacctctctgggttgcttgttgtgataaacctaagtgcctccgtaaatggttagagcatgtgtttcttcgtctttgtgacttcccttgtctgggaataagactgcttgtacttctccccagctttgccctctttggcctactagtagcacaccccatcgatccagacctgtctggctctttgtaacatttacctggtcacatgataaagggtgctgagtgcttgccagtgtgggtccctgtcacttctcatgcatgtcctataccttaattttaccacatgtgcttctgcttcttaaaagccattcaaataa

SEQ ID NO: 386584 - DNA, 444 bp, Homo sapiens
ataaaatctttaaatgcccatttgagagggtattatgctgatatcttaactgagatcctttgtgggcaaaacaagtgttcctcattttttaactgtgaataacatcttgcatctgaaaattagaaaataagaggtttcaggttctctctgctaaatccggtttagctactaagaagtgccaaatcatagaactgactctgtgctctgggtggtgtggctttctctgcccttcagagattccaggtcagggttccaggttggcttcctaagtagaaatccatttgtcaaaaccagacaccctcagttagtgaatgtttagggcatgggtttctgcccatgcataggaaaggtcttcccaagtggggcagggctccacaaagaggaggatggccttggaggctggctgacatcctgctttatacctgaacatcttgcaggcagagc

SEQ ID NO: 386585 - DNA, 269 bp, Homo sapiens
tactcccgggtttataaaagatcagagcacttgtcactcttggtgcaggtagagtgagatagagtggttgagcagttcatttttctttataattacactccattaaccttccacatgagagctcccctgtgctttcataccagcagcaccaactggctgcatttgataaggctctacagagtctgcaagaccagcacatgtaacaaaaggaagactttaatactgcagacttaagcagaagctgaacgcagctctgttacttattggca

SEQ ID NO: 386586 - DNA, 317 bp, Homo sapiens
atttatccaaaagtgacaacgttttctcattttttttttttttgccttaggaagaaaatagtaagaagtagatttttcatgtcaagtgtggtgtactgctatttgaaagaaatacaatcttataacagtattatattttaaagacttgctgattctctgtaaggtcacaatatgttttacaagtttcagaagtagggtttcttcattatgagattcataatgttcacagtgtaatctaaaatttaagattctttcattcagtcatgtctttcccctttttgtagggggttggtggtgctaacaagtcatgtaaaagt

SEQ ID NO: 386587 - DNA, 236 bp, Homo sapiens
tttgatttgtatgaagcccaaggtattatcattcatcctttttgtgtcctaggaaatctttgtataacctaagattggaaggattatctcttgtgtttcctcttggagttttataattttttcccccacattttgcttgtgagatcactttaaaaagaaaagcttcacgaatttgcatgtcatctttatacgggggccgtgttatcttctgtgtaatgttccagttttaatatatg

SEQ ID NO: 386588 - DNA, 147 bp, Homo sapiens
  misc_feature (142)..(142): n is a, c, g, or t
ctgaggttttcaggcagctgactgctattgctgtaagcatttccatttggtgtcagctcttggtcattatatttgctttttcctaagttataatcttccatgcctttaagataccctggaagattcagtgagcattctctgnaagac

SEQ ID NO: 386589 - DNA, 493 bp, Homo sapiens
gagactacaggcatgcaccaccactcccagctccaaataaatattcttatcccattttactgatgcagaaaaatgtatggcccagagaagtaatgttaagtttattgggggatttaagttgtaaaaaattattttatcgaaccctaatgtaaactgtggactctgggtgatagtgatgtgtcagtgtaggttcatcgattatagcaaatgcatcattctggtgcaggatgttgacagtgggggaagctgtgtgtgtatgggagtagggagtctatgggaactcttctactttccactcaattttgctgtgagcctaaaactactctaaaaaatgaagtttattaatcaagaaaaaaattcttatgttttatgaatatatgggacagctattcatgtatgtggtaaaaatgaagagatttgttacagtactcggcaggagtgtgtctaatcgactgatattcatgtgtcacttataaaaactggcttcattatc

SEQ ID NO: 386590 - DNA, 493 bp, Homo sapiens
ttagttccaaaactttgatatggcttacaatggaataaaaaagccggaggagtttcagttactgattctcttctaataattctgtgatttgataccatagtgacagggatcaaaaacgtacttataattaatgatgctttcagttgatttgaaaacaaaatttatgtttaattcctccagctccttggttaaattaccatcttgcacataacctcctttccaatataaatgaattgaaaatatcaatctaaaaaataatttaaagccatataacaacatgcttattttggccctaattttactaggctgttttaacccacgttataaaaagaaaaaacataaagcagatggattaagtattataaatatatcataacattttgagtatttaaaaattatatttctaatcactgagctatttcttagtatttaagtatctgctattaaatttttttttggtcctaaatgggttaactttttaatgagattttgt

SEQ ID NO: 386591 - DNA, 217 bp, Homo sapiens
  misc_feature (6)..(6): n is a, c, g, or t
  misc_feature (21)..(21): n is a, c, g, or t
  misc_feature (25)..(25): n is a, c, g, or t
  misc_feature (27)..(29): n is a, c, g, or t
  misc_feature (31)..(31): n is a, c, g, or t
  misc_feature (199)..(199): n is a, c, g, or t
  misc_feature (202)..(202): n is a, c, g, or t
  misc_feature (204)..(204): n is a, c, g, or t
  misc_feature (206)..(206): n is a, c, g, or t
  misc_feature (209)..(209): n is a, c, g, or t
  misc_feature (213)..(214): n is a, c, g, or t
aaaggnctgaggatgggggcncttngnnnanggggtcccagtggagggctctccggaggaatgggttgtagggagggctgggctaggtggagcaggaggtgcaggacgacaagctggtgacgcccagcctcctacgtcatgtgtggccatgactgctccatgtgaccacagcacctggactttgcagacccctgtgctncanantntcngccnntcg

SEQ ID NO: 386592 - DNA, 1606 bp, Homo sapiens
tatataaattgtgaggctactacgtggccagagtagtacttgaacttaagtgggctgtattacagaactcatattcaatacacaatgctgtcattcaaagtggttgctttgcatagttacttctttaaattacttctaaacttcaacaagcaaagaatcactttggtgcatgaatggaatgccctgcacctcttcaaatgctcactccaagtccattcatgaggtttactctactcttgtgtatagcctctttggggatgttgtagaactactagagtctttttctagaaattcaatctttaggaaatcattgtcaaagaatggactttaaataggaagaacacttttttttttttttggctatagaatcgtcttaagtgcatgagatatacaaacaatacaaacacacccatgaatatatacacataatgtcaccatatcggtaacttgaggttgttcaaaatgcttatatttagaggaaaatataagagattatcatcattaatagctaccaatattaaatacctgtcatttatttttagtaacatctagaatggccttgatcacttaaaacatcttgccccagtcttacacagtccacaaatttttctttctgttcagaatctgcaaagcattactcttactctgtatctagaatctacctgttaacagctcatatgaataattaaagaaggtttaattttggaattgtacttaatccatcttactgctagtcactgttactgtgagatctgcatcagagagttctgacagtagaatcagcaaaatgaaaaacggctcacagcacaaactcttcctgctaggatttatcactacttaaaaatagcaaatggctgctgctagtatcttaaagacttctcctacctttgtttatctagttaaatttattattacttttcatacatacatactgagcagactgttgtagtaggtgttggtttaaaagttaactaagttactctgcttaatattttccaccattaataggtatattaatttttaggccctaatttcatatttaaaatgtgggctagaattgagacccaaattagtaaaccttgaagactcatgctgtagagtttcaaagtaactgccattgccacacactcttttcagccagccaggtcagaactggctgtgtcatactcttcctcgagcttgactctttggcagtgtcatactttttcccggttgtaggcagaatttacaaccatctaacaaaaagactaaggacccttggattgaaagtttcctaaaatcttttctttttctgggctttttataatagttcaccatcggcttatctaagagataatctaacaatattatatactgtacaagacattatttttctcaaactctgctttttaaaactactattacaaaaaaccctaattactactaaaaaaaacttcataaaaataattattgaatgtgactgcaatttgaaacctcaaaaaattaatatttaatggaataaaatgtataacctaaaaagttttatttagtacaacagaaatgcttactaaaaatcaaaatgttttaaatcctagattatttgacacattttggcttagaaattatt

SEQ ID NO: 386593 - DNA, 965 bp, Homo sapiens
aatgctttataaccattttggaaaaaagaactgtgtagatacacaatggaataggctcctgcatatcagaggggactgacgcatatccacaggttcctctgaaactctgcctgaatggctctagattagacaaggtctcagacccaccctagctctggccttcaacagtcccacaggttctggtctgctctgaagttgccatagtttagttctaaagcttccctctcaccaacctgccctaattgtcatatattacctgctctttccaataagtctcctgctttcctgtccattggccaaattgttacacagccttaccagccataaacataagtgctaccttatatacccatttcattcttaagagtatacttggatattgatacaattaactttgtgtctaattaatacatcttcaagaaattagatgcactaagtctacaaacccttttgaaattttaaggatgtaaaatttgcctgaaaacatcttgctcttgaaaagcttcagattagctcagaccataccatctgcattgatgctgctctgaaactaccaagaaaaggcaatgtagaactctgattggcctgggcttagctcagaccataccatctgcattgatgctgctctgaaactaccaagaaaaggcaatgtagaactctgattggcctgggctccatgtccctttgttccctaacctctaagctccacttcagctccatagctgcaaagaaactcatgacgtgcatcaagagtcaccctttggtcccaaagtgaacactatttgccctgatgcctgcccctgccgtgtctgcgtactgctcaaatatacccatagtgttacacgcaggtaggagagactgttgagaagttctgctatcagaggtgaggacagaggtggtttgttactgatctttagcagtctgagaatcttatcattgtgtgtggcatatgataagaacaagga

SEQ ID NO: 386594 - DNA, 487 bp, Homo sapiens
catgtgagaatcctttgagaccataaaatactttatgattacagctttattattacttttttttttaagcctaattcattctgtggacgcctgcttatcttcatagacagcttcagctgccttgaagttgtcccaaatacagtttggacaaaagctttggagtgcttttctttggagcatttgttaaagaaatcctttttcatattatttgcaaactacagaaaaaaaaaatcaaactctcaaaaagattgtattctaataaagcatgttgcagttcatatcaacgtgtagggaaggtttgaaaaaaggagttacattttgtgccttttcttctgtgtgtatttttcttggtatttcacagtggagagaataacggtacctctagtcatgcctgattgctgtactttaataaaggaacacaggccgaagaaaatgccaaaagtgaagcaggaagaattgtggagggggaagcaagggagaaaaaaaa

SEQ ID NO: 386595 - DNA, 360 bp, Homo sapiens
ggccagagacatataccccataaccctgggggtacttcaggaaccgtgagtgcacagaaggacagcgtccctggaaagggggtctggtattaagtctaaacaaatacataataacaattgcagccatggtaggtaacatttaggtaacatctatatgttactaagcactatatgttgctaagcactgttcttactgttttgcatatgataattcattgaatcctcatagccactctacaagctgggtgctttcataagcttcccttcacagatgtgagagccgaggtatgcagaggttaagttctaaagacaaaacttaacgttaacttttctttctccattaattttagttatggtttt

SEQ ID NO: 386596 - DNA, 1017 bp, Homo sapiens
gaggcggatcgggtattgagtccatggagcgagctgagagctagagtacagaacctgctaaggccatcaaacctatcgatcggaagtcagtccatcagatttgctctgggccggtggtactgagtctaagcactgcggtgaaggagttagtagaaaacagtctggatgctggtgccaccaatattgatctaaagcttaaggactatggagtggatctcattgaagtttcagacaatggatgtggggtagaagaagaaaactttgaaggcttaacgatgtcaccatttctacctgccacgcatcggcgaaggttgggactcgactggtgtttgatcacgatgggaaaatcatccagaaaaccccctacccccaccccagagggaccacagtcagcgtgaagcagttattttctacactacctgtgcaccataaggaatttcaaaggaatattaagaagacgtgcctgtttccccttcgccttctgccgtgattgtcagtttcctgaggcctccccagccatgcttcctgtacagcctgcagaactggaccattgcaagctgcagaaaatgagaagaccctactgaccagcccaagaagacagatgacaagatactgaggatggccgtataagaaaataaacaacttgctaaaactgctgaaactccctctgcttgtgagatttaaaaaaactggctgaaattggttggaaccaacatgtccaatggagtctgaatagaaagagcttgctgacatcacagcccgaatttccaccacatttcatactaactccccctgaatttgcatatgcaaaccacaagcaagcatgatcaaacagacaactgcgcgtgtccgaggactttccagatctcccctttccttccaccaatcacttactaatctgagaatccatcccctaataaaatcactgccttaaagcctgcacaggaagacaaatttgagctggactcagtgtctctttattagtcgacttgcaataaaaaagctttcttttccccc

SEQ ID NO: 386597 - DNA, 969 bp, Homo sapiens
gaggcggatcgggtattgagtccatggagcgagctgagagctagagtacagaacctgctaaggccatcaaacctatcgatcggaagtcagtccatcagatttgctctgggccggtggtactgagtctaagcactgcggtgaaggagttagtagaaaacagtctggatgctggtgccaccaatattgatctaaagcttaaggactatggagtggatctcattgaagtttcagacaatggatgtggggtagaagaagaaaactttgaaggcttaacgatgtcaccatttctacctgccacgcatcggcgaaggttgggactcgactggtgtttgatcacgatgggaaaatcatccagaaaaccccctacccccaccccagagggaccacagtcagcgtgaagcagttattttctacactacctgtgcaccataaggaatttcaaaggaatattaagaaggtgatctcagccctcctccaggcttcgattataacttacaggattgtgattcacacatttcagtttccaccacaggcccctccagacatgtccatctgcctgctgtgttgacttttccctttggagtcttgaggcagctacaagcttactgaccagaaatgaactcaagctctccccgaagcctggtcctcttccaggatcagccagcctggaagatggcactgtcatccaccctgttctcaggcctgccacccaggagtcaaccttagccccatctaattgtcagaggcatctgaaccacagcaactccatcttgagtaggggatgggtaaaatgaggctgagacctgctgggctgcattcccagacagccaaggcattagccacaggataagataggcggtcggtacaagacacaggtcataaagaccttgctgataaaacagttggcagtaaagaagccagccaaaacccactaaaaccaagatggcaacgagagtgacctctggtcgt

SEQ ID NO: 386598 - DNA, 553 bp, Homo sapiens
tgaactcggcagacaaggaccatttttcacacccctatgattgcatccccaaccagttagcagcacccctaccctagccccctgcccaccaaattatcattacctctgaattctcagggagatcaagttgagtaataataaaactccagtctctcattcagctggctgtatgtgaagtaagctctttctctgttgcaattgccctgtcttggtaagtcagctctctctggacagccagcaaaatgaactcattgcacacggttacactctcatctctacctgctgtagactcacctcctctattggagctcatcaaggctgggtctttcctgttctcattttattctctctccttaggtgatctcagccctcctccaggcttcgattataacttacaggattgtgattcacacatttcagtttccaccacaggcccctccagacatgtccatctgcctgctgtgttgacttttccctttggagtcttgaggcagctacaagcttactgaccagaaatgaactcgaacccagtgtgcgatcctctagagcaccg

SEQ ID NO: 386599 - DNA, 575 bp, Homo sapiens
gaggcggatcgggtattgagtccatggagcgagctgagagctagagtacagaacctgctaaggccatcaaacctatcgatcggaagtcagtccatcagatttgctctgggccggtggtactgagtctaagcactgcggtgaaggagttagtagaaaacagtctggatgctggtgccaccaatattgatctaaagcttaaggactatggagtggatctcattgaagtttcagacaatggatgtggggtagaagaagaaaactttgaaggcttaacgatgtcaccatttctacctgccacgcatcggcgaaggttgggactcgactggtgtttgatcacgatgggaaaatcatccagaaaaccccctacccccaccccagagggaccacagtcagcgtgaagcagttattttctacactacctgtgcaccataaggaatttcaaaggaatattaagaagacgtgcctgtttccccttcgccttctgccgtgattgtcagtttcctgaggcctccccagccatgcttcctgtacagcctgcagaactgtgagtcaattaaacctcttttcttcataaa

SEQ ID NO: 386600 - DNA, 554 bp, Homo sapiens
acggcctgagactgtgccgacagcagaattgattcctatgatcctgaatgtaaagtctgagtatcaaatctgcatctcttgggaccattgcaagctgcagaaaatgagaagaccctactgaccagcccaagaagacagatgacaagatactgaggatggccgtataagaaaataaacaacttgctaaaactgctgaaactccctctgcttgtgagatttaaaaaaactggctgaaattggttggaaccaacatgtccaatggagtctgaatagaaagagcttgctgacatcacagcccgaatttccaccacatttcatactaactccccctgaatttgcatatgcaaaccacaagcaagcatgatcaaacagacaactgcgcgtgtccgaggactttccagatctcccctttccttccaccaatcacttactaatctgagaatccatcccctaataaaatcactgccttaaagcctgcacaggaagacaaatttgagctggactcagtgtctctttattagtcgacttgcaataaaaaagctttcttttccccc

SEQ ID NO: 386601 - DNA, 360 bp, Homo sapiens
gagcaggactccatctcagtcaatcaatcaatcaatcaatctcagcggttgaactacccttgacatggttcagctctgtatccacacccaaatctcatgtcaaattgtaattcccagtgttgtgggagggacctggtgggaggtgattggctcatgggggccgacttcccccttgctgttctcgtgatattgagtgagcgcttgtgggatctggttgtttaaaagcgtgcagccctcccacttcactctctctgtctctcctgctccaacatggccagacgtgcctgtttccccttcgccttctgccgtgattgtcagtttcctgaggcctccccagccatgcttcctgtacagcctgca

SEQ ID NO: 386602 - DNA, 726 bp, Homo sapiens
gaggcggatcgggtattgagtccatggagcgagctgagagctagagtacagaacctgctaaggccatcaaacctatcgatcggaagtcagtccatcagatttgctctgggccggtggtactgagtctaagcactgcggtgaaggagttagtagaaaacagtctggatgctggtgccaccaatattgatctaaagcttaaggactatggagtggatctcattgaagtttcagacaatggatgtggggtagaagaagaaaactttgaaggcttaacgatgtcaccatttctacctgccacgcatcggcgaaggttgggactcgactggtgtttgatcacgatgggaaaatcatccagaaaaccccctacccccaccccagagggaccacagtcagcgtgaagcagttattttctacactacctgtgcaccataaggaatttcaaaggaatattaagaaggagacttacccaaccgtgtccgtatacccctcgcgcctctggcgcgaatgccaagtatcctgcagggcgtcccagacaggagatcccgggcacaccggggcaccgcggcggtcaataagcgctcttgcttccattacaccactaaacgacaacacccgaggggggggccggttccaattgccccaaagtgagtcgttttacctccctgccccagctttcacggtgtgtctgggcccgtggttccccacttatcgcttgggttccctttg

SEQ ID NO: 386603 - DNA, 631 bp, Homo sapiens
atcagaagggaatctggtgatatgtagcagaagccaccagggcctgctccaccagggagaacgcggagcagcagagtcagcggaaggagtgccagtgcgtacacctcctctctgtttacaaagcaaagctgctcgtaagaagtgcgcttgaggaaagagtgcattttacatttcatcacttcatcactctgtttattaaaatctttgttgacttgatatatacattcagaaaagtgcatgtatcaaaagctcactgatttttttatacactggaaacacttgtgtgaaataccactgaaggattcactttaaaatggttgtgtattaatgcaaatttcacctcaacaaacaaaaaaagccccagaactcaagcagccccgcagagcctccttgagctgcattttgttggaagtgtcggggtggaatcaccagggtcaacggtttcccatttccactcccgctggcacgtccgcagacccctgccggtcccacacgcaccccaacacttgctgtcttctcatttctgctgggtgggtggtagtatgatattgtggctttactttgcatttccttgatgtttaatgaacctgagcaccttttcatatgcttctcaggcatttgaagttttata

SEQ ID NO: 386604 - DNA, 458 bp, Homo sapiens
ccggagggggcggccgcggagcactggttggagcgccgcgaagcgcccgagcctcttgccttcgcgggcggcgccctggccgccggcagccttgtggccggtgccccgatccgccgcgctccggacccgggcaggcggggcgcgcccgctgcgcgcgggatgtggcagcccagacggccctggccccgcgtgccctggcgctgggcgctggcgctgctggccctggttggcgcggggctgtgccacgccggcccgcagcccgggtatcccgcgcggcccagcgccaggaacaagtaagtgcgcgccccttggctggccccaaaccgcctacccctccccggcccccagttgagccccagagctgccctgccaaagacgacgagcggcagccgggggcctcccttggacttccccgggcggctccctctgcgggggaccgcgcgctccgcagccggcgc

SEQ ID NO: 386605 - DNA, 5907 bp, Homo sapiens
ccggagggggcggccgcggagcactggttggagcgccgcgaagcgcccgagcctcttgccttcgcgggcggcgccctggccgccggcagccttgtggccggtgccccgatccgccgcgctccggacccgggcaggcggggcgcgcccgctgcgcgcgggatgtggcagcccagacggccctggccccgcgtgccctggcgctgggcgctggcgctgctggccctggttggcgcggggctgtgccacgccggcccgcagcccgggtatcccgcgcggcccagcgccaggaacaagaactggtgcgcctacatcgtgaacaagaatgtgagctgctccgtgctggagggaagtgagagttttattcaggctcagtacaactgtgcctggaaccagatgccctgtccgtcggcgctggtgtatcgagtgaacttcagacctagatatgtcactaggtataagacagtgacacagttggaatggaggtgctgtcctggctttagagggggagattgccaagaaggtcccaaagaccccgtgaagaccctccgccccacgccggctcggcctcgaaatagcttgaagaaagccacagataatgaacccagccaattctcagagcccaggaagactttgtccccaactggtacagcacaaccaagctggggggtagatccaaaagaggggcctcaggaacttcaggaaaagaagatacaggtgctagaggagaaggttcttcgactcacaaggacggttcttgacctccagtcttcccttgctggagtgagtgaaaatctcaaacatgccactcaggatgatgccagtagaacacgggcaccagggctcagcagccagcaccccaagcctgacaccactgttagtggagacacagaaacgggccagagtcctggtgtcttcaacactaaggaatctggcatgaaggacatcaagtctgaattggctgaagtcaaagatactctaaagaacaaaagtgacaagctggaagagctggatggaaaagtgaagggctacgaagggcagctcagacagctccaggaagcagctcagggcccgacggtgaccatgacaaccaacgaactctaccaagcctatgtggacagtaagatcgacgccctgagagaggagctcatggagggcatggacagaaagctggctgacctgaaaaactcatgtgagtacaagctcactggcctccagcagcagtgtgatgactatgggagcagctacctgggagtgatagagctcataggggagaaggaaacaagcctgagaaaagaaataaataacctccgagcccggctacaggagccttcagcccaggcaaattgctgcgacagtgaaaagaatggtgacattggtcaacagatcaagacattggaccagaaaatcgagagagttgctgaagccaccagaatgctgaatggaagactggacaatgagtttgaccgccttatagttccagagccagatgtggattttgatgcaaaatggaatgaactcgatgcaaggatcaatgtgacggagaagaacgctgaagaacattgcttttacattgaggaaacccttcggggcgccattaatggagaggtgggtgacttgaagcagcttgttgatcagaaaatacagtctctggaagaccgtctggggagcgttctcctacagatgaccaataacactggtgcagagctcagtcccccaggggcagcagccctgccaggagtgtcagggtcaggagatgaacgggtcatgatggaattaaaccacctgaaggacaaagttcaagttgttgaagacatttgcctgctgaacatccagggaaagcctcatgggatggaaggtgccttgccaaacagggaagaccgcgcagtacgcgacagcctgcaccttttgaaatctctcaacgacacgatgcacaggaagtttcaagaaaccgaacaaaccatccagaaacttcaacaggattttagttttctttattctcaattaaaccacacagaaaatgatgtgactcatcttcaaaaggaaatgagcaattgtagagcaggtgaaaacgctggcatgggtaggttcactaaggtgggtgagcaagaaaggacagtggacaccctgccgtccccccagcaccccgtggctcattgctgcagtcagctggaggagaggtggcagaggttgcagagccaggtcatctcggagctggatgcttgtaaggaatgcacgcagggggtccagagggaggtctccatggtggagggcagggtgtctcatatggagaaaacttgcagcaagctggactctatctcaggaaatcttcagaggatcaaggaggggctcaacaagcatgtcagcagcctgtggaactgtgtcaggcagatgaacggaacgctcaggtcgcattccagagacatttctggcctgaagaattcagtccagcagttctacagccacgtcttccagatttctactgatttgcaagatctggtcaaatttcagccatcagcaaaggcgccctcgcccccgccgcccgcagaggccccgaaggagccgctgcagcccgagcccgccccgccgaggcccagcggccccgcaaccgcagaggaccctgggcgacggcccgtcctgccccagcggccccccgaggagaggccgccccagccgccaggctccaccggggtcatcgcggagacgggccaggccgggccccccgcaggcgcaggcgtgtctgggcggggtctgccgcggggcgtggacggccagaccgggagcggcaccgtccccggcgcagaaggcttcgcgggcgcaccaggatacccgaagtcacctcctgtagcttccccaggagctccggtgccttctctggtgtctttttctgcggggctcacccagaagcctttccccagtgatgggggcgttgtcctctttaacaaagtgctggtgaacgacggggatgtttacaaccccagcaccggggtcttcacggctccttatgatgggcgctacctgatcacggccaccctcacccccgagagagacgcctacgtggaagcagtgctgtcggtctccaacgccagcgtggcccagctgcataccgctgggtacaggagagagttcctggaataccaccgccctccaggagctttgcatacctgcgggggcccgggggcattccacctcatcgtgcacctgaaggcgggagatgcagtcaacgtcgtggtgactgggggcaagctggctcacacagactttgatgaaatgtactccacatttagtggggttttcttatatcctttcctttcccacctctaaggtggctggggagatgtcaggggaaagatagatagttgtaaaaactctaaagctttaatatattcggtttgtatgtaatggaagcacggggctagagtttccacataggccccaacataaaggccttccctcgctgttgaggccaccatgccttactgcatccagccaggctgcagggagtgaggcacacggtgaacatggccactgacttttctgccactctaactggacaactggaagacttggaaaggcctccacctgtatctacactctgagggccctggactgggcctgagcttgccacagaggctccgtctgactgtgggctgggaggagggaggcaggggagagccggtcacggtggctggtctttactgcagggcagcactgtggccagctgtctgtctttacactgcatgcagaagtttaaacactgaagtgccgaagtggcccgtgccgccgcacagagaccccgactttagtttgggctgttccacgcttggctcaccattgccgcctgggacttaacctgctcaggcgggccttcgcccagctgcaaatagggatgcgttagagactgttcccaaagcttgttgggctccttaaatggcatgtacaatttaagtgcaaagacagggagtgtcaataaagatggaaagccatttccagttaacttttgttaatttaagtgtggtcccttacagatcgggagttgttgctaaaaagcaaactgaagaaatgttttgtttcaaaaagggctacagaaagtaaccttgagtaaaattaatctcagctacaaaactgttacccctccgcatccaagctatacacttgggttttgtttctggcttgtgaagacggaccagatgtgcacggaggtcaaggccccatgtcatctgcagctggagcggctcctctggggatgctgcactcagatcccacagcagctgcccaggctaacttgatccctgctgcttcactgcaccaatctccagcagacacagctcgccgagctcttgggtttctaagcagcaggaagctcaacctaacgctggccacacgctgacagctgagcccatctgagaacacggcatcttcacacagcgagacgcctccactgaggggaggcccgggagtatcaatctgtcaccagtggccacggagacctctcagcacccttagttcaaggtagtctctgtggatcaggttggtaacacctactggttaatcaagtcccactggggaaaggtttggacggtagaatcaagagctgcagtttccttggcccacaagatgctcttatgctgtaaaaaaaatgctttaagaattgtttgcaaatgaatttacagggtggccactggacacttcagagttcctatttactccccccgccacagctaggaagaccagcaagaactaaaggtttgccgttttactatttaaaatgtggacctctttgtccaggagcgggagggagaatggcatctcaccccattacaacagctggggaactggctaaagagagctgtcagagagtatccttggctgtcctaggaatgactcatggaaagcgccccagtgcagcagtgttttcaggaaaacccagtgggcacgcgccatcgccctctcctctcctctcacgctccttttgaaaagaccgcactcggcgcccaaggggacgtgctcaagagctgcaggggcagggcccaggcaaaaggtgggtgatgactacctgctgctttccctactccgtagatgggtctggaacatcgggtaaaacccagtcctcctctcagtgcatctctactcaccaacaatggtgaatctcagctctgtgtattcaagacaggcaaaacagaatatgcctcattatggctggagcgtgcctctactttgagataaagctggatgacaggtggatcctggcccacttaggagacatctttagaaagggaaaggctgtctttttgtacaggtagtagaacaacaaggtcagctgagcttaaggctgtggggttcgaagcagcccttcaagaagtcatcacccctgaagtagtgcctgcgagtcagtcagaggcataccaaaccctgagacagaatcaggcacaagttcacaactttttttttttttggggggagacagtcctactctgtcgcccaggctggagtgcagtagcgcgatctcagctcactgcaacctccgcctcccgggttcaagcaattctcctacctcagcctcccgagtagcggggactacaggtgcatgccgccacgcccggttaattttttgtattttagtagagatggggtttcaccgtgttgcccaggctggtcgcgaactcctgagctcagccaatccgcccacctcggcctcccaaagtgctgggattacaggtatgagccaccatgcccagccaagttcacaacttctgatatcaagttgttgctgagaaaaggtcaggacacttcttaagtagagaaggactgtgacatcccctccaaacctccatgtaacactaacaaatggcctcatttacacgattaaaaacaaaatggtatcgtcaataaatgcaaaccttaaactgc

SEQ ID NO: 386606 - DNA, 5723 bp, Homo sapiens
  misc_feature (15)..(15): n is a, c, g, or t
  misc_feature (35)..(35): n is a, c, g, or t
  misc_feature (77)..(77): n is a, c, g, or t
tcccttgcggccgcntcccggggggccgggagcgngcctgtcggaaggtgggaggcggagtcgctcggcatctgggnagagaccaaaggaatgagtcattggaaatgctgaactggtgcgcctacatcgtgaacaagaatgtgagctgctccgtgctggagggaagtgagagttttattcaggctcagtacaactgtgcctggaaccagatgccctgtccgtcggcgctggtgtatcgagtgaacttcagacctagatatgtcactaggtataagacagtgacacagttggaatggaggtgctgtcctggctttagagggggagattgccaagaaggtcccaaagaccccgtgaagaccctccgccccacgccggctcggcctcgaaatagcttgaagaaagccacagataatgaacccagccaattctcagagcccaggaagactttgtccccaactggtacagcacaaccaagctggggggtagatccaaaagaggggcctcaggaacttcaggaaaagaagatacaggtgctagaggagaaggttcttcgactcacaaggacggttcttgacctccagtcttcccttgctggagtgagtgaaaatctcaaacatgccactcaggatgatgccagtagaacacgggcaccagggctcagcagccagcaccccaagcctgacaccactgttagtggagacacagaaacgggccagagtcctggtgtcttcaacactaaggaatctggcatgaaggacatcaagtctgaattggctgaagtcaaagatactctaaagaacaaaagtgacaagctggaagagctggatggaaaagtgaagggctacgaagggcagctcagacagctccaggaagcagctcagggcccgacggtgaccatgacaaccaacgaactctaccaagcctatgtggacagtaagatcgacgccctgagagaggagctcatggagggcatggacagaaagctggctgacctgaaaaactcatgtgagtacaagctcactggcctccagcagcagtgtgatgactatgggagcagctacctgggagtgatagagctcataggggagaaggaaacaagcctgagaaaagaaataaataacctccgagcccggctacaggagccttcagcccaggcaaattgctgcgacagtgaaaagaatggtgacattggtcaacagatcaagacattggaccagaaaatcgagagagttgctgaagccaccagaatgctgaatggaagactggacaatgagtttgaccgccttatagttccagagccagatgtggattttgatgcaaaatggaatgaactcgatgcaaggatcaatgtgacggagaagaacgctgaagaacattgcttttacattgaggaaacccttcggggcgccattaatggagaggtgggtgacttgaagcagcttgttgatcagaaaatacagtctctggaagaccgtctggggagcgttctcctacagatgaccaataacactggtgcagagctcagtcccccaggggcagcagccctgccaggagtgtcagggtcaggagatgaacgggtcatgatggaattaaaccacctgaaggacaaagttcaagttgttgaagacatttgcctgctgaacatccagggaaagcctcatgggatggaaggtgccttgccaaacagggaagaccgcgcagtacgcgacagcctgcaccttttgaaatctctcaacgacacgatgcacaggaagtttcaagaaaccgaacaaaccatccagaaacttcaacaggattttagttttctttattctcaattaaaccacacagaaaatgatgtgactcatcttcaaaaggaaatgagcaattgtagagcaggtgaaaacgctggcatgggtaggttcactaaggtgggtgagcaagaaaggacagtggacaccctgccgtccccccagcaccccgtggctcattgctgcagtcagctggaggagaggtggcagaggttgcagagccaggtcatctcggagctggatgcttgtaaggaatgcacgcagggggtccagagggaggtctccatggtggagggcagggtgtctcatatggagaaaacttgcagcaagctggactctatctcaggaaatcttcagaggatcaaggaggggctcaacaagcatgtcagcagcctgtggaactgtgtcaggcagatgaacggaacgctcaggtcgcattccagagacatttctggcctgaagaattcagtccagcagttctacagccacgtcttccagatttctactgatttgcaagatctggtcaaatttcagccatcagcaaaggcgccctcgcccccgccgcccgcagaggccccgaaggagccgctgcagcccgagcccgccccgccgaggcccagcggccccgcaaccgcagaggaccctgggcgacggcccgtcctgccccagcggccccccgaggagaggccgccccagccgccaggctccaccggggtcatcgcggagacgggccaggccgggccccccgcaggcgcaggcgtgtctgggcggggtctgccgcggggcgtggacggccagaccgggagcggcaccgtccccggcgcagaaggcttcgcgggcgcaccaggatacccgaagtcacctcctgtagcttccccaggagctccggtgccttctctggtgtctttttctgcggggctcacccagaagcctttccccagtgatgggggcgttgtcctctttaacaaagtgctggtgaacgacggggatgtttacaaccccagcaccggggtcttcacggctccttatgatgggcgctacctgatcacggccaccctcacccccgagagagacgcctacgtggaagcagtgctgtcggtctccaacgccagcgtggcccagctgcataccgctgggtacaggagagagttcctggaataccaccgccctccaggagctttgcatacctgcgggggcccgggggcattccacctcatcgtgcacctgaaggcgggagatgcagtcaacgtcgtggtgactgggggcaagctggctcacacagactttgatgaaatgtactccacatttagtggggttttcttatatcctttcctttcccacctctaaggtggctggggagatgtcaggggaaagatagatagttgtaaaaactctaaagctttaatatattcggtttgtatgtaatggaagcacggggctagagtttccacataggccccaacataaaggccttccctcgctgttgaggccaccatgccttactgcatccagccaggctgcagggagtgaggcacacggtgaacatggccactgacttttctgccactctaactggacaactggaagacttggaaaggcctccacctgtatctacactctgagggccctggactgggcctgagcttgccacagaggctccgtctgactgtgggctgggaggagggaggcaggggagagccggtcacggtggctggtctttactgcagggcagcactgtggccagctgtctgtctttacactgcatgcagaagtttaaacactgaagtgccgaagtggcccgtgccgccgcacagagaccccgactttagtttgggctgttccacgcttggctcaccattgccgcctgggacttaacctgctcaggcgggccttcgcccagctgcaaatagggatgcgttagagactgttcccaaagcttgttgggctccttaaatggcatgtacaatttaagtgcaaagacagggagtgtcaataaagatggaaagccatttccagttaacttttgttaatttaagtgtggtcccttacagatcgggagttgttgctaaaaagcaaactgaagaaatgttttgtttcaaaaagggctacagaaagtaaccttgagtaaaattaatctcagctacaaaactgttacccctccgcatccaagctatacacttgggttttgtttctggcttgtgaagacggaccagatgtgcacggaggtcaaggccccatgtcatctgcagctggagcggctcctctggggatgctgcactcagatcccacagcagctgcccaggctaacttgatccctgctgcttcactgcaccaatctccagcagacacagctcgccgagctcttgggtttctaagcagcaggaagctcaacctaacgctggccacacgctgacagctgagcccatctgagaacacggcatcttcacacagcgagacgcctccactgaggggaggcccgggagtatcaatctgtcaccagtggccacggagacctctcagcacccttagttcaaggtagtctctgtggatcaggttggtaacacctactggttaatcaagtcccactggggaaaggtttggacggtagaatcaagagctgcagtttccttggcccacaagatgctcttatgctgtaaaaaaaatgctttaagaattgtttgcaaatgaatttacagggtggccactggacacttcagagttcctatttactccccccgccacagctaggaagaccagcaagaactaaaggtttgccgttttactatttaaaatgtggacctctttgtccaggagcgggagggagaatggcatctcaccccattacaacagctggggaactggctaaagagagctgtcagagagtatccttggctgtcctaggaatgactcatggaaagcgccccagtgcagcagtgttttcaggaaaacccagtgggcacgcgccatcgccctctcctctcctctcacgctccttttgaaaagaccgcactcggcgcccaaggggacgtgctcaagagctgcaggggcagggcccaggcaaaaggtgggtgatgactacctgctgctttccctactccgtagatgggtctggaacatcgggtaaaacccagtcctcctctcagtgcatctctactcaccaacaatggtgaatctcagctctgtgtattcaagacaggcaaaacagaatatgcctcattatggctggagcgtgcctctactttgagataaagctggatgacaggtggatcctggcccacttaggagacatctttagaaagggaaaggctgtctttttgtacaggtagtagaacaacaaggtcagctgagcttaaggctgtggggttcgaagcagcccttcaagaagtcatcacccctgaagtagtgcctgcgagtcagtcagaggcataccaaaccctgagacagaatcaggcacaagttcacaactttttttttttttggggggagacagtcctactctgtcgcccaggctggagtgcagtagcgcgatctcagctcactgcaacctccgcctcccgggttcaagcaattctcctacctcagcctcccgagtagcggggactacaggtgcatgccgccacgcccggttaattttttgtattttagtagagatggggtttcaccgtgttgcccaggctggtcgcgaactcctgagctcagccaatccgcccacctcggcctcccaaagtgctgggattacaggtatgagccaccatgcccagccaagttcacaacttctgatatcaagttgttgctgagaaaaggtcaggacacttcttaagtagagaaggactgtgacatcccctccaaacctccatgtaacactaacaaatggcctcatttacacgattaaaaacaaaatggtatcgtcaataaatgcaaaccttaaactgc

SEQ ID NO: 386607 - DNA, 4758 bp, Homo sapiens
ctcccttccaccagcctcccttcccagctgaaaaactcatgtgagtacaagctcactggcctccagcagcagtgtgatgactatgggagcagctacctgggagtgatagagctcataggggagaaggaaacaagcctgagaaaagaaataaataacctccgagcccggctacaggagccttcagcccaggcaaattgctgcgacagtgaaaagaatggtgacattggtcaacagatcaagacattggaccagaaaatcgagagagttgctgaagccaccagaatgctgaatggaagactggacaatgagtttgaccgccttatagttccagagccagatgtggattttgatgcaaaatggaatgaactcgatgcaaggatcaatgtgacggagaagaacgctgaagaacattgcttttacattgaggaaacccttcggggcgccattaatggagaggtgggtgacttgaagcagcttgttgatcagaaaatacagtctctggaagaccgtctggggagcgttctcctacagatgaccaataacactggtgcagagctcagtcccccaggggcagcagccctgccaggagtgtcagggtcaggagatgaacgggtcatgatggaattaaaccacctgaaggacaaagttcaagttgttgaagacatttgcctgctgaacatccagggaaagcctcatgggatggaaggtgccttgccaaacagggaagaccgcgcagtacgcgacagcctgcaccttttgaaatctctcaacgacacgatgcacaggaagtttcaagaaaccgaacaaaccatccagaaacttcaacaggattttagttttctttattctcaattaaaccacacagaaaatgatgtgactcatcttcaaaaggaaatgagcaattgtagagcaggtgaaaacgctggcatgggtaggttcactaaggtgggtgagcaagaaaggacagtggacaccctgccgtccccccagcaccccgtggctcattgctgcagtcagctggaggagaggtggcagaggttgcagagccaggtcatctcggagctggatgcttgtaaggaatgcacgcagggggtccagagggaggtctccatggtggagggcagggtgtctcatatggagaaaacttgcagcaagctggactctatctcaggaaatcttcagaggatcaaggaggggctcaacaagcatgtcagcagcctgtggaactgtgtcaggcagatgaacggaacgctcaggtcgcattccagagacatttctggcctgaagaattcagtccagcagttctacagccacgtcttccagatttctactgatttgcaagatctggtcaaatttcagccatcagcaaaggcgccctcgcccccgccgcccgcagaggccccgaaggagccgctgcagcccgagcccgccccgccgaggcccagcggccccgcaaccgcagaggaccctgggcgacggcccgtcctgccccagcggccccccgaggagaggccgccccagccgccaggctccaccggggtcatcgcggagacgggccaggccgggccccccgcaggcgcaggcgtgtctgggcggggtctgccgcggggcgtggacggccagaccgggagcggcaccgtccccggcgcagaaggcttcgcgggcgcaccaggatacccgaagtcacctcctgtagcttccccaggagctccggtgccttctctggtgtctttttctgcggggctcacccagaagcctttccccagtgatgggggcgttgtcctctttaacaaagtgctggtgaacgacggggatgtttacaaccccagcaccggggtcttcacggctccttatgatgggcgctacctgatcacggccaccctcacccccgagagagacgcctacgtggaagcagtgctgtcggtctccaacgccagcgtggcccagctgcataccgctgggtacaggagagagttcctggaataccaccgccctccaggagctttgcatacctgcgggggcccgggggcattccacctcatcgtgcacctgaaggcgggagatgcagtcaacgtcgtggtgactgggggcaagctggctcacacagactttgatgaaatgtactccacatttagtggggttttcttatatcctttcctttcccacctctaaggtggctggggagatgtcaggggaaagatagatagttgtaaaaactctaaagctttaatatattcggtttgtatgtaatggaagcacggggctagagtttccacataggccccaacataaaggccttccctcgctgttgaggccaccatgccttactgcatccagccaggctgcagggagtgaggcacacggtgaacatggccactgacttttctgccactctaactggacaactggaagacttggaaaggcctccacctgtatctacactctgagggccctggactgggcctgagcttgccacagaggctccgtctgactgtgggctgggaggagggaggcaggggagagccggtcacggtggctggtctttactgcagggcagcactgtggccagctgtctgtctttacactgcatgcagaagtttaaacactgaagtgccgaagtggcccgtgccgccgcacagagaccccgactttagtttgggctgttccacgcttggctcaccattgccgcctgggacttaacctgctcaggcgggccttcgcccagctgcaaatagggatgcgttagagactgttcccaaagcttgttgggctccttaaatggcatgtacaatttaagtgcaaagacagggagtgtcaataaagatggaaagccatttccagttaacttttgttaatttaagtgtggtcccttacagatcgggagttgttgctaaaaagcaaactgaagaaatgttttgtttcaaaaagggctacagaaagtaaccttgagtaaaattaatctcagctacaaaactgttacccctccgcatccaagctatacacttgggttttgtttctggcttgtgaagacggaccagatgtgcacggaggtcaaggccccatgtcatctgcagctggagcggctcctctggggatgctgcactcagatcccacagcagctgcccaggctaacttgatccctgctgcttcactgcaccaatctccagcagacacagctcgccgagctcttgggtttctaagcagcaggaagctcaacctaacgctggccacacgctgacagctgagcccatctgagaacacggcatcttcacacagcgagacgcctccactgaggggaggcccgggagtatcaatctgtcaccagtggccacggagacctctcagcacccttagttcaaggtagtctctgtggatcaggttggtaacacctactggttaatcaagtcccactggggaaaggtttggacggtagaatcaagagctgcagtttccttggcccacaagatgctcttatgctgtaaaaaaaatgctttaagaattgtttgcaaatgaatttacagggtggccactggacacttcagagttcctatttactccccccgccacagctaggaagaccagcaagaactaaaggtttgccgttttactatttaaaatgtggacctctttgtccaggagcgggagggagaatggcatctcaccccattacaacagctggggaactggctaaagagagctgtcagagagtatccttggctgtcctaggaatgactcatggaaagcgccccagtgcagcagtgttttcaggaaaacccagtgggcacgcgccatcgccctctcctctcctctcacgctccttttgaaaagaccgcactcggcgcccaaggggacgtgctcaagagctgcaggggcagggcccaggcaaaaggtgggtgatgactacctgctgctttccctactccgtagatgggtctggaacatcgggtaaaacccagtcctcctctcagtgcatctctactcaccaacaatggtgaatctcagctctgtgtattcaagacaggcaaaacagaatatgcctcattatggctggagcgtgcctctactttgagataaagctggatgacaggtggatcctggcccacttaggagacatctttagaaagggaaaggctgtctttttgtacaggtagtagaacaacaaggtcagctgagcttaaggctgtggggttcgaagcagcccttcaagaagtcatcacccctgaagtagtgcctgcgagtcagtcagaggcataccaaaccctgagacagaatcaggcacaagttcacaactttttttttttttggggggagacagtcctactctgtcgcccaggctggagtgcagtagcgcgatctcagctcactgcaacctccgcctcccgggttcaagcaattctcctacctcagcctcccgagtagcggggactacaggtgcatgccgccacgcccggttaattttttgtattttagtagagatggggtttcaccgtgttgcccaggctggtcgcgaactcctgagctcagccaatccgcccacctcggcctcccaaagtgctgggattacaggtatgagccaccatgcccagccaagttcacaacttctgatatcaagttgttgctgagaaaaggtcaggacacttcttaagtagagaaggactgtgacatcccctccaaacctccatgtaacactaacaaatggcctcatttacacgattaaaaacaaaatggtatcgtcaataaatgcaaaccttaaactgc

SEQ ID NO: 386608 - DNA, 4015 bp, Homo sapiens
cgactctagagtgatccccactctcaacgacacgatgcacaggaagtttcaagaaaccgaacaaaccatccagaaacttcaacaggattttagttttctttattctcaattaaaccacacagaaaatgatgtgactcatcttcaaaaggaaatgagcaattgtagagcaggtgaaaacgctggcatgggtaggttcactaaggtgggtgagcaagaaaggacagtggacaccctgccgtccccccagcaccccgtggctcattgctgcagtcagctggaggagaggtggcagaggttgcagagccaggtcatctcggagctggatgcttgtaaggaatgcacgcagggggtccagagggaggtctccatggtggagggcagggtgtctcatatggagaaaacttgcagcaagctggactctatctcaggaaatcttcagaggatcaaggaggggctcaacaagcatgtcagcagcctgtggaactgtgtcaggcagatgaacggaacgctcaggtcgcattccagagacatttctggcctgaagaattcagtccagcagttctacagccacgtcttccagatttctactgatttgcaagatctggtcaaatttcagccatcagcaaaggcgccctcgcccccgccgcccgcagaggccccgaaggagccgctgcagcccgagcccgccccgccgaggcccagcggccccgcaaccgcagaggaccctgggcgacggcccgtcctgccccagcggccccccgaggagaggccgccccagccgccaggctccaccggggtcatcgcggagacgggccaggccgggccccccgcaggcgcaggcgtgtctgggcggggtctgccgcggggcgtggacggccagaccgggagcggcaccgtccccggcgcagaaggcttcgcgggcgcaccaggatacccgaagtcacctcctgtagcttccccaggagctccggtgccttctctggtgtctttttctgcggggctcacccagaagcctttccccagtgatgggggcgttgtcctctttaacaaagtgctggtgaacgacggggatgtttacaaccccagcaccggggtcttcacggctccttatgatgggcgctacctgatcacggccaccctcacccccgagagagacgcctacgtggaagcagtgctgtcggtctccaacgccagcgtggcccagctgcataccgctgggtacaggagagagttcctggaataccaccgccctccaggagctttgcatacctgcgggggcccgggggcattccacctcatcgtgcacctgaaggcgggagatgcagtcaacgtcgtggtgactgggggcaagctggctcacacagactttgatgaaatgtactccacatttagtggggttttcttatatcctttcctttcccacctctaaggtggctggggagatgtcaggggaaagatagatagttgtaaaaactctaaagctttaatatattcggtttgtatgtaatggaagcacggggctagagtttccacataggccccaacataaaggccttccctcgctgttgaggccaccatgccttactgcatccagccaggctgcagggagtgaggcacacggtgaacatggccactgacttttctgccactctaactggacaactggaagacttggaaaggcctccacctgtatctacactctgagggccctggactgggcctgagcttgccacagaggctccgtctgactgtgggctgggaggagggaggcaggggagagccggtcacggtggctggtctttactgcagggcagcactgtggccagctgtctgtctttacactgcatgcagaagtttaaacactgaagtgccgaagtggcccgtgccgccgcacagagaccccgactttagtttgggctgttccacgcttggctcaccattgccgcctgggacttaacctgctcaggcgggccttcgcccagctgcaaatagggatgcgttagagactgttcccaaagcttgttgggctccttaaatggcatgtacaatttaagtgcaaagacagggagtgtcaataaagatggaaagccatttccagttaacttttgttaatttaagtgtggtcccttacagatcgggagttgttgctaaaaagcaaactgaagaaatgttttgtttcaaaaagggctacagaaagtaaccttgagtaaaattaatctcagctacaaaactgttacccctccgcatccaagctatacacttgggttttgtttctggcttgtgaagacggaccagatgtgcacggaggtcaaggccccatgtcatctgcagctggagcggctcctctggggatgctgcactcagatcccacagcagctgcccaggctaacttgatccctgctgcttcactgcaccaatctccagcagacacagctcgccgagctcttgggtttctaagcagcaggaagctcaacctaacgctggccacacgctgacagctgagcccatctgagaacacggcatcttcacacagcgagacgcctccactgaggggaggcccgggagtatcaatctgtcaccagtggccacggagacctctcagcacccttagttcaaggtagtctctgtggatcaggttggtaacacctactggttaatcaagtcccactggggaaaggtttggacggtagaatcaagagctgcagtttccttggcccacaagatgctcttatgctgtaaaaaaaatgctttaagaattgtttgcaaatgaatttacagggtggccactggacacttcagagttcctatttactccccccgccacagctaggaagaccagcaagaactaaaggtttgccgttttactatttaaaatgtggacctctttgtccaggagcgggagggagaatggcatctcaccccattacaacagctggggaactggctaaagagagctgtcagagagtatccttggctgtcctaggaatgactcatggaaagcgccccagtgcagcagtgttttcaggaaaacccagtgggcacgcgccatcgccctctcctctcctctcacgctccttttgaaaagaccgcactcggcgcccaaggggacgtgctcaagagctgcaggggcagggcccaggcaaaaggtgggtgatgactacctgctgctttccctactccgtagatgggtctggaacatcgggtaaaacccagtcctcctctcagtgcatctctactcaccaacaatggtgaatctcagctctgtgtattcaagacaggcaaaacagaatatgcctcattatggctggagcgtgcctctactttgagataaagctggatgacaggtggatcctggcccacttaggagacatctttagaaagggaaaggctgtctttttgtacaggtagtagaacaacaaggtcagctgagcttaaggctgtggggttcgaagcagcccttcaagaagtcatcacccctgaagtagtgcctgcgagtcagtcagaggcataccaaaccctgagacagaatcaggcacaagttcacaactttttttttttttggggggagacagtcctactctgtcgcccaggctggagtgcagtagcgcgatctcagctcactgcaacctccgcctcccgggttcaagcaattctcctacctcagcctcccgagtagcggggactacaggtgcatgccgccacgcccggttaattttttgtattttagtagagatggggtttcaccgtgttgcccaggctggtcgcgaactcctgagctcagccaatccgcccacctcggcctcccaaagtgctgggattacaggtatgagccaccatgcccagccaagttcacaacttctgatatcaagttgttgctgagaaaaggtcaggacacttcttaagtagagaaggactgtgacatcccctccaaacctccatgtaacactaacaaatggcctcatttacacgattaaaaacaaaatggtatcgtcaataaatgcaaaccttaaactgc

SEQ ID NO: 386609 - DNA, 3592 bp, Homo sapiens
ccggagggggcggccgcggagcactggttggagcgccgcgaagcgcccgagcctcttgccttcgcgggcggcgccctggccgccggcagccttgtggccggtgccccgatccgccgcgctccggacccgggcaggcggggcgcgcccgctgcgcgcgggatgtggcagcccagacggccctggccccgcgtgccctggcgctgggcgctggcgctgctggccctggttggcgcggggctgtgccacgccggcccgcagcccgggtatcccgcgcggcccagcgccaggaacaagaactggtgcgcctacatcgtgaacaagaatgtgagtgcagcccgagcccgccccgccgaggcccagcggccccgcaaccgcagaggaccctgggcgacggcccgtcctgccccagcggccccccgaggagaggccgccccagccgccaggctccaccggggtcatcgcggagacgggccaggccgggccccccgcaggcgcaggcgtcacccgggtcaatccattccatcctttctctgctccaggagctccggtgccttctctggtgtctttttctgcggggctcacccagaagcctttccccagtgatgggggcgttgtcctctttaacaaagtgctggtgaacgacggggatgtttacaaccccagcaccggggtcttcacggctccttatgatgggcgctacctgatcacggccaccctcacccccgagagagacgcctacgtggaagcagtgctgtcggtctccaacgccagcgtggcccagctgcataccgctgggtacaggagagagttcctggaataccaccgccctccaggagctttgcatacctgcgggggcccgggggcattccacctcatcgtgcacctgaaggcgggagatgcagtcaacgtcgtggtgactgggggcaagctggctcacacagactttgatgaaatgtactccacatttagtggggttttcttatatcctttcctttcccacctctaaggtggctggggagatgtcaggggaaagatagatagttgtaaaaactctaaagctttaatatattcggtttgtatgtaatggaagcacggggctagagtttccacataggccccaacataaaggccttccctcgctgttgaggccaccatgccttactgcatccagccaggctgcagggagtgaggcacacggtgaacatggccactgacttttctgccactctaactggacaactggaagacttggaaaggcctccacctgtatctacactctgagggccctggactgggcctgagcttgccacagaggctccgtctgactgtgggctgggaggagggaggcaggggagagccggtcacggtggctggtctttactgcagggcagcactgtggccagctgtctgtctttacactgcatgcagaagtttaaacactgaagtgccgaagtggcccgtgccgccgcacagagaccccgactttagtttgggctgttccacgcttggctcaccattgccgcctgggacttaacctgctcaggcgggccttcgcccagctgcaaatagggatgcgttagagactgttcccaaagcttgttgggctccttaaatggcatgtacaatttaagtgcaaagacagggagtgtcaataaagatggaaagccatttccagttaacttttgttaatttaagtgtggtcccttacagatcgggagttgttgctaaaaagcaaactgaagaaatgttttgtttcaaaaagggctacagaaagtaaccttgagtaaaattaatctcagctacaaaactgttacccctccgcatccaagctatacacttgggttttgtttctggcttgtgaagacggaccagatgtgcacggaggtcaaggccccatgtcatctgcagctggagcggctcctctggggatgctgcactcagatcccacagcagctgcccaggctaacttgatccctgctgcttcactgcaccaatctccagcagacacagctcgccgagctcttgggtttctaagcagcaggaagctcaacctaacgctggccacacgctgacagctgagcccatctgagaacacggcatcttcacacagcgagacgcctccactgaggggaggcccgggagtatcaatctgtcaccagtggccacggagacctctcagcacccttagttcaaggtagtctctgtggatcaggttggtaacacctactggttaatcaagtcccactggggaaaggtttggacggtagaatcaagagctgcagtttccttggcccacaagatgctcttatgctgtaaaaaaaatgctttaagaattgtttgcaaatgaatttacagggtggccactggacacttcagagttcctatttactccccccgccacagctaggaagaccagcaagaactaaaggtttgccgttttactatttaaaatgtggacctctttgtccaggagcgggagggagaatggcatctcaccccattacaacagctggggaactggctaaagagagctgtcagagagtatccttggctgtcctaggaatgactcatggaaagcgccccagtgcagcagtgttttcaggaaaacccagtgggcacgcgccatcgccctctcctctcctctcacgctccttttgaaaagaccgcactcggcgcccaaggggacgtgctcaagagctgcaggggcagggcccaggcaaaaggtgggtgatgactacctgctgctttccctactccgtagatgggtctggaacatcgggtaaaacccagtcctcctctcagtgcatctctactcaccaacaatggtgaatctcagctctgtgtattcaagacaggcaaaacagaatatgcctcattatggctggagcgtgcctctactttgagataaagctggatgacaggtggatcctggcccacttaggagacatctttagaaagggaaaggctgtctttttgtacaggtagtagaacaacaaggtcagctgagcttaaggctgtggggttcgaagcagcccttcaagaagtcatcacccctgaagtagtgcctgcgagtcagtcagaggcataccaaaccctgagacagaatcaggcacaagttcacaactttttttttttttggggggagacagtcctactctgtcgcccaggctggagtgcagtagcgcgatctcagctcactgcaacctccgcctcccgggttcaagcaattctcctacctcagcctcccgagtagcggggactacaggtgcatgccgccacgcccggttaattttttgtattttagtagagatggggtttcaccgtgttgcccaggctggtcgcgaactcctgagctcagccaatccgcccacctcggcctcccaaagtgctgggattacaggtatgagccaccatgcccagccaagttcacaacttctgatatcaagttgttgctgagaaaaggtcaggacacttcttaagtagagaaggactgtgacatcccctccaaacctccatgtaacactaacaaatggcctcatttacacgattaaaaacaaaatggtatcgtcaataaatgcaaaccttaaactgc

SEQ ID NO: 386610 - DNA, 5803 bp, Homo sapiens
ccaggcgcgcgctctccagaggcgcacccgggcaccctccggcgtctgctcggtgaagctcccgcctccgcagagggcgacgggcccccccgaccctcgctcggtctggtgccgcagtcccctctcccctggcctcattgttctccgggtttaccccgtgcccctctccctctctctcctgcaccccaggaactggtgcgcctacatcgtgaacaagaatgtgagctgctccgtgctggagggaagtgagagttttattcaggctcagtacaactgtgcctggaaccagatgccctgtccgtcggcgctggtgtatcgagtgaacttcagacctagatatgtcactaggtataagacagtgacacagttggaatggaggtgctgtcctggctttagagggggagattgccaagaaggtcccaaagaccccgtgaagaccctccgccccacgccggctcggcctcgaaatagcttgaagaaagccacagataatgaacccagccaattctcagagcccaggaagactttgtccccaactggtacagcacaaccaagctggggggtagatccaaaagaggggcctcaggaacttcaggaaaagaagatacaggtgctagaggagaaggttcttcgactcacaaggacggttcttgacctccagtcttcccttgctggagtgagtgaaaatctcaaacatgccactcaggatgatgccagtagaacacgggcaccagggctcagcagccagcaccccaagcctgacaccactgttagtggagacacagaaacgggccagagtcctggtgtcttcaacactaaggaatctggcatgaaggacatcaagtctgaattggctgaagtcaaagatactctaaagaacaaaagtgacaagctggaagagctggatggaaaagtgaagggctacgaagggcagctcagacagctccaggaagcagctcagggcccgacggtgaccatgacaaccaacgaactctaccaagcctatgtggacagtaagatcgacgccctgagagaggagctcatggagggcatggacagaaagctggctgacctgaaaaactcatgtgagtacaagctcactggcctccagcagcagtgtgatgactatgggagcagctacctgggagtgatagagctcataggggagaaggaaacaagcctgagaaaagaaataaataacctccgagcccggctacaggagccttcagcccaggcaaattgctgcgacagtgaaaagaatggtgacattggtcaacagatcaagacattggaccagaaaatcgagagagttgctgaagccaccagaatgctgaatggaagactggacaatgagtttgaccgccttatagttccagagccagatgtggattttgatgcaaaatggaatgaactcgatgcaaggatcaatgtgacggagaagaacgctgaagaacattgcttttacattgaggaaacccttcggggcgccattaatggagaggtgggtgacttgaagcagcttgttgatcagaaaatacagtctctggaagaccgtctggggagcgttctcctacagatgaccaataacactggtgcagagctcagtcccccaggggcagcagccctgccaggagtgtcagggtcaggagatgaacgggtcatgatggaattaaaccacctgaaggacaaagttcaagttgttgaagacatttgcctgctgaacatccagggaaagcctcatgggatggaaggtgccttgccaaacagggaagaccgcgcagtacgcgacagcctgcaccttttgaaatctctcaacgacacgatgcacaggaagtttcaagaaaccgaacaaaccatccagaaacttcaacaggattttagttttctttattctcaattaaaccacacagaaaatgatgtgactcatcttcaaaaggaaatgagcaattgtagagcaggtgaaaacgctggcatgggtaggttcactaaggtgggtgagcaagaaaggacagtggacaccctgccgtccccccagcaccccgtggctcattgctgcagtcagctggaggagaggtggcagaggttgcagagccaggtcatctcggagctggatgcttgtaaggaatgcacgcagggggtccagagggaggtctccatggtggagggcagggtgtctcatatggagaaaacttgcagcaagctggactctatctcaggaaatcttcagaggatcaaggaggggctcaacaagcatgtcagcagcctgtggaactgtgtcaggcagatgaacggaacgctcaggtcgcattccagagacatttctggcctgaagaattcagtccagcagttctacagccacgtcttccagatttctactgatttgcaagatctggtcaaatttcagccatcagcaaaggcgccctcgcccccgccgcccgcagaggccccgaaggagccgctgcagcccgagcccgccccgccgaggcccagcggccccgcaaccgcagaggaccctgggcgacggcccgtcctgccccagcggccccccgaggagaggccgccccagccgccaggctccaccggggtcatcgcggagacgggccaggccgggccccccgcaggcgcaggcgtgtctgggcggggtctgccgcggggcgtggacggccagaccgggagcggcaccgtccccggcgcagaaggcttcgcgggcgcaccaggatacccgaagtcacctcctgtagcttccccaggagctccggtgccttctctggtgtctttttctgcggggctcacccagaagcctttccccagtgatgggggcgttgtcctctttaacaaagtgctggtgaacgacggggatgtttacaaccccagcaccggggtcttcacggctccttatgatgggcgctacctgatcacggccaccctcacccccgagagagacgcctacgtggaagcagtgctgtcggtctccaacgccagcgtggcccagctgcataccgctgggtacaggagagagttcctggaataccaccgccctccaggagctttgcatacctgcgggggcccgggggcattccacctcatcgtgcacctgaaggcgggagatgcagtcaacgtcgtggtgactgggggcaagctggctcacacagactttgatgaaatgtactccacatttagtggggttttcttatatcctttcctttcccacctctaaggtggctggggagatgtcaggggaaagatagatagttgtaaaaactctaaagctttaatatattcggtttgtatgtaatggaagcacggggctagagtttccacataggccccaacataaaggccttccctcgctgttgaggccaccatgccttactgcatccagccaggctgcagggagtgaggcacacggtgaacatggccactgacttttctgccactctaactggacaactggaagacttggaaaggcctccacctgtatctacactctgagggccctggactgggcctgagcttgccacagaggctccgtctgactgtgggctgggaggagggaggcaggggagagccggtcacggtggctggtctttactgcagggcagcactgtggccagctgtctgtctttacactgcatgcagaagtttaaacactgaagtgccgaagtggcccgtgccgccgcacagagaccccgactttagtttgggctgttccacgcttggctcaccattgccgcctgggacttaacctgctcaggcgggccttcgcccagctgcaaatagggatgcgttagagactgttcccaaagcttgttgggctccttaaatggcatgtacaatttaagtgcaaagacagggagtgtcaataaagatggaaagccatttccagttaacttttgttaatttaagtgtggtcccttacagatcgggagttgttgctaaaaagcaaactgaagaaatgttttgtttcaaaaagggctacagaaagtaaccttgagtaaaattaatctcagctacaaaactgttacccctccgcatccaagctatacacttgggttttgtttctggcttgtgaagacggaccagatgtgcacggaggtcaaggccccatgtcatctgcagctggagcggctcctctggggatgctgcactcagatcccacagcagctgcccaggctaacttgatccctgctgcttcactgcaccaatctccagcagacacagctcgccgagctcttgggtttctaagcagcaggaagctcaacctaacgctggccacacgctgacagctgagcccatctgagaacacggcatcttcacacagcgagacgcctccactgaggggaggcccgggagtatcaatctgtcaccagtggccacggagacctctcagcacccttagttcaaggtagtctctgtggatcaggttggtaacacctactggttaatcaagtcccactggggaaaggtttggacggtagaatcaagagctgcagtttccttggcccacaagatgctcttatgctgtaaaaaaaatgctttaagaattgtttgcaaatgaatttacagggtggccactggacacttcagagttcctatttactccccccgccacagctaggaagaccagcaagaactaaaggtttgccgttttactatttaaaatgtggacctctttgtccaggagcgggagggagaatggcatctcaccccattacaacagctggggaactggctaaagagagctgtcagagagtatccttggctgtcctaggaatgactcatggaaagcgccccagtgcagcagtgttttcaggaaaacccagtgggcacgcgccatcgccctctcctctcctctcacgctccttttgaaaagaccgcactcggcgcccaaggggacgtgctcaagagctgcaggggcagggcccaggcaaaaggtgggtgatgactacctgctgctttccctactccgtagatgggtctggaacatcgggtaaaacccagtcctcctctcagtgcatctctactcaccaacaatggtgaatctcagctctgtgtattcaagacaggcaaaacagaatatgcctcattatggctggagcgtgcctctactttgagataaagctggatgacaggtggatcctggcccacttaggagacatctttagaaagggaaaggctgtctttttgtacaggtagtagaacaacaaggtcagctgagcttaaggctgtggggttcgaagcagcccttcaagaagtcatcacccctgaagtagtgcctgcgagtcagtcagaggcataccaaaccctgagacagaatcaggcacaagttcacaactttttttttttttggggggagacagtcctactctgtcgcccaggctggagtgcagtagcgcgatctcagctcactgcaacctccgcctcccgggttcaagcaattctcctacctcagcctcccgagtagcggggactacaggtgcatgccgccacgcccggttaattttttgtattttagtagagatggggtttcaccgtgttgcccaggctggtcgcgaactcctgagctcagccaatccgcccacctcggcctcccaaagtgctgggattacaggtatgagccaccatgcccagccaagttcacaacttctgatatcaagttgttgctgagaaaaggtcaggacacttcttaagtagagaaggactgtgacatcccctccaaacctccatgtaacactaacaaatggcctcatttacacgattaaaaacaaaatggtatcgtcaataaatgcaaaccttaaactgc

SEQ ID NO: 386611 - DNA, 4880 bp, Homo sapiens
tctagaggagcgtatgggtgctcatccccccagctcagggcccgacggtgaccatgacaaccaacgaactctaccaagcctatgtggacagtaagatcgacgccctgagagaggagctcatggagggcatggacagaaagctggctgacctgaaaaactcatgtgagtacaagctcactggcctccagcagcagtgtgatgactatgggagcagctacctgggagtgatagagctcataggggagaaggaaacaagcctgagaaaagaaataaataacctccgagcccggctacaggagccttcagcccaggcaaattgctgcgacagtgaaaagaatggtgacattggtcaacagatcaagacattggaccagaaaatcgagagagttgctgaagccaccagaatgctgaatggaagactggacaatgagtttgaccgccttatagttccagagccagatgtggattttgatgcaaaatggaatgaactcgatgcaaggatcaatgtgacggagaagaacgctgaagaacattgcttttacattgaggaaacccttcggggcgccattaatggagaggtgggtgacttgaagcagcttgttgatcagaaaatacagtctctggaagaccgtctggggagcgttctcctacagatgaccaataacactggtgcagagctcagtcccccaggggcagcagccctgccaggagtgtcagggtcaggagatgaacgggtcatgatggaattaaaccacctgaaggacaaagttcaagttgttgaagacatttgcctgctgaacatccagggaaagcctcatgggatggaaggtgccttgccaaacagggaagaccgcgcagtacgcgacagcctgcaccttttgaaatctctcaacgacacgatgcacaggaagtttcaagaaaccgaacaaaccatccagaaacttcaacaggattttagttttctttattctcaattaaaccacacagaaaatgatgtgactcatcttcaaaaggaaatgagcaattgtagagcaggtgaaaacgctggcatgggtaggttcactaaggtgggtgagcaagaaaggacagtggacaccctgccgtccccccagcaccccgtggctcattgctgcagtcagctggaggagaggtggcagaggttgcagagccaggtcatctcggagctggatgcttgtaaggaatgcacgcagggggtccagagggaggtctccatggtggagggcagggtgtctcatatggagaaaacttgcagcaagctggactctatctcaggaaatcttcagaggatcaaggaggggctcaacaagcatgtcagcagcctgtggaactgtgtcaggcagatgaacggaacgctcaggtcgcattccagagacatttctggcctgaagaattcagtccagcagttctacagccacgtcttccagatttctactgatttgcaagatctggtcaaatttcagccatcagcaaaggcgccctcgcccccgccgcccgcagaggccccgaaggagccgctgcagcccgagcccgccccgccgaggcccagcggccccgcaaccgcagaggaccctgggcgacggcccgtcctgccccagcggccccccgaggagaggccgccccagccgccaggctccaccggggtcatcgcggagacgggccaggccgggccccccgcaggcgcaggcgtgtctgggcggggtctgccgcggggcgtggacggccagaccgggagcggcaccgtccccggcgcagaaggcttcgcgggcgcaccaggatacccgaagtcacctcctgtagcttccccaggagctccggtgccttctctggtgtctttttctgcggggctcacccagaagcctttccccagtgatgggggcgttgtcctctttaacaaagtgctggtgaacgacggggatgtttacaaccccagcaccggggtcttcacggctccttatgatgggcgctacctgatcacggccaccctcacccccgagagagacgcctacgtggaagcagtgctgtcggtctccaacgccagcgtggcccagctgcataccgctgggtacaggagagagttcctggaataccaccgccctccaggagctttgcatacctgcgggggcccgggggcattccacctcatcgtgcacctgaaggcgggagatgcagtcaacgtcgtggtgactgggggcaagctggctcacacagactttgatgaaatgtactccacatttagtggggttttcttatatcctttcctttcccacctctaaggtggctggggagatgtcaggggaaagatagatagttgtaaaaactctaaagctttaatatattcggtttgtatgtaatggaagcacggggctagagtttccacataggccccaacataaaggccttccctcgctgttgaggccaccatgccttactgcatccagccaggctgcagggagtgaggcacacggtgaacatggccactgacttttctgccactctaactggacaactggaagacttggaaaggcctccacctgtatctacactctgagggccctggactgggcctgagcttgccacagaggctccgtctgactgtgggctgggaggagggaggcaggggagagccggtcacggtggctggtctttactgcagggcagcactgtggccagctgtctgtctttacactgcatgcagaagtttaaacactgaagtgccgaagtggcccgtgccgccgcacagagaccccgactttagtttgggctgttccacgcttggctcaccattgccgcctgggacttaacctgctcaggcgggccttcgcccagctgcaaatagggatgcgttagagactgttcccaaagcttgttgggctccttaaatggcatgtacaatttaagtgcaaagacagggagtgtcaataaagatggaaagccatttccagttaacttttgttaatttaagtgtggtcccttacagatcgggagttgttgctaaaaagcaaactgaagaaatgttttgtttcaaaaagggctacagaaagtaaccttgagtaaaattaatctcagctacaaaactgttacccctccgcatccaagctatacacttgggttttgtttctggcttgtgaagacggaccagatgtgcacggaggtcaaggccccatgtcatctgcagctggagcggctcctctggggatgctgcactcagatcccacagcagctgcccaggctaacttgatccctgctgcttcactgcaccaatctccagcagacacagctcgccgagctcttgggtttctaagcagcaggaagctcaacctaacgctggccacacgctgacagctgagcccatctgagaacacggcatcttcacacagcgagacgcctccactgaggggaggcccgggagtatcaatctgtcaccagtggccacggagacctctcagcacccttagttcaaggtagtctctgtggatcaggttggtaacacctactggttaatcaagtcccactggggaaaggtttggacggtagaatcaagagctgcagtttccttggcccacaagatgctcttatgctgtaaaaaaaatgctttaagaattgtttgcaaatgaatttacagggtggccactggacacttcagagttcctatttactccccccgccacagctaggaagaccagcaagaactaaaggtttgccgttttactatttaaaatgtggacctctttgtccaggagcgggagggagaatggcatctcaccccattacaacagctggggaactggctaaagagagctgtcagagagtatccttggctgtcctaggaatgactcatggaaagcgccccagtgcagcagtgttttcaggaaaacccagtgggcacgcgccatcgccctctcctctcctctcacgctccttttgaaaagaccgcactcggcgcccaaggggacgtgctcaagagctgcaggggcagggcccaggcaaaaggtgggtgatgactacctgctgctttccctactccgtagatgggtctggaacatcgggtaaaacccagtcctcctctcagtgcatctctactcaccaacaatggtgaatctcagctctgtgtattcaagacaggcaaaacagaatatgcctcattatggctggagcgtgcctctactttgagataaagctggatgacaggtggatcctggcccacttaggagacatctttagaaagggaaaggctgtctttttgtacaggtagtagaacaacaaggtcagctgagcttaaggctgtggggttcgaagcagcccttcaagaagtcatcacccctgaagtagtgcctgcgagtcagtcagaggcataccaaaccctgagacagaatcaggcacaagttcacaactttttttttttttggggggagacagtcctactctgtcgcccaggctggagtgcagtagcgcgatctcagctcactgcaacctccgcctcccgggttcaagcaattctcctacctcagcctcccgagtagcggggactacaggtgcatgccgccacgcccggttaattttttgtattttagtagagatggggtttcaccgtgttgcccaggctggtcgcgaactcctgagctcagccaatccgcccacctcggcctcccaaagtgctgggattacaggtatgagccaccatgcccagccaagttcacaacttctgatatcaagttgttgctgagaaaaggtcaggacacttcttaagtagagaaggactgtgacatcccctccaaacctccatgtaacactaacaaatggcctcatttacacgattaaaaacaaaatggtatcgtcaataaatgcaaaccttaaactgc

SEQ ID NO: 386612 - DNA, 3940 bp, Homo sapiens
gagcttcctccgttggaagtcccttccgctggcgacgtgggcgctgtggccgcggccctcgtggagcctgagccctcctcacggcctccgcgcagccctggggccccccggcagggtccctcggcagcccgcgggagaggccgtggggccccggcaggagtgtggttcagagacggtgcgggggtcggtggcctcaggtccctttcagtcacttgcgacgcacccgcggtttccgcgtgctgtgaaatcgggaattgttggatgccggagccaagagtgaggccggtttggaaagtgcagccgtctgcgccggagaggctggaaacgccccggccccgggcaggggtccccggcggcgtccgggtggcccgctgcgtcctcggaagatgcgggcggacgcccgtgtgtcccgctggcctgacgtcgcaggggtggccgcagagtcctcacggggaccccgctcgccgggactcatggaggggaccctgacggggcagtcagggctgaggtttcctaatcccgtgtgtttctttctccccgacgcccggcagaggcgccctcgcccccgccgcccgcagaggccccgaaggagccgctgcagcccgagcccgccccgccgaggcccagcggccccgcaaccgcagaggaccctgggcgacggcccgtcctgccccagcggccccccgaggagaggccgccccagccgccaggctccaccggggtcatcgcggagacgggccaggccgggccccccgcaggcgcaggcgtgtctgggcggggtctgccgcggggcgtggacggccagaccgggagcggcaccgtccccggcgcagaaggcttcgcgggcgcaccaggatacccgaagtcacctcctgtagcttccccaggagctccggtgccttctctggtgtctttttctgcggggctcacccagaagcctttccccagtgatgggggcgttgtcctctttaacaaagtgctggtgaacgacggggatgtttacaaccccagcaccggggtcttcacggctccttatgatgggcgctacctgatcacggccaccctcacccccgagagagacgcctacgtggaagcagtgctgtcggtctccaacgccagcgtggcccagctgcataccgctgggtacaggagagagttcctggaataccaccgccctccaggagctttgcatacctgcgggggcccgggggcattccacctcatcgtgcacctgaaggcgggagatgcagtcaacgtcgtggtgactgggggcaagctggctcacacagactttgatgaaatgtactccacatttagtggggttttcttatatcctttcctttcccacctctaaggtggctggggagatgtcaggggaaagatagatagttgtaaaaactctaaagctttaatatattcggtttgtatgtaatggaagcacggggctagagtttccacataggccccaacataaaggccttccctcgctgttgaggccaccatgccttactgcatccagccaggctgcagggagtgaggcacacggtgaacatggccactgacttttctgccactctaactggacaactggaagacttggaaaggcctccacctgtatctacactctgagggccctggactgggcctgagcttgccacagaggctccgtctgactgtgggctgggaggagggaggcaggggagagccggtcacggtggctggtctttactgcagggcagcactgtggccagctgtctgtctttacactgcatgcagaagtttaaacactgaagtgccgaagtggcccgtgccgccgcacagagaccccgactttagtttgggctgttccacgcttggctcaccattgccgcctgggacttaacctgctcaggcgggccttcgcccagctgcaaatagggatgcgttagagactgttcccaaagcttgttgggctccttaaatggcatgtacaatttaagtgcaaagacagggagtgtcaataaagatggaaagccatttccagttaacttttgttaatttaagtgtggtcccttacagatcgggagttgttgctaaaaagcaaactgaagaaatgttttgtttcaaaaagggctacagaaagtaaccttgagtaaaattaatctcagctacaaaactgttacccctccgcatccaagctatacacttgggttttgtttctggcttgtgaagacggaccagatgtgcacggaggtcaaggccccatgtcatctgcagctggagcggctcctctggggatgctgcactcagatcccacagcagctgcccaggctaacttgatccctgctgcttcactgcaccaatctccagcagacacagctcgccgagctcttgggtttctaagcagcaggaagctcaacctaacgctggccacacgctgacagctgagcccatctgagaacacggcatcttcacacagcgagacgcctccactgaggggaggcccgggagtatcaatctgtcaccagtggccacggagacctctcagcacccttagttcaaggtagtctctgtggatcaggttggtaacacctactggttaatcaagtcccactggggaaaggtttggacggtagaatcaagagctgcagtttccttggcccacaagatgctcttatgctgtaaaaaaaatgctttaagaattgtttgcaaatgaatttacagggtggccactggacacttcagagttcctatttactccccccgccacagctaggaagaccagcaagaactaaaggtttgccgttttactatttaaaatgtggacctctttgtccaggagcgggagggagaatggcatctcaccccattacaacagctggggaactggctaaagagagctgtcagagagtatccttggctgtcctaggaatgactcatggaaagcgccccagtgcagcagtgttttcaggaaaacccagtgggcacgcgccatcgccctctcctctcctctcacgctccttttgaaaagaccgcactcggcgcccaaggggacgtgctcaagagctgcaggggcagggcccaggcaaaaggtgggtgatgactacctgctgctttccctactccgtagatgggtctggaacatcgggtaaaacccagtcctcctctcagtgcatctctactcaccaacaatggtgaatctcagctctgtgtattcaagacaggcaaaacagaatatgcctcattatggctggagcgtgcctctactttgagataaagctggatgacaggtggatcctggcccacttaggagacatctttagaaagggaaaggctgtctttttgtacaggtagtagaacaacaaggtcagctgagcttaaggctgtggggttcgaagcagcccttcaagaagtcatcacccctgaagtagtgcctgcgagtcagtcagaggcataccaaaccctgagacagaatcaggcacaagttcacaactttttttttttttggggggagacagtcctactctgtcgcccaggctggagtgcagtagcgcgatctcagctcactgcaacctccgcctcccgggttcaagcaattctcctacctcagcctcccgagtagcggggactacaggtgcatgccgccacgcccggttaattttttgtattttagtagagatggggtttcaccgtgttgcccaggctggtcgcgaactcctgagctcagccaatccgcccacctcggcctcccaaagtgctgggattacaggtatgagccaccatgcccagccaagttcacaacttctgatatcaagttgttgctgagaaaaggtcaggacacttcttaagtagagaaggactgtgacatcccctccaaacctccatgtaacactaacaaatggcctcatttacacgattaaaaacaaaatggtatcgtcaataaatgcaaaccttaaactgc

SEQ ID NO: 386613 - DNA, 4035 bp, Homo sapiens
ccggagggggcggccgcggagcactggttggagcgccgcgaagcgcccgagcctcttgccttcgcgggcggcgccctggccgccggcagccttgtggccggtgccccgatccgccgcgctccggacccgggcaggcggggcgcgcccgctgcgcgcgggatgtggcagcccagacggccctggccccgcgtgccctggcgctgggcgctggcgctgctggccctggttggcgcggggctgtgccacgccggcccgcagcccgggtatcccgcgcggcccagcgccaggaacaagaactggtgcgcctacatcgtgaacaagaatgtgagctgctccgtgctggagggaagtgagagttttattcaggctcagtacaactgtgcctggaaccagatgccctgtccgtcggcgctggtgtatcgagtgaacttcagacctagatatgtcactaggtataagacagtgacacagttggaatggaggtgctgtcctggctttagagggggagattgccaagaaggtcccaaagaccccgtgaagaccctccgccccacgccggctcggcctcgaaatagcttgaagaaagccacagataatgaacccagccaattctcagagcccaggaagactttgtccccaactggtacagcacaaccaagctggggggtagatccaaaagaggggcctcaggaacttcaggaaaagaagatacaggtgctagaggagaaggttcttcgactcacaaggacggttcttgacctccagtcttcccttgctggagtgagtgaaaatctcaaacatgccactcaggatgatgccagtagaacacgggcaccagggctcagcagccagcaccccaagcctgacaccactgttagtggagacacagaaacgggccagagtcctggtgtcttcaacactaaggaatctggcatgaaggacatcaagtctgaattggctgaagtcaaagatactctaaagaacaaaagtgacaagctggaagagctggatggaaaagtgaagggctacgaagggcagctcagacagctccaggaagcagctcagggcccgacggtgaccatgacaaccaacgaactctaccaagcctatgtggacagtaagatcgacgccctgagagaggagctcatggagggcatggacagaaagctggctgacctgaaaaactcatgtgagtacaagctcactggcctccagcagcagtgtgatgactatgggagcagctacctgggagtgatagagctcataggggagaaggaaacaagcctgagaaaagaaataaataacctccgagcccggctacaggagccttcagcccaggcaaattgctgcgacagtgaaaagaatggtgacattggtcaacagatcaagacattggaccagaaaatcgagagagttgctgaagccaccagaatgctgaatggaagactggacaatgagtttgaccgccttatagttccagagccagatgtggattttgatgcaaaatggaatgaactcgatgcaaggatcaatgtgacggagaagaacgctgaagaacattgcttttacattgaggaaacccttcggggcgccattaatggagaggtgggtgacttgaagcagcttgttgatcagaaaatacagtctctggaagaccgtctggggagcgttctcctacagatgaccaataacactggtgcagagctcagtcccccaggggcagcagccctgccaggagtgtcagggtcaggagatgaacgggtcatgatggaattaaaccacctgaaggacaaagttcaagttgttgaagacatttgcctgctgaacatccagggaaagcctcatgggatggaaggtgccttgccaaacagggaagaccgcgcagtacgcgacagcctgcaccttttgaaatctctcaacgacacgatgcacaggaagtttcaagaaaccgaacaaaccatccagaaacttcaacaggattttagttttctttattctcaattaaaccacacagaaaatgatgtgactcatcttcaaaaggaaatgagcaattgtagagcaggtgaaaacgctggcatgggtaggttcactaaggtgggtgagcaagaaaggacagtggacaccctgccgtccccccagcaccccgtggctcattgctgcagtcagctggaggagaggtggcagaggttgcagagccaggtcatctcggagctggatgcttgtaaggaatgcacgcagggggtccagagggaggtctccatggtggagggcagggtgtctcatatggagaaaacttgcagcaagctggactctatctcaggaaatcttcagaggatcaaggaggggctcaacaagcatgtcagcagcctgtggaactgtgtcaggcagatgaacggaacgctcaggtcgcattccagagacatttctggcctgaagaattcagtccagcagttctacagccacgtcttccagatttctactgatttgcaagatctggtcaaatttcagccatcagcaaaggcgccctcgcccccgccgcccgcagaggccccgaaggagccgctgcagcccgagcccgccccgccgaggcccagcggccccgcaaccgcagaggaccctgggcgacggcccgtcctgccccagcggccccccgaggagaggccgccccagccgccaggctccaccggggtcatcgcggagacgggccaggccgggccccccgcaggcgcaggcgtgtctgggcggggtctgccgcggggcgtggacggccagaccgggagcggcaccgtccccggcgcagaaggcttcgcgggcgcaccaggatacccgaagtcacctcctgtagcttccccaggagctccggtgccttctctggtgtctttttctgcggggctcacccagaagcctttccccagtgatgggggcgttgtcctctttaacaaagtgctggtgaacgacggggatgtttacaaccccagcaccggggtcttcacggctccttatgatgggcgctacctgatcacggccaccctcacccccgagagagacgcctacgtggaagcagtgctgtcggtctccaacgccagcgtggcccagctgcataccgctgggtacaggagagagttcctggaataccaccgccctccaggagctttgcatacctgcgggggcccgggggcattccacctcatcgtgcacctgaaggcgggagatgcagtcaacgtcgtggtgactgggggcaagctggctcacacagactttgatgaaatgtactccacatttagtggggttttcttatatcctttcctttcccacctctaaggtggctggggagatgtcaggggaaagatagatagttgtaaaaactctaaagctttaatatattcggtttgtatgtaatggaagcacggggctagagtttccacataggccccaacataaaggccttccctcgctgttgaggccaccatgccttactgcatccagccaggctgcagggagtgaggcacacggtgaacatggccactgacttttctgccactctaactggacaactggaagacttggaaaggcctccacctgtatctacactctgagggccctggactgggcctgagcttgccacagaggctccgtctgactgtgggctgggaggagggaggcaggggagagccggtcacggtggctggtctttactgcagggcagcactgtggccagctgtctgtctttacactgcatgcagaagtttaaacactgaagtgccgaagtggcccgtgccgccgcacagagaccccgactttagtttgggctgttccacgcttggctcaccattgccgcctgggacttaacctgctcaggcgggccttcgcccagctgcaaatagggatgcgttagagactgttcccaaagcttgttgggctccttaaatggcatgtacaatttaagtgcaaagacagggagtgtcaataaagatgaagacctgtcccgttttttttctccccctgtctttttctttggttttttttttgtttgga

SEQ ID NO: 386614 - DNA, 459 bp, Homo sapiens
  misc_feature (459)..(459): n is a, c, g, or t
tggagtttaatctccagccctcaaccctctttctgtaggtcagtaggtggggctgaaagttccagccctgtaatcacctggtccctctgtagctctgtagactggtcctatcatgaggatacccaggggacccacccttagtaatcattagcataaactcaaaagttatcagaggtgatcagtaacaaaagacattctatcacttaagaaattccgatggttttaggaactcaagacaaagaccaaatgtatttcatattataccacactttacttttatcagggaaagaacatttgaacagtccaatagaagataggaatacattttagatcagattctctttcatatgatagcccatcataacaggggctcaaacataaaatgtttattccatgataaaacagaagtgtgtaactagacaatctagggcaaaaatggtagtcagaggaaaaaaaaan

SEQ ID NO: 386615 - DNA, 434 bp, Homo sapiens
ctgcccaccttggcctcccaaagtgctgggattacaggcatgagccactgcacccagccaggtgatggtctttaattagagacttgaatattgaatcaaaaccacagaagattatgttattacagcacaaccctcaccttgaaacgtgaaaaatgtgttaaattattttgctacttttccttttagccaggaactattcaatactttcacaagtacctgtttaactcagcccactacactggccatcataaataaccaaaacgtgatttctttactttctttaaggaaacagtatctcgcacttccagtgttcagtcacatttaataaagatgaatctttctagccgttcaacaccctcacctattttaaaaacaaggaggcagaattttgtgtgatattctctaagtttataaattgtggtgtcctctccgtt

SEQ ID NO: 386616 - DNA, 384 bp, Homo sapiens
atgataggaaggaaattgaattatttagaaagtcactgtgtcctcaatttgtatgaatatttgaagcaagattcatttctcttgttaaatattccattttagtccctacaataatagagattaattttctgttctttttcatcacagagttaggaccagtagtgattattgcatatttggaaattggaaagctgaatgttttacaaaatagaatgagttggttattaatattgattgtgggttcctgagaccacccctcttacttttaacatctcttggtttaaacatatttgttttaagtagaactcctttccttttctcattcttaattactttcttgaggcagaattcctgatattcaaaattaatttttatcaatatatt

SEQ ID NO: 386617 - DNA, 377 bp, Homo sapiens
tatgctgagtgaaataagccttataaaaaaagaatagactgtaaggttctatttacatgaaatctagaataggcaaaaataatttataatggaaaaaattcagaacagtggttgctggtggctgggggtaagaatggaaagggagcacaatagaacttttgggggtgattataatattgtgtaattctgtatcttgacagagattcatagtacatagacatatacatttgtcatatctcacaaatggtacacataaaatttacacattttactttatggcatttcacatttaaaaatgtaaactttgaatttatttaattttgaattaatttttttttgagatgaggtcttgctatattgcccaggctggtctcgaa

SEQ ID NO: 386618 - DNA, 509 bp, Homo sapiens
ttcattatttattaacttcattcaataaatagttacattgtacctactacatgccaggcactatgttagtgagtttgttcactcagtcagccagctctgtaacatggaaagaaatgggaacaatttcacctatctcatagccacctgaaatagctcagcatagatagttttctgttcatttgcttctcaggctgttccctcactcactcattcactcattcatttgcttattcatcaagtacccattgagggcattctgggtgctgaaccctgtgctgggtaggcactgtgcgggtgtgagttgtgttctgaagggtgaaggctgaggatcttgagagcccagaggagggatccagcccgacccgagggaccaggaagagtggtctggaaccagcaccctttggacctaggctagaggccgagcaggaaccattgaggagagaggcaggaggtcagtggcccaggcgggaaccctcacacccaagccccaacatttttattttgttttg

SEQ ID NO: 386619 - DNA, 387 bp, Homo sapiens
tcaaggctgtagttcttatttttaagatgttgcttttctggaatcttatttaactgaatgccagaggggctcagcaagaactctctacttttattgagttggaactactccatctacccacatatgacctctgatatctgatatctccagttaccttagtcctaaagcagctatctcccgttacctcttagtcctaaagcagcctttctttcttttctttctctctctctccttccttctttccttccttccttccttccttccttccttccttccttccttccttccttcctctctttctctctctttctctctttctttcttagacagaatctcactctgtctccaggctggagtgcagtggcgtgatcatggctgactgcaacc

SEQ ID NO: 386620 - DNA, 584 bp, Homo sapiens
caactagaaaatcaaatgggcgtcattttcacttaccccacaccacccttacccaactcctcatcacctcaccaaggcccttcttaggtttctaagccaatgctcattcagttttgcaagttacttcttaaacatacagtgacatctttaataactacatttgcaaatccaaatttctttgatattgtaagaaaagagcatttgtctttgaatagaagctctttcattggctgaatctgttcctttaaataatttagatccccttaatataaacttatgagatataaaactttctaaggctttttaatctaaaaactggatttactcttaggggatgtagtggagaagtgatgatgagtaattaaaggtcattctcaaacaaaaatatgtatttagaatcaggtcttctagattgaccaaaacatatgtggcaatgtatactttgatattataattgcttggagtttattttaggagacaattctccagagagttgatggatatctttgtgcattatcctattccttggcctttcttactgtgtagttaaaggatattaggattgctcaatcagaaaaatgata

SEQ ID NO: 386621 - DNA, 294 bp, Homo sapiens
accatgtccggctaatttttaaattttttatagcaacagggtcccactctgttgcccaggctggtttcaaactcctgggttcaagtgatgcttctgccttggcctgtcaaagtgttgggcttacactttgggcgtaacccaccatgcccagccaattattttttacgtgtattttttggtggcagggtggggtgggggcagggtcgggtgggggcagggtctcgctctgtcacccaggctggagtgcagtggcgtgatcgtggctcactgccttaagctcctgggctcaagtga

SEQ ID NO: 386622 - DNA, 718 bp, Homo sapiens
aagggcccaagtagggaatttctgtgcttatttgactcacctcaggagcaaatctctttctcccctaccattgcttttaccctgcaagggattcagtttcctgattataagttctgaggcactggatcctatttcttgagggaggcagagaccaaaacctttgaaatatgagacccactaaacgagcacagaatagagtttggtctgtccctttgttctgtctctgacagtagtagcaagagatgctttatgggaagaacacagtagctgccttcggtgaagtcaatttctaaaggttagggatgtgagcctctttgacttgccctgtaataactcattctggctccatcattcatgtgagctcctctaagcccttctggaacttatttattctttcagtctttattggattccaaaggatagaagcaacccctgagacttgtggttgagttgtgccctcatccatcagctgtggactccaatggtgaagtaatgttctctgtagaaaattatctgctggggttcttttcttggctctgccactagaaagctatgaccctgagtgaagtccttcaatctctctgagcctaggtttcctagcctagaaaacagaagtgggagcatctggcaatgcctagttcatggggtggctgcattctgaaggcagggactgtaccccattcatcattgcatccccagggcctgacatggtccctgg

SEQ ID NO: 386623 - DNA, 258 bp, Homo sapiens
atgcagggggcactgttgtaggctcatttggtcctctcaggtagcaaattgtaatccatagtgtaggatcagaagacacaaaggctgaggaaagactactagctcctagacttttaaggaatgggcagaggaagggaaaccaataagctaccaacagtgtaagagaagatcagagcaggatatcacaaaagctggggtaagagaatatttccagaaagagaaagtgattaaaagtgccacatattggccgggcatggt

SEQ ID NO: 386624 - DNA, 126 bp, Homo sapiens
ccttacgttcttccttccttctcttcttccttccttcctttattctttccttcctctttcttgttattttacccttcaaaagtgggttttaaagtttctatatacaataaatcactgctactttat

SEQ ID NO: 386625 - DNA, 195 bp, Homo sapiens
agtttacattgttgggtgctgaaattctgtatttctttgaagagtgttgaatcttttctgttggacttttacttgcagattagtttgatccttttgaggtatgttctaggctcttttagcgtgttctagagtagcatttatttgagaaataatttagccccacttcaaactgttgcctttccaggatttttactg

SEQ ID NO: 386626 - DNA, 250 bp, Homo sapiens
atgcttagtagcgtcacgtggctagtagctaccattttggatcatatagaatagaacatttttatcattgcagaaagttctatcagatgacactaatctagactttcatttataataagctgaaaatgaaatatgattagatattgtgaagataattaacggattcaaaacaaagggcccctcccaaaagttaacatagaaacaaaataactttttagctcctgggtgatcacaagaaacttaaaaagag

SEQ ID NO: 386627 - DNA, 705 bp, Homo sapiens
gtgaaaccttgtctcttctaaaatacaaaagttagccaggcatggtggtgtgcatctgtaatcccagctacttgggaggctgaggcaggagaattgcttgaacccgggaggcagaggttgcagtgagccaagattgtgccactacactccagcgtgggcaacagagcgagactccctctaaaaaaaaaatatgtaaatatatatattatatatatatacttcaacctatgaagttgtaattaccaaattgaccattttttagttattttaaaagtaaattgagtatagagttaagaaaataattcaaaattgctacgtaaaaattgctctccatttaagagtgtaggctacaggttttagataactacattatattttaataaaccaaaaggtatgtgtttgtatatagtttgccaagattcagaagtttttgagaaacaattacattttctcttcaaagtttaggtactctgacattcttttctaacctgtggttttgatgaatgtgccatgaaaaaagtgttctgtgtggaaacgaatttgggaaatgcagagttagatggataaagagtacatatattcacatatttatgaagcatttctgaacaactaatgtttctaacaggacaaccagtttcatttcaaactttttttttggatacactttttttgtagggattacatttataagcattttagatatat

SEQ ID NO: 386628 - DNA, 1406 bp, Homo sapiens
ggcacgaggctggttccctggcaggctggagggcaggagctggggccacgctggtctgggatagttgggcagggagacggagtctcgatctgtcacccaggctggagtgcagtggcacaaccttggctcactgcaacctccgcctcccgggttcaagtgattctcctgcctcagccttctgagtagctggaattacaggctgtctacctggtctccagaatggacggccctgtggcagagcatgccaagcaggagccctttcacgtggtcacacctctgttggagagctgggcgctgtcccaggtggcgggcatgcctgtcttcctcaagtgtgagaatgtgcagcccagcggctccttcaagattcggggcattgggcatttctgccaggagatggccaagaagggatgcagacacctggtgtgctcctcagggggtaatgcgggcatcgctgctgcctatgctgctaggaagctgggcattcctgccaccatcgtgctccccgagagcacctccctgcaggtggtgcagaggctgcagggggagggggccgaggttcagctgactggaaaggtctgggacgaggccaatctgagggcgcaagagttggccaagagggacggctgggagaatgtccccccgtttgaccaccccctaatatggaaaggccacgccagcctggtgcaggagctgaaagcagtgctgaggaccccaccaggtgccctggtgctggcagttgggggtgggggtctcctggccggggtggtggctggcctgctggaggtgggctggcagcatgtacccatcattgccatggagacccatggggcacactgcttcaatgcggccatcacagccggcaagctggtcacacttccagacatcaccagtgtggccaagagcctgggtgccaagacggtggccgctcgggccctggagtgcatgcaggtgtgcaagattcactctgaagtggtggaggacaccgaggctgtgagcgctgtgcagcagctcctggatgatgagcgtatgctggtggagcctgcctgtggggcagccttagcagccatctactcaggcctcctgcggaggctccaggccgagggctgcctgcccccttccctgacttcagttgtggtaatcgtgtgtggaggcaacaacatcaacagccgagagctgcaggctttgaaaacccacctgggccaggtctgaggggtcccatcctggccccaaagacccctgagaggcccatggacagtcctgtgtctggatgaggaggactcagtgctggcagatggcagtggaagctgccctgtgcaactgtgctggctgcctcctgaaggaagccctcctggactgcttcttttggctctccgacaactccggccaataaacactttctgaattga

SEQ ID NO: 386629 - DNA, 1266 bp, Homo sapiens
ggcacgaggctggttccctggcaggctggagggcaggagctggggccacgctggtctgggatagttgggcagggagacggagtctcgatctgtcacccaggctggagtgcagtggcacaaccttggctcactgcaacctccgcctcccgggttcaagtgattctcctgcctcagccttctgagtagctggaattacaggctgtctacctggtctccagaatggacggccctgtggcagagcatgccaagcaggagccctttcacgtggtcacacctctgttggagagctgggcgctgtcccaggtggcgggcatgcctgtcttcctcaagtgtgagaatgtgcagcccagcggctccttcaagattcggggcattgggcatttctgccaggagatggccaagaagggatgcagacacctggtgtgctcctcaggtctgggacgaggccaatctgagggcgcaagagttggccaagagggacggctgggagaatgtccccccgtttgaccaccccctaatatggaaaggccacgccagcctggtgcaggagctgaaagcagtgctgaggaccccaccaggtgccctggtgctggcagttgggggtgggggtctcctggccggggtggtggctggcctgctggaggtgggctggcagcatgtacccatcattgccatggagacccatggggcacactgcttcaatgcggccatcacagccggcaagctggtcacacttccagacatcaccagtgtggccaagagcctgggtgccaagacggtggccgctcgggccctggagtgcatgcaggtgtgcaagattcactctgaagtggtggaggacaccgaggctgtgagcgctgtgcagcagctcctggatgatgagcgtatgctggtggagcctgcctgtggggcagccttagcagccatctactcaggcctcctgcggaggctccaggccgagggctgcctgcccccttccctgacttcagttgtggtaatcgtgtgtggaggcaacaacatcaacagccgagagctgcaggctttgaaaacccacctgggccaggtctgaggggtcccatcctggccccaaagacccctgagaggcccatggacagtcctgtgtctggatgaggaggactcagtgctggcagatggcagtggaagctgccctgtgcaactgtgctggctgcctcctgaaggaagccctcctggactgcttcttttggctctccgacaactccggccaataaacactttctgaattga

SEQ ID NO: 386630 - DNA, 1283 bp, Homo sapiens
ggcacgaggctggttccctggcaggctggagggcaggagctggggccacgctggtctgggatagttgggcagggaggctgtctacctggtctccagaatggacggccctgtggcagagcatgccaagcaggagccctttcacgtggtcacacctctgttggagagctgggcgctgtcccaggtggcgggcatgcctgtcttcctcaagtgtgagaatgtgcagcccagcggctccttcaagattcggggcattgggcatttctgccaggagatggccaagaagggatgcagacacctggtgtgctcctcagggggtaatgcgggcatcgctgctgcctatgctgctaggaagctgggcattcctgccaccatcgtgctccccgagagcacctccctgcaggtggtgcagaggctgcagggggagggggccgaggttcagctgactggaaaggtctgggacgaggccaatctgagggcgcaagagttggccaagagggacggctgggagaatgtccccccgtttgaccaccccctaatatggaaaggccacgccagcctggtgcaggagctgaaagcagtgctgaggaccccaccaggtgccctggtgctggcagttgggggtgggggtctcctggccggggtggtggctggcctgctggaggtgggctggcagcatgtacccatcattgccatggagacccatggggcacactgcttcaatgcggccatcacagccggcaagctggtcacacttccagacatcaccagtgtggccaagagcctgggtgccaagacggtggccgctcgggccctggagtgcatgcaggtgtgcaagattcactctgaagtggtggaggacaccgaggctgtgagcgctgtgcagcagctcctggatgatgagcgtatgctggtggagcctgcctgtggggcagccttagcagccatctactcaggcctcctgcggaggctccaggccgagggctgcctgcccccttccctgacttcagttgtggtaatcgtgtgtggaggcaacaacatcaacagccgagagctgcaggctttgaaaacccacctgggccaggtctgaggggtcccatcctggccccaaagacccctgagaggcccatggacagtcctgtgtctggatgaggaggactcagtgctggcagatggcagtggaagctgtcttgtccctctgcccctcccccctcctcaaggtagtggccttggatagcctgtttgtgaataaagacaattcagccagctcccaaaattatgaagtg

SEQ ID NO: 386631 - DNA, 1127 bp, Homo sapiens
ggcacgaggctggttccctggcaggctggagggcaggagctggggccacgctggtctgggatagttgggcagggaggctgtctacctggtctccagaatggacggccctgtggcagagcatgccaagcaggagccctttcacgtggtcacacctctgttggagagctgggcgctgtcccaggtggcgggcatgcctgtcttcctcaagtgtgagaatgtgcagcccagcggctccttcaagattcggggcattgggcatttctgccaggagatggccaagaagggatgcagacacctggtgtgctcctcagggggtaatgcgggcatcgctgctgcctatgctgctaggaagctgggcattcctgccaccatcgtgctccccgagagcacctccctgcaggtggtgcagaggctgcagggggagggggccgaggttcagctgactggaaaggtctgggacgaggccaatctgagggcgcaagagttggccaagagggacggctgggagaatgtccccccgtttgaccaccccctaatatggaaaggccacgccagcctggtgcaggagctgaaagcagtgctgaggaccccaccaggtgccctggtgctggcagttgggggtgggggtctcctggccggggtggtggctggcctgctggaggtgggctggcagcatgtacccatcattgccatggagacccatggggcacactgcttcaatgcggccatcacagccggcaagctggtcacacttccagacatcaccagtgtggccaagagcctgggtgccaagacggtggccgctcgggccctggagtgcatgcaggtgtgcaagattcactctgaagtggtggaggacaccgaggctgtgagcgctgtgcagcagctcctgggtgagtgatccctgtcctccacctgggctcagagacccacgaagtccctgcatcctctagcaagagtgtgttctgtcttatctgtatcctcagcaccaggcactggctaggtgtgcagttactgtgcactaagtgcacgtcgagtagatggaagggggtgaggataaagaaggagtgtatcttgctgtctctagcccccagactttcatacatgctgctcctctctctggctgg

SEQ ID NO: 386632 - DNA, 1284 bp, Homo sapiens
ggcacgaggctggttccctggcaggctggagggcaggagctggggccacgctggtctgggatagttgggcagggaggctgtctacctggtctccagaatggacggccctgtggcagagcatgccaagcaggagccctttcacgtggtcacacctctgttggagagctgggcgctgtcccaggtggcgggcatgcctgtcttcctcaagtgtgagaatgtgcagcccagcggctccttcaagattcggggcattgggcatttctgccaggagatggccaagaagggatgcagacacctggtgtgctcctcagggggtaatgcgggcatcgctgctgcctatgctgctaggaagctgggcattcctgccaccatcgtgctccccgagagcacctccctgcaggtggtgcagaggctgcagggggagggggccgaggttcagctgactggaaaggtctgggacgaggccaatctgagggcgcaagagttggccaagagggacggctgggagaatgtccccccgtttgaccaccccctaatatggaaaggccacgccagcctggtgcaggagctgaaagcagtgctgaggaccccaccaggtgccctggtgctggcagttgggggtgggggtctcctggccggggtggtggctggcctgctggaggtgggctggcagcatgtacccatcattgccatggagacccatggggcacactgcttcaatgcggccatcacagccggcaagctggtcacacttccagacatcaccagtgtggccaagagcctgggtgccaagacggtggccgctcgggccctggagtgcatgcaggtgtgcaagattcactctgaagtggtggaggacaccgaggctgtgagcgctgtgcagcagctcctggatgatgagcgtatgctggtggagcctgcctgtggggcagccttagcagccatctactcaggcctcctgcggaggctccaggccgagggctgcctgcccccttccctgacttcagttgtggtaatcgtgtgtggaggcaacaacatcaacagccgagagctgcaggctttgaaaacccacctgggccaggtctgaggggtcccatcctggccccaaagacccctgagaggcccatggacagtcctgtgtctggatgaggaggactcagtgctggcagatggcagtggaagctgccctgtgcaactgtgctggctgcctcctgaaggaagccctcctggactgcttcttttggctctccgacaactccggccaataaacactttctgaattga

SEQ ID NO: 386633 - DNA, 1416 bp, Homo sapiens
ggcacgaggctggttccctggcaggctggagggcaggagctggggccacgctggtctgggatagttgggcagggaggctgtctacctggtctccagaatggacggccctgtggcagagcatgccaagcaggagccctttcacgtggtcacacctctgttggagagctgggcgctgtcccaggtggcgggcatgcctgtcttcctcaagtgtgagaatgtgcagcccagcggctccttcaagattcggggcattgggcatttctgccaggagatggccaagaagggatgcagacacctggtgtgctcctcagggggtaatgcgggcatcgctgctgcctatgctgctaggaagctgggcattcctgccaccatcgtgctccccgagagcacctccctgcaggtggtgcagaggctgcagggggagggggccgaggttcagctgactggaaaggtctgggacgaggccaatctgagggcgcaagagttggccaagagggacggctgggagaatgtccccccgtttgaccaccccctaatatggaaaggccacgccagcctggtgcaggagctgaaagcagtgctgaggaccccaccaggtgccctggtgctggcagttgggggtgggggtctcctggccggggtggtggctggcctgctggaggtgggctggcagcatgtacccatcattgccatggagacccatggggcacactgcttcaatgcggccatcacagccggcaagctggtcacacttccagacatcaccagtgtggccaagagcctgggtgccaagacggtggccgctcgggccctggagtgcatgcaggtgtgcaagattcactctgaagtggtggaggacaccgaggctgtgagcgctgtgcagcagctcctggatgatgagcgtatgctggtggagcctgcctgtggggcagccttagcagccatctactcaggcctcctgcggaggctccaggccgagggctgcctgcccccttccctgacttcagttgtggtaatcgtgtgtggaggcaacaacatcaacagccgagagctgcaggctttgaaaacccacctgggccaggtctgaggggtcccatcctggccccaaagacccctgagaggcccatggacagtcctgtgtctggatgaggaggactcagtgctggcagatggcagtggaagctgccctgtgcaactgtgctggctgcctcctgaaggaagccctcctggactgcttcttttggctctccgacaactccggccaataaacactttctgaattgagattacgaatgctatggatcctatctttccatgtcagtgagctcacaggagacacaccacaatcctgttgccacttctgtaataaagtgactccaagccccaaaaacacttacacgaaaactctccagcgct

SEQ ID NO: 386634 - DNA, 571 bp, Homo sapiens
tggttcttcttccctttccttcctctctccatcccccgatcctggcagatgatgagcgtatgctggtggagcctgcctgtggggcagccttagcagccatctactcaggcctcctgcggaggctccaggccgagggctgcctgcccccttccctgacttcagttgtggtaatcgtgtgtggaggcaacaacatcaacagccgagagctgcaggctttgaaaacccacctgggccaggtctgaggggtcccatcctggccccaaagacccctgagaggcccatggacagtcctgtgtctggatgaggaggactcagtgctggcagatggcagtggaagctgccctgtgcaactgtgctggctgcctcctgaaggaagccctcctggactgcttcttttggctctccgacaactccggccaataaacactttctgaattgagattacgaatgctatggatcctatctttccatgtcagtgagctcacaggagacacaccacaatcctgttgccacttctgtaataaagtgactccaagccccaaaaacacttacacgaaaactctccagcgct

SEQ ID NO: 386635 - DNA, 982 bp, Homo sapiens
agcagcagaggcactctgggcagctgggtgagggcccatctgggcaaggcccccagcgcctgccttctctcccggggccctgtgggcaagcctcctgcttcactttcaggtttctcgaagtgccttcttgctcctgtctgtttccccatcctgccagatttctgtttctcttgctgggcttttggcagtagggggctgtgttggtgggccctacgaagatgctcagtgctcgagatcgccgggaccggcaccctgaggagggggtagttgcagagctccagggcttcgcggtggacaaggccttcctcacctcccacaagggcatcctgctggaaaccgagctggccctgaccctcatcatcttcatctgcttcacggcctccatctctgcctacatggccgcggcgctactggagttcttcatcacacttgccttcctcttcctctatgccacccagtactaccagcgcttcgaccgaattaactggccctgtctggacttcctgcgctgtgtcagtgccatcatcatcttcctggtggtctcctttgcagctgtgacctcccgggacggagctgccattgctgcttttgtttttggcatcatcctggtttccatctttgcctatgatgccttcaagatctaccggactgagatggcacccggggccagccagggggaccagcagtgactctggggctacctggctcctaggcccagccagccagagaggacagtggagcccagacacgtctccttgggattcactagcccccagcccgccaaaccccaccccagccctacacagcagtctggcctgagacgtcactggggacttatctgtggagcctggtgctccaggatgtggcttctcatgaagctctggccagaggaggggaacttattgggggagggggggtggaggggaggaatctggacctctaagtcattcccaaattaaaatattcaaattctaaaaatgag

SEQ ID NO: 386636 - DNA, 913 bp, Homo sapiens
aggaaatgggagaaaggaccggccaaacaagagggttaaggtttctcgaagtgccttcttgctcctgtctgtttccccatcctgccagatttctgtttctcttgctgggcttttggcagtagggggctgtgttggtgggccctacgaagatgctcagtgctcgagatcgccgggaccggcaccctgaggagggggtagttgcagagctccagggcttcgcggtggacaaggccttcctcacctcccacaagggcatcctgctggaaaccgagctggccctgaccctcatcatcttcatctgcttcacggcctccatctctgcctacatggccgcggcgctactggagttcttcatcacacttgccttcctcttcctctatgccacccagtactaccagcgcttcgaccgaattaactggccctgtctggacttcctgcgctgtgtcagtgccatcatcatcttcctggtggtctcctttgcagctgtgacctcccgggacggagctgccattgctgcttttgtttttggcatcatcctggtttccatctttgcctatgatgccttcaagatctaccggactgagatggcacccggggccagccagggggaccagcagtgactctggggctacctggctcctaggcccagccagccagagaggacagtggagcccagacacgtctccttgggattcactagcccccagcccgccaaaccccaccccagccctacacagcagtctggcctgagacgtcactggggacttatctgtggagcctggtgctccaggatgtggcttctcatgaagctctggccagaggaggggaacttattgggggagggggggtggaggggaggaatctggacctctaagtcattcccaaattaaaatattcaaattctaaaaatgag

SEQ ID NO: 386637 - DNA, 820 bp, Homo sapiens
aggaaatgggagaaaggaccggccaaacaagagggttaaggtttctcgaagtgccttcttgctcctgtctgtttccccatcctgccagatttctgtttctcttgctgggcttttggcagtagggggctgtgttggtgggccctacgaagatgctcagtgctcgagatcgccgggaccggcaccctgaggagggggtagttgcagagctccagggcttcgcggtggacaaggccttcctcacctcccacaagggcatcctgctggaaaccgagctggccctgaccctcatcatcttcatctgcttcacggcctccatctctgcctacatggccgcggcgctactggagttcttcatcacacttgccttcctcttcctctatgccacccagtactaccagcgcttcgaccgaattaactggccctgtctggtttttggcatcatcctggtttccatctttgcctatgatgccttcaagatctaccggactgagatggcacccggggccagccagggggaccagcagtgactctggggctacctggctcctaggcccagccagccagagaggacagtggagcccagacacgtctccttgggattcactagcccccagcccgccaaaccccaccccagccctacacagcagtctggcctgagacgtcactggggacttatctgtggagcctggtgctccaggatgtggcttctcatgaagctctggccagaggaggggaacttattgggggagggggggtggaggggaggaatctggacctctaagtcattcccaaattaaaatattcaaattctaaaaatgag

SEQ ID NO: 386638 - DNA, 824 bp, Homo sapiens
tgcattttcctttcctccccgagcttctttccatttccacaccacagctgggctttgtcccatgctatgccctgcactcaaaggtgtgctttgactcacactgatttcacagctgcagggccacgggcaatcaggaggaccacatccgctagatctactctcccactcagcaaaggtccagccccagccctggcctggcttgacccccccgggctggcatactccagccgctgtcccctgggttccagccccagcgcctggcttctggtcctggttgctctggttcatctgcttccactccctgggtagcagtgtgagcgctctgtctcttgaatgtgcttcatattgtgtgaggggtatcctatggaggggttcagaatccctcagggtcgggctgctggctagcctggaaaacttcagggtaacgccccctgccttctgaggtcctgttaaccctgcacccctggcccccaggacttcctgcgctgtgtcagtgccatcatcatcttcctggtggtctcctttgcagctgtgacctcccgggacggagctgccattgctgcttttgtgagttcagccctgcaggactccttagcccctcaagagctcaggctggtgcttgcacactttctgtatcagaagccacagccaggacttggggttctggcttgcacctcaccctataccttaacccaatggccctatagcctctgttttgccatccccactcccactcccacaggtttttggcatcatcctggtttccatctttgcctatgatgccttcaagatctaccggactgagatggcacccggggccagcc

SEQ ID NO: 386639 - DNA, 1952 bp, Homo sapiens
agcagcagaggcactctgggcagctgggtgagggcccatctgggcaaggcccccagcgcctgccttctctcccggggccctgtgggcaagcctcctgcttcactttcaggtttctcgaagtgccttcttgctcctgtctgtttccccatcctgccagatttctgtttctcttgctgggcttttggcagtagggggctgtgttggtgggccctacgaagatgctcagtgctcgagatcgccgggaccggcaccctgaggagggggtagttgcagagctccagggcttcgcggtggacaaggccttcctcacctcccacaagggcatcctgctggaaaccgagctggtaacagctgcctcccaacctggtgcctccatctccctgacccccggctcctggccagccttatgccagcccccagctcacccttcagtagcctccttccccaagccctctggacacctctcctgcccgcagctgccccttcttcgtctcctactctgccttcttgctgcctctccacccggagacatttacagcaggtttcagttgcagcaggaaggactgcagttagacagggtgactttttgggacattgaggaagcttgagacatagggatgggacaggggcaatgacagcctctaacatggccacttctcagcacgtccaagaagtctaactatcaaaaagggcagacttcctgcaactgcactttatctgtggtctgctgcccagaaacatctcttctcaggaaaggatcttcccctggttacttagcaagaccacagtgtagagttaaggcctctgcacgtatgccaccctaggtcatcagagctaaagggctcccagaaaccactgggcagcatctgccttctctcttggcatggaatcaaaggctctggtccttgtcagggggctttcaggcatctgggggtggggaaagcattatgaggcagggggctcctcttggtccctgtggagtcgggtctctgtgggcacaactccaggggctggcattcacactgtacctatgaattactgtgggatagtgctcctgggagccatatggcttggccagactgctggggttgctgggtgagcagagtgggaggccggagactgcccttgaccggcaaatgccctgcaacggtggctcctgacaccaggggatagggagatgtgccagagtccttcctcccctccaaggacaggtagtaggtgccagcctaggggagcttccaaggaggggaaggcaaagccctggcccctgcctgtgtccccttcttggcatgttccacatgctcggtcctgcaggccctgaccctcatcatcttcatctgcttcacggcctccatctctgcctacatggccgcggcgctactggagttcttcatcacacttgccttcctcttcctctatgccacccagtactaccagcgcttcgaccgaattaactggccctgtctggacttcctgcgctgtgtcagtgccatcatcatcttcctggtggtctcctttgcagctgtgacctcccgggacggagctgccattgctgcttttgtttttggcatcatcctggtttccatctttgcctatgatgccttcaagatctaccggactgagatggcacccggggccagccagggggaccagcagtgactctggggctacctggctcctaggcccagccagccagagaggacagtggagcccagacacgtctccttgggattcactagcccccagcccgccaaaccccaccccagccctacacagcagtctggcctgagacgtcactggggacttatctgtggagcctggtgctccaggatgtggcttctcatgaagctctggccagaggaggggaacttattgggggagggggggtggaggggaggaatctggacctctaagtcattcccaaattaaaatattcaaattctaaaaatgag

SEQ ID NO: 386640 - DNA, 1725 bp, Homo sapiens
agcagcagaggcactctgggcagctgggtgagggcccatctgggcaaggcccccagcgcctgccttctctcccggggccctgtgggcaagcctcctgcttcactttcaggtttctcgaagtgccttcttgctcctgtctgtttccccatcctgccagatttctgtttctcttgctgggcttttggcagtagggggctgtgttggtgggccctacgaagatgctcagtgctcgagatcgccgggaccggcaccctgaggagggggtagttgcagagctccagggcttcgcggtggacaaggccttcctcacctcccacaagggcatcctgctggaaaccgagctggtaacagctgcctcccaacctggtgcctccatctccctgacccccggctcctggccagccttatgccagcccccagctcacccttcagtagcctccttccccaagccctctggacacctctcctgcccgcagctgccccttcttcgtctcctactctgccttcttgctgcctctccacccggagacatttacagcaggtttcagttgcagcaggaaggactgcagttagacagggtgactttttgggacattgaggaagcttgagacatagggatgggacaggggcaatgacagcctctaacatggccacttctcagcacgtccaagaagtctaactatcaaaaagggcagacttcctgcaactgcactttatctgtggtctgctgcccagaaacatctcttctcaggaaaggatcttcccctggttacttagcaagaccacagtgtagagttaaggcctctgcacgtatgccaccctaggtcatcagagctaaagggctcccagaaaccactgggcagcatctgccttctctcttggcatggaatcaaaggctctggtccttgtcagggggctttcaggcatctgggggtggggaaagcattatgaggcagggggctcctcttggtccctgtggagtcgggtctctgtgggcacaactccaggggctggcattcacactgtacctatgaattactgtgggatagtgctcctgggagccatatggcttggccagactgctggggttgctgggtgagcagagtgggaggccggagactgcccttgaccggcaaatgccctgcaacggtggctcctgacaccaggggatagggagatgtgccagagtccttcctcccctccaaggacaggtagtaggtgccagcctaggggagcttccaaggaggggaaggcaaagccctggcccctgcctgtgtccccttcttggcatgttccacatgctcggtcctgcaggccctgaccctcatcatcttcatctgcttcacggcctccatctctgcctacatggccgcggcgctactggagttcttcatcacacttgccttcctcttcctctatgccacccagtactaccagcgcttcgaccgaattaactggccctgtctggtgaggaaccctgacccctagcccagtttggggcccttccctctcctctaaatgatgcattttcctttcctccccgagcttctttccatttccacaccacagctgggctttgtcccatgctatgccctgcactcaaaggtgtgctttgactcacactgatttcacagctgcagggccacgggcaatcaggaggaccacatccgctagatctactctcccactcagcaaaggtccagccccagccctggcctggcttga

SEQ ID NO: 386641 - DNA, 425 bp, Homo sapiens
ctatggctgactctcgaggatccacgaaagtattcacaacacatatatctgacaaaggacttgtatcctgaatatttaaactactccaactttgttactacacaatgtatgagtttagcacattacaggacgcacatgaactttgaaatctattagccaattagaagaatatgtctttacatctttcaaaaagaataggtaaaaagaaataatatattttcagttataaatattttcatccaagtcagtgtagaaaaatattgactagaaaattaagataaaacttcaacctaaaactacagaaaaagaacctttcaatgtttaaagttttgttatgttcctttatttgagatgctttgctgttcttcctatgtaagacatcacatagcttcctagtggtaaactttgcttttaaaatttctcac

SEQ ID NO: 386642 - DNA, 1066 bp, Homo sapiens
gccttttcagaaaaagtttgcaggaatttcctctgcccttggagcaaccattgaaaaaagaagaggaaataatttaacatgttaataaaataaatcaaatgtatttaaaaacagttaagagaagttaggaagaagagaaaaaggaacaaaaaactgatgggataaatagaaaataaatagcaaggtggtaagtttaaatctaaccatattgatgactgcattaaatataaatggactgctgaggtgtgaagattgcttgaggccaagagttcaagaccaacctggccaacacagcgagaccctgtctcaattttttttaattaaaaaaatataaatggactaagcacgttaattaagaaactgagatggttagagtgattaaaaaaaaaagaccaaatgagcgtaaaagaaatgcaatttaaatgaaaagacacagttttaacatttaaagagctaggtgagatggttcactcttgtaggcccagcttgtcaggatgctgaagtaggaggattacttgaatgtagaaggttgagactgcagtgagccatgattgattgcaccagtgtactccagcccaggctgcagagtgagaccctatttaaaaaaaaataaaaagaaaaaaaagaaaagaaaatagctaattgttttggatttgggtcataaaatgatggaacagaaattgggtttagttaattatgcctatgaattaatttatggatcccatattctcagagtttatccttaaagacagtcttaaagtccttaagaaaataaagagagaacggccaggcgtattggctcacacctgtaatcccagcactttgggaggccgaggcaggcggatcacaagatcaggagatcgagaccttcctaacacagtgaaaccctgtctctactaaaaatccacaaccaaagttagctgggtgtggtggcggacgcctgtagtcccagctactggggaggctgaggcgggagaatggcatgaatccaggaggcggagcttgcagtgagccgagattgcaccactgcactccagcctgggcgacagagtgagactctgtctca

SEQ ID NO: 386643 - DNA, 389 bp, Homo sapiens
ctgtctcttatctgggcaagctttagacatactagcttggttggaaactgatattaaaagcctaaaacatgtaacttttcttatcaggttactatcatggggaactaaagattcctggttttttgtatgttccataactatactttagtaagccctgatatacggtgttaatttttcttcagtgaaggaaacatgaagatatatttatgtgcacacatacatatatatgtatatataacgtatattcaaacatgcactcagaggaagttagggagagaagtttctagctaaacatgatcttgtgaaattcttccatatgtggaaaagtcgtcagttcatctgacatagagcaatacatacatatatacacacaggatgctatgtataca

SEQ ID NO: 386644 - DNA, 402 bp, Homo sapiens
ttccgcctcccaaagtgctgggattacaggcatgagccactgcgcctggtcaatttcccacattttcttaagattatgtttggcctacaaaagctcaacccaaagctatcttatcaagctggtatggaatctttatttcagcaaggtgatatccccaatatgtaattcaaccttttgtttattccaataattagtacgcaggtgctattttaactaaaattgtgttaaatttgagataaaatcaatgtatttttgtaattttgttttcaccctgaaaattggtcctactataagacaagatgggatcacccttcctgtgatggctggctccggtggaagcctgcgtggggctcccatacccctcaccctcctggacagatcgtcaccctgtctctgcttaaa

SEQ ID NO: 386645 - DNA, 836 bp, Homo sapiens
gatttaagaaacagttttattctataggaaacatactaagtaattgatatatgtgttgtggaaggttactgaactgggagacatgttatcttagttctagtctgcattctatagaaacaatttacataacctttggtaagttgcttaacctctctggagctgttcatccatttataaaatgaaggtattgaactaaatgacctctaaaattcaatttagctctactattgcatggtttaatgactctatgataattttttccattagagaaagtacagtcaagaaaggcattttagaacttgtagcaaaattttttttaattctcctgaatttaaaaaatgttatccacttataaataatgttttaaagtttatgtagatgcctctcagatggtccctgaacagtaagtggcaaatgaagctgtcctaaaatagaggttccttaatttcagtgtttggggtttcttcccaaactcagtttccttactaaagtgatcaaaatactcctatagtgaaaaacctcttccttttatgtcttaactgtgactgttaggtaagttttgaagataaataattttttttctataatcagatgattttctatgtctagtcatgcatccatataatcatccttttttctgcctcataaatcatctgatgttttttcctaagaccttttatgggtttggctggtcagagtcatcctgagaggaatcagcatcagtggtggtcatgggatggtcatagatactagtttgggtcctatggagataatatttttgataagcagctgtggtattgcaagccatacagcagtgaatgtcctgtaataataac

SEQ ID NO: 386646 - DNA, 408 bp, Homo sapiens
gtttttttgtttgttttttggagtgtttgtttgtttgtttggagtgtttgtctctgtctgtcgcccggactggatcacagctcactgcagcctcgacctcttgggctcaagcagtcttcccaccaggtagctgggactacaggcttacaccaccaggctaggctaatttttgtattttttgtagagatggggtttcgcctttgccacgtggctcaggctggtctcaatttcctgggctcaagtgatcttcccacctcagcctcccaaagtcctgggattacaggcatgagccaccgcgcctggccagattttctttttcttttctttcttttttttttttactttgataacaacatgacatttcatgtcactggattacaatttgttctttttctaacattttcactg

SEQ ID NO: 386647 - DNA, 539 bp, Homo sapiens
cagtagcaattgtcatctgtgtaaataaggttattgatttctaaaaggtctatgtttaatcagatggattagtcattctgtctttcacacctgtggtgactaattcaaaggaaaagccctatcattttgccagctggtgtttaagagttgctttgttttctgtgaaaccaggtgtactgcattagaaaagtttattcaacttttaatcattaagcattgtgataaattgtaaacttagaaattgtttggtttactgtattaaaaatgttggattcctgtaattccagcattttgggaggctgaggtgggaggattgcttgagttcaagagttcaagaccagtctgggcaacatggtaggaccccatctctacaaaaaggaaaaaacaatttggcctgggagtgcacgcttgtggtcccagctacccaggaagttaaggtgggaggtttacttgagcccagaaggttgaggctgtgatgagccatgatcgtttcattgcactctagcctgggcaacagagtgagaccctgtctcaaaaaa

SEQ ID NO: 386648 - DNA, 459 bp, Homo sapiens
catcagaattcttttactagattaccagtcatccttcaggtatccttctctgagatcctaagatagatttacgtccttcttcgtgctcctcttgtgcagaatctgaccatagtagttaacttcatatggtaacttaactgtttaacagattcctccactacactccatgaaaacaaagactgagttttaaatcaagtctctggttcctaaccagcacctgatacattataggctttagtttaaatgtatgaataagcctgggtgcgatggctcatgcctgtaatcccagcactttgggaggccaaggtgggaggatcacttgagtccaggagtttgagaccagcctgggtaacatagtgagaccctgtctctacaaattatcaaaaattagctgggcattgtggtacatgcctgtagttctagctacttgggaggctgaaacaggctaattgcttgagc

SEQ ID NO: 386649 - DNA, 344 bp, Homo sapiens
tgaaatgcacatctgagaggtgcgtaaggagaccgcagggacacgctctgggaaacagggcaaagccaacagggatttgggattagcagaagtcctgtggcatcaagcagcccgacagccaggagaccagccaacacttgtgccaacgtggtcaggagagacatggcagacgcatgtcctggctccaggcattcaggcagaagggaagcaaacactactgaacacacctccacatgacctgggccgtagggtgtccctgcagaacccacccaatcacagctcgcatttcttttctttctttctttcttttttttttttttgagacagtctcgttctgtcgccca

SEQ ID NO: 386650 - DNA, 403 bp, Homo sapiens
tacaaagaatgaaagtagattagtagtggttgcttaaagctaaaggtgtttaaaggaaatacagaggggactgctaaaggacaaggagtgataaaaatgttctaaaattgtgattgttgtgtaattctgggaattcactaagaaaccattgaagtgtacattttatatgtgtgaattatatggtatgcaaatgatagtaagcacacatagacacatgtataatgtgggacaccattaagggcaacatatgtgtaatgaaaaattttttaagtagtcaaagaaataatgactagaaacttcccaagtttggtgaaaaacatattttcagaagctcaacatactccaagtaggataaatgcaaagagattcaaaagtagacatgttattgtcagaatgttgaaag

SEQ ID NO: 386651 - DNA, 420 bp, Homo sapiens
ggtactaatgagtggcccatcaccaggacaaaactttttttcatgccagtataacagtttcctaaaatcatagctttgtatcaaagaacgtatgcataggactgcatttcttcattactgatatttttggtgattgccctgatcttgtttacctggttgatcttcctgtcaggttccactttcaaaggaaagcaactgtatggcaagtacaacttacttacctgcaaatgggtgaatagttgtaactgaattcatagaagactggtgtaggttcagttcactttgtcacgttcccatatctcatgttccacttacactgttgggctttcccatcattcctgtcatctgcgccagggacagcaagtggggcagaacctaacttgactgtgtcactggagagagctggtcactgcaaaccct

SEQ ID NO: 386652 - DNA, 522 bp, Homo sapiens
tctccatggcctggtggccctgccctgaagcgtggtgggcttccgaggcactggcacacgcagctcaccctgagcatcagtaagccttctctgcagccaacccctagcatggatagcttgggcacaaggggatgggaatgaggagcttcctcctcctggcccctggaagagggagaagagagcatttactgaccactaagcactctgtgcccagcatgggagcaggtgcttcacatgcattatggttaagtgatccttatcacttttcaccttatgatgcagatatttgaaatcattctattttacagatgagaacacagaggctcaggaaagtgaagcagcttggcctacggtttcacaaatggaaaatgttagagctgggtcacacacagaggtctgctggctccagagcctgagctttggctttcagggtctcagtttctcacttataaaatgggtatgacaaaaaaaatccctccttcacagtgttcttgtgagcattaaaaaagtagcaatgttaac

SEQ ID NO: 386653 - DNA, 1481 bp, Homo sapiens
ttcaaactagatgttctagagagcactagctgcaatcacattgggagactgatgctccatgacagctaaaagttggattgagtttcaggagctactatatataaagctgggtcgacttatgtcactgcactaattaaatgccatctgggtggttcctctgggtttttgagtccatcacccagttcagatcgagtcagaggccaaggaggagaacatgatgatggacctttttgaaactggctcctatttcttctacttggatggggaaaatgttactctgcagccattagaagtggcagaaggctctcctttgtatccagggagtgatggtaccttgtccccctgccaggaccaaatgcccccggaagcggggagcgacagcagcggagaggaacatgtcctggcgcccccgggcctgcagcctccacactgccccggccagtgtctgatctgggcttgcaagacctgcaagagaaaatctgcccccactgaccggcgaaaagccgccaccctgcgcgaaaggaggaggctaaagaaaatcaacgaggccttcgaggcactgaagcggcgaactgtggccaaccccaaccagaggctgcccaaggtggagattctgcggagcgccatcagctatattgagcggctgcaggacctgctgcaccggctggatcagcaggagaagatgcaggagctgggggtggaccccttcagctacagacccaaacaagaaaatcttgagggtgcggatttcctgcgcacctgcagctcccagtggccaagtgtttccgatcattccagggggctcgtgataacggctaaggaaggaggagcaagtattgattcgtcagcctcgagtagccttcgatgcctttcttccatcgtggacagtatttcctcggaggaacgcaaactcccctgcgtggaggaagtggtggagaagtaactgagcctgcgcttgagaccttctccacgcagcaggaagatcccaccgacccttcctggcctaatcctttagattaggtcacattacattaacatttaggaacccagaccgaaaagttgctgaaagggaaggagacacattcacaaagaaacgttgcgaaaattgcgaaatctgttgtgcatgctcaaatgaaaacgcctttcggctttgggcttttatttttttggaactgcgagtggcttaggtctagcctcattttgtttttgtttggttggttttatactatattaacttttattacggtgatccttttgtgccatgttcaaaagaagttcattcctgtctaaagtgggaaagttgcatttaatgttaggggtatttaatgtatttttgtaaatagtttaacactttctttttttacgtaaacctgaaatatattttaaatgtggaatgatgtatataaaatgtgcgaggatcctggtattgtaatattaaaaagaagtttctatatgaaaaaagttggtcctaatttgatgga

SEQ ID NO: 386654 - DNA, 344 bp, Homo sapiens
tcaatctcttcatttgtccagtgcccaaagtcttttctggttctaaaagaccatgattccaaattattgttagtgacctacatatatgcatgcatgcatgcatgcatacacatacacacatatgtatagtgactattgtactgggtttgacaacaggtaaaggcagtgtcttataaatattacatattttatgaaaaccaaacagcctttgtgtttaagtcagaaggaacatatggttcacatacagtctaattttcaaatagctgtgcattgaaattcttgatctacaggatagattcatatttgtgcagatattaactttttatgagtattcattgtttttc

SEQ ID NO: 386655 - DNA, 137 bp, Homo sapiens
tcatctgggagaaggatcaaatcctgccatctggatgtgcattattaatgctggtgtttggtgaggaagctcctaggaatgcatagatctctccttctgccatagtatgtcgtgtgtagtggatgccagtagacaac

SEQ ID NO: 386656 - DNA, 705 bp, Homo sapiens
cgccccctttctcctttagctgccaccggctgctctgtctagcttctcacctgctggcttttcagcttcaactcctggctaatgagtgaagaaggtcactgtaggagtgtgaggaccatcaggagcttcatatttcaataaccagtgccaaattctgaatgccagatgggatgagatgggatgttaaaccacttcttattaccatgttgttggcctccattgccttcgtattggtctccaattgcatggtctctgtggatctctgacttcttattacctccgattggaacgcgccacaaatcatcctgctttctttatcctctctcacctccaagtaatcctgtcatcttgctccaattagagccgcttccattaagaagatcgtgacaaattccctacccctgtttgctcttcaggaaaattatcccctggaaaagtggatgttatagtcgcttttcagaatgtattgtctgaatttcttgtcttccaacattctcctaagccagttacctttgcactgaagtagaattcaaaaggagatagaggttctgaatttcttcctttgaccagatggaagtcgttacatcagaatgctgatgactgcaaaatcttggacatattgttttcacaattaggaaatggcaaacacaaagttcttcagtgcaaagccagcatgcgagttcagcttccatttgctgctataaa

SEQ ID NO: 386657 - DNA, 621 bp, Homo sapiens
tcagctcggtaccccacttatgcgtgggcttcattctaaagtgtctggccgggagcgttggctttcgcctgtaatcccaacactttgggaggccaggacagatcacttgaggtcaggagttcgagaccagcccagccaacatggcgaaaccatgtctctactaaaaatacaaaaattatggtgacgcctgcctgtagtcccagctactcgggaggctgaggcaggaggatcgcttgaacccaggaagtggagactgcagtgagccgatatcgcaccacagcgctccagcctggtcgacagagtgagactccatctcaagaaaaaaataaaaataaagttgttctctgaagagcaaatgtctcattccagtaatgacccactcagcaggaatatggtggagttcagtccaattcaggtcagccatatccaaaagaccacaagtcattactaagttgagcaaaagagtttttatctattagcagaaagggcctctctggcagcagagattaaaaactggcccaacttcatttccatacttcagggaatagcaaattgaagatttacttatctaggacttgaattccttctttgggtccaagttaataaaagaccaagaaactc

SEQ ID NO: 386658 - DNA, 858 bp, Homo sapiens
  misc_feature (53)..(53): n is a, c, g, or t
accatcacatgggtagggattttccatccagagccaataaaaggactggtggnggccgggggtggctattgtgggaagtcataacccacagatagatcaacctaagaatcctggcccttctccactctccaccatgcaggacaaacatcttctcaagcagtcaacgtagaatgcttgggaaatagtcataattacccacatatagtaattaatagatggtaattaattgatccttgatgtgatgttcttttgcatatttccttcattctaaagttgttccctggccgggagccgttggctttcgcctgtaatcccaacactttgggaggccaggacagatcacttgaggtcaggagttcgagaccagcccagccaacatggcgaaaccatgtctctactaaaaatacaaaaattatggtgacgcctgcctgtagtcccagctactcgggaggctgaggcaggaggatcgcttgaacccaggaagtggagactgcagtgagccgatatcgcaccacagcgctccagcctggtcgacagagtgagactccatctcaagaaaaaaataaaaataaagttgttctctgaagagcaaatgtctcattccagtaatgacccactcagcaggaatatggtggagttcagtccaattcaggtcagccatatccaaaagaccacaagtcattactaagttgagcaaaagagtttttatctattagcagaaagggcctctctggcagcagagattaaaaactggcccaacttcatttccatacttcagggaatagcaaattgaagatttacttatctaggacttgaattccttctttgggtccaagttaataaaagaccaagaaactc

SEQ ID NO: 386659 - DNA, 524 bp, Homo sapiens
aaaaaattcttccccaaatctgagattactgatgctccaagaagaaatgtgcctcctgaccctaggttttaagtaccattgttttactgtcttgttacttagcaggaagagtatggatccatggcaaggatgttagacggtttcatccagatgaatatcagtgatacttaggaactgcctctgtgaggtggttacatttgtttctctgtttgactttcacaagagtcttgacctacactggggaatcaaatcatacttttgtcttgtgggggaatcaaatcatactcctgtcttggaggaaaatcaaataatctaatctttttcactgcttcagtttctttccctgtaggacctgctgatatgaaaagtcaggccttcatatctgcagattctatatccctcaaatactgtatttccaattcatggttggttgaatcagaggatgtggaacctgtggatatggaaggcttgactgtactgtactttttatcattattttagagagtactccttctacttactaa

SEQ ID NO: 386660 - DNA, 586 bp, Homo sapiens
gcacccgcaaccctatgtttttttctaagaatatagtgtcccttgccccctgctacaagccttacccagtgttacataatttattgtaattaaattgtttattaatgatacattcttgctgtagaagaaaacgtgtccttttgggctcagtacagtatatgtttcttaagtaagagggatcatattaaaccagctacttaatgtgaagcagatagccagtgttctccatgtacaatcttagggagggtaatttttgttttggctgtgtaattatggtttgaggcagcccattaatcgcatatttcagctgtcaaatagaaatttggcccagaaaggaatacactttggctttacaaaactgcttattttcaaatttttaaatggggacaaaaacgaatatgctatattatatacttttatttatataatttttttttcagcaactttttctcttttgaaaatgcaagagcctgaaaaacattgtgaatatacttgtaacattgcaaagctatttcaccagagtaaagatattttggttgttcatatacgagtgtgttcgttgtttatctaataaattgttaaaact

SEQ ID NO: 386661 - DNA, 479 bp, Homo sapiens
cagtgctggccgctgtcattaagcacacacagcttccacagggcagcagagtggctcctgggcagatcctaggggagcaggctctgttgcttgggcacactcccttttttactatgtgctagctatgtggcctggagcaatagattgaacctttctgtacctaagctttctcatctatgaaaagtggagataatgataatagtacctccctcagagggctgttgttgggactaactgtgccaagtcatgtggagtgtttagcaaagtgtctggctcatattaagtactcagtaaatgtcagcttttactattccccggctggaaggaaccctaaaaacaatatgccccctattttttaaagagacattgaagctaacagatgttcttttctcccttaagtttttagggcctttatttctgaattttagaaaggaagataggattctttatctctcccttaaataaaaacacatttcagt

SEQ ID NO: 386662 - DNA, 414 bp, Homo sapiens
ccatctctactaaaaatacaaaaattagccaggcatgatggcatgcacctgtaatcccggctactcagggggctgaggcaggagaactgcttgaacccgggaggtggaggttgcagtgagccaagatcgccccattgcactccagcctagtgacagagcaagactctgtttcaaaaaaaaaaaaatttttttttaaaaaaagaacaacttctgaaccaaacacctactgtagcacagctcctcaaagccctttccagatgggaagctgcccaggaaatatctcacccactacaaccatacagccatctcttgggtggagtgaggcaggtgttctgcccagagctgcatactgacctggggcaggaagcaaaaagtgctgagttaaaactagtccttagaggtagagcttgtcca

SEQ ID NO: 386663 - DNA, 411 bp, Homo sapiens
cacatatttaatgtgtttccatgtcaaaatactatttaagttaagacttgattgagtctgttaggtaccagagtcactcactcattactttaatttcaaatgctacagtttgaaaacttaatgtatgcttggttgttaaaaaaaaaaaagcagtgggaagaatagaagttgtgttagaatacaaggtacattttattttcaccagaaaggaaaaatattgttgtaagattataaatagcacgaaaggcttattttaattattttaaaaatatgatacctttccactgcagtacctggatttcaagctctgactcaggggtgtccagtcttttggcttccttgggccatagtggaagaagaattgtcttgggccacatataaaacacactaacaatagatagctcatgaact

SEQ ID NO: 386664 - DNA, 461 bp, Homo sapiens
tgggtaattttttgtctccttttgggtgctttgcaagtcactgactgtagcagcaggcaactaatggccaacagcattctgacagtgcttgctgacaggcgataatgagattagtgccttttgattccattattaacaagtagccaaagaatcatttggacatgtcaggagctaatgataggaattaagggtccctctaactttggggcagcagttcaggtacctgatgctttgaagactaattgcagacattttttcctaaatgttttaaaataaatgtttttgctgacatagaacatacatccaaaaaagtgcacaaatccgaagtgtccagctcgattaattatcacaaagtgaacacagcagtgtcatcactattcaggttaggatatagaatattcctggcacccagaaccagagacctctcctcttgctggtcccagtcaccgcttgtacccttt

SEQ ID NO: 386665 - DNA, 375 bp, Homo sapiens
gccccgactgcacccgacgggccttccctcgacgagagcggctccagcagtgaggcggagttggagaccctcaatgacgagcccccggtgcgctgggcgcaggctcaggcccccacgagggtcctaggcttggcgccgccgtgctgctaccccgactctccttggagacccgcctgcagcaggagggagacccgggcctccgtgggtccctgagggagctgtgggaacccgaggatgaggacgaggcggtgctggagagggacctggagctgagcctccggccgggcctggaggcgccacccttccccggtgccaagggcaggagcctcggagacggcctggaagacatggaggacctggcgcggttgcggttag

SEQ ID NO: 386666 - DNA, 517 bp, Homo sapiens
ctgggaagaagaggaaaatatatttagacgaacaaccagaaatctatttctattctctggaagagcttgtataagataagaaatacttgaatcatgggtttttttaattacttgacctattttcttgctgctggtgctgtcactttgggaattggtttctttgctttggcatcagctttgtggttcctgatttgcaaacgaagagaaatatttcaaaattccaaatttaaagcaattgatgagagatgcaggcaaagaccatcaatggcgaagattaaatctcattctcagtgtgtttttatttctcgaaattttcatactgggagattccaattacagttttgaaggctgagaagtccaagatcaagatgctgaaagatccggttctggtgaaggccctcttcctgatttggagatggcctttttcttgctgtgttttcagatggcagggagcagagagagcaagagcgcactttcacatctcttcttataaaggcactaattccattcatgagag

SEQ ID NO: 386667 - DNA, 1001 bp, Homo sapiens
ctgggaagaagaggaaaatatatttagacgaacaaccagaaatctatttctattctctggaagagcttgtataagataagaaatacttgaatcatgggtttttttaattacttgacctattttcttgctgctggtgctgtcactttgggaattggtttctttgctttggcatcagctttgtggttcctgatttgcaaacgaagagaaatatttcaaaattccaaatttaaagcaattgatgagagatgcaggcaaagaccatcaatggcgaagattaaatctcattctcagtgtgtttttatttctcgaaattttcatactgggagattccaattacaggaggagcaaagaaaaaaggaagcagcacatataaaagcaattaaagatcattctaaagatgaaccccaacttgcaacaaaaaatatcatttgtgatccctcagagaccagctccacaacaaatcgcagcagtgttacattaagcttatcaacattaccatctgattcttattacagccaaagtatagaagcagctgatgactggttttctgatgattctctagtgaaaaggaactctccaatgccttctctcggggaacctctaatggaaaaagtattttcatacctgtcaaccatttcattagaagagggtactgaaagtgtactgaatgacactttatgaccatcaaaaagatgactacattaagggaaaatgttcatgaagaaacacagaggttgaaatataaaaccttcaacataatactgaatgacttttttcttttgaaaccttgtatacaatcagcttctgagtctcttaacatgtccatgctaatattgctttttttgttctttaccatagagcggctctacttcccttgctggttcttatttctagaaacaaaattaggaagaactagagtgatgtcatgaacattaagcttaacttattgtatctcatccaaagacatattaaataaaatgagtgtatgtcaacaaacggga

SEQ ID NO: 386668 - DNA, 150 bp, Homo sapiens
cccctatgcggacaggggcagagctgtgtctaactaccaaaaacccacttggccataagggaggtggggccgaacatgtcctaggaacacagctgtattctcactacaaggactactccagccgctgtcatgggggcagctgcctgcggg

SEQ ID NO: 386669 - DNA, 467 bp, Homo sapiens
ggctgaactaaccctggagggatgggtaggattttgacaagagtggttgaaggtattctaattcacttagtacctacatgtgcgaggcagcatgaaggcaaaaaagcctggggcatgttcagagaatagcaagtattctagtttgagtggcacctggtacgtatataagggaatagtaaaagatctggctggaaaggaaaagtaggggcaggttacgaaggacctctgaaagtcagactgtggaactggaacttttatcaggaagcagtagttagttttttcaagcaaaagctaattagagttgatatttaggaggatgaatctaacagttgtgtgcaaggatgccttcaaactgagtgagactagtactggagactggttaagagactacaacaataacctgagtaagaattaatacaggcctgacctagttttgagtgagtaggattggaaacaagagttttagg

SEQ ID NO: 386670 - DNA, 698 bp, Homo sapiens
ctgagtcagtcaccctttggccggacaggcggttcccgggcgcggaggatggaaacctggcggtaacctctgcaggtcgtgccactcggtgtgcgcaaggtctccagaggcatcttttcatttttagggggcactttccacgaattcatttgagctacacagcagtcctgggcagtggggagtggtgagctccattgtgtacacttggaagcagcccagaaagttcactgaggcagatgggaggcccggaggagaaagaatgaaggaaggcatttcagcccgagtaaactccccaggcccgctctgtgccaggcagtgttgcaagcctcgggtagggtgcttctagcacggtgctttgtgcacagtaaacactccagcggctgttgaccaatgaatgaatgaagattgtaggctcaaatattcaagttatcaaagtgcaaagaatgagaggttgtttgcactggacttaaaaaataaatagcctggacctgtactgtcttatacaacagctatgagctactggtatgtggctagtccaaactgaaatgccctttaagagtaaaacacacactggatttcaaagacttagtacaaagaaaaaatgcaaaatagctcattagtaatttttatgttaatgacatgttgaaataacattttgatatattaagtaaaatatagtattagaattaaaaaaaact

SEQ ID NO: 386671 - DNA, 775 bp, Homo sapiens
ctgagtcagtcaccctttggccggacaggcggttcccgggcgcggaggatggaaacctggcggtaacctctgcaggtcgtgccactcggtgtgcgcaaggtctccagaggcatcttttcatttttagggggcactttccacgaattcatttgagctacacagcagtcctgggcagtggggagtggtgagctccattgtgtacacttggaagcagcccagaaaggtgaagacctgttcgtgaactccagaggccattggaagcatggaaggctatggctggcactcttcctctttttccagttcactgaggcagatgggaggcccggaggagaaagaatgaaggaaggcatttcagcccgagtaaactccccaggcccgctctgtgccaggcagtgttgcaagcctcgggtagggtgcttctagcacggtgctttgtgcacagtaaacactccagcggctgttgaccaatgaatgaatgaagattgtaggctcaaatattcaagttatcaaagtgcaaagaatgagaggttgtttgcactggacttaaaaaataaatagcctggacctgtactgtcttatacaacagctatgagctactggtatgtggctagtccaaactgaaatgccctttaagagtaaaacacacactggatttcaaagacttagtacaaagaaaaaatgcaaaatagctcattagtaatttttatgttaatgacatgttgaaataacattttgatatattaagtaaaatatagtattagaattaaaaaaaact

SEQ ID NO: 386672 - DNA, 582 bp, Homo sapiens
ctgagtcagtcaccctttggccggacaggcggttcccgggcgcggaggatggaaacctggcggtaacctctgcaggtcgtgccactcggtgtgcgcaaggtctccagaggcatcttttcatttttagggggcactttccacgaattcatttgagctacacagcagtcctgggcagtggggagtggtgagctccattgtgtacacttggaagcagcccagaaagcttctagcacggtgctttgtgcacagtaaacactccagcggctgttgaccaatgaatgaatgaagattgtaggctcaaatattcaagttatcaaagtgcaaagaatgagaggttgtttgcactggacttaaaaaataaatagcctggacctgtactgtcttatacaacagctatgagctactggtatgtggctagtccaaactgaaatgccctttaagagtaaaacacacactggatttcaaagacttagtacaaagaaaaaatgcaaaatagctcattagtaatttttatgttaatgacatgttgaaataacattttgatatattaagtaaaatatagtattagaattaaaaaaaact

SEQ ID NO: 386673 - DNA, 1298 bp, Homo sapiens
ctgagtcagtcaccctttggccggacaggcggttcccgggcgcggaggatggaaacctggcggtaacctctgcaggtcgtgccactcggtgtgcgcaaggtctccagaggcatcttttcatttttagggggcactttccacgaattcatttgagctacacagcagtcctgggcagtggggagtggtgagctccattgtgtacacttggaagcagcccagaaaggtgaagacctgttcgtgaactccagaggccattggaagcatggaaggctatggctggcactcttcctctttttccagttcactgaggcagatgggaggcccggaggagaaagaatgaaggaaggcatttcagcccgagtaaactccccaggcccgctctgtgccaggcagtgttgcaagcctcgggtagggtggtgagcaaagcagatggccctgccctcactcagcaaccagtgtaggggagctgccacggttaccagcaaaagctgaaatccagcgccatttgcatttcatatggaattttaggaagttttcgagatgttttagtttagaagctaaacatgacataccaggttcttctctgtctggccttgcatacctatccagttccctctccattcatctctgccctgacatgcactcaggaggctccctgggcctcagcattcctcatttgcgcgcctctggtcaagctagtacctctgaatgccctttcccatccccttctcagagttcacctcacacattccgaagccagctcagggccacctctgaaacatttagagcactcccctgcccatccagatgctcattaaatagtgtgcatctctgtcaccgttctttcatgttattttataattgtctctttatgtgtctctcacccccacagactgagccttagggcaaacaatgtcttgttcacttttgtccttccagcttctagcacggtgctttgtgcacagtaaacactccagcggctgttgaccaatgaatgaatgaagattgtaggctcaaatattcaagttatcaaagtgcaaagaatgagaggttgtttgcactggacttaaaaaataaatagcctggacctgtactgtcttatacaacagctatgagctactggtatgtggctagtccaaactgaaatgccctttaagagtaaaacacacactggatttcaaagacttagtacaaagaaaaaatgcaaaatagctcattagtaatttttatgttaatgacatgttgaaataacattttgatatattaagtaaaatatagtattagaattaaaaaaaact

SEQ ID NO: 386674 - DNA, 190 bp, Homo sapiens
ttcccccattgaatgatcttggcatctttctcaaaaagcagttgaccatagttgtacggttttatttctggactttcaattctgttccattgatctatatgtcttatgccggtaccatactgttttgattaccattggtttgtagtaaattttgaaatcaggaagcatttgagtcctctccttcttcttc

SEQ ID NO: 386675 - DNA, 248 bp, Homo sapiens
tttgactcatgtagaaaagacatctaacattattcatccaaaaagttggcagtggacttttgcgtggtcccatgggaaggtcacagacgctttgataacactgcgtggtagccattagcattcggactagtcacaagttaccgttttcatagggcatttacccttgtatcttatttatcctgtattagaacatactaacttatgtgtgtcctctttattttattctctcttatggcagtgtttctgga

SEQ ID NO: 386676 - DNA, 1828 bp, Homo sapiens
catgctgcctctgccaccttctctgccagaagataccatttcaactttaacacagcatgatcgaaacatacaaccaaacttctccccgatctgcggccactggactgcccatcagcatgaaaatttttatgtatttacttactgtttttcttatcacccagatgattgggtcagcactttttgctgtgtatcttcatagaaggttggacaagatagaagatgaaaggaatcttcatgaagattttgtattcatgaaaacgatacagagatgcaacacaggagaaagatccttatccttactgaactgtgaggagattaaaagccagtttgaaggctttgtgaaggatataatgttaaacaaagaggagacgaagaaagaaaacagctttgaaatgcaaaaaggtgatcagaatcctcaaattgcggcacatgtcataagtgaggccagcagtaaaacaacatctgtgttacagtgggctgaaaaaggatactacaccatgagcaacaacttggtaaccctggaaaatgggaaacagctgaccgttaaaagacaaggactctattatatctatgcccaagtcaccttctgttccaatcgggaagcttcgagtcaagctccatttatagccagcctctgcctaaagtcccccggtagattcgagagaatcttactcagagctgcaaatacccacagttccgccaaaccttgcgggcaacaatccattcacttgggaggagtatttgaattgcaaccaggtgcttcggtgtttgtcaatgtgactgatccaagccaagtgagccatggcactggcttcacgtcctttggcttactcaaactctgaacagtgtcaccttgcaggctgtggtggagctgacgctgggagtcttcataatacagcacagcggttaagcccaccccctgttaactgcctatttataaccctaggatcctccttatggagaactatttattatacactccaaggcatgtagaactgtaataagtgaattacaggtcacatgaaaccaaaacgggccctgctccataagagcttatatatctgaagcagcaaccccactgatgcagacatccagagagtcctatgaaaagacaaggccattatgcacaggttgaattctgagtaaacagcagataacttgccaagttcagttttgtttctttgcgtgcagtgtctttccatggataatgcatttgatttatcagtgaagatgcagaagggaaatggggagcctcagctcacattcagttatggttgactctgggttcctatggccttgttggagggggccaggctctagaacgtctaacacagtggagaaccgaaaccccccccccccccccgccaccctctcggacagttattcattctctttcaatctctctctctccatctctctctttcagtctctctctctcaacctctttcttccaatctctctttctcaatctctctgtttccctttgtcagtctcttccctcccccagtctctcttctcaatccccctttctaacacacacacacacacacacacacacacacacacacacacacacacacacacacacacacagagtcaggccgttgctagtcagttctcttctttccaccctgtccctatctctaccactatagatgagggtgaggagtagggagtgcagccctgagcctgcccactcctcattacgaaatgactgtatttaaaggaaatctattgtatctacctgcagtctccattgtttccagagtgaacttgtaattatcttgttatttattttttgaataataaagacctcttaacattaaaa

SEQ ID NO: 386677 - DNA, 698 bp, Homo sapiens
aatgaagagccaaacaagtagagggtgttcactaattaactggttagttaattacaccctgttgcctccgaagaacatcctaaagctgtgtccaatgatgtataaaatacagtacagcagttaaacatagctgcaaaagaatgggaacaaatgattgcagggaaacaaagcacacctaacaaagaagctaatacaaagacatataatagggaaattttagctttctagagggcaaatcaatgaaagaggaaacctggtaaaaagggaaacttctgataccagcaagttaaaatagagcatttgctgtggaaaaacatttgacatagtgaccaattctctggatctcaatggagaggaatcggtgtatttactataagcagtgtccttaacagaatcattgggataaacacggtgatgagttgtgcagggtcattttatatctggctttggtcctggccctaactacatccccctctccattataggagggctgatctgtctttacaaataacatacttggttgggaatataaatctttagtattagctctgtaagaaccatctgttaagaatagttgtatccatcccaaacaaagcataaaaatgcatgatttttcactgagtttagagctgtgtcagaagctgtcttgagtatcttttggtaactgggaaccttccactccacatacagaggaggga

SEQ ID NO: 386678 - DNA, 736 bp, Homo sapiens
gaaactttgtctcaaaaaaaaaaaaaaaaaaaaaaaggtaccatgtagtagtaacaggttatttgaaggctctctaaatggtcttaattaaaatataaacaaaattatgtatatgacttaattattcttttgcctttccggattcttaaggacagatcatggtgaaaaacagttattacaggtaaagtggtgtgaattgtttgctttgagggtaaagtaattggtcagttggacaaggtagtcaggtgtgccctggagggtggagagaagtcagcttggaataaaaaattaactgaacctgggcaacatggtgaaaccccttctctacaaaaaaatacaaaaattagctaggcgtggtggcctgtaatcccagctacccaggaggctgaggtgggagtatcgcctaagctcgggaggtgaaagccgcagtgagatgtgatcatgccactgcactccagcctgggcaacagagtgagaccttctgtcagaaaacaaacaaacaaacaaaaaactgtgattcactatggagtcgaaaagaaggaaggtagactctctgactttcctgagttaggatgatgtggacgtacacactctttgctttaagaagatgttcttggccaggcgcagtggctcacgcctgtaatcccagcactttgggaggccgaggtgggcggatcatgaggtcaggagatcgagaccatcctggctaacacagtgaaaccccgcctctactaaa

SEQ ID NO: 386679 - DNA, 354 bp, Homo sapiens
  misc_feature (29)..(29): n is a, c, g, or t
tccgtgtggttcttgtagctggggtaatnccaggactgaacaaggacagcaatcacgaacctaaaggtgataaaacatacttggaaatgaagttatttgacttatataccttcactttcaaaagtccagagcaagagcatccaaaaatgtggtatttactaccagggagcacccaattcttcttgagaacaccaacctacaacttgaagtacaattcacctggaatgactcgctccaatgttttgtttacatccagatatggccatctgtgaaacagaagggaagatcgccattggttatacataacagcaattcatttttttcctctgaagttgaaccagcaaagaaccacag

SEQ ID NO: 386680 - DNA, 443 bp, Homo sapiens
taattagtacagtatttacctttaagggactgaacaaggacagcaatcacgaacctaaaggtgataaaacatacttggaaatgaagttatttgacttatataccttcactttcaaaagtccagagcaagagcatccaaaaatgtgatttcataaactaatttctgttgatggatcttgtagcttttgtgggtacacaaagtaggacgagtcttcttggttacgttggaggaaaaaggtatgtatttactaccagggagcacccaattcttcttgagaacaccaacctacaacttgaagtacaattcacctggaatgactcgctccaatgttttgtttacatccagatatggccatctgtgaaacagaagggaagatcgccattggttatacataacagcaattcatttttttcctctgaagttgaaccagcaaagaaccacag

SEQ ID NO: 386681 - DNA, 537 bp, Homo sapiens
tgaattcataaccttagacatttagtggttgaaagagttaatagcaataaaatatgaactatttacagtggcaaatatatatctatatctagtggtatgtatctgtctatgtatgtacctatagatatatatatctttgagttttaagacttgaccatagcctatttaattcaaataatataggagatatttcacaatcactgactggaatcttcctagcatagtatatgtatcagcagaaatcactataacaaagagaatctaatgtaaatcttggcatactggttactaaatgtagttttataaagggcaatctaataaatgtctttggtttccaaggtgctaacaacagattggaataataaacccttctgttctcggaaaccagaaatgtctttaggaatcctggcaaaggaaaaaaaaaatctctgtaatctgatcaagcccaaacatttgcaaaagaaaattaacttacataacactggcccagatcttattatttagaaccatttttgagatcatgaggcatatattttg

SEQ ID NO: 386682 - DNA, 6061 bp, Homo sapiens
ggtgatgctgctgctgctgctgctgccgccgccgccgcctctattgctgatactctagtggggctggaagggtggttcctattcgcaccatcgccaaccagagacagagggaaaaaaaaaaccggcagccactgctgatgttgggttcggaggctgcatccgactcggtcacaaggaaaatggattcagtttgcatctctccctcctttaaacagcttctccgggtctcagcatgggcttccagggcagcgattgaggagaccttaccaaggagcaccacacagtagatgctgagacatcgtactccaggataagaaacagtaacatggcagcacctgcttgaaagaaattaaaaaccaacagactccatttagaaaggaacaatgtccaagaaagggcgaaataagggcgagaagcccgaggcactcattgttgcccttcaagctgccaatgaagacctcaggaccaagctcacagacattcagatagagctgcatcaagagaagtccaaggtatcaaagcttgaaagagagaagactcaagaagcgaagaggattcgtgagctggagcagcgcaagcacacggtgctggtgacagaactcaaagccaagctccatgaggagaagatgaaggagctgcaggctgtgagggagaaccttatcaagcagcacgagcaggaaatgtcaaggacggtgaaggtacgtgatggagagatccagaggctcaagtctgctctctgtgctctccgcgacggcagcagtgacaaagtaaggacagcgctcaccattgaggcccgggaggaggcccggaaactgtttgacacagagcgccttaagctcttacaggaaattgcggacctgaaaacggccaagaagcaggtggacgaggctctgagcaatatgatccaagcagataaaatcaaggctggggaccttcggagtgagcatcagtcccaccaagaagccatctcgaagatcaagtgggagtcggagcgggatattcggaggctgatggatgaaatcaaagccaaggacaggatcatcttttccctggaaaaggaactggagacccagacaggctatgtacagaaactccaacttcagaaggaggctttggacgaacaactctttctggtcaaggaggctgagtgcaacatgagcagcccaaaacgagaaattccaggaagggcaggtgatggttccgaacactgcagcagtcctgatttgcgaagaaatcaaaagagaatagctgaattgaatgccactataagaaaattagaagacaggaataccttgcttggagatgaacgaaatgaactgttaaaacgtgtgcgggaaaccgaaaagcaatgtaaacctctcctggaaaggaacaagtgcctcgccaagagaaacgatgaactgatggtgtccttgcagcgcatggaagaaaaactaaaagccgttaccaaggaaaattcagaaatgagagaaaaaataacatcccatccacccctgaagaaattaaaatctctgaatgacctcgaccaagctaatgaagaacaagaaacagagtttctaaaacttcaggtcattgagcaacagaacattattgatgagctcacaagggaccgagaaaagctcatccgtagaagaaagcatagaagaagttccaagccaattaagaggcctgttttggacccgtttattggctatgatgaggactctatggattcagagacatcatccatggcctcatttagaacagacagaacaccagctactcctgatgatgacttggatgaaagtttagcagctgaagaatctgaactaagatttcgacaattaacaaaagaatatcaggccctccaaagagcatatgccctcctacaggagcagacgggaggcatcatcgacgctgaacgagaagccaaggctcaagaacagctccaagcagaggtgctaaggtataaagccaaaattgaagacctggaagcgactctggctcagaaagggcagatagaaaaacaggaggcagaaaatcaccggttacaacaagaactacaggacgccagagaccagaatgagctgctggagtttcgaaacctagagctagaagagagagagagacgatcccctccatttaatctccaaattcacccattctcagatggtgtgagtgctctacagatctactgtatgaaagaaggtgttaaggatgtgaacatccctgatctcataaagcagcttgatatcttgggtgataatgggaatttaagaaatgaagaacaagtggccataattcaggccagcactgtgctgtccctggcagagaagtggatccagcagattgaaggagctgaggctgccctacaccagaaaatgatggaattggaaagtgacatggaacagttctgcaaaataaaaggctatctggaggaagaactagactacagaaaacaagctcttgaccaagcatatatgagaatccaggaactagaagctactttgtacaatgctctacagcaagaaactgttatcaagtttggtgaattattaagtgaaaaacagcaagaggagctgaggacggcagtagaaaagttacggcggcaaatgctgaggaagagcagagagtatgactgtcagattcttcaggagagaatggagctcttacagcaagcccatcagagaattcgtgacttagaagataaaacagacatccagaaaagacaaataaaagacttagaagaaaagtttctgtttctattcttgttcttctctcttgcctttattctatggccttgatgtcaaggtgcctcttaaagagtaaccgaaaacatggataagatcccaggaagacaagtgcttctaaaccttcaaagatggcaaaattgtttacaccagtgagagggagatcaaaagctaagaactaccctgtagccaggactacaactgtgtattttaaagccattattcaaggtttcttacttgacagttcctacacaaccctgttgaaaatctacaatatatgctgcatttaatgaaacatgtatatgtcaaatcagaagagaagaactataaacatatattgtgtaaagaaaaagttcagcaatggaactagtttctgcagatcaagcaaagatgtgtcttgggcatggaaccaaagttacaatgaaatattcaacccctgctgtgcaggggggtcattttaatgtaacaccacaccccatggaaacactagtcctgataataaacatcattttaaaagatcaaaacaaacaaacaaaaaaaacaagggtgggtggggagtgaagcacgaggaatacctatgaagagctatttacaataaaatgtttcatttgaaaagtctggtttcttactacagggatttgcttttctgtctttatgattgttttaaactcaggaacagagacatccgcatcgtaaatgggaagaaaaacactctctgttttgtttttctgcaaaaggtggagcttgtggaattcattccacagacgacagatgagaagtggatcacagtgaccataacaaaactggtaacgaagtcaaaggacccgagcgaatgtgacatgtgaaataaaagcagattcgatgcttccttgtcctactctcacatctgcattcctctatcaacaatggactgatctcattcatattgaaaactaagaagatgatactgtaaatcacatgctccctgacttagttctgtttagaacgccaacatctatagggaacatgggccagagagcatctctgaatctttcatttccaaaatactgtttttcaaatggctgcttaaaattgcctgcaaatgaatatgctatatgatttgggcaaaaacacagcagaatcaatgagtaaatttctaccaagagtcgggtttgccacagagatgtgaatattaaactaaactattattttttaaagaatcctcacatgcctagagcattctgacctcttcttgtttagagtgataacattttttcccagacagatgacagcaacaagatagctctacttttttatatggaaataacattatgttactgacaaggtcattttctaccagagacaattagaggactggtacttttcctaagttgtgtattactgagtcttggagtcatctctgagagcaaatgtatgttcctgaaaagctaattttacacctcatttactgtagataacagaacaacctcaatttttcaaatttttgaagttttatttatggggctagaattcccatgcatagagaatatgtgtagggagccagaaattctttctatgaaatgctatacaaatctttccatatgtgggttcactatcatccttcagttttagcactggcatttgcaaagccagaacaataactgaagaatgtacaataaaaactagaatgctggggtcccactttttgttcttacatttactgctgacccaggtatctttggcccagtcacttaacctctctgtgcctcagtttcctcatctgcaaaatggggttaaaatgctttttcataaagttttatttgcaattttagaacaagaggtgcttaaagtagcacaatgtgctttgtaattattacaagtgctgtattatttgactttcttgtgttgttgacaaaaagattccctcatgtaataaaatagtgcttcagtttggttaaatttaagcactatagcactgaagcttgcttatcaagctacttgggacattattagcaataaaaattgagagattcaaaaccaggatctttaataatctataggaaatagatcatctcatgctattgaacaagatagaagagtgtgtcatttctatgataagcatctcccagctctcttgattgcatatgcatgccatcatacagaaccccacttttaccacaggagagccagtcattaaacaaaggcttggagcaaactgacagtatcacataattagcttgattatcttttattctggaggaaagtcaggtggtatgccctactgggaagatacaaaacagactatcctgctgtattcttttttttttttttttgagatggagtcttgctctgttgcccatgctggagtgcattggcacaatctcggctcatggcaagctccgcctcctggattcaagtgattctcctgcctcaacctccctagtagctgggattacaggtgcacaccaccacacctggctaatttttgtatttttagtagagacagggtttcactatgctggtcaggctggtctcgaactcctgacctcaagtgatctgcctgcctcagcctcccaaagtgctaggattacaggtgtaagccactgtgcccggcctcctgctggattctttattcaactaggtaggttccagattaaatatgagccatatgctcattaggcaagaaatgtgaaagagggtgcctctacagtgttggtgacccaacactagccaacttgagtcagaaaatatggaagaagataaattactctcacatatctaagacttttccatttttcttcactttctgttgcagggcccatatgagtaaatctatattccgtctgctccaacacacaccttccttctcttaattttgctttcccacccaccaagaaatttgtaagtcaaaatttatttccatgagtaactatttctaaatgattggaaatttttgaaaaagtggtatggtttatatacctaatctgcttatctgctataagtcatatgagaacaacagctaggatgattgtccaagcagctttagatgtgtttagggccaggcaaaaggtttgcttgttttttctttttgcttaagatctgggagattagcaaatttctcaagactatagactgaactgtaatttttaccaactcttgctcatgagcctcaaaatgaatatatccttgaataaagtataaatatttcaatagatacatctctctattatccattttcacaattataaaagcatcagcaaaattgtggatatgtgttccagtcactcatggatccatggaaatggaccgtgtttaaatgaatgcttcccttggatgggatgttcagcaatagc

SEQ ID NO: 386683 - DNA, 6004 bp, Homo sapiens
ggtgatgctgctgctgctgctgctgccgccgccgccgcctctattgctgatactctagtggggctggaagggtggttcctattcgcaccatcgccaaccagagacagagggaaaaaaaaaaccggcagccactgctgatgttgggttcggaggctgcatccgactcggtcacaaggaaaatggattcagtttgcatctctccctcctttaaacagcttctccgggtctcagcatgggcttccagggcagcgattgaggagaccttaccaaggagcaccacacagtagatgctgagacatcgtactccaggataagaaacagtaacatggcagcacctgcttgaaagaaattaaaaaccaacagactccatttagaaaggaacaatgtccaagaaagggcgaaataagggcgagaagcccgaggcactcattgttgcccttcaagctgccaatgaagacctcaggaccaagctcacagacattcagatagagctgcatcaagagaagtccaaggtatcaaagcttgaaagagagaagactcaagaagcgaagaggattcgtgagctggagcagcgcaagcacacggtgctggtgacagaactcaaagccaagctccatgaggagaagatgaaggagctgcaggctgtgagggagaaccttatcaagcagcacgagcaggaaatgtcaaggacggtgaaggtacgtgatggagagatccagaggctcaagtctgctctctgtgctctccgcgacggcagcagtgacaaagtaaggacagcgctcaccattgaggcccgggaggaggcccggaaactgtttgacacagagcgccttaagctcttacaggaaattgcggacctgaaaacggccaagaagcaggtggacgaggctctgagcaatatgatccaagcagataaaatcaaggctggggaccttcggagtgagcatcagtcccaccaagaagccatctcgaagatcaagtgggagtcggagcgggatattcggaggctgatggatgaaatcaaagccaaggacaggatcatcttttccctggaaaaggaactggagacccagacaggctatgtacagaaactccaacttcagaaggaggctttggacgaacaactctttctggtcaaggaggctgagtgcaacatgagcagcccaaaacgagaaattccaggaagggcaggtgatggttccgaacactgcagcagtcctgatttgcgaagaaatcaaaagagaatagctgaattgaatgccactataagaaaattagaagacaggaataccttgcttggagatgaacgaaatgaactgttaaaacgtgtgcgggaaaccgaaaagcaatgtaaacctctcctggaaaggaacaagtgcctcgccaagagaaacgatgaactgatggtgtccttgcagcgcatggaagaaaaactaaaagccgttaccaaggaaaattcagaaatgagagaaaaaataacatcccatccacccctgaagaaattaaaatctctgaatgacctcgaccaagctaatgaagaacaagaaacagagtttctaaaacttcaggtcattgagcaacagaacattattgatgagctcacaagggaccgagaaaagctcatccgtagaagaaagcatagaagaagttccaagccaattaagagtttagcagctgaagaatctgaactaagatttcgacaattaacaaaagaatatcaggccctccaaagagcatatgccctcctacaggagcagacgggaggcatcatcgacgctgaacgagaagccaaggctcaagaacagctccaagcagaggtgctaaggtataaagccaaaattgaagacctggaagcgactctggctcagaaagggcaggattcacactgggtagaagataaacaacttttcattaagagaaaccaggagcttttagaaaagatagaaaaacaggaggcagaaaatcaccggttacaacaagaactacaggacgccagagaccagaatgagctgctggagtttcgaaacctagagctagaagagagagagagacgatcccctccatttaatctccaaattcacccattctcagatggtgtgagtgctctacagatctactgtatgaaagaaggtgttaaggatgtgaacatccctgatctcataaagcagcttgatatcttgggtgataatgggaatttaagaaatgaagaacaagtggccataattcaggccagcactgtgctgtccctggcagagaagtggatccagcagattgaaggagctgaggctgccctacaccagaaaatgatggaattggaaagtgacatggaacagttctgcaaaataaaaggctatctggaggaagaactagactacagaaaacaagctcttgaccaagcatatatgagaatccaggaactagaagctactttgtacaatgctctacagcaagaaactgttatcaagtttggtgaattattaagtgaaaaacagcaagaggagctgaggacggcagtagaaaagttacggcggcaaatgctgaggaagagcagagagtatgactgtcagattcttcaggagagaatggagctcttacagcaagcccatcagagaattcgtgacttagaagataaaacagacatccagaaaagacaaataaaagacttagaagaaaagtttctgtttctattcttgttcttctctcttgcctttattctatggccttgatgtcaaggtgcctcttaaagagtaaccgaaaacatggataagatcccaggaagacaagtgcttctaaaccttcaaagatggcaaaattgtttacaccagtgagagggagatcaaaagctaagaactaccctgtagccaggactacaactgtgtattttaaagccattattcaaggtttcttacttgacagttcctacacaaccctgttgaaaatctacaatatatgctgcatttaatgaaacatgtatatgtcaaatcagaagagaagaactataaacatatattgtgtaaagaaaaagttcagcaatggaactagtttctgcagatcaagcaaagatgtgtcttgggcatggaaccaaagttacaatgaaatattcaacccctgctgtgcaggggggtcattttaatgtaacaccacaccccatggaaacactagtcctgataataaacatcattttaaaagatcaaaacaaacaaacaaaaaaaacaagggtgggtggggagtgaagcacgaggaatacctatgaagagctatttacaataaaatgtttcatttgaaaagtctggtttcttactacagggatttgcttttctgtctttatgattgttttaaactcaggaacagagacatccgcatcgtaaatgggaagaaaaacactctctgttttgtttttctgcaaaaggtggagcttgtggaattcattccacagacgacagatgagaagtggatcacagtgaccataacaaaactggtaacgaagtcaaaggacccgagcgaatgtgacatgtgaaataaaagcagattcgatgcttccttgtcctactctcacatctgcattcctctatcaacaatggactgatctcattcatattgaaaactaagaagatgatactgtaaatcacatgctccctgacttagttctgtttagaacgccaacatctatagggaacatgggccagagagcatctctgaatctttcatttccaaaatactgtttttcaaatggctgcttaaaattgcctgcaaatgaatatgctatatgatttgggcaaaaacacagcagaatcaatgagtaaatttctaccaagagtcgggtttgccacagagatgtgaatattaaactaaactattattttttaaagaatcctcacatgcctagagcattctgacctcttcttgtttagagtgataacattttttcccagacagatgacagcaacaagatagctctacttttttatatggaaataacattatgttactgacaaggtcattttctaccagagacaattagaggactggtacttttcctaagttgtgtattactgagtcttggagtcatctctgagagcaaatgtatgttcctgaaaagctaattttacacctcatttactgtagataacagaacaacctcaatttttcaaatttttgaagttttatttatggggctagaattcccatgcatagagaatatgtgtagggagccagaaattctttctatgaaatgctatacaaatctttccatatgtgggttcactatcatccttcagttttagcactggcatttgcaaagccagaacaataactgaagaatgtacaataaaaactagaatgctggggtcccactttttgttcttacatttactgctgacccaggtatctttggcccagtcacttaacctctctgtgcctcagtttcctcatctgcaaaatggggttaaaatgctttttcataaagttttatttgcaattttagaacaagaggtgcttaaagtagcacaatgtgctttgtaattattacaagtgctgtattatttgactttcttgtgttgttgacaaaaagattccctcatgtaataaaatagtgcttcagtttggttaaatttaagcactatagcactgaagcttgcttatcaagctacttgggacattattagcaataaaaattgagagattcaaaaccaggatctttaataatctataggaaatagatcatctcatgctattgaacaagatagaagagtgtgtcatttctatgataagcatctcccagctctcttgattgcatatgcatgccatcatacagaaccccacttttaccacaggagagccagtcattaaacaaaggcttggagcaaactgacagtatcacataattagcttgattatcttttattctggaggaaagtcaggtggtatgccctactgggaagatacaaaacagactatcctgctgtattcttttttttttttttttgagatggagtcttgctctgttgcccatgctggagtgcattggcacaatctcggctcatggcaagctccgcctcctggattcaagtgattctcctgcctcaacctccctagtagctgggattacaggtgcacaccaccacacctggctaatttttgtatttttagtagagacagggtttcactatgctggtcaggctggtctcgaactcctgacctcaagtgatctgcctgcctcagcctcccaaagtgctaggattacaggtgtaagccactgtgcccggcctcctgctggattctttattcaactaggtaggttccagattaaatatgagccatatgctcattaggcaagaaatgtgaaagagggtgcctctacagtgttggtgacccaacactagccaacttgagtcagaaaatatggaagaagataaattactctcacatatctaagacttttccatttttcttcactttctgttgcagggcccatatgagtaaatctatattccgtctgctccaacacacaccttccttctcttaattttgctttcccacccaccaagaaatttgtaagtcaaaatttatttccatgagtaactatttctaaatgattggaaatttttgaaaaagtggtatggtttatatacctaatctgcttatctgctataagtcatatgagaacaacagctaggatgattgtccaagcagctttagatgtgtttagggccaggcaaaaggtttgcttgttttttctttttgcttaagatctgggagattagcaaatttctcaagactatagactgaactgtaatttttaccaactcttgctcatgagcctcaaaatgaatatatccttgaataaagtataaatatttcaatagatacatctctctattatccattttcacaattataaaagcatcagcaaaattgtggatatgtgttccagtcactcatggatccatggaaatggaccgtgtttaaatgaatgcttcccttggatgggatgttcagcaatagc

SEQ ID NO: 386684 - DNA, 5574 bp, Homo sapiens
ggtgatgctgctgctgctgctgctgccgccgccgccgcctctattgctgatactctagtggggctggaagggtggttcctattcgcaccatcgccaaccagagacagagggaaaaaaaaaaccggcagccactgctgatgttgggttcggaggctgcatccgactcggtcacaaggaaaatggattcagtttgcatctctccctcctttaaacagcttctccgggtctcagcatggtatcaaagcttgaaagagagaagactcaagaagcgaagaggattcgtgagctggagcagcgcaagcacacggtgctggtgacagaactcaaagccaagctccatgaggagaagatgaaggagctgcaggctgtgagggagaaccttatcaagcagcacgagcaggaaatgtcaaggacggtgaaggtacgtgatggagagatccagaggctcaagtctgctctctgtgctctccgcgacggcagcagtgacaaagtaaggacagcgctcaccattgaggcccgggaggaggcccggaaactgtttgacacagagcgccttaagctcttacaggaaattgcggacctgaaaacggccaagaagcaggtggacgaggctctgagcaatatgatccaagcagataaaatcaaggctggggaccttcggagtgagcatcagtcccaccaagaagccatctcgaagatcaagtgggagtcggagcgggatattcggaggctggatttgcgaagaaatcaaaagagaatagctgaattgaatgccactataagaaaattagaagacaggaataccttgcttggagatgaacgaaatgaactgttaaaacgtgtgcgggaaaccgaaaagcaatgtaaacctctcctggaaaggaacaagtgcctcgccaagagaaacgatgaactgatggtgtccttgcagcgcatggaagaaaaactaaaagccgttaccaaggaaaattcagaaatgagagaaaaaataacatcccatccacccctgaagaaattaaaatctctgaatgacctcgaccaagctaatgaagaacaagaaacagagtttctaaaacttcaggtcattgagcaacagaacattattgatgagctcacaagggaccgagaaaagctcatccgtagaagaaagcatagaagaagttccaagccaattaagaggcctgttttggacccgtttattggctatgatgaggactctatggattcagagacatcatccatggcctcatttagaacagacagaacaccagctactcctgatgatgacttggatgaaagtttagcagctgaagaatctgaactaagatttcgacaattaacaaaagaatatcaggccctccaaagagcatatgccctcctacaggagcagacgggaggcatcatcgacgctgaacgagaagccaaggctcaagaacagctccaagcagaggtgctaaggtataaagccaaaattgaagacctggaagcgactctggctcagaaagggcagatagaaaaacaggaggcagaaaatcaccggttacaacaagaactacaggacgccagagaccagaatgagctgctggagtttcgaaacctagagctagaagagagagagagacgatcccctccatttaatctccaaattcacccattctcagatggtgtgagtgctctacagatctactgtatgaaagaaggtgttaaggatgtgaacatccctgatctcataaagcagcttgatatcttgggtgataatgggaatttaagaaatgaagaacaagtggccataattcaggccagcactgtgctgtccctggcagagaagtggatccagcagattgaaggagctgaggctgccctacaccagaaaatgatggaattggaaagtgacatggaacagttctgcaaaataaaaggctatctggaggaagaactagactacagaaaacaagctcttgaccaagcatatatgagaatccaggaactagaagctactttgtacaatgctctacagcaagaaactgttatcaagtttggtgaattattaagtgaaaaacagcaagaggagctgaggacggcagtagaaaagttacggcggcaaatgctgaggaagagcagagagtatgactgtcagattcttcaggagagaatggagctcttacagcaagcccatcagagaattcgtgacttagaagataaaacagacatccagaaaagacaaataaaagacttagaagaaaagtttctgtttctattcttgttcttctctcttgcctttattctatggccttgatgtcaaggtgcctcttaaagagtaaccgaaaacatggataagatcccaggaagacaagtgcttctaaaccttcaaagatggcaaaattgtttacaccagtgagagggagatcaaaagctaagaactaccctgtagccaggactacaactgtgtattttaaagccattattcaaggtttcttacttgacagttcctacacaaccctgttgaaaatctacaatatatgctgcatttaatgaaacatgtatatgtcaaatcagaagagaagaactataaacatatattgtgtaaagaaaaagttcagcaatggaactagtttctgcagatcaagcaaagatgtgtcttgggcatggaaccaaagttacaatgaaatattcaacccctgctgtgcaggggggtcattttaatgtaacaccacaccccatggaaacactagtcctgataataaacatcattttaaaagatcaaaacaaacaaacaaaaaaaacaagggtgggtggggagtgaagcacgaggaatacctatgaagagctatttacaataaaatgtttcatttgaaaagtctggtttcttactacagggatttgcttttctgtctttatgattgttttaaactcaggaacagagacatccgcatcgtaaatgggaagaaaaacactctctgttttgtttttctgcaaaaggtggagcttgtggaattcattccacagacgacagatgagaagtggatcacagtgaccataacaaaactggtaacgaagtcaaaggacccgagcgaatgtgacatgtgaaataaaagcagattcgatgcttccttgtcctactctcacatctgcattcctctatcaacaatggactgatctcattcatattgaaaactaagaagatgatactgtaaatcacatgctccctgacttagttctgtttagaacgccaacatctatagggaacatgggccagagagcatctctgaatctttcatttccaaaatactgtttttcaaatggctgcttaaaattgcctgcaaatgaatatgctatatgatttgggcaaaaacacagcagaatcaatgagtaaatttctaccaagagtcgggtttgccacagagatgtgaatattaaactaaactattattttttaaagaatcctcacatgcctagagcattctgacctcttcttgtttagagtgataacattttttcccagacagatgacagcaacaagatagctctacttttttatatggaaataacattatgttactgacaaggtcattttctaccagagacaattagaggactggtacttttcctaagttgtgtattactgagtcttggagtcatctctgagagcaaatgtatgttcctgaaaagctaattttacacctcatttactgtagataacagaacaacctcaatttttcaaatttttgaagttttatttatggggctagaattcccatgcatagagaatatgtgtagggagccagaaattctttctatgaaatgctatacaaatctttccatatgtgggttcactatcatccttcagttttagcactggcatttgcaaagccagaacaataactgaagaatgtacaataaaaactagaatgctggggtcccactttttgttcttacatttactgctgacccaggtatctttggcccagtcacttaacctctctgtgcctcagtttcctcatctgcaaaatggggttaaaatgctttttcataaagttttatttgcaattttagaacaagaggtgcttaaagtagcacaatgtgctttgtaattattacaagtgctgtattatttgactttcttgtgttgttgacaaaaagattccctcatgtaataaaatagtgcttcagtttggttaaatttaagcactatagcactgaagcttgcttatcaagctacttgggacattattagcaataaaaattgagagattcaaaaccaggatctttaataatctataggaaatagatcatctcatgctattgaacaagatagaagagtgtgtcatttctatgataagcatctcccagctctcttgattgcatatgcatgccatcatacagaaccccacttttaccacaggagagccagtcattaaacaaaggcttggagcaaactgacagtatcacataattagcttgattatcttttattctggaggaaagtcaggtggtatgccctactgggaagatacaaaacagactatcctgctgtattcttttttttttttttttgagatggagtcttgctctgttgcccatgctggagtgcattggcacaatctcggctcatggcaagctccgcctcctggattcaagtgattctcctgcctcaacctccctagtagctgggattacaggtgcacaccaccacacctggctaatttttgtatttttagtagagacagggtttcactatgctggtcaggctggtctcgaactcctgacctcaagtgatctgcctgcctcagcctcccaaagtgctaggattacaggtgtaagccactgtgcccggcctcctgctggattctttattcaactaggtaggttccagattaaatatgagccatatgctcattaggcaagaaatgtgaaagagggtgcctctacagtgttggtgacccaacactagccaacttgagtcagaaaatatggaagaagataaattactctcacatatctaagacttttccatttttcttcactttctgttgcagggcccatatgagtaaatctatattccgtctgctccaacacacaccttccttctcttaattttgctttcccacccaccaagaaatttgtaagtcaaaatttatttccatgagtaactatttctaaatgattggaaatttttgaaaaagtggtatggtttatatacctaatctgcttatctgctataagtcatatgagaacaacagctaggatgattgtccaagcagctttagatgtgtttagggccaggcaaaaggtttgcttgttttttctttttgcttaagatctgggagattagcaaatttctcaagactatagactgaactgtaatttttaccaactcttgctcatgagcctcaaaatgaatatatccttgaataaagtataaatatttcaatagatacatctctctattatccattttcacaattataaaagcatcagcaaaattgtggatatgtgttccagtcactcatggatccatggaaatggaccgtgtttaaatgaatgcttcccttggatgggatgttcagcaatagc

SEQ ID NO: 386685 - DNA, 667 bp, Homo sapiens
ccttttccttcgatgcattttttctcagataaatcacaaacaacctaatccaatgaactctttcgaatggagttcagctgcttcaaactgactcaaggaacagggtaaaaataagatagatgaaattaatgctaaccacctttaaaaaaatggtactgcactatagttttctacatggcagtcaaaattcaatcaggtcagaattttgctaattagaataaaattggttgattctttatatttattacctattacttttttatacctgaaagcctatcacaattgaaaaaaaaaagatttggcagtcatgagaagaaagttaatgagaatattccaagtcttttactacatgctagactctttcatacacagtctgtttatcctgaagatcagctcagcctatgaagtaggaatttattatctccattttgcaactagcaaaattaagaatgatctgttaagtacctgacccaagttcacacagcatgtaagaagcaaaattgaaacttaaaactaggtgtgccagattgaaaacatcccaaggaagttcaggccctaaaatgtcttcctctaacttcatgttcaggcactgatggaataggaggccacatttgtctttgacatgagtttctgcttgattttgcaggatgtgaacatccctgatctc

SEQ ID NO: 386686 - DNA, 1466 bp, Homo sapiens
ggtgatgctgctgctgctgctgctgccgccgccgccgcctctattgctgatactctagtggggctggaagggtggttcctattcgcaccatcgccaaccagagacagagggaaaaaaaaaaccggcagccactgctgatgttgggttcggaggctgcatccgactcggtcacaaggaaaatggattcagtttgcatctctccctcctttaaacagcttctccgggtctcagcatgggcttccagggcagcgattgaggagaccttaccaaggagcaccacacagtagatgctgagacatcgtactccaggataagaaacagtaacatggcagcacctgcttgaaagaaattaaaaaccaacagactccatttagaaaggaacaatgtccaagaaagggcgaaataagggcgagaagcccgaggcactcattgttgcccttcaagctgccaatgaagacctcaggaccaagctcacagacattcagatagagctgcatcaagagaagtccaaggtatcaaagcttgaaagagagaagactcaagaagcgaagaggattcgtgagctggagcagcgcaagcacacggtgctggtgacagaactcaaagccaagctccatgaggagaagatgaaggagctgcaggctgtgagggagaaccttatcaagcagcacgagcaggaaatgtcaaggacggtgaaggtacgtgatggagagatccagaggctcaagtctgctctctgtgctctccgcgacggcagcagtgacaaagtaaggacagcgctcaccattgaggcccgggaggaggcccggaaactgtttgacacagagcgccttaagctcttacaggaaattgcggacctgaaaacggccaagaagcaggtggacgaggctctgagcaatatgatccaagcagataaaatcaaggctggggaccttcggagtgagcatcagtcccaccaagaagccatctcgaagatcaagtgggagtcggagcgggatattcggaggctgatggatgaaatcaaagccaaggacaggatcatcttttccctggaaaaggaactggagacccagacaggctatgtacagaaactccaacttcagaaggaggctttggacgaacaactctttctggtcaaggaggctgagtgcaacatgagcagcccaaaacgagaaattccaggaagggcaggtgatggttccgaacactgcagcagtcctgatttgcgaagaaatcaaaagagaatagctgaattgaatgccactataagaaaattagaagacaggaataccttgcttggagatgaacgaaatgaactgttaaaacgtgtgcgggaaaccgaaaagcaatgtaaacctctcctggaaaggaacaagtgcctcgccaagagaaacgatgaactgatggtgtccttgcagcgcatggaagaaaaactaaaagccgttaccaaggaaaattcagaaatg

SEQ ID NO: 386687 - DNA, 372 bp, Homo sapiens
gctcttaggaaaaagctcagattccctgtctggcaggcagggcccttcctgacctaaccagagaggcaaagtcatctttgagagagttctgaggctgagaaaaagctcactaagggatgggggcgtggggagcatttcagggacagggaaatgtgatttcaaaggtggggagatatgatggaacctcccatctgggaaaaatcagaaagcagatatggcaggaggctggagtgagtgtccagggtgtattaggtacacctagtgtgttccaggctctgttctcatgctgaagatgcagcagtgaccaaaacaaacatccctgccctcaggagctggcatttagcagaggaaggtggcaatcagcaatgagca

SEQ ID NO: 386688 - DNA, 554 bp, Homo sapiens
tggaatttgctcctgggtcccctaggccctagtgaggggaggagagagaacccatcctctcccttcttacactgtgaggccaagcagaagccaggggtgctgccctctcccacggtgccaacgcctttgtgtgttgtgtatgtgagccatcccacatgtgagggaaataaacccctggcacttaaaaaacaaacaaaaaaacgcattttaaagaaagaaaaatagtaatgtaatttgcccaaggatacagttcttaaagttaggatttgaatccagatcagtgttgctccaaaacctgttaaatcacacaatccctatcatcttgtgcattcgtttgcttctgaattgttagtcaaggaatttttaactgccaacaacatgatgaaaacaatgttactgcacagagttgatacaattttagacagaaaaaagaaacttgatattttggttacctaatccattcattcattaaaaaaaaatttagtgctgggcttggtggctcacaactgtgtaatcccggcattttgggaggccgaggcaagaggattaccttt

SEQ ID NO: 386689 - DNA, 437 bp, Homo sapiens
ataagattgaatatggcaaattcttaatgatctggggaacaacagtttttaagtctgggaataacatgtgaaaccagcagctacatttctaagtggcatctccattctcactgttggtgaacgttaaactgttgcaaattcattttatttttaacctaaaaaaactgaaatcacaaattacctaggagaaatcaatcacatgacgcactccaaagttaaaggtacgtcagcgtcagctcccctgactctctgtcagtggctgattctccactcccacccaccagccatctcgattctgcactccagtgcttttcagtcttctagactctgctgaactatgagagaaatctggggcttcaacaaagtcagtgccaactttttaaacttaccttaccaagttagaggaaaaaacaaaacaccacgtaccatcagaatca

SEQ ID NO: 386690 - DNA, 518 bp, Homo sapiens
ctccatctcaaaaaaaaaagaaagaaaaataagcatcttttctcagagtgtcttagtaagctgctgaaaaggacaaaagactcttaaaatggtaatttgcacagtgtatttgatttaaggtctctttgagtatttttgtacccaatacagagggtaacaggaaatagaattaactgagaaaaagcccctgctgcatctgttgtgtgcctagtatcattttcagatcaccaagtcagatttaggatgcatttaaaatgtgtgtatcaaaaatatttagctctccggattgaagtctactctccatccattctctgggcaaatactgactgagaacttactgtgtataatgtagtctggatctgggaaaggaaataaagatgggtaacagtgggtccccacctcaggtaggttttcagctgccctcaagaatcttgggatccagggttgtagaataaatacaatattttattacatcagtaaaagtcatctccaaactgttatttttcttttatgtattc

SEQ ID NO: 386691 - DNA, 315 bp, Homo sapiens
agtccacattaaggtttgtgaagcctcattctgagacaccactggttgggtgtcgtttccaaaaaccagtgccagaggccgtgtgatctaatagcgatcattacccatagctttatgcatgtatctatttgtgtgtaccctgctcccaccttactgagcatttgagccagttgctattcaattagataaaaagcatccacagaggaggtggcaaataagggtttaaataacaagatgaacgcaagtcactcagggcgcataacttctggagagctattgtacaacctggcgatatagttaacaatcatgtattac

SEQ ID NO: 386692 - DNA, 400 bp, Homo sapiens
ttgtgtgtgtgtgcgtgtgtgtgtgtaacttaaagttccctctcctcctagctaactttaacttttatcgatttatggctgatattcctatgacactctggtgcatctgtctacagatatttctattttttatattacacttatttaatattcttcattaatcttcattaattcattaatttaattaattggacctttttgttttactccttatatcgcgtaacttcttttatatactttacattgctttgttttcgagttcacattctaggaaacttattcagccaaatagcttggttttactaaaagtttttttcaattctgtatcaactgcaatctaaccatttcattgattctgggtacacaattttaaaaaaaactttgttttgcagttgttcta

SEQ ID NO: 386693 - DNA, 980 bp, Homo sapiens
caggaagtatcagcatggcattaggttgttgtgagagattcagctcttctgcagtgccttgtcaaacgacctgactggtcaactgggaaaatgaagttctcagggccaacatcgtatttgggtgtttttcttttaggtctgtatcaaagccagatttaagaaggagggtgtctacaaatgaacgaaagcagaggatgtctggggacaagctaaggacatttgtgtcccacactgcatgtattctgaatccagagaaaagagacaaacttcttgggagaaaggatcatgcctgaagcatctttgcatctcccctaacatctgtttgctaagtgttgaataaaataaaagcttgaaagaatgaatctgactgtcagttgagacatctgataatctaaaagcattcagagaattaggatcccatatggctcgaaaatatttcctatccggcaggaaaaagagaacataccatgaaaataatactgaacattaaatagtaaacaaaaaacaccatgacaagtctaaagagagaccacaaaaggaaggaaaaaggtctcaagttttgatcatcctatgagcccatatatccttcagagcaagacaatgtgaataggcatcgttgcacttggtagagggttaggcaaatagtggatgccaaataaatccttgtggaattgaatggtattacctggagttccctgaaggttgtacatcctcttactccttggcctttggaacgtccttctctatacctggaattcttcctctctctctttacctcctctgactactgtctctttacctcactttgaccttcctagttctgtttatcacttcctctaagagttgttgcttgatgcccctgcactgggttagcagattttgctaagtggtccacagaatcacctacttatgtgtttctctgccagctctataaagacagaccagactaccttgcggtaatttgttcagtattttatccc

SEQ ID NO: 386694 - DNA, 288 bp, Homo sapiens
  misc_feature (6)..(6): n is a, c, g, or t
ggctgnaggaatcgcacgaggtttttttttttcctgttttgagagttagataacatggttaccagaattaacagaaactggtttccccctggcataatgaaaaggagaaaacttagacatgtctgcctttttcttacctcaagggaaattctgcatatatctgcagtcaagactgaatagagagggatcccgcagaagggaaagagctgcatgctatcatactaataaatactcaatggtgagagaattaaatgtcagagctgcaattgcagacagcttttgagaaat

SEQ ID NO: 386695 - DNA, 446 bp, Homo sapiens
tccaggattccttttcttagacattatctattaaagagcaattctaaaatttttcctatatgatctaaagtttctaccaatactctgtctattctttcctttttaaaaaaactaaggaagtttacagaatgttgtttttaaaatattagaaaacacatgtacagttggccctccatatctgcaggtttaatctgcagattcaatcaaccaggaattgaaaatattcatttcaggggagaaaaaaaatacagaaaatgttatattgttgctgacatgtactatgtacctagttaggtctaagatagttgcgtatgtactaaacatgtaccggctttctttttggtcattattccctaaatacagtataacaactatttacagaacacgcattgcattaggtattattaagtaatctagagttgatttaaactatataacagaatgtg

SEQ ID NO: 386696 - DNA, 650 bp, Homo sapiens
gttaataggaaggctttgatttgaggaagagattctgagactccagcaggatgtcttatcaacagtagcaatgtaagcagccctgccagccacctcctgtgtgccgcctgccaaagcgtccagagccatgtccacccctgaagtgccctgagccctgcccaccaccaaagtgtccacagccctgcccacctcagcagtgccagcagaaatatcctctggtgacaccttccccaccctgccagccaaagtgtccacccaagagcaagtaacagcttcggaattcatcaggaccacgaaaggatagggataattggctcacctcgttccacagctccacctgcatcttctcatcaaagccatccagggatacacagggagcttctttccccttagcctgtgatctgcccatgatgatccccgacagcaaaatgtttcctttctgaggctgccatgctgccactgtccaggtggagactgagcaaaggaagtcctcagctgtaccggcctttcagagcttctctttgggtgccatcaaagaattattttgatgtcttctgtctctgtctgtcacctggcatgagcttctactatctgtgcaattgtcacttttctttcactccctgaataaagtagctatgcctataaaaaag

SEQ ID NO: 386697 - DNA, 686 bp, Homo sapiens
agaggttctcagcctcatgactcctaaactcctggtacttgagcaccgatctgcttcggagaacctgattctgagactccagcaggatgtcttatcaacagtagcaatgtaagcagccctgccagccacctcctgtgtgccgcctgccaaagcgtccagagccatgtccacccctgaagtgccctgagccctgcccaccaccaaagtgtccacagccctgcccacctcagcagtgccagcagaaatatcctctggtgacaccttccccaccctgccagccaaagtgtccacccaagagcaagtaacagcttcggaattcatcaggaccacgaaaggatagggataattggctcacctcgttccacagctccacctgcatcttctcatcaaagccatccagggatacacagggagcttctttccccttagcctgtgatctgcccatgatgatccccgacagcaaaatgtttcctttctgaggctgccatgctgccactgtccaggtggagactgagcaaaggaagtcctcagctgtaccggcctttcagagcttctctttgggtgccatcaaagaattattttgatgtcttctgtctctgtctgtcacctggcatgagcttctactatctgtgcaattgtcacttttctttcactccctgaataaagtagctatgcctataaaaaag

SEQ ID NO: 386698 - DNA, 686 bp, Homo sapiens
  misc_feature (44)..(44): n is a, c, g, or t
aaaaatttgctctatactaacatattcggtacacttctagaaanagagaaacttaactatatagcagattctgagactccagcaggatgtcttatcaacagtagcaatgtaagcagccctgccagccacctcctgtgtgccgcctgccaaagcgtccagagccatgtccacccctgaagtgccctgagccctgcccaccaccaaagtgtccacagccctgcccacctcagcagtgccagcagaaatatcctctggtgacaccttccccaccctgccagccaaagtgtccacccaagagcaagtaacagcttcggaattcatcaggaccacgaaaggatagggataattggctcacctcgttccacagctccacctgcatcttctcatcaaagccatccagggatacacagggagcttctttccccttagcctgtgatctgcccatgatgatccccgacagcaaaatgtttcctttctgaggctgccatgctgccactgtccaggtggagactgagcaaaggaagtcctcagctgtaccggcctttcagagcttctctttgggtgccatcaaagaattattttgatgtcttctgtctctgtctgtcacctggcatgagcttctactatctgtgcaattgtcacttttctttcactccctgaataaagtagctatgcctataaaaaag

SEQ ID NO: 386699 - DNA, 359 bp, Homo sapiens
gagtgatacttcagccatccttctaggtgagggtcttgaggccacacagacagaagtggcagagatgggacacacattcgtcttctcactcacagtctggcactgagctgtgggctgctgggacaccatgcccccatacgagtagccttcccactccttaccttgaaggaaaagtgttttttggacaaatacctgatggaaacattacatgggccttggaatctgttagatctagcttcctgaaactcttgctagctgtgtgacaatatacaagtttcttaacctctctgagcctcagtgctctaattacactcccctcatagagtttctaagagcatcctggggctggcacgtgtcaa

SEQ ID NO: 386700 - DNA, 564 bp, Homo sapiens
tgagatggcgtttcactcttgtcgcctaggctggagtgcaatgacgcgatctcagctcactgcagcctccgccttgtgggtgcaagcgattctcctgcctcagcctcccgagtagctgggattacaggcacccgccaccacgcccagttaatttttgtatttttagtacagacggggttttgccatgttggccaggcttgtctcgactcctgacctcaggtgatccgcctgccttggcctctaaaagtgctgggattacaggagtgagccactgcacccagctcagttgcttttttttgcaaacagtttttgtgaatatagatatagaaaaatacataaaatgtatgtgtttggtttaacaaaatattatggagcaaaaacccatgtaatgtaattatcacccagtcaagaaataatggtagcctctcaaaaaatacattagggattcttttttcttttctttttttttttttttttggaagaatattgcatacctattagaaaagtcttttaacaattaaaattggaaaatgactgacaaacttacactatttgatttaaata

SEQ ID NO: 386701 - DNA, 216 bp, Homo sapiens
tctcttcccctgagtgatgagaatgacaaggaccccaatactcccccaggttgtggaggaaactagataacatgggcggaaggacccagtacctggcaccgcctttcagaccctgagctgtagagagggttgaggcttgcacgccacagggccagttgcacaggcagctgccacagcctgcctgacccaggtctcctcacctgcctgccagaaact

SEQ ID NO: 386702 - DNA, 178 bp, Homo sapiens
aggctcaaacgtgggagagaaagatgaacaaaacagccaaaaaatgttggggagggtgcaggtgtcgtccgggtacatttaatgagaaaaatgagtgagactcccgagtaagaatggagttaactagtaatgaaccatgttggcccttagcattcctgctcaagataactgcctagag

SEQ ID NO: 386703 - DNA, 199 bp, Homo sapiens
catggacttggtatgataggaagtaggatgcctttatgggattctagttattagctgtcttctttttgtgcttttatttgacttattacatgacgatctttgattttcttccaatttcatagtcatcatattatcccttaacactgaagagtagttttaacccatatatttcaaaccaatagttattctcagaatgctg

SEQ ID NO: 386704 - DNA, 397 bp, Homo sapiens
cgggtgctgtggctcagtcctgtagtgccagcacatgggaagataaggagggaggatgacttgagcccaggcgtttgaaactagcctgggcaacgtaatgagaccctgtctctaaaaaaagaaaattatccaggtgtggtgcttgcctgtagtcccagctacttggggaaactgaggcaggcagattcccttgagcccaggaggtcaaggctatagtgagccatgattgtgccactgcactgcagcctgggtgacagagtgagaccttgtctcaaaaaaaagaagttaacctacagaatgagagaaaatatttataacccacgtatctgataggggactaatatctaaaatgtataaggaactcataatacatatttgtagcaaaccaagtaaccca

SEQ ID NO: 386705 - DNA, 426 bp, Homo sapiens
tttaagcttaaatttaaataaccacacgtggctagtggccactgtatttgacagtgcagtggtgcaatctcggctgactgcaacctccacctccctggttcaagcaattcttctgcctcagcctcccgagtagctgggactacaggcgcctgcccaagagtgatgaactgtgcatcaggaactcagcatgagtataaacatcaccctcttttttatgcagtttttactcaggttttatttaatgcactgtttcaactttgtagctatcactttagtcaggcacttagattctctgttatgtgagtatttatattgctggactgcaactcagagaaattgatatctgttcttgtcagtggacattttggaaaataagtgcatgaccaatggtggtgattattattacagtatataactaattgaatt

SEQ ID NO: 386706 - DNA, 499 bp, Homo sapiens
ggtcgtcgctgctgaccacgaagctgtcaaaagttcacctccttggctgcccccaacccctgcccctttgccattaaatcatttactagattccaactagaggaatttggctccggggactcgaacctctgaggtcagggtctggggccagtgtgggagagaaaggccttgaatggaaacaaaataaattactttaaggagtttataaaactcacacttatagggagagccgcggggccctgtggtcaatgtaccagcaggcccatgacgcaactgttccgtttggaaatttctggaaagcagtaatttttggaatcataaatcttgagtattttttttttaaactttggaaaggtttttaaactttttttttttaagttttttttaaacttcggaaagttttaagctttggaaagaatgtaacaaaatgttattaacatatgtggagctatcgaatcatttaatggtggtttctgtattttctgttttgttttttatc

SEQ ID NO: 386707 - DNA, 371 bp, Homo sapiens
tggtaccatcacaggtttatgccttatagtcttagctgagctgaacagttattttatgtgtttttggttggctcccagtcctgtttcaccaagcagatattccttgtaccttgctttcaaactggctacaccatggtaactcccctctctgtaagctcatattgaaacatgtccttcatggaaaaatgtatataatacctcttctcactattatccttaccgacttctttgctatctcggtggacatagtgccccatcttctgtgtaaggatactcactctacctatatttgaaattccatctcttcctactttaaggaaccaactctgtcagttaaaccctctttgtcttacattttcaacctattcttt

SEQ ID NO: 386708 - DNA, 445 bp, Homo sapiens
tgggggtctgagatagaaggatcacttgaggctagaagtttgagacagcagtgagccatgattgcaccactgcactacagcctgtgtgacagagcatgatcctgtctccaaaggaagaaaaaaaagataaaacaatagtacttcctgcttggatggagctgcttaaagaaactaccttcatgccttactaggtatgactctctaatttctgcatcaacatgcaatggcatcaaatgctcaattagcaatcctcacagaagtcgtgtctaccgctgttaatcttatcaactacatcagagccaaggtcttttcaagatactctgttaagaaatataagcaagggggccgggcgcagtggctcacgcctctaatcccagcactttgggaggccggagcgggcggatcacctgaggtcaggaattcgagatcagcctcaccaacatgg

SEQ ID NO: 386709 - DNA, 237 bp, Homo sapiens
tggtgtgtggctcagctgcagcggcagcgtagtgggtgtccaggggagtggacaagcaattctcctgtcatttgcaactttcttcaggaactcagataaagaacacttggataacgatgatccctgtagagggatttcatctgtaccatcacacatggaagaggagttgctaggtcaggaaaggcagctgctaagctaaggttcttgtccctttgtccttgcatgcctaaggagggg

SEQ ID NO: 386710 - DNA, 365 bp, Homo sapiens
aataaaaaacaattacctggacttggtcgcacacgcctgtagtcccagctactcaggaggttggggttcgtgaatcacttgagcccagaattcaaagggtgcggtgagctaccattgtgtcactgcactctaatctgggtgataaaacaagaccttgtctctgaaacaacagcaacaataataaacttcagcatccaaatagcctgaaggcttgttaaaatacagatagttggccgggtggtggctcacgcctgtaatcccagcactttaggaggccgaggcaggcagatcatgaggtcaggagatggagaccatcctggctaacacggtgaaaccccgtctctactaaaaatacaaaaaattag

SEQ ID NO: 386711 - DNA, 281 bp, Homo sapiens
ctctggagtgattattttcccatttaaaacaaaaaccaaaaaccttgctacagtattaagtttgaattagggtctgaacgaagttattgtttgctcagacccctcctccgctcttaaacctaaacctccactgccttcatgtaaatgagacaccgtgggggaacagtcctcccttcgggcagccaggcaaccacttggctcacaagagcaatcaagtatctccggcttgaaagttaatagagcactattatttcctaaaagaaaggagaaaatccgcatcc

SEQ ID NO: 386712 - DNA, 377 bp, Homo sapiens
agagaatgtaatttttaatggctgcctaggccgtcatagtgttgaagggtgctgggtttggacctttaacaggctgtgtgaccattgacaagttatttcacctcattaagcctcaagagtaataatagtagtatctacctcaaggggtgttcgtaagaagtaaacgtaataatttatgtgaggtgtttagcacagtgttttaacacattaccagttttcaattatgttagctatgattccattaaataaacatccttaattaacataagcacttgtttttagaatagacctaacagtttattattatacattgcattataaattgtactgtattggacgttacatgaataattcatttatgatctgtattaaatgtt

SEQ ID NO: 386713 - DNA, 255 bp, Homo sapiens
attttgttttgctttcattattaacatacacattctataatacatggggagaaaagcatgaaaatattcactaggataagactgatttccttcatgtctaattttctttttttttttgagacggagtctcactctgtcgccatgtctaattttctgaatacagatgagcctttggatactgatgacaccttagtgggccccagtttacctctactcatttttaattggttcaatcgtgttttatcataaacacct

SEQ ID NO: 386714 - DNA, 342 bp, Homo sapiens
gtgcaggagctgccgcagcttcttccaaaatagagctctcctggctgctgcagctgctgacgtcttcctgcatctctcaacctgctcttcctctcctttcttcccaccacgccatctcccctcgcctgcttcccctcacttggactggggcccgctgggacatcacccagtctaccaccctggtgtctcagagggtgggtgaggtcactgttttccattccaaaccacacctggtgttaggaacattccattttcaactcttcactggtttgcttctgtgggggcagaactcagattttcaagaaaatgcattacattgtaaaaggatctttcagattacaa

SEQ ID NO: 386715 - DNA, 390 bp, Homo sapiens
tgggatcacaggcgtgagccacctcacctggcctgatgtagtttagaataatctttagttgtgtccaatatgtagttttacctagcaaactcgttttaattgttggtacctttttttttttttaacttctctaagttcatctaccttcagattgcatctttggaaggggatgggcagaattttggaaggtagcagttctcttagatgaatagaaaagaggccaggcatggtggctcacgcctgtaacccctgcactttgggaggccaaggcaggtggatcacctgaggtcaggagtttgagaccagcctggccaatatgatgaaaccccgagattgcgccactgcactccagcctgggtgacagagtgagactctttctcagggaaaagg

SEQ ID NO: 386716 - DNA, 1174 bp, Homo sapiens
aaggcagtgccgtaagataaaatgtagttaacagaatagaatgctaattatcccattttgttctgtgtatgttggaaaaaaattacagaactctcagtttcatagtaaagataggtaagtagtgtctggataatgtccagaggatagactgaaactctgtgataaacgtgagcaggcagcaggatgctacctgataactgagtataacagcatgcaggggaggactgtgtggctggaggcagctgcggtagaagttggcagtgccactgtggacttttaaagggacaactctgggtacaagcctgaagtgtaaggaggacataaaattaaatacaattgagcttgtctccttgaaaactggttctctctttttactacattaaaaagatcaagtggacagttaagtcattaattcaggtaattccaatcacaaaactacttttttcctgaagtgtcctaatcattgatttttaaaaatgatatttctttcatcataaattatcagcataattgctttggttccatatttcatattaagcttgggctgagtgatgtttaaagcctcctgcttaccttccccccttttcttcctattttattttacttaatacctaaaaaaaaaaaaagaaaagaaaaaaaaacctcgatgtaaattattttcttctgatactgtgatggtttcatagagtaaaacactttccttagatctcttcatttgaacatttcctgttgataaatcactgaaaacaaaacaaaactacctaatttaaaagcgttgcgatgggtcttccagagtttttatcttacacatagctgttctagggcttcccaccaacatttatttccaaaccaaggacttgtttatctcatccttcatacttttgcatttcagtccgaattggatacgggtttttgttgtctttgtttttgcagtagaaaaacttcagttggtaggatgaaaaggagaacaaatctttattcactttcagtatagttccattaacagtattaatgtgccatgtatgaatatacctgtcatgcagactgaggcccacagactaataacattttgagcaagataattttaagtaaaaactgaagctctgaactcaaacattctttcaaatttctttaaaataataatgatcacttagatgaggtgcatcatttatgt

SEQ ID NO: 386717 - DNA, 339 bp, Homo sapiens
aatgggaagatgaggactggaggtaggtcctagacctaaaaacatcaaaggttcctgcaccggaccgttgatagggatgggaacacaatcatttcccacagtgacatattccaacttgaataacccttaccatcaggaagttccctttgtgtctatcctaaatctttcctgttgaaaactaaaccccatttcctctagttctgccttctgtggagatgaatagctgatgaacactttataagttatatatgaagggtttattataaaccactgcatcagcctttttacccccttgtacaactaaaactttaataaaccagaatgctcaatgaaatatgg

SEQ ID NO: 386718 - DNA, 950 bp, Homo sapiens
ccgtcgtatagacgacatttcaagaataggcgcaatccccggattggcgacatttcaaacatggcgtgatgctgcatcagagagaaaaataagctcttgcattgacaatgaaatgtctacccatgtagatgacttgtgcttacttccactcagcaagtgattgcccagagctacttacctggctccaatctaccactgggtgtgtacttgcaatctaccatgtacctagaagatgagagaaacaaattattaatgatgaccacaccccaatactaacaacaattgcagaagaatcaatgacttaaacaaaaatgtggccattgaaggaatagaaaatatagtgagtttagtgtaaatttaaaagtgattaataagtaacatacaaaatccagaaactataagaaaacagattcacaaatataaatatataaagctttaaaaaagtttaatgtaacaaaaatggcataaaaggagtcaaaagtttttaaaaaatatgttaatgcagtagattaggtgctaattttcttaatatactaataactcaataagagaaattttgtatctagaagaaaatgaacatggaaataggcaattcacagataatggcattcatctggcgaataaaaaatgtgtgacattcagaataaaataaaaatgaatactggtcttcagccatcacttgagcaaaactgcaaagatacaatgagactcaggcattcccatatactgtggatgggagggcaaagaccttcaacctctaattttatttctatttttaaacatgtatgttaaaattttaaatgctaatgtcctcttgacccaataatcttatgtctaagatttgaatctggagataaacttgaacaaatgcatctagatttatgtataagtattaatatagtttagatgtgtgttcccacccaaatctcatattgaaatgtaatccccag

SEQ ID NO: 386719 - DNA, 514 bp, Homo sapiens
ccgtcgtatagacgacatttcaagaataggcgcaatccccggattggcgacatttcaaacatggcgtgatgctgcatcagagagaaaaataagctcttgcattgacaatgaaatgtctacccatgtagatgacttgtgcttacttccactcagcaagtgattgcccagagctacttacctggctccaatctaccactgggtcagacgtttgctgaattcagttctgagcttttgaaccaaaagcagatcttcagaacaagaaacaagataataaaagagaaacatgaagaaactgaagatgattggagaaatatgaatcaagatgattagacctagcagagggctggctggatggcatttatgttgacaatggactcctacacagaggatgatcatggtctaggacataatagtcattcaatcatcatttcttaaatgattttttaaaacaagtgaatgaatgaccaattatataccttccctgagccaataaaatatattaaaagtataggcc

SEQ ID NO: 386720 - DNA, 210 bp, Homo sapiens
catggatatagaggtagattatcttggaaagtcaggcagaatcgctgccttaacaaacataaccacagtgttacagtaaagaaatgttggggctaggtgcggtccctcatgtctgaaaccccagcactctgagagatcaaagtgggagaatcacttgaggtcaggaggtgtagaccagcctgggcaacatagtgagacctcatctctaca

SEQ ID NO: 386721 - DNA, 789 bp, Homo sapiens
cgaggccgacggggacctgacacggtcacgcggcgccggggagcaggttcgagtggccgggcgtggccgtgctgcccctccgcgttccgcaggcggcgacgggcgagcggccctagcgggctgcagggaggacgccgcgtggacggagagccggcgcccgggggccagatcccctcccgggacggggcgccaggtccccgcgagctgcggcgcgacgcgcgggcacccgtgtcccacccggtggcctcgccgctgcgggctgcgctgagagcggggtggcgcgacgcggtccctcaccgcagggggaagacggcaccaccgcgtcccggccgctggaacttcccgcccgcgccgccggcccgacgctgccccctggcgggagagcgctgcaggggccccggcgaggccgcaggacccgacctccccgccggcctcgcactcccgcgccgcctccgagggtcggcagccggatcgccctccgtgccccatagcacccctcacactaaaaacgacgactttattaagatgtgagatacagggtctctgtcgcccaggctggagtgcggtggcacgatctcggctcaccgcagccttgaacttctaggctccagcgatcctcctgcctcagcctcccgagcagctgggaccacaggccccgccaccatgcccggctcagttccatgacttctgacacgcgaaaccaccaggctagtctccccccgagttcaagaagtcctctcctcccaaaagtaccctcctgcccctctgcagctaacccctcacctcccc

SEQ ID NO: 386722 - DNA, 284 bp, Homo sapiens
cccgaactcctgacctcaagtgatacacctcagcctcccaaagtactaggataacaggcatgagccaccatggccagcctatagcaggtaatttagtccagtccttatcagatgcatgagacccctctaaaagatgctatcaagtcataatctttctgattttcttttctggcccaaggtcaggtcatcaggcagtaggttaattacatgaagatgtgttcctgtaccttctcctttgcatttgtactacctcacatctggtactaatacaaataactaaaaca

SEQ ID NO: 386723 - DNA, 401 bp, Homo sapiens
gaatgtacaacatcaagagtgaaccttaatgtaaactatgaactttgggtgattatgatgtgtcaatgtatcttcatcaattgtaacaaatgcactactctgatgagggatgttgatgaagagggaggctatgcacttgtggggggaggggatatatggaaaatcttcctaccttcctttcagttttgctgtgaacctaaaactgctcttaaaagtagtcttttttaaaagaaaaacctggaatataacattattggatgaaacaatcaattatgttaatattgacaattgatttaatagaactgtcttggctctaaaattgtaattttaaatgcatctttgtagaaatgaaactatatcttaaactatatgttcattaaattattttttaaaagacacca

SEQ ID NO: 386724 - DNA, 650 bp, Homo sapiens
gttgtatatatcaaacctcttcattactggagataaaagaaatacaataaatagaagagaaggcccctcctcgtatcttcattctagaagagagatgtttgtagtagcttcacctgttgtcaagctgccatttctttctccactgtaatttcctaaaagcgtggtaggaaagagaatagttgctgagaagggttcttgagcttaatttctacttaattattagatttaataaaggcaagttttaaagaagtatctgtggcctgacaaagacttcaagccaaattagaggcaaaggagctcaaactcattcagagaagaaattgtgttagctgaaaaagaagtcggtgctaatctttaagattttttaaagttctctctagaccaaacaaagaagggaagaaaattttagcatgattatagtttacacacatttattaatggcattatgttgaaaaaaagtatttggcattattgtatagtgaacagggagttagaaagtgggttgttcaatgagaacacatggacacagggaggggaacatcacacaccagggcctgtcgggggtgggggtctaagggagggatagaattaggataaatacctaatgtagatgacgagttgatgggtgcagcaaaccaccatggcacgcg

SEQ ID NO: 386725 - DNA, 187 bp, Homo sapiens
tcccttccagcatcttactacattcttccaggtcaatttcaggaatctttagataaaaagaaacacagtccttcgttactgttcttccagccctcctgtattctgctggttttagagagtgtagaaaagctgttggaactctaattttacattttatgtactataaggatcaaaacaaaaatatctg

SEQ ID NO: 386726 - DNA, 159 bp, Homo sapiens
aaggagccattcagttttctatgaggacttttaagagacatttacccaaggtcttggtatcagaaaagcattctatctcctaaaggacttcttactgaacatggaatttcatgcatccctctttcctctagggccacaagcagcctccaagtcaaattt

SEQ ID NO: 386727 - DNA, 460 bp, Homo sapiens
cctacatgtccatcaactgatgaaacatgggctgcatccatccaacggaatattatccggccataaaaaggaatgacatcgagttgaaggcagggtcttgaggagatatttgcacacccatgttgcatgttcattgcagcatcattcatgagaactgagaggtggaggaaccctgtgcgctgaaattggggctggccgagccaggtaggaggtggacaggctccctggcggctctccagggacgtccttcagggacagcttcgaggacgtcccatgagcagtgcccatgtggtcaagggcttcagtacccggcagcagctctcagccaccttgaccatgagcaaggagaggacatatctggtgcctcaaaagaacatctttgcctaaagctcatctgggagagagagcaagcagactgcaaatttctgaaactgcttgaaccaagtgcatgaatttggtg

SEQ ID NO: 386728 - DNA, 1016 bp, Homo sapiens
tcttctcatagtggacccctctctctcgactattctgagccggtttccgtttgtactcctcccctcttttcccgttcgaggtctgccttctcctctccccgtttttcgcgccttcttggtttcggttgtgtgggaggcccctcttccccggtcgctcaaacataccagactagattgggacataggcccgcctcgaagagtccgccagcttcccatgccagcccggagcccacagtgctgcccagcgtacctccctcaccgtctggggctcttctgggagcacggagcatcccctgttcctgtttcactctcagcttctcccctcgaagggactctctggccacctcctccaccgcagtccagctccctcagtctggcacccactgctacactcagcctcatgagccacttcagaccagccaggtgtcttcccgggccctgccagaccctgctcacattccctctgctggtctgtgctggtctcagaaggccaccgcgcccgcattccactcagccagggtccagctgcagcccccgccacccttccttcccttccctgtcctgggtcatgttgttgccaccctgtgtgacttttgaagctgtaaaatgagcttccagggcttgggtggcgtcggggcagggccgccgaggctgggaggaagcccttctgccttttgctggtgtttctggaatttgctttccctcacctctcacttccttctagaaggagcttcctgactggaaccagagaatgcatgtctgtccacttggtggctgctgggtggggccgggaacaagggcccctgaccctgtgtgctggccgggacctgccaccagccccccagcctgcttcttccccttaagctttgtgcccctggatgcgctaacattcactcttgtttgtccctggactggccatgaagtgaggagatggttatttaaagagaattccctatttatttgacaaaaaatccagttaatatattaatgtgaaataaaccctgtttgcacctcga

SEQ ID NO: 386729 - DNA, 690 bp, Homo sapiens
ttgcttgaggatccccccgactagccgacaggtccagctccctcagtctggcacccactgctacactcagcctcatgagccacttcagaccagccaggtgtcttcccgggccctgccagaccctgctcacattccctctgctggtctgtgctggtctcagaaggccaccgcgcccgcattccactcagccagggtccagctgcagcccccgccacccttccttcccttccctgtcctgggtcatgttgttgccaccctgtgtgacttttgaagctgtaaaatgagcttccagggcttgggtggcgtcggggcagggccgccgaggctgggaggaagcccttctgccttttgctggtgtttctggaatttgctttccctcacctctcacttccttctagaaggagcttcctgactggaaccagagaatgcatgtctgtccacttggtggctgctgggtggggccgggaacaagggcccctgaccctgtgtgctggccgggacctgccaccagccccccagcctgcttcttccccttaagctttgtgcccctggatgcgctaacattcactcttgtttgtccctggactggccatgaagtgaggagatggttatttaaagagaattccctatttatttgacaaaaaatccagttaatatattaatgtgaaataaaccctgtttgcacctcga

SEQ ID NO: 386730 - DNA, 1294 bp, Homo sapiens
tcttctcatagtggacccctctctctcgactattctgagccggtttccgtttgtactcctcccctcttttcccgttcgaggtctgccttctcctctccccgtttttcgcgccttcttggtttcggttgtgtgggaggcccctcttccccggtcgctcaaacataccagactagattgggacataggcccgcctcgaagagtccgccagcttcccatgccagcccggagcccacagtgctgcccagcgtacctccctcaccgtctggggctcttctgggagcacggagcatcccctgttcctgtttcactctcagcttctcccctcgaagggactctctggccacctcctccaccgcagtccagctccctcagtctggcacccactgctacactcagcctcatgagccacttcagaccagccaggtgtcttcccgggccctgccagaccctgctcacattccctctgctggtctgtgctggtctcagaaggccaccgcgcccgcattccactcagccagggtccagctgcagcccccgccacccttccttcccttccctgtcctgggtcatgttgttgccaccctgtgtgacttttgaagctgtaaaatgagcttccagggcttgggtggcgtcggggcagggccgccgaggctgggaggaagcccttctgccttttgctggtgtttctggaatttgctttccctcacctctcacttccttctagaaggagcttcctgactggaaccagagaatgcatgtctgtccacttggtggctgctgggtggggccgggaacaagggcccctgaccctgtgtgctggccgggacctgccaccagccccccagcctgcttcttccccttaagctttgtgcccctggatgcgctaacattcactcttgtttgtccctggactggccatgaagtgaggagatggttatttaaagagaattccctatttatttgacaaaaaatccagttaatatattaatgtgaaataaaccctgtttgcacctcgatttgtttgctgaaaatgtgaaatagtaaaaatgaaataactggaaaaaaaaaaaacgaaaaaaaaaaaaaaaaaaaacccgcgagaggcaccataagggcgggggaggggaaaaagagagggataaggaaaggggcccaggggccaaaagggagtccgggaaccacggtatcagggtaccaagggggcaaaactcggcggggctacccaaataggggagcgccaaataaaagtcgggagataaccgagggtataaccggcattaaggacccgggagag

SEQ ID NO: 386731 - DNA, 963 bp, Homo sapiens
tcttctcatagtggacccctctctctcgactattctgagccggtttccgtttgtactcctcccctcttttcccgttcgaggtctgccttctcctctccccgtttttcgcgccttcttggtttcggttgtgtgggaggcccctcttccccggtcgctcaaacataccagactagattgggacataggcccgcctcgaagagtccgccagcttcccatgccagcccggagcccacagtgctgcccagcgtacctccctcaccgtctggggctcttctgggagcacggagcatcccctgttcctgtttcactctcagcttctcccctcgaagggactctctggccacctcctccaccgcagtccagctccctcagtctggcacccactgctacactcagcctcatgagccacttcagaccagccaggtgtcttcccgggccctgccagaccctgctcacattccctctgctggtctgtgctggtctcagaaggccaccgcgcccgcattccactcagccagggtccagctgcagcccccgccacccttccttcccttccctgtcctgggtcatgttgttgccaccctgtgtgacttttgaagctgtaaaatgagcttctgccttttgctggtgtttctggaatttgctttccctcacctctcacttccttctagaaggagcttcctgactggaaccagagaatgcatgtctgtccacttggtggctgctgggtggggccgggaacaagggcccctgaccctgtgtgctggccgggacctgccaccagccccccagcctgcttcttccccttaagctttgtgcccctggatgcgctaacattcactcttgtttgtccctggactggccatgaagtgaggagatggttatttaaagagaattccctatttatttgacaaaaaatccagttaatatattaatgtgaaataaaccctgtttgcacctcga

SEQ ID NO: 386732 - DNA, 724 bp, Homo sapiens
tcttctcatagtggacccctctctctcgactattctgagccggtttccgtttgtactcctcccctcttttcccgttcgaggtctgccttctcctctccccgtttttcgcgccttcttggtttcggttgtgtgggaggcccctcttccccggtcgctcaaacataccagactagattgggacataggcccgcctcgaagagtccgccagcttcccatgccagcccggagcccacagtgctgcccagcgtacctccctcaccgtctggggctcttctgggagcacggagcatcccctgttcctgtttcactctcagcttctcccctcgaagggactctctggccacctcctccaccgcagtccagctccctcagtctggcacccatctagaaggagcttcctgactggaaccagagaatgcatgtctgtccacttggtggctgctgggtggggccgggaacaagggcccctgaccctgtgtgctggccgggacctgccaccagccccccagcctgcttcttccccttaagctttgtgcccctggatgcgctaacattcactcttgtttgtccctggactggccatgaagtgaggagatggttatttaaagagaattccctatttatttgacaaaaaatccagttaatatattaatgtgaaataaaccctgtttgcacctcgatttgtttgctgaaaatgtgaaatagtaaaaatgaaataactgga

SEQ ID NO: 386733 - DNA, 680 bp, Homo sapiens
tcttctcatagtggacccctctctctcgactattctgagccggtttccgtttgtactcctcccctcttttcccgttcgaggtctgccttctcctctccccgtttttcgcgccttcttggtttcggttgtgtgggaggcccctcttccccggtcgctcaaacataccagactagattgggacataggcccgcctcgaagagtccgccagcttcccatgccagcccggagcccacagtgctgcccagcgtacctccctcaccgtctggggctcttctgggagcacggagcatcccctgttcctgtttcactctcagcttctcccctcgaagggactctctggccacctcctccaccgcagtccagctccctcagtctggcacccatctagaaggagcttcctgactggaaccagagaatgcatgtctgtccacttggtggctgctgggtggggccgggaacaagggcccctgaccctgtgtgctggccgggacctgccaccagccccccagcctgcttcttccccttaagctttgtgcccctggatgcgctaacattcactcttgtttgtccctggactggccatgaagtgaggagatggttatttaaagagaattccctatttatttgacaaaaaatccagttaatatattaatgtgaaataaaccctgtttgcacctcga

SEQ ID NO: 386734 - DNA, 1060 bp, Homo sapiens
tcttctcatagtggacccctctctctcgactattctgagccggtttccgtttgtactcctcccctcttttcccgttcgaggtctgccttctcctctccccgtttttcgcgccttcttggtttcggttgtgtgggaggcccctcttccccggtcgctcaaacataccagactagattgggacataggcccgcctcgaagagtccgccagcttcccatgccagcccggagcccacagtgctgcccagcgtacctccctcaccgtctggggctcttctgggagcacggagcatcccctgttcctgtttcactctcagcttctcccctcgaagggactctctggccacctcctccaccgcagtccagctccctcagtctggcacccactgctacactcagcctcatgagccacttcagaccagccaggtgtcttcccgggccctgccagaccctgctcacattccctctgctggtctgtgctggtctcagaaggccaccgcgcccgcattccactcagccagggtccagctgcagcccccgccacccttccttcccttccctgtcctgggtcatgttgttgccaccctgtgtgacttttgaagctgtaaaatgagcttccagggcttgggtggcgtcggggcagggccgccgaggctgggaggaagcccttctgccttttgctggtgtttctggaatttgctttccctcacctctcacttccttctagaaggagcttcctgactggaaccagagaatgcatgtctgtccacttggtggctgctgggtggggccgggaacaagggcccctgaccctgtgtgctggccgggacctgccaccagccccccagcctgcttcttccccttaagctttgtgcccctggatgcgctaacattcactcttgtttgtccctggactggccatgaagtgaggagatggttatttaaagagaattccctatttatttgacaaaaaatccagttaatatattaatgtgaaataaaccctgtttgcacctcgatttgtttgctgaaaatgtgaaatagtaaaaatgaaataactgga

SEQ ID NO: 386735 - DNA, 720 bp, Homo sapiens
tcttctcatagtggacccctctctctcgactattctgagccggtttccgtttgtactcctcccctcttttcccgttcgaggtctgccttctcctctccccgtttttcgcgccttcttggtttcggttgtgtgggaggcccctcttccccggtcgctcaaacataccagactagattgggacataggcccgcctcgaagagtccgccagcttcccatgccagcccggagcccacagtgctgcccagcgtacctccctcaccgtctggggctcttctgggagcacggagcatcccctgttcctgtttcactctcagcttctcccctcgaagggactctctggccacctcctccaccgcagtccagctccctcagtctggcacccactgctacactcagcctcatgagccacttcagaccagccagtctagaaggagcttcctgactggaaccagagaatgcatgtctgtccacttggtggctgctgggtggggccgggaacaagggcccctgaccctgtgtgctggccgggacctgccaccagccccccagcctgcttcttccccttaagctttgtgcccctggatgcgctaacattcactcttgtttgtccctggactggccatgaagtgaggagatggttatttaaagagaattccctatttatttgacaaaaaatccagttaatatattaatgtgaaataaaccctgtttgcacctcga

SEQ ID NO: 386736 - DNA, 764 bp, Homo sapiens
tcttctcatagtggacccctctctctcgactattctgagccggtttccgtttgtactcctcccctcttttcccgttcgaggtctgccttctcctctccccgtttttcgcgccttcttggtttcggttgtgtgggaggcccctcttccccggtcgctcaaacataccagactagattgggacataggcccgcctcgaagagtccgccagcttcccatgccagcccggagcccacagtgctgcccagcgtacctccctcaccgtctggggctcttctgggagcacggagcatcccctgttcctgtttcactctcagcttctcccctcgaagggactctctggccacctcctccaccgcagtccagctccctcagtctggcacccactgctacactcagcctcatgagccacttcagaccagccagtctagaaggagcttcctgactggaaccagagaatgcatgtctgtccacttggtggctgctgggtggggccgggaacaagggcccctgaccctgtgtgctggccgggacctgccaccagccccccagcctgcttcttccccttaagctttgtgcccctggatgcgctaacattcactcttgtttgtccctggactggccatgaagtgaggagatggttatttaaagagaattccctatttatttgacaaaaaatccagttaatatattaatgtgaaataaaccctgtttgcacctcgatttgtttgctgaaaatgtgaaatagtaaaaatgaaataactgga

SEQ ID NO: 386737 - DNA, 247 bp, Homo sapiens
ctcataaagccagtgtgataaaattggtagtttcatgttatctacaagactaagttcaaaattccatgcatgtgctgataaaagacccattatggtcctcactgtacttcctccccattttttagctttcattctggtcaccagctctagttcctctgcttagcgaatctcgcttgtcttcaagatttcattcaaatgtcacattttgtgggaagccttgccttttttgacacgctctccctgccac

SEQ ID NO: 386738 - DNA, 230 bp, Homo sapiens
cttcttggacggaggtggtggttcaaatgaaatttcagccttaccctttgtagttttctacgtaataaatcctaacatctgtgattaaggtgacataggtttttttgagaaaggctttgatttcttgcttgcatggatggttaatactccaggctcttcagggtgattctcgccctcttgttctgtagcttgtggtccttatttattttaatataatttaaaacttgcag

SEQ ID NO: 386739 - DNA, 572 bp, Homo sapiens
gggtttcaccatgttggccaggctggtctcgaactcctgacctcaggtgatccacctgcctcagcctcacaaagcgctaggattacaggtgtaagccatcgtgcctggcccaattgtttgaatttttgcatgagtgaaaaatcagaccttggtgatggccttgagcagtagagtatcagggtgagtgataagcactgcctttggagtcagtcggtcctggatttaaccccagatctgtctctaactccagctgcctctctttccccatctgtaaagtaggaatgataaaaccagccccctagttttttaggtgtgtgaggattatggactaataccaacagtaataatcctagctgtatttgtctgttctcatgctgctaataatgacctgaggctgggtaatttataaaagtaagaagtttaatggactcacagtttcacatggtcagggaggcctcaccatcatgatggaaggcaaaggagaagccaaggcacatcttacacggtggcaggccagagcgcctgtgcaaggacactcccctttaaaaacatcagatctcatgagacttact

SEQ ID NO: 386740 - DNA, 560 bp, Homo sapiens
ctgatttcaccctctgtagtgtggactcctgcctgaataccggctttctcccccatcttgcaacctcgggtctcacctccggtccctcctccatactgttgcaagatgggggagaaagccggtattcaggcaggagtccacactacagagggtgaaatcagcatcctcagaggaatttgcaaggaccttgttacagtcaaggcttgcttatgtaccaaaaagaaaaagaaaaaaaaagaagagggaagggagagagaaggaaagagagagggaaagagggagagagaaaaagaaaggaaacctgctcggagaaagttaagcttttttccaataaatcagttgtcaggggctcaggttgctaagctacagggaaagtggaacagcctgtgctcgctaaaaggagctttgggggaggtgagtgtaatcagtcaagttgttccctcctccaggcccagagccccaggcctcaccctgtgcagggtgggagcagagagctgttccacctccaggcagggcccacagggttcaaaccatgcagcaccacagcagggagagaagtt

SEQ ID NO: 386741 - DNA, 339 bp, Homo sapiens
tacatctatatctgtaagcttttgtacagtacttactttagtaataaggcacttgaacacttattattctctttactcataaccaccacaagaagaaaggacagaaattgttattctgtgttacagatgaagaaaaaggagagctaaagggggcaactggcttggccagagacccacacagatagactatggcagaccccgtgtttcccagtggcttgaatttttgtccagagctctttttgtcacactgcaataaagcacaagtcaacaggaaacctttacaaccaggcagagaagcttggatcagggagcaggcagtcacactaaattgtagaaaag

SEQ ID NO: 386742 - DNA, 222 bp, Homo sapiens
tatattaccactgggcatggtggctcacatctgtaatcccagcactttgggagggcaaggtgggcaaattgcaaaaattagccaggcatgctgacatgcctctagtcccagcttttatggaagcagaggtgggagaatcacttgagcccatgaggttgaggctgcagtgagccaagatcgtgccactgcaatccagcctggacaacaatgagaccctgtctc

SEQ ID NO: 386743 - DNA, 726 bp, Homo sapiens
taggttttgctgcatgtgtgtaatcagctctactaggcaagcgcaaattattttccaaagtaactgcaccaatttttgcttcttatcagcagtgctcctgcttgaatcttatcagactttctaaatttgttcaagttaatgggtatgaaatggtatctcattgttttaatttgaatttctctgcttactaatgttaaactcatgctcatgtgttttttggttatctgaattttctcttttgagaaatgcctcttctaatcttcatctactttctgttgtttgtctgtgttctttttttttttttttttttgagacggagtctcgctctgttgcccaggctggagtgcagtggcgtgatctcggctcactgcaagctccgcctcctgggttcatgccattctcctgcctcagcctcccgagtagctgggattataggcgcccaccaccacgtcctgctaattttttgaatttttagtagagacggggtttcaccatgttagccaggatggtctcgatctcctgacctcatgatccaattggtagaagttctttgcaagtcttttgttagttactggtgctccacatatactttcctgggctattggctttatgatatcttttgagaaacaggattttcactttaatgtacaaattattcattttccttaatggtttatactttcatcttgcttaaccaattatggatactcccaaattaaaaaaaaa

SEQ ID NO: 386744 - DNA, 261 bp, Homo sapiens
caaaaccccacaaaagttttccacagttgcagcctccagttcctctgctcccattctcctacatccatgaaaattggtgtttgccaagatcgctgaaggcctccacgctgaaggactcctccagtggtcaactctgcctttaccgtagttaacactgcagcgggatctgaacagtgcttcgcctccgtgtacaactggactcctgcgtgcctgcatgctcacactgcttctccctctccctcctaggcactgctcaggcct

SEQ ID NO: 386745 - DNA, 399 bp, Homo sapiens
cacacacacatatatgatccaatcatatatattggatatatatatgattggactggggggcagttttccccatgctgttctcatgatagtgagggagttctcacaagagctgatggttttaaatgaggcactttctggttctcgctgacactcctgccgccttgttaagaaggtgcctgcttccccttccaccatgattgtaagtttcctgaggcctcctagccatgcttcctgttaaacctgcagaactgtgagtcaattaaacctcgttccttataatgaccctgtctcaggtagtattctttatagcagtgtgagaatggactccactgatgttacataaccaccaaatacattgttttccttatgctttaaactgtcaattatcttttagtggtt

SEQ ID NO: 386746 - DNA, 381 bp, Homo sapiens
ggatgcagggtggggggtctagacctgggggcgaaataagagagggcttgtgctaagtcacgggctgccactaatgccccagtgagcagtggtaaatgctggtgtctgtgttggtgctgtttgctgccatctgaaatatgtatcacacgtcacctgttgctcccattctcttctgcccagtgggtaatgctgcctcatagcacaactcaggatgcagtggacactatgaccccatctgtggggtgtgcaacgcagtggacttccgccggctcatcacccttgacttgggtctcctggcaggaatgattttgaggttttcaaattttgtttttaatttaatttaattttttttgtttgacagagtctctctctgctgctcag

SEQ ID NO: 386747 - DNA, 712 bp, Homo sapiens
taataattatcgagtgctattggcaggcatgggaaagtgctaggtatctcctatcttcctaaatcccctgaagtaaatagtatcccactttacagatgacgaaactgagcattttgtgttttagtaacttcccatagccagtgaggtgtcaggtttcaaaccattcactccattcgttcatactctgcggcttatttcccatgccattttctggcgtctggcccgggttaatcatttccatacctgcttgtgttagtctcctagggttgccataacaaagtactacaaactgggtagcttaaaacaacagaaggactcccacaattctggaagctagaagtctaaaagttcaggtgttggcagaggcactttccctctgaaggttctgggggaagaatctttctttacctctccctggcttctgatggttgtcagcaatctttggcattccctggcaggcagcttcatcactcctccaatttctgctccatcaccacatgatcttctttcttttgtgcctttgtctttacatggccttttttgtcgttgttttttgaggcagagtcttgctccgttgcccaggcagcagtgcagtggcatgatcttggctcactgcatcctctgcctcctgggttctaccaattctcatgccacagcctcctgagtagctgggattacaggtgtgtgtacatggccatgttataaggacact

SEQ ID NO: 386748 - DNA, 347 bp, Homo sapiens
cattttacactgtgagctctagcccaaatgcttttcctttaaagttgtcatcatttaaagatcccagtgttgaattcctttgcatgttagggatttgagtaggtgtattttgacactaaatattttcagtgcttcaaaattgattgcaatactctcttcttcatctagagaaaagctatacctgctgacattacaattgttttagaacttcaacgactttatgtcagtgttgttacattgagaatcttaatcacatcttctgattaccggattgagtttctgcatgtgtatgtgtgtgtgtatctctgattaaaaatgaataaaatgattaatcattcttttgtaac

SEQ ID NO: 386749 - DNA, 330 bp, Homo sapiens
tggggttggcaaaaccgatctgaagtgatgtaaaactatttatagcttcaatttatcccgcttagctgtattattcatgtttcactgcagaaaaattaaggtgcttagtgactatgtgctaccttagacatggctgtattatgttacctatgggttatgtactatgttatcttttacaatctgaaagaggcagggtgtggtgtctcatgcctgtaatcccaacactttgggaggccaggacatgaggatcacctatgtagccaggagtttgagaccagcccgagcaacagagtgagccaattgcttgtgttggccttttactttccatgt

SEQ ID NO: 386750 - DNA, 554 bp, Homo sapiens
gggaacaccacaccctggggcctgttggggggatgggggctaggggagggatagcattaggagaaatacctgatgtagatgatgggttgatgggtgcagcaaagtaccatggcacatgtatacctgtgtaacaaacctgcacattcagcacatgtatcccagaacttaaagtataataaaaataaataaataatttcagtaagaacctgatcaagttgaacatgtatatatatgttatatacaagtttgaaacatatttctgtttttatatgttttcttatgatgcaagggcatactcttatgcaaataattaaaacttcataggtcttaatttcccatatctctatatattattatgacctatccaactggtaaccctatgaacaccttaaaataaacttgtatactcttaaaaaggtgagtttttcttgttaatactattattattgctatctaattgaatacttgaaggaagttgtgtgaaagaccttggctttgattttagttcttatattcttctagtttttgaaaataaaacacttccatcaacccgt

SEQ ID NO: 386751 - DNA, 712 bp, Homo sapiens
tgaaacatcgtaccctttaaccaatattgctctatcctccctaccctctattgttgccttcccttccctccacccacccctggccatctcttggcaaccatcattccactctctacttctgagtttgacttatttaggttctacatataagtggggttatgcactatttgtgtggctgtgcctggcttatttcacttagcaaaatgtcctctagattcatccacaacacgatttccttccttttttttttttttagtttttttatattattatacttcaagttttaaggtacatctgcacattcagcacatgtatcccagaacttaaagtataataaaaataaataaataatttcagtaagaacctgatcaagttgaacatgtatatatatgttatatacaagtttgaaacatatttctgtttttatatgttttcttatgatgcaagggcatactcttatgcaaataattaaaacttcataggtcttaatttcccatatctctatatattattatgacctatccaactggtaaccctatgaacaccttaaaataaacttgtatactcttaaaaaggtgagtttttcttgttaatactattattattgctatctaattgaatacttgaaggaagttgtgtgaaagaccttggctttgattttagttcttatattcttctagtttttgaaaataaaacacttccatcaacccgt

SEQ ID NO: 386752 - DNA, 311 bp, Homo sapiens
taaaatttttcattactgatcataaaagagattggctaattatttttctttcttgggtactgaggttatgttaattttatgaaatgaattggaaagtgtttcctccttttgatcctctggaagaatgtatataagattaaaatgatattttctttgaacgtttggtagaatttgcctgtgaagataatctggacttggtgttctcattttcagaagagtttaaactactgaccactgtctttaatagttgtagaaactttcaggtattctctagcttccttaataatttctgttaaattatatgtttctag

SEQ ID NO: 386753 - DNA, 415 bp, Homo sapiens
tgcaaagcccctcattttggcagaacataccatgtcgaccagccgcaaattaaagagtcatggcatgaggaggagcaagagccgatctcctcacaagggagtcaagagaggtggcagcaaaagaaaataccgtaagggcaacctgaaaagtaggaaacggggcgatgacgccaatcgcaattaccgctcccacttgtgagcccccagcgggctctgccctggtgcgcttcacacagcaccaagcagcaacaagaacagcagaaggggaactgccaaggagacctgatgttagatcaaagccagagaggagcctatggaatgtggatcaaatgccagttgtgacgaaatgaggaatgtatatgttggctgtttttccccaacatctcaataaaactttgaaagcaaaaaaaaaaaa

SEQ ID NO: 386754 - DNA, 189 bp, Homo sapiens
  misc_feature (22)..(23): n is a, c, g, or t
  misc_feature (27)..(27): n is a, c, g, or t
tggttgctactactaccgttgnnagangacgacagaaggggaactgccaaggagacctgatgttagatcaaagccagagaggagcctatggaatgtggatcaaatgccagttgtgacgaaatgaggaatgtatatgttggctgtttttccccaacatctcaataaaactttgaaagcaaaaaaaaaaaa

SEQ ID NO: 386755 - DNA, 403 bp, Homo sapiens
agcaagagccgatctcctcacaagggagtcaagagaggtggcagcaaaagaaaataccatgtcgaccagccgcaaattaaagagtcatggcatgaggaggagcaagagccgatctcctcacaagggagtcaagagaggtggcagcaaaagaaaataccccaatcgcaattaccgctcccacttgtgagcccccagcgggctctgccctggtgcgcttcacacagcaccaagcagcaacaagaacagcagaaggggaactgccaaggagacctgatgttagatcaaagccagagaggagcctatggaatgtggatcaaatgccagttgtgacgaaatgaggaatgtatatgttggctgtttttccccaacatctcaataaaactttgaaagcaaaaaaaaaaaa

SEQ ID NO: 386756 - DNA, 346 bp, Homo sapiens
gtgagtgagggatggggaggagattgccaaacttaggcacacattgctgccaggccctccctcttggaggcagctctcacaggaccctgaaatcttggcctgagattatttccaataactaaatgcagatttgagcaacaagagtcttgatgggaatgttctaattcgtgtctctgttgcaaacctgtcctttcccacagccaatcgcaattaccgctcccacttgtgagcccccagcgggctctgccctggtgcgcttcacacagcaccaagcagcaacaagaacagcagaaggggaactgccaaggagacctgatgttagatcaaagccagagaggagcctatg

SEQ ID NO: 386757 - DNA, 442 bp, Homo sapiens
agcaagagccgatctcctcacaagggagtcaagagaggtggcagcaaaagaaaataccatgtcgaccagccgcaaattaaagagtcatggcatgaggaggagcaagagccgatctcctcacaagggagtcaagagaggtggcagcaaaagaaaataccgtaagggcaacctgaaaagtaggaaacggggcgatgacgccaatcgcaattaccgctcccacttgtgagcccccagcgggctctgccctggtgcgcttcacacagcaccaagcagcaacaagaacagcagaaggggaactgccaaggagacctgatgttagatcaaagccagagaggagcctatggaatgtggatcaaatgccagttgtgacgaaatgaggaatgtatatgttggctgtttttccccaacatctcaataaaactttgaaagcaaaaaaaaaaaa

SEQ ID NO: 386758 - DNA, 211 bp, Homo sapiens
gtgattagaggatcccatccccggctctgggtatcgatgccatcactcacgccagacaactttgcttaggactgccaaactcttccccacgcaaacttttgccagaagtaatagaatggataacagtactttttataaaactcaggttcaggcctgacatagtggctcacgcctgtaatcccagcgttttgggaggccaaggcggacagat

SEQ ID NO: 386759 - DNA, 407 bp, Homo sapiens
aattacctaacaatggaaagtcattgttctcagaatgagagtccttctcaggcccaggcctgaggctcatggtgtgtgtgtgctctcaggcggaaacatcctcctgattgtcctgttgctgtttattgtggaattgtgtcccacacccacccccttgtgtttgtgttcactaaatgaaggctggaatcctgcctaactttggatgatattgtgcttgtcatagtcatatgagctgaaaacaaaaataaaaagccctccataaaatgtctccccctccctccccctctagcctcacccctagcatgacttgtgagaagtaactcctcgttttacctggcatgatttctaactcaacatacatctccgcctgtgagatcatccgagatgtactgtggaatgctcgtgcc

SEQ ID NO: 386760 - DNA, 607 bp, Homo sapiens
ttttcagaattcttcacaccactggatatattgaatgaaagaatgagtggtgcagagaacccataaatcatgaaatccgagaagttggacacaatgaatacagtgttctatgaagataaatattaataataaaattgttaaaattgaacactttctcaatgcaacctgagaaatagggttagttatggaagagatactctggtgtacctatttttattcaattggtgaaaaagcagatacaaccaaaggcaaaacacttagagtagaaaaagaactgcaacatcactcaaccattccttgctaacaagcagagagtaccagtgtttttcagtttaaagaagtggaaagttttaacagtagaatgataaaattgtaataatataaattatttttcaaatacattaacaaaactaaggattttctgaagtttttgataaagttcaatctcaaagtagattacttgttgagtattatggcactacaggatagaattttagagaacagagtagaaagcagaaaaagagcattcctgaagaaatcgggaaatagaatagccatattcattaagacttattaccacttttttcattggaagacatcagagctt

SEQ ID NO: 386761 - DNA, 424 bp, Homo sapiens
aaccaaccacaatctttggccctttagatccaagcatttctctggaggccactaaataaccaattcaactgatagtctcagttgagttttagtgaccaaaagcagagttagatattttctgcatcaaaaatatattagaaggcatttctttaaaagcttattccataaattcaaatctatgggaaatttcaaacatgaccaaagtggagaaaatagtatactccacaaatagtataatgagcccaatatttaaaaatttccaacctatggccaatcttacttcatctatacctctgtgcattacctactctctccacctcccatccctctatggaattatttaaggcagttttttgaggggtccaatattttacttatctgccaacaaaaagcaaatattaacttgatacagtttgcgtgtttg

SEQ ID NO: 386762 - DNA, 665 bp, Homo sapiens
tatatatcatgatggaaaagaatacataacttttgagacgttgactctaggtcacactaaataaaattcttttattttttaaaataagtctacgtgttttgaatagtaaatactgcaatagcaaataaatggaatagaaaaaaaaaccactagcacaagtgtgcaaatataaatgtgcagaaacaacttacgtaaaatttgtaattaaaacaataaaatctgggctgggcacgctgactcacacctgtaatcccagcactttgggaggctgaggcagggggatcactcaaggccaggagttcgtgaccagccaagccaacatggtgaaaccccgtctctactaaaaatacaaaaattagctgggtgtggtggcgcgcacctgtaatcccagctacttgggaggctgaggtgggagaatcactcgaatctgggaggcagaagttgcagtgagccaagatcatgccattgcactccagcatgggtgacagagaaactctgtctcaaaaaaataaaacaatatctagaaacaaccctaaaatctatcaataggctactatgtaaagtatagtatatccataaaatagaatactctgcagccattaaaatgattgagacaaggacaaagtgtactgacatggaataatgttggagatatactattaaat

SEQ ID NO: 386763 - DNA, 414 bp, Homo sapiens
tgtaaaataggcttgcgtcaggtgattttgccaactgtagggtaatgtggtctgagcacatttaaggtaggccaggctgtgatgtgcagcaggtcaggcatagtaaatgccttctgacttacgatattttcagcttgcgataggttagccaggatgtcagcgcatctgcactcctgcagtgaatgtgcatgctcccccatggccccatgagagtccttcctgggggtactggagcctgtctgttggtcataggggagactaaaagcacatgccagctgtcctctagaatggggccaccagtcctcctgcattgcagcatgagatgggatactcccacccacagtgcgcctctgtgggcgtggtgctgatggggtgacagtggtgatggtggcagagtggggatgcggatggcaa

SEQ ID NO: 386764 - DNA, 541 bp, Homo sapiens
aggagacagagtgtcacagagatctggggacttgagcatcacaggcaagaggcatgctagtgtcgaatgctgctgagacaccaaacgagggaagggtggagaaacttccattggatttaacaaggagaattatcagtgaccttaacaagaacagtttcactgaggttgtgggtggaagaggccaggttgcagcaggttgaggcgtatgtgaaaggtgaagaaaaggaaaccatgagtataaacaacttgttcaagaaatttcactctgaaggaaaaatgagaaatcgcatagtaatcacagaatgtgatagagttgcaggacgttttctgttaacctttttaatgtaaacattgttagaggcttgaacatgtttgaattaatgggaaggagccagtagaaacatcaaagaggagaggatgtaacaactcaatgggccttaagaaagtagcagggaatgggatctgaagcagaagtgcaacagaagcgccgggcgcagtggctcatgcctgtaatcccagcactttgggaggccgaggcagg

SEQ ID NO: 386765 - DNA, 451 bp, Homo sapiens
cttcagcaaccaccaccctgatcagtcaacaaccaacaacatcgaggcaagaccctccatctgcaaaaagattatggaccttgctgaaggcctcagatggatcctctagcaagttttaccttgtaaagtctttttaaaattaagatatgtacattgtttttaaacataatgccagtgcacatttaaaagactccagtatggtataaataaaactcttatatgcactaggaaaccaaaatttcatgtgactattgagttatttgctttattgtggtggtctggaactgaatatctccaagatatacccatacttaaaatgctcagaggaagaagaagttatcaaccaagagttctgaatcagttaaaacattattcagaaatgaaggtgaaataaacacattcccagataaaccaaactgagaagactcagtgctgcagacatgccacacaa

SEQ ID NO: 386766 - DNA, 947 bp, Homo sapiens
ctgacggccaaacgtttcctagacgttgtcgttactgataagaaactacatttcccagaatgcagtgagggtagcgaccgggctacacagtagaaacagggtttcaccatgttggccatgctggtctcgaactccagaactcaagtgatccgtccgcctcggtcttccaaactgctgggattacaggcgtgagccaccgcgcccagcctttggggaagttctttttaccgtccatcatccattgccaccacaccttctgcttacgagttatttataataagtttaactaaaagagaacgagagaacatcccctgaaacccaaagtttgtcattctatacagctttcctgcctgcaaaagaggaggagcagactcatccagcaaatcacctaaaaagtttgaagatcaaaaagcctagctccagtttcagatccttcccctacctttctgaacactagtttcttcctctgaaaaacgaaagagggaacgggaccgtagagtggagtgggcacaagaatcgcaagtcccttctggctatgacgctgcaagactctaggtacagtttaggactccgggcattcagatccccgggacttgtcaagttctcctcattgacatttttgatatttcgtgacaacacaaattcatcacatttttgtgctgtgtgttatatgtgggaaggagattttaaaaagattgccttttgaagttattggatagctgtgttacagaagaaaacattgccttcaagaagttattggatagatatgttacagaagaaaagacgtttgtttcatttttgactttgcaggaaaagaatatgtaacacatcagaattcttctctcctccctggccttagtcgagtacctgaggggcattaaagcacttcctccttgcaatcacttacccagcatagtccttaatacagatatcttcattgttgaatg

SEQ ID NO: 386767 - DNA, 1044 bp, Homo sapiens
ctgacggccaaacgtttcctagacgttgtcgttactgataagaaactacatttcccagaatgcagtgagggtagcgaccgggctacacaggtgatgaaggggggaactgcatcctgggatccgcagtttcgcctgtccacccgccaaatcctaagagtggctgggcgcagttattggggagtggtagtagaaacagggtttcaccatgttggccatgctggtctcgaactccagaactcaagtgatccgtccgcctcggtcttccaaactgctgggattacaggcgtgagccaccgcgcccagcctttggggaagttctttttaccgtccatcatccattgccaccacaccttctgcttacgagttatttataataagtttaactaaaagagaacgagagaacatcccctgaaacccaaagtttgtcattctatacagctttcctgcctgcaaaagaggaggagcagactcatccagcaaatcacctaaaaagtttgaagatcaaaaagcctagctccagtttcagatccttcccctacctttctgaacactagtttcttcctctgaaaaacgaaagagggaacgggaccgtagagtggagtgggcacaagaatcgcaagtcccttctggctatgacgctgcaagactctaggtacagtttaggactccgggcattcagatccccgggacttgtcaagttctcctcattgacatttttgatatttcgtgacaacacaaattcatcacatttttgtgctgtgtgttatatgtgggaaggagattttaaaaagattgccttttgaagttattggatagctgtgttacagaagaaaacattgccttcaagaagttattggatagatatgttacagaagaaaagacgtttgtttcatttttgactttgcaggaaaagaatatgtaacacatcagaattcttctctcctccctggccttagtcgagtacctgaggggcattaaagcacttcctccttgcaatcacttacccagcatagtccttaatacagatatcttcattgttgaatg

SEQ ID NO: 386768 - DNA, 1174 bp, Homo sapiens
  misc_feature (915)..(915): n is a, c, g, or t
  misc_feature (917)..(920): n is a, c, g, or t
ctgacggccaaacgtttcctagacgttgtcgttactgataagaaactacatttcccagaatgcagtgagggtagcgaccgggctacacagtagaaacagggtttcaccatgttggccatgctggtctcgaactccagaactcaagtgatccgtccgcctcggtcttccaaactgctgggattacaggcgtgagccaccgcgcccagcctttggggaagttctttttaccgtccatcatccattgccaccacaccttctgcttacgagttatttataataagtttaactaaaagagaacgagagaacatcccctgaaacccaaagtttgtcattctatacagctttcctgcctgcaaaagaggaggagcagactcatccagcaaatcacctaaaaagtttgaagatcaaaaagcctagctccagtttcagatccttcccctacctttctgaacactagtttcttcctctgaaaaacgaaagagggaacgggaccgtagagtggagtgggcacaagaatcgcaagtcccttctggctatgacgctgcaagactctaggtacagtttaggactccgggcattcagatccccgggacttgtcaagttctcctcattgacatttttgatatttcgtgacaacacaaattcatcacatttttgtgctgtgtgttatatgtgggaaggagattttaaaaagattgccttttgaagttattggatagctgtgttacagaagaaaacattgccttcaagaagttattggatagatatgttacagaagaaaagacgtttgtttcatttttgactttgcaggaaaagaatatgtaacacatcagaattcttctctcctccctggccttagtcgagtacctgaggggcattaaagcacttcctccttgcaaaaaaaaaaaaaaaaanannnnaaaaaaaaaaaaaaaaaaaaaaaaaataaaaaaaaaaaaaaaaaaaaaaaaaaaaaaaaaaaaaaaaaaaaaaaaaaaaccctgggggggggccccggcccccatttccccttttagtgagcgattttccccccctctcttggccgtttttttccaacgttgggatgggaaaacccctggggttccccaattaatttcctttggagaaaatcccctttttgccccttggtttattaccagaaaaggcccctccc

SEQ ID NO: 386769 - DNA, 302 bp, Homo sapiens
tggaagaaatataaaaattaatcattacagtgaaaattattaacacacaattctcagtaattgatggagaagtgagataaaaatgatcagggagagaatatttgaaataaacttgcgatttatatatgatactacatctataaacttctgactatgcatttttatttcacattcacacagaaaatgtagaaagattagtcatatacttctgggccataaagtagtgttagtacatttcaaaagttttaaattcatacagaacattttctgacctcatgggaattaagtcaggaagcactaag

SEQ ID NO: 386770 - DNA, 579 bp, Homo sapiens
tcataatattgtacaaccatcaccactatctatatccagaacttttccatcaccccaaagagaaacttggtacccattaaacaataattccccgtccactcctttccccagtccctggtaatctctaatgtatattgtgtctctatgaatttacttattctagatatttcatatataagtagaagtatgcatttgtcttatgtatctgacttatttcatttaacataatgttttcaaggctcatctgtgttgtatgtatcagatgttattccttttcatggctgaatactattccattgactgcatataccacatttgtttatccattcatctgttgatggacacttgggttgtttccacatttttggctgcagtgaataatgctacagtgaacattggtgtacaagtatctgtttgagttcctcttttcagctcctttgggatatacctaggaattatgtttaactttttgagtagctgagaaatctttaataaatgataacacaaatacttatatttgccaatgcaaatatgaatatttttggcttttaagagattgcggttgagaccacgtggttg

SEQ ID NO: 386771 - DNA, 1540 bp, Homo sapiens
atagaaattcctctagccagcattcgctctccagttccctcaggtcccctccctgctccccattatctaaatttggccatttcccacatttgccattgttttcactgtctggatcctaaaagcatggagtttctgcccctggtggggaggaaagaactgccatcaagggtcaggagagctgggttctagccccaggtctgcatctgattcgtgtgtgacctcagacaacctcttccaatctctgggcctcagtttccccttctgtgcagtgaaaggattacagaaggaggtcagagaccatttggtctccgacagtccaggtttgactgtgttctacttatgtattcaccccacacatgtgccctgctttgggtctggggttgggttgagtggatgctactttttgaattttcacccaccgcattcccaaggagctctggtgtgcacggtgcattgagctctctgtcagaaagtgaacagttctgatttcctgcagccttttcgtactgtgcacacccccgactcaaaaacatacacacagagtcagtgcccaggcatggctgttagggtgaggtcaggctctggcccatctccagatgatggggatctgcttaccactgccctcaacattcaatcccgtttgagcccttctgttttgtagtcttggctgaattgttatttcttccacttgttggcctcagcattccccttgtggccaccaaaggcagaaacaatgctttagagatttttaggtagttatcatagctctcctgtgcagcctactctcctggctgaagaccccaggttccgctgccttgggtggttattgactggcttgggtcatgaactctaggccctacctccctgctcagggtggcactgtggtcaggtgttgggtcatgccagagcccaccctgatttggcatttggccctagccctcctcttctagccctggagctgggaccttcctcccagctcctctccctaaactgtggggtctgccttctgcggccagcctgactgggatgttccactggcacagagaagctcccagtgtctctggctcatgtatacacaattctgaccctgggaagaaaacagtgggatcccaggctgagccttaactttcagcttgatgactgggagcttggatgtccctagggagtctctaagggtcactccagcattagtatcccatgaaaaatgtcctgctcaggctgttgtataacattcttctttaggttaaagggctccagtttggagtctgggctcatctagcagctgctacattctgtttggataaaacatacaattggtgtctatttcctttggattgggaggaattagaagactctcagttggatgagaggatgactggcttggttatggctgatcactgattggatgaaagaataaatctttggatggttctagattttgatcgggtaggaagcatggaatggactggctagctctgaactctggtggatgactgctagtgaatttggattggattaaatggcaaggtggactggttat

SEQ ID NO: 386772 - DNA, 588 bp, Homo sapiens
aaaaattaaaaattagctgggtatggtagtgtatgcctgtggtcccagctacttgggaggctgaggtgagaggattgcttgagcccgggaggtcgaggcggcagtgagctgtgatcatgtcactgccctccatcttgggcaacagagagagaccttgtctcgaagagaaaaataaaagaaagaaaatgttaatttctgctcctgtcagattagagggaaattcaatctcagtctttttgctgctctccaaagatcccagagttgtacataggattgaagcataaggaacatccttaaagtcagtagcaactggcctgtactaattattcccaggatacgcatatccctttgtggcagcagttctgccagaggcacaggggctttgcccagtcagtctccttcaacttgccacgtagctttctccagaataagtccaccccctcagggtgctaccgtgaaggagagtatggttttggcatttgagagcccagagagatatacatgaagatctggtctctggagagtattgaaggtagaaaagacaaggagaagatgctgcagaacacccagaagggaagaaaaaaaaaa

SEQ ID NO: 386773 - DNA, 377 bp, Homo sapiens
gatggagacaagccaatgaaggaagcagcaaccaaaaggtgcctgaatttgacatccttggacaagccaactgataaataggagagcaaattttaggtagcttcagaggtatgccttattacagaaagtagaagttaatactttgttaaaaataattcatgttgcttagcaacaattatagcaagcttggctctcatgattaaaaaggttttgattcctcttaaaaatggactagcaccataagaactggacacctggagaaacatgaggaaagtctcttcggaagcagctagtatctctcgtatctactttcagcaaaaaattagtaagaatcaagagatcagaaactggatcacagtccttcaatacaaaaaaaa

SEQ ID NO: 386774 - DNA, 447 bp, Homo sapiens
agacacacatgcatatacatgcacagagatgcacacatatacacacagacatgcacacacacatgctacagcatgtgcacacagacacacacaccctgcacaccccaagcctcgtctgctgtctctgctgtgcctgcttcccttagcccctgataccaccttccccaggtctcccaactgccctgcctggacacagagaggggtcctgtgaagtcaggccttgaaggagtgggcgtctctcagcccctctggaagcctcgcaccaggactgtcccctctcccgcagagcattcaggaccagcagccctcagccctgcagtctccagacctggttctggggagcttggggagctggggaggtgggtcaggacccagacacctttgattgggacccatttgacatgagacagtgagtgtcatccctaaattaaatcttgatttcagaaa

SEQ ID NO: 386775 - DNA, 1700 bp, Homo sapiens
tggaacaactcgaggctttacacccattcttttcccacatttattttttctatcagaattcttaaatctaagaaacaaataatatggaggttctttatattaacacattgctttaaattaggaagaaaactgtgtataggctgcagcagactttaaaagcattgtaagactttagatttggaaatcaactttaataacatggaaactttagatttaagagatcatttaatacagctactttgatttggcttttaagagaactgaggcccaggtagcccagaccaaggatcttttgcaaggtcgtgctactgggttctttagcgtcaagactgtaacctacatctttaggttcctaaatttttatcatgccttcttgttacctaactgttgattgttgaactttcttttttcttttttgagacagggtcttgctctgttgcacaggctggagtgcagtggcgcagtcatggctcactgcagcctgaaacttgagctcaagcaatcctcccatgtcagcctctcaagtagctgggactactggcatgtgccatcacacctggataatttttaaaaattatttgtagacacagggtctccctgtgttcgtgtgggctggtctcaaactactgggctcaagctgtcctcctgcctcagcctcacaaagtgctgggatttgaattttcttaaacctaaatcaatattataggcctcaccttaggagaactttccaaaatattgttagtgttgaccaccttagcattacatttgctaacgacagtcatccaggtttactgaaccaggaaaccaactttcaggttaataagacagtttcgtctatgtgccatccttatccttgtctggacatatccatagagcacgcattttaaatctgaaagaatatatgtagtctcccctaccccagctttttttaagtagcaagggctattgaaaaaaatcagaaccctccgcttacgctcgcatacatgtagcttaaaatatatgttgcttattgaaagcattgtttaagttgaactcacgagatatactacatcatgtaatatgtctgcatttgtccatgcattcttttcggaaacctgatcttacttatgtctgcatttaacagataggctaggttaagttatgttaaaacatgttgtactgaggttggattcaccgtgtcacagcctggctttcttccttgattagctttaatcaaactctctgcattccgtgaccttaataaagctatttttcctgacaactgaagactgtcttaacaagcatagttcatctgtgctgaaactaaggctgagttaagatggggtttaggtcctcattaaagtccacagcatggagtgtaagaagaaatgatgaaatggtgctccctgaaacatctcttctttaaatttaattagacaaattatacgcaaactagtagatgccctgggaaggcaatcaacattagggctaataaaaagcttgagtagtataaaaaggctgggggaggtgctgtggagcctttctaacgcctatgagaggcaaattaaaaccaattgcgaaacatggaaactggatgaatttcaatattgatttagaaattaattttattatgttgttctaaatataaaaataaaggctatacttattaatcttccagaatttggcatgttaacacctatgcacaaagcattttatggatc

SEQ ID NO: 386776 - DNA, 1663 bp, Homo sapiens
  misc_feature (4)..(6): n is a, c, g, or t
  misc_feature (690)..(690): n is a, c, g, or t
gggnnnaaggtgtaagaggaggaccttgtagagagccagcgcttagccccagcctcctcatatgcacatggctctgtagaggttctccagacagtgctgctgctgctgctgtttcgagccttatctcctctgtgctcctcacaagtgtcgttaacagcgggcagctcctggcagcacaagggacagggatttgtcttgcttagccggggcaaaatgcagttagaatggaaaagctaatggcaaggcatcccaacaacagcctcctcctcctcaagcacatggggcacttgtgtgtgtctctcagcctgagagctcctgatgactctcctggggaggttcccaaccacactgtcttggcagctggtggaggcaggtggtgattccaatttactgccatccccgagtcttcaaaatccatcctattgaaaagtgatctggtgagctccagcagcatgtgggttagggtctcctgcttggggttcaagagcttgcagtcctgttcattgaaataggctgtcatggctgctcagctctctgacatatctctcagactggcaaagatattaggtctgataccaaaagtacaatccatagaagaaaaaggatggatacattggacttcattaaaattaagaatgttttctccttgaaaaataatgttaagagaataagaagataagccacaaactnggaaaaaaagtaattgtaaattacatatctgataaagtacttgtacccaaaatatgcacaagaatctcaaaactcaataataagaaaacaatccaatttaagaaattattttaacatacattttacaaaagaggatatatagatagcaaataagcccacaaaaagatattgaatattattgaccattgggaaaatgcaaattaaaacaaaatgagataccattacacacctattagaatgtctaatattgagaagactaatcatactaactgatgaggatttggagcaactggaactctcaaaccctgctgatagataaatgcacaaccactttggaacagtttggcagttttttaaaaagttaaacatacatctgccttatgccccagccatacaatttttagacatttctcaaggaaaatgaaagcatatgttcattcagagatacacatgcatattcattgcagctttatttgtaacagccaaaaactggaaacagcccaaatgtccagcaacaaaagaatggataaacaaattgtggtatatttactacctagcagttgaaagaaataaacctctgacacacacaagctggattaaaaaagaagaggaaatgaattattgatacatataataaagattactctcaaaataattatggtaagtcaaagaagtcagaccatgctccctaagagtatatacttcatgattcaatttctgtacaattctataaaatgcaaattaatatatgataacaaaaagtgattgcctggaaatggtgagaggacagaggggccagaatcagccaggattacaaagatgcacaaggaaacttttgagggtggtggatatcttgagtgtggtgatagttttacagttgtatgcctatgttagaagctatcaaattgtacactttaagtatgtacactttgttgtatattaattatgccttaataaagttattataaaaagt

SEQ ID NO: 386777 - DNA, 1711 bp, Homo sapiens
  misc_feature (4)..(6): n is a, c, g, or t
  misc_feature (690)..(690): n is a, c, g, or t
gggnnnaaggtgtaagaggaggaccttgtagagagccagcgcttagccccagcctcctcatatgcacatggctctgtagaggttctccagacagtgctgctgctgctgctgtttcgagccttatctcctctgtgctcctcacaagtgtcgttaacagcgggcagctcctggcagcacaagggacagggatttgtcttgcttagccggggcaaaatgcagttagaatggaaaagctaatggcaaggcatcccaacaacagcctcctcctcctcaagcacatggggcacttgtgtgtgtctctcagcctgagagctcctgatgactctcctggggaggttcccaaccacactgtcttggcagctggtggaggcaggtggtgattccaatttactgccatccccgagtcttcaaaatccatcctattgaaaagtgatctggtgagctccagcagcatgtgggttagggtctcctgcttggggttcaagagcttgcagtcctgttcattgaaataggctgtcatggctgctcagctctctgacatatctctcagactggcaaagatattaggtctgataccaaaagtacaatccatagaagaaaaaggatggatacattggacttcattaaaattaagaatgttttctccttgaaaaataatgttaagagaataagaagataagccacaaactnggaaaaaaagtaattgtaaattacatatctgataaagtacttgtacccaaaatatgcacaagaatctcaaaactcaataataagaaaacaatccaatttaagaaattattttaacatacattttacaaaagaggatatatagatagcaaataagcccacaaaaagatattgaatattattgaccattgggaaaatgcaaattaaaacaaaatgagataccattacacacctattagaatgtctaatattgagaagactaatcatactaactgatgaggatttggagcaactggaactctcaaaccctgctgatagataaatgcacaaccactttggaacagtttggcagttttttaaaaagttaaacatacatctgccttatgccccagccatacaatttttagacatttctcaaggaaaatgaaagcatatgttcattcagagatacacatgcatattcattgcagctttatttgtaacagccaaaaactggaaacagcccaaatgtccagcaacaaaagaatggataaacaaattgtggtatatttactacctagcagttgaaagaaataaacctctgacacacacaagctggattaaaaaagaagaggaaatgaattattgatacatataataaagattactctcaaaataattatggtaagtcaaagaagtcagaccatgctccctaagagtatatacttcatgattcaatttctgtacaattctataaaatgcaaattaatatatgataacaaaaagtgattgcctggaaatggtgagaggacagaggggccagaatcagccaggattacaaagatgcacaaggaaacttttgagggtggtggatatcttgagtgtggtgatagttttacagttgtatgcctatgttagaagctatcaaattgtacactttaagtatgtacactttgttgtatattaattatgccttaataaagttattataaaaagtagttccaggcaatactagacactcaataaacatttgtaaactagtcgt

SEQ ID NO: 386778 - DNA, 383 bp, Homo sapiens
ctctttttgcattttcagctttaatctccattctgggaatgtttagatatataatgtttgggtagatagagaatgtttagaagtctattctaggtcatagaagttcatgctccagaatatacatttttatcctggtgcctggaagattcctgtaggaggcagcatggcactgctactctagttcacacccctcacccccaaggaaaagaaccaccacgagcactaaaataaaatacattctcaatgtgcttaggataaagaaaatgactttttaccatggcctacaaagcactacgtggtgaggcaaagtacagttttactaatggcatctgaagttgccagatccctcttcattccctcccatcttgcttgttctgtcagtc

SEQ ID NO: 386779 - DNA, 336 bp, Homo sapiens
actttttgtatttttagtagatatgggatttcaccatgttggccaggctggtcttgaactcctgacctcagtttatctttccacctcagcctcccaaagtgccgaaattacggttgtgagcctctgcacccggccgttctgttgctttcctttttaaaattcactttctcctctcaatcatagttggcttaaattcgactttcaaatagggaaaaagcataccgatattctgccactttttttcaatgtggtgttctatataaaagagaaaactcgtagtatgtaaaatttcactatattcctttgaatcatgagctaacataacatctatgtaac

SEQ ID NO: 386780 - DNA, 339 bp, Homo sapiens
ggtcaaaaccagactgttcagcattgtagagcctgccttctgttcattctttcaccagtgcctaggactgtgccgtaaatgagctttgacattcgcgctcattttgatacaaagacactaagtagtttataatagcttgcattatatttatctctagtctttcttcttctcttcttcttctccttctccttctccttcttcttcttcttttttttttttttttttttagatataaggtctcactatgttgtccagtctagagtgcagtggctacagcctcgaactcctgggctcaagagatcctcccatctccacctcccaagtagctgcgactacagg

SEQ ID NO: 386781 - DNA, 477 bp, Homo sapiens
ttcctagttaaactgcaaaatacattttcaaccatttagccataacaacttctaaacggagaaagttgcttctttatataaaccacctctgtttaccaaacatcagagaatctccgggcagagggctactgcaggatgggaatagtaagagaatgttacaacccatgaggtgctgatctgcacacaccaccgtgaggaaataccttaagtgattaaagacaaacgccacctgcatgcttggcaaaggagtccactgctatcgccacacactctccccagtgagagaggggaaacgatggactgaagtcccacagtggattagaactgggcacaaaaggagccaggaacagaagatggcagcataggaagggaatgttatgctttgcccagctggggactctggcagtattatcacttaggcatcctgaagcccaaactcaagaataaagaattaaaatttcatatcttctttgaaaa

SEQ ID NO: 386782 - DNA, 436 bp, Homo sapiens
gaaaagtaaaaatggttttaaaaaccaagttttctaagaaaagcataaatgactaatgataatatgacaattgactaaagctgtccttactgtttgaaagaacaacaaccaaaatatgtatattatacctgtaagttattaaatctgaaactatgatattatgaaatagggtaggtggaaatacgagcaaaatcattaactttcatagtctgcctaagctgaattttgctcccttctcctgtctttccaaggatggcaaagtgattttagactttgtcaattttggtggttagtaatttttgtgagtgatgcatggggaaggagatgctatggtagattacattagtgtctaattcttgtgatgatgcaaagtgagatacattttctgtctttggtggtgtgagaaccctatctactggtagataacttacttata

SEQ ID NO: 386783 - DNA, 569 bp, Homo sapiens
atacctgttcatagttgaatctgttacaaattgttaccttttatttgatgaagaactatttaaagattttccttttttatttcttctaaagcaaaagtcaatgcaagtaactctaatcagcgtgcaaaggcgtgcatatatatctgctatgtaattatataatgtttttataatgctgtgtggataacttttcactgatttagttacttgactgtaggaaacactgttgctttgcacgctgtgagaggtttgcactgttacagatgaaggcaacatatttacatatgtacatgtatatacatatatatatattcaaaaataacatcggctctttggggtgtctgtttccttggttgtctcacgccactggaacattgaacccagacagaccctaggatgtgaggttcctgactgcaccttacggaccacagagccacgtgtctatttctgtagacctatctccttagatttgtacatgcattttttgcggacttgaactttgttttctgaaattagatgccatttatgatgatgtgatgtcaatcaaataaagcatcattattttcaga

SEQ ID NO: 386784 - DNA, 362 bp, Homo sapiens
aatgtgggtttttcctagaacacctttttacatttcagaggacattagagttcagcaggacacagtttggtaaatattagtataaaaagttaggctcagccgggtgcggtggctcatgtctgtaatcccagcactttgggaggctgaggtgggcagatcacgaggtcaagagatcgagaccatcctggccaacatggtgaaacctcgtctctactaaaaatacaaaaattacctgggcgtggtagcacacgcctgtagtcccacctgctcgggaggctgaggcaggaaaatcgcttgaaccagggaggcagagattgcagtaagcctagatggtgccactgcactccagcctggcaatagag

SEQ ID NO: 386785 - DNA, 170 bp, Homo sapiens
ccaattggtaagtgtccctgggagccgcagccaggcagtctgacctcagactcctgacacctgcaggctgtgccgcatccctgacttgggtgctggccttctccttctaggtactgtccctggcaggcaagtctgaggcctgagccagtcttactttttattgttttcac

SEQ ID NO: 386786 - DNA, 121 bp, Homo sapiens
tgctctccatggagatgaggctgacagggtcagcggagtagcctgtgacaggcaggttttaataagttcattttcagccaacccctgaaatgggttatttttgttccatgggaatgctcta

SEQ ID NO: 386787 - DNA, 648 bp, Homo sapiens
atataagctaacagcatttatactttattttcagaataccagtggttttcttagctctggaagaactatatctttagatcccaatgtagacttaaattaaataaatccgtttggctggcttcatctggatacaaatgactacatatttgtaataggtacttgatttcatgtttaacttacttttctgtttttcctctgtattttgttttcagagcattgagttagcaatcagaagaactaatgtttattctcttccaaatccccttcttgctttcttacttattaagcattgtctgtgtgatttgcttaggatacaaaaaatgatcacaatgtggttttggcttaggaggggctcatgtgaagtggtccatgacctgtctgccttattgctttgttgatgggtttgatagaaggttaagtgtgaaatgctgtgtagacagctcattgttacacaacatctgtattattagcatcctttttaatgagatagatggaggtgtgggctatgaatgagattcttcatggcgtgagttttctggcgggattttttaagagtgagaagaggtgtgccttgaagcaggtaagtaggagaacctactccagatattgagagggatggctagagaaggactgaatagaccagctgca

SEQ ID NO: 386788 - DNA, 787 bp, Homo sapiens
atataagctaacagcatttatactttattttcagaataccagtggttttcttagctctggaagaactatatctttagatcccaatgtagacttaaattaaataaatccgtttggctggcttcatctggatacaaatgactacatatttgtaataggtacttgatttcatgtttaacttacttttctgtttttcctctgtattttgttttcagagcattgagttagcaatcagaagaactaatgtttattctcttccaaatccccttcttgctttcttacttattaagcattgtctgtgtgatttgcttaggatacaaaaaatgatcacaatgtggttttggcttaggaggggctcatgtgaagtggtccatgacctgtctgccttattgctttgttgatgggtttgatagaaggttaagtgtgaaatgctgtgtagacagctcattgttacacaacatctgtattattagcatcctttttaatgagatagatggaggtgtgggctatgaatgagattcttcatggcgtgagttttctggcgggattttttaagagtgagaagaggtgtgccttgaagcaggtaagtaggagaacctactccagatattgagagggatggctagagaaggactgaatagaccagctgcaaaaaaaaaaaaaaaaaaaaaaaaaagccagggcagaggaaggaggtgaatgccaggtatctttctgatgactgtactgtgtattttctaatattctttgaaaactttgagatcagcagagatgctgagccctgctgatg

SEQ ID NO: 386789 - DNA, 166 bp, Homo sapiens
aggtgttggcagggttgttccccttccaaaatctttagaggaggatttttccttgcctcctccagcttctgataaccccaggtgttctttagcatgtgacagtataactcagtatcttcctctgtcttcacatggtcatcttccatgtgtgtttctgtatctaaat

SEQ ID NO: 386790 - DNA, 1009 bp, Homo sapiens
agttgatccaggaaggtctcaaaagtggttttctttatccactttttgaaaaacaggacaagggtagtaagcccattactttaccacttgacgcctgcagtttgtcagaattatgtgaaatggcaaagcatttgccttctctgaatgaaatggaacatcagacattacaattggtggaagaggatacatctgttacagaacaggatttatttttgcgagttgttgaaaacaactctagctttacaaaagtgattactttaatgggacagaaatacctgctaccaccgaaaagcagttttcttttatctgacatttcttgtatgcaaccacttctaaactataggaaaacatttgatgtaattgtgatagatccaccatggcagaacaaatcagttaaaagaagtaataggtacagttatttgtcacccctgcaaatacagcaaatacctatccctaaattggctgctccaaactgtcttcttgttacttgggtgaccaatagacagaagcacctacgttttataaaggaagaactttatccctcttggtctgtggaggtagttgctgagtggcactgggtaaaaataaccaattcaggagaatttgtgttcccattagattctccacacaaaaagccctacgaaggtcttatactggggagggttcaagaaaaaactgctctaccattgaggaatgcagatgtaaacgtgctccccattccagaccacaaattaattgtcagcgtgccctgtactcttcactcacataagccaccgcttgctgaggttttaaaagactacatcaagccagatggggaatatttggagttgtttgctcgaaatttacagccaggttggactagttggggcaatgaagttctcaaatttcagcatgtggattattttattgctctggagtctggaagctgactatgatcttgattaaagtagtggtctcttcattgtctcctcaccacttttcccttaattctaagtcattttattatttt

SEQ ID NO: 386791 - DNA, 494 bp, Homo sapiens
agttgatccaggaaggtctcaaaagtggttttctttatccactttttgaaaaacaggacaagggtagtaagcccattactttaccacttgacgcctgcagtttgtcagaattatgtgaaatggcaaagcatttgccttctctgaatgaaatggaacatcagacattacaattggtggaagaggatacatctgttacagaacaggatttatttttgcgagttgttgaaaacaactctagctttacaaaagtgattactttaatgggacagaaatacctgctaccaccgaaaagcagttttcttttatctgacatttcttgtatgcaaccacttctaaactataggaaaacatttgatgtaattgtgatagatccaccatggcagaacaaatcagttaaaagaagtaatagatggagtctcactccgttaccaggccgagattgcgccactgcagtccgcagtccggcctgggcgacagagcgagactccgtctca

SEQ ID NO: 386792 - DNA, 391 bp, Homo sapiens
attaagggcccacaataagactaaaacacatattttcagacttacagagtagcctggctttccctagacaaaacccagacttacctctcaaatcgaggcgaatctacagaggccagagtgaaagtcgcatggccactgccttatgtgtcacctccccaacaactgctaacatcggggtcactggtagaagagcatctatgattactttcaggtcaatgcctcagaggttgagaaacaagtcactacaaagctgtttcatcagcatcttacagatagcttttcattagcggtgagaaatggttactgaagactatatgtgaaccagattgaatacaataatagttcacttatccaggccatcaataaagacagtataggccaaaagttcctt

SEQ ID NO: 386793 - DNA, 306 bp, Homo sapiens
  misc_feature (1)..(2): n is a, c, g, or t
  misc_feature (98)..(98): n is a, c, g, or t
  misc_feature (124)..(124): n is a, c, g, or t
  misc_feature (154)..(154): n is a, c, g, or t
  misc_feature (191)..(191): n is a, c, g, or t
  misc_feature (305)..(305): n is a, c, g, or t
nnattccaagatgcatcccaagcacctaaagcactgcctggcacatatggacatataataagtaagtgtttgttgaatgaataagtgatgggcatttnggtcatttccagcttttcattttttnaacaatgcttaaaagaatatttttgcaaangaacagctttgcttgtcctaatgtgtttgtttccttnctattcaaagtattatccaaaagaataactagacataaattttaccattgagagaaaggtttatacactgaagacaaaacattcctgaaataaataaatacatgaaaaatacant

SEQ ID NO: 386794 - DNA, 298 bp, Homo sapiens
cgtgtggagttttgcttggtcaactggagaaacaacttttgattgtttttatgtttttcagagatttatttgccagagatattacattataataaaaacataaacacagaagttagggattggaacaaaggttatatggtcacaatttaactcatagttatttgaaaattattggtttataaggaaacagatttagacaaagctagaacttatgcaggtaagttacaaagctagaacttactcaggcagttgctcacgtctgtaattctagcactttgggaggccggggcgggcggat

SEQ ID NO: 386795 - DNA, 151 bp, Homo sapiens
ggttgccttataacatgtataacagtactctttatttgtagatacctttgtatgtatgtgtgtgtatagacagatagacagactttttttttgagacagggtatctgtcacccaggctggagagcaggggtatgatcatggctcactgcaa

SEQ ID NO: 386796 - DNA, 654 bp, Homo sapiens
catatatatattccttttatatattaatggttagtagcattttttattttaacccctcacctttcattgttgtagactttattaaaggctgaagagtttgcataaatattagggaagtggacattttctgggtttacagtttacacttttgctgctgttcctttatgaagatgaagcaggtccctccctccctccctttctctcccctgagtggctgaattctacacatctctctagtccctctgaagccccacctctggagcgctgcctctgatcaccccagcccacagtgatctgagttcacagagcacatcctgtttgaatgccccatttgaatcacagcctattcctctttttgagtgttggttgtgccttaagtgcacagatggcttttcaccagctggacctcgagcagcctgaggatgccaccctgccttctgagccattcttccatcacactgtagtgccacagcgctcatttagtaggattttggtaaacatgggtcaactaagtgagacactggcagagcaaggttatatttagtgctagaaaggacctacaacatggtgacttcctcctagtctagagaatgtaggccctgacgctttgatattcccaatgtcgacgcggccgcgaatttagtagtagtagta

SEQ ID NO: 386797 - DNA, 344 bp, Homo sapiens
gacggagtttccctcttgttgcccaggctggggtgcaatggcgcgatctcggctcactgcaacctctgcttcccaggttcaagcaattatcctgcctcagcctcccgagtagctgggattataggcatccactaccatgcctggctaattctgtatttttagtagagacagtgtttcaccatgttggtcaggctggtcttgaactcctgacctcaaatgatccacctgcctcagcctcccaaagtgctgggattacaggcatgaatcaccacacctggcctaaaccaagtattattaattccaaataaaaccaatacatcagaccagtctgggtattatttgga

SEQ ID NO: 386798 - DNA, 1603 bp, Homo sapiens
catcggcttccgtaggaaggcgccggccgtggaggcgccacgtcccttgcggcggcgggagagaaatcgcttggacttcggggcggcctcggacggccatggcctttaccctgtactcactgctgcaggcagccctgctctgcgtcaacgccatcgcagtgctgcacgaggagcgattcctcaagaacattggctggggaacagaccagggaattggtggatttggagaagagccgggaattaaatcacagctaatgaaccttattcgatctgtaagaaccgtgatgagagtgccattgataatagtaaactcaattgcaattgtgttacttttattatttggatgaatatcagtggagaaaatggagactcagaagaggacatgccagtagaagttattactttggtcattattggaatatttatatcttagctggctgaccttgcacttgtcaaaaatgtaaagctgaaaataaaaccagggtttctatttatctgtttttttttttaatgttgcacttgtagtttcattacaaaagatcagatcatgaaaggcagtaactctccaggactggaatatctgattgctcagtgttaatagtagttcatgctgtggtgagattgttaaaagggtgcaagactgttgcttctctttttttagatatttttctatctctcacttctcagggatgaaattctttttcaaagttttgaagttccttgcaacttagccatgatgtgagtggttatccctagataaaattaaaaggatttttaaaaagtaattactgcacataaaatgataaataggtaatttgaataattttattttaagctccttggttaattattttgtctattgtctcagctataaattcaaatttatacatactattgagtattaatattctctgatttcagggagaattctgtcagtcacatgatgattatgtttttgtttaacattctttccatgcacttgttattttattaatttgcctgaatgatgagaccagaccagtgtctacagattttcattgtcagaaaaatctataagtctgccctttttacaatgatgatttaaaaaaaacaacagcgtaaatattagcccacaagagcagtcctaaacaatcacaattacactgtactacccaagaagactgtttattgtgaagcatttacctttcaaaaaatcattacatttctatttcttggtggagcagcacattgtggagtgtgattcttaattcttcattgagtttgtcaataggacattgatgctggataggttgtcttttgtttttatgtctcagaccatcttgtgagattgtttgcctatctcataatacagttttatgcagaaaggttgaaactatgtaaatggtttttatggaaattatcagttacaatattttaaaggtgtagaatggcatctttgtttataggagaacatttgtaaataaagttaaatttctaagtcaacctttaaaatattgtaactgataatttccataaaaaccatttacatagtttcaacctttctgcataaaactgtattatgagataggcaaacaatctcacaagatggtctgagacataaaaa

SEQ ID NO: 386799 - DNA, 1292 bp, Homo sapiens
tctggggctgccccaaagggcagacaggtttattgggcagcagccgggaattaaatcacagctaatgaaccttattcgatctgtaagaaccgtgatgagagtgccattgataatagtaaactcaattgcaattgtgttacttttattatttggatgaatatcagtggagaaaatggagactcagaagaggacatgccagtagaagttattactttggtcattattggaatatttatatcttagctggctgaccttgcacttgtcaaaaatgtaaagctgaaaataaaaccagggtttctatttatctgtttttttttttaatgttgcacttgtagtttcattacaaaagatcagatcatgaaaggcagtaactctccaggactggaatatctgattgctcagtgttaatagtagttcatgctgtggtgagattgttaaaagggtgcaagactgttgcttctctttttttagatatttttctatctctcacttctcagggatgaaattctttttcaaagttttgaagttccttgcaacttagccatgatgtgagtggttatccctagataaaattaaaaggatttttaaaaagtaattactgcacataaaatgataaataggtaatttgaataattttattttaagctccttggttaattattttgtctattgtctcagctataaattcaaatttatacatactattgagtattaatattctctgatttcagggagaattctgtcagtcacatgatgattatgtttttgtttaacattctttccatgcacttgttattttattaatttgcctgaatgatgagaccagaccagtgtctacagattttcattgtcagaaaaatctataagtctgccctttttacaatgatgatttaaaaaaaacaacagcgtaaatattagcccacaagagcagtcctaaacaatcacaattacactgtactacccaagaagactgtttattgtgaagcatttacctttcaaaaaatcattacatttctatttcttggtggagcagcacattgtggagtgtgattcttaattcttcattgagtttgtcaataggacattgatgctggataggttgtcttttgtttttatgtctcagaccatcttgtgagattgtttgcctatctcataatacagttttatgcagaaaggttgaaactatgtaaatggtttttatggaaattatcagttacaatattttaaaggtgtagaatggcatctttgtttataggagaacatttgtaaataaagttaaatttctaagtcaa

SEQ ID NO: 386800 - DNA, 169 bp, Homo sapiens
gcggccgcctactactactactactgctcgaattcaagcttctaacgatgtacggggacatgccagtagaagttattactttggtcattattggaatatttatatcttagctggctgaccttgcacttgtcaaaaatgtaaagctgaaaataaaaccagggtttctatt

SEQ ID NO: 386801 - DNA, 1521 bp, Homo sapiens
  misc_feature (1509)..(1511): n is a, c, g, or t
catcggcttccgtaggaaggcgccggccgtggaggcgccacgtcccttgcggcggcgggagagaaatcgcttggacttcggggcggcctcggacggccatggcctttaccctgtactcactgctgcaggcagccctgctctgcgtcaacgccatcgcagtgctgcacgaggagcgattcctcaagaacattggctggggaacagaccagggaattggtggatttggagaagagccgggaattaaatcacagctaatgaaccttattcgatctgtaagaaccgtgatgagagtgccattgataatagtaaactcaattgcaattgtgttacttttattatttggatgaatatcagtggagaaaatggagactcagaagaggacatgccagtagaagttattactttggtcattattggaatatttatatcttagctggctgaccttgcacttgtcaaaaatgtaaagctgaaaataaaaccagggtttctatttatctgtttttttttttaatgttgcacttgtagtttcattacaaaagatcagatcatgaaaggcagtaactctccaggactggaatatctgattgctcagtgttaatagtagttcatgctgtggtgagattgttaaaagggtgcaagactgttgcttctctttttttagatatttttctatctctcacttctcagggatgaaattctttttcaaagttttgaagttccttgcaacttagccatgatgtgagtggttatccctagataaaattaaaaggatttttaaaaagtaattactgcacataaaatgataaataggtaatttgaataattttattttaagctccttggttaattattttgtctattgtctcagctataaattcaaatttatacatactattgagtattaatattctctgatttcagggagaattctgtcagtcacatgatgattatgtttttgtttaacattctttccatgcacttgttattttattaatttgcctgaatgatgagaccagaccagtgtctacagattttcattgtcagaaaaatctataagtctgccctttttacaatgatgatttaaaaaaaacaacagcgtaaatattagcccacaagagcagtcctaaacaatcacaattacactgtactacccaagaagactgtttattgtgaagcatttacctttcaaaaaatcattacatttctatttcttggtggagcagcacattgtggagtgtgattcttaattcttcattgagtttgtcaataggacattgatgctggataggttgtcttttgtttttatgtctcagaccatcttgtgagattgtttgcctatctcataatacagttttatgcagaaaggttgaaactatgtaaatggtttttatggaaattatcagttacaatattttaaaggtgtagaatggcatctttgtttataggagaacatttgtaaataaagttaaatttctaagtcaaaaaaaaaaaaaaaaaaaaaaaaaaaannnggggggggcg

SEQ ID NO: 386802 - DNA, 1502 bp, Homo sapiens
catcggcttccgtaggaaggcgccggccgtggaggcgccacgtcccttgcggcggcgggagagaaatcgcttggacttcggggcggcctcggacggccatggcctttaccctgtactcactgctgcaggcagccctgctctgcgtcaacgccatcgcagtgctgcacgaggagcgattcctcaagaacattggctggggaacagaccagggaattggtggatttggagaagagccgggaattaaatcacagctaatgaaccttattcgatctgtaagaaccgtgatgagagtgccattgataatagtaaactcaattgcaattgtgttacttttattatttggatgaatatcagtggagaaaatggagactcagaagaggacatgccagtagaagttattactttggtcattattggaatatttatatcttagctggctgaccttgcacttgtcaaaaatgtaaagctgaaaataaaaccagggtttctatttatctgtttttttttttaatgttgcacttgtagtttcattacaaaagatcagatcatgaaaggcagtaactctccaggactggaatatctgattgctcagtgttaatagtagttcatgctgtggtgagattgttaaaagggtgcaagactgttgcttctctttttttagatatttttctatctctcacttctcagggatgaaattctttttcaaagttttgaagttccttgcaacttagccatgatgtgagtggttatccctagataaaattaaaaggatttttaaaaagtaattactgcacataaaatgataaataggtaatttgaataattttattttaagctccttggttaattattttgtctattgtctcagctataaattcaaatttatacatactattgagtattaatattctctgatttcagggagaattctgtcagtcacatgatgattatgtttttgtttaacattctttccatgcacttgttattttattaatttgcctgaatgatgagaccagaccagtgtctacagattttcattgtcagaaaaatctataagtctgccctttttacaatgatgatttaaaaaaaacaacagcgtaaatattagcccacaagagcagtcctaaacaatcacaattacactgtactacccaagaagactgtttattgtgaagcatttacctttcaaaaaatcattacatttctatttcttggtggagcagcacattgtggagtgtgattcttaattcttcattgagtttgtcaataggacattgatgctggataggttgtcttttgtttttatgtctcagaccatcttgtgagattgtttgcctatctcataatacagttttatgcagaaaggttgaaactatgtaaatggtttttatggaaattatcagttacaatattttaaaggtgtagaaatttaactttatttacaaatgttctcctataaacaaagatgccatgtcgacgcggccgcgaatttagtagtagta

SEQ ID NO: 386803 - DNA, 1465 bp, Homo sapiens
ggcactcatcagctcgcacccaccgtcccttgcggcggcgggagagaaatcgcttggacttcggggcggcctcggacggccatggcctttaccctgtactcactgctgcaggcagccctgctctgcgtcaacgccatcgcagtgctgcacgaggagcgattcctcaagaacattggctggggaacagaccagggaattggtggatttggagaagagccgggaattaaatcacagctaatgaaccttattcgatctgtaagaaccgtgatgagagtgccattgataatagtaaactcaattgcaattgtgttacttttattatttggatgaatatcagtggagaaaatggagactcagaagaggacatgccagtagaagttattactttggtcattattggaatatttatatcttagctggctgaccttgcacttgtcaaaaatgtaaagctgaaaataaaaccagggtttctatttatctgtttttttttttaatgttgcacttgtagtttcattacaaaagatcagatcatgaaaggcagtaactctccaggactggaatatctgattgctcagtgttaatagtagttcatgctgtggtgagattgttaaaagggtgcaagactgttgcttctctttttttagatatttttctatctctcacttctcagggatgaaattctttttcaaagttttgaagttccttgcaacttagccatgatgtgagtggttatccctagataaaattaaaaggatttttaaaaagtaattactgcacataaaatgataaataggtaatttgaataattttattttaagctccttggttaattattttgtctattgtctcagctataaattcaaatttatacatactattgagtattaatattctctgatttcagggagaattctgtcagtcacatgatgattatgtttttgtttaacattctttccatgcacttgttattttattaatttgcctgaatgatgagaccagaccagtgtctacagattttcattgtcagaaaaatctataagtctgccctttttacaatgatgatttaaaaaaaacaacagcgtaaatattagcccacaagagcagtcctaaacaatcacaattacactgtactacccaagaagactgtttattgtgaagcatttacctttcaaaaaatcattacatttctatttcttggtggagcagcacattgtggagtgtgattcttaattcttcattgagtttgtcaataggacattgatgctggataggttgtcttttgtttttatgtctcagaccatcttgtgagattgtttgcctatctcataatacagttttatgcagaaaggttgaaactatgtaaatggtttttatggaaattatcagttacaatattttaaaggtgtagaatggcatctttgtttataggagaacatttgtaaataaagttaaatttctaagtcaa

SEQ ID NO: 386804 - DNA, 817 bp, Homo sapiens
catcggcttccgtaggaaggcgccggccgtggaggcgccacgtcccttgcggcggcgggagagaaatcgcttggacttcggggcggcctcggacggccatggcctttaccctgtactcactgctgcaggcagccctgctctgcgtcaacgccatcgcagtgctgcacgaggagcgattcctcaagaacattggctggggaacagaccagggaattggtggatttggagaagagccgggaattaaatcacagctaatgaaccttattcgatctgtaagaaccgtgatgagagtgccattgataatagtaaactcaattgcaattgtgttacttttattatttggatgaatatcagtggagaaaatggagactcagaagaggacatgccagtagaagttattactttggtcattattggaatatttatatcttagctggctgaccttgcacttgtcaaaaatgtaaagctgaaaataaaaccagggtttctatttatctgtttttttttttaatgttgcacttgtagtttcattacaaaagatcagatcatgaaaggcagtaactctccaggactggaatatctgattgctcagtgttaatagtagttcatgctgtggtgagattgttaaaagggtgcaagactgttgcttctctttttttagatatttttctatctctcacttctcagggatgaaattctttttcaaagttttgaagttccttgcaacttagccatgatgtgagtggttatccctagataaaattaaaaggatttttagtgattactgtgcattattgtctattgtcttagctatttt

SEQ ID NO: 386805 - DNA, 492 bp, Homo sapiens
catcggcttccgtaggaaggcgccggccgtggaggcgccacgtcccttgcggcggcgggagagaaatcgcttggacttcggggcggcctcggacggccatggcctttaccctgtactcactgctgcaggcagccctgctctgcgtcaacgccatcgcagtgctgcacgaggagcgattcctcaagaacattggctggggaacagaccagggaattggtggatttggagaagagccgggaattaaatcacagctaatgaaccttattcgatctgtaagaaccgtgatgagagtgccattgataatagtaaactcaattgcaattgtgttacttttattatttggatgaatatcagtggagaaaatggagactcagaagaggacatgccagtagaagttattactttggtcattattggaatatttatatcttagctggctgaccttgcacttgtcaaaaatgtaaagctgaaaataaaaccagggtttctatt

SEQ ID NO: 386806 - DNA, 564 bp, Homo sapiens
  misc_feature (561)..(561): n is a, c, g, or t
catcggcttccgtaggaaggcgccggccgtggaggcgccacgtcccttgcggcggcgggagagaaatcgcttggacttcggggcggcctcggacggccatggcctttaccctgtactcactgctgcaggcagccctgctctgcgtcaacgccatcgcagtgctgcacgaggagcgattcctcaagaacattggctggggaacagaccagggaattggtggatttggagaagagccgggaattaaatcacagctaatgaaccttattcgatctgtaagaaccgtgatgagagtgccattgataatagtaaactcaattgcaattgtgttacttttattatttggatgaatatcagtggagaaaatggagactcagaagaggacatgccagtagaagttattactttggtcattattggaatatttatatcttagctggctgaccttgcacttgtcaaaaatgtaaagctgaaaataaaaccagggtttctattcttaaaaaaaaatgagcaagttatgtatgcgcgcgcaattcgagtcacttgggccattcgccctatagnggg

SEQ ID NO: 386807 - DNA, 1482 bp, Homo sapiens
catcggcttccgtaggaaggcgccggccgtggaggcgccacgtcccttgcggcggcgggagagaaatcgcttggacttcggggcggcctcggacggccatggcctttaccctgtactcactgctgcaggcagccctgctctgcgtcaacgccatcgcagtgctgcacgaggagcgattcctcaagaacattggctggggaacagaccagggaattggtggatttggagaagagccgggaattaaatcacagctaatgaaccttattcgatctgtaagaaccgtgatgagagtgccattgataatagtaaactcaattgcaattgtgttacttttattatttggatgaatatcagtggagaaaatggagactcagaagaggacatgccagtagaagttattactttggtcattattggaatatttatatcttagctggctgaccttgcacttgtcaaaaatgtaaagctgaaaataaaaccagggtttctatttatctgtttttttttttaatgttgcacttgtagtttcattacaaaagatcagatcatgaaaggcagtaactctccaggactggaatatctgattgctcagtgttaatagtagttcatgctgtggtgagattgttaaaagggtgcaagactgttgcttctctttttttagatatttttctatctctcacttctcagggatgaaattctttttcaaagttttgaagttccttgcaacttagccatgatgtgagtggttatccctagataaaattaaaaggatttttaaaaagtaattactgcacataaaatgataaataggtaatttgaataattttattttaagctccttggttaattattttgtctattgtctcagctataaattcaaatttatacatactattgagtattaatattctctgatttcagggagaattctgtcagtcacatgatgattatgtttttgtttaacattctttccatgcacttgttattttattaatttgcctgaatgatgagaccagaccagtgtctacagattttcattgtcagaaaaatctataagtctgccctttttacaatgatgatttaaaaaaaacaacagcgtaaatattagcccacaagagcagtcctaaacaatcacaattacactgtactacccaagaagactgtttattgtgaagcatttacctttcaaaaaatcattacatttctatttcttggtggagcagcacattgtggagtgtgattcttaattcttcattgagtttgtcaataggacattgatgctggataggttgtcttttgtttttatgtctcagaccatcttgtgagattgtttgcctatctcataatacagttttatgcagaaaggttgaaactatgtaaatggtttttatggaaattatcagttacaatattttaaaggtgtagaatggcatctttgtttataggagaacatttgtaaataaagttaaatttctaagtcaa

SEQ ID NO: 386808 - DNA, 486 bp, Homo sapiens
  misc_feature (2)..(2): n is a, c, g, or t
gnccgctctagagtatccccacagcataaactatcgtcccttgcggcggcgggagagaaatcgcttggacttcggggcggcctcggacggccatggcctttaccctgtactcactgctgcaggcagccctgctctgcgtcaacgccatcgcagtgctgcacgaggagcgattcctcaagaacattggctggggaacagaccagggaattggtggatttggagaagagccgggaattaaatcacagctaatgaaccttattcgatctgtaagaaccgtgatgagagtgccattgataatagtaaactcaattgcaattgtgttacttttattatttggatgaatatcagtggagaaaatggagactcagaagaggacatgccagtagaagttattactttggtcattattggaatatttatatcttagctggctgaccttgcacttgtcaaaaatgtaaagctgaaaataaaaccagggtttctatt

SEQ ID NO: 386809 - DNA, 1507 bp, Homo sapiens
catcggcttccgtaggaaggcgccggccgtggaggcgccacgtcccttgcggcggcgggagagaaatcgcttggacttcggggcggcctcggacggccatggcctttaccctgtactcactgctgcaggcagccctgctctgcgtcaacgccatcgcagtgctgcacgaggagcgattcctcaagaacattggctggggaacagaccagggaattggtggatttggagaagagccgggaattaaatcacagctaatgaaccttattcgatctgtaagaaccgtgatgagagtgccattgataatagtaaactcaattgcaattgtgttacttttattatttggatgaatatcagtggagaaaatggagactcagaagaggacatgccagtagaagttattactttggtcattattggaatatttatatcttagctggctgaccttgcacttgtcaaaaatgtaaagctgaaaataaaaccagggtttctatttatctgtttttttttttaatgttgcacttgtagtttcattacaaaagatcagatcatgaaaggcagtaactctccaggactggaatatctgattgctcagtgttaatagtagttcatgctgtggtgagattgttaaaagggtgcaagactgttgcttctctttttttagatatttttctatctctcacttctcagggatgaaattctttttcaaagttttgaagttccttgcaacttagccatgatgtgagtggttatccctagataaaattaaaaggatttttaaaaagtaattactgcacataaaatgataaataggtaatttgaataattttattttaagctccttggttaattattttgtctattgtctcagctataaattcaaatttatacatactattgagtattaatattctctgatttcagggagaattctgtcagtcacatgatgattatgtttttgtttaacattctttccatgcacttgttattttattaatttgcctgaatgatgagaccagaccagtgtctacagattttcattgtcagaaaaatctataagtctgccctttttacaatgatgatttaaaaaaaacaacagcgtaaatattagcccacaagagcagtcctaaacaatcacaattacactgtactacccaagaagactgtttattgtgaagcatttacctttcaaaaaatcattacatttctatttcttggtggagcagcacattgtggagtgtgattcttaattcttcattgagtttgtcaataggacattgatgctggataggttgtcttttgtttttatgtctcagaccatcttgtgagattgtttgcctatctcataatacagttttatgcagaaaggttgaaactatgtaaatggtttttatggaaattatcagttacaatattttaaaggtgtagaatggcatctttgtttataggagaacatttgtaaataaagttaaatttctaagtcaaaagcacttgtttttgtaccttagta

SEQ ID NO: 386810 - DNA, 1425 bp, Homo sapiens
catcggcttccgtaggaaggcgccggccgtggaggcgccacgtcccttgcggcggcgggagagaaatcgcttggacttcggggcggcctcggacggccatggcctttaccctgtactcactgctgcaggcagccctgctctgcgtcaacgccatcgcagtgctgcacgaggagcgattcctcaagaacattggctggggaacagaccagggaattggtggatttggagaagagccgggaattaaatcacagctaatgaaccttattcgatctgtaagaaccgtgatgagagtgccattgataatagtaaactcaattgcaattgtgttacttttattatttggatgaatatcagtggagaaaatggagactcagaagaggacatgccagtagaagttattactttggtcattattggaatatttatatcttagctggctgaccttgcacttgtcaaaaatgtaaagctgaaaataaaaccagggtttctatttatctgtttttttttttaatgttgcacttgtagtttcattacaaaagatcagatcatgaaaggcagtaactctccaggactggaatatctgattgctcagtgttaatagtagttcatgctgtggtgagattgttaaaagggtgcaagactgttgcttctctttttttagatatttttctatctctcacttctcagggatgaaattctttttcaaagttttgaagttccttgcaacttagccatgatgtgagtggttatccctagataaaattaaaaggatttttaaaaagtaattactgcacattgtctattgtctcagctataaattcaaatttatacatactattgagtattaatattctctgatttcagggagaattctgtcagtcacatgatgattatgtttttgtttaacattctttccatgcacttgttattttattaatttgcctgaatgatgagaccagaccagtgtctacagattttcattgtcagaaaaatctataagtctgccctttttacaatgatgatttaaaaaaaacaacagcgtaaatattagcccacaagagcagtcctaaacaatcacaattacactgtactacccaagaagactgtttattgtgaagcatttacctttcaaaaaatcattacatttctatttcttggtggagcagcacattgtggagtgtgattcttaattcttcattgagtttgtcaataggacattgatgctggataggttgtcttttgtttttatgtctcagaccatcttgtgagattgtttgcctatctcataatacagttttatgcagaaaggttgaaactatgtaaatggtttttatggaaattatcagttacaatattttaaaggtgtagaatggcatctttgtttataggagaacatttgtaaataaagttaaatttctaagtcaa

SEQ ID NO: 386811 - DNA, 760 bp, Homo sapiens
catcggcttccgtaggaaggcgccggccgtggaggcgccacgtcccttgcggcggcgggagagaaatcgcttggacttcggggcggcctcggacggccatggcctttaccctgtactcactgctgcaggcagccctgctctgcgtcaacgccatcgcagtgctgcacgaggagcgattcctcaagaacattggctggggaacagaccagggaattggtggatttggagaagagccgggaattaaatcacagctaatgaaccttattcgatctgtaagaaccgtgatgagagtgccattgataatagtaaactcaattgcaattgtgttacttttattatttggatgaatatcagtggagaaaatggagactcagaagaggacatgccagtagaagttattactttggtcattattggaatatttatatcttagctggctgaccttgcacttgtcaaaaatgtaaagctgaaaataaaaccagggtttctatttatctgtttttttttttaatgttgcacttgtagtttcattacaaaagatcagatcatgaaaggcagtaactctccaggactggaatatctgattgctcagtgttaatagtagttcatgctgtggtgagattgttaaaagggtgcaagactgttgcttctctttttttagatatttttctatctctcatctctcggagtagaatacttttcaagatttggatcctgcaactgactagtagtggatgttactgataaataagattaagta

SEQ ID NO: 386812 - DNA, 557 bp, Homo sapiens
  misc_feature (545)..(547): n is a, c, g, or t
catcggcttccgtaggaaggcgccggccgtggaggcgccacgtcccttgcggcggcgggagagaaatcgcttggacttcggggcggcctcggacggccatggcctttaccctgtactcactgctgcaggcagccctgctctgcgtcaacgccatcgcagtgctgcacgaggagcgattcctcaagaacattggctggggaacagaccagggaattggtggatttggagaagagccgggaattaaatcacagctaatgaaccttattcgatctgtaagaaccgtgatgagagtgccattgataatagtaaactcaattgcaattgtgttacttttattatttggatgaatatcagtggagaaaatggagactcagaagaggacatgccagtagaagttattactttggtcattattggaatatttatatcttagctggctgaccttgcacttgtcaaaaatgtaaagctgaaaataaaaccagggtttctattaaaaaaaaaaaaaaaaaaaaaaaaaaaaaaaaaaaaaaaaaaaaaaaaaaaannnggggggggcg

SEQ ID NO: 386813 - DNA, 1835 bp, Homo sapiens
  misc_feature (1272)..(1272): n is a, c, g, or t
aaaaaaaaatggaaaaagagaaaaaagtaaaaagtaggtaagaaaaaatgaagaaattaggaagtatgtgtttgtatacagcctgccactaccgattatatttaatattcaaatgtgtaccttttaaaaatcaaagttcaaacttacagggtacttagagatttaaaagggaacaagtcatcagttcctatctcaaaactggcccatttacccttctttcctctttctcatttctgatcctggaaacaaaattattttctcatacaacatcgagagcattgcagacaatgtattatagtgagcaagtatgtgcggtagaggcagattctgagtttaaatcctgattctgctagtagttgttgactttggacaaattattaaccactaaggtttccgtcattcatctgtaaaatgaggataataacacttttcctgtaggagtattttttaaaacaacatgtaaaaagtatgtattgtagtgccagcgcataaaagtaatttgttaaaatcgtttcctccttttgtctgccctttcttttccaatcctactgctataacatgaattcggggatttatcgtcttgtatctactagacaccatggcagccttcataccaattgctaacttcccttctccattccattccaagcacttctattcaatatgtttcctttaatccagattttcatcagttttgaagcacatcataatcctttaaaaattcctcaggccaggcacaatggcagatttctataatcccagcactttgggaggccaaggtaggggatcacttgagcccaggagtttaagaacagcctgggcaacacagcaagaccctgcctctacaaaaacatttagaagaatttttttttaatagccgggtgtggtggctgtatgcctgtagttccagctactcaggaggctgaggaagaaggattgcttgagcccagaagttggaggctgtagtgagctatgatcatgacactgcattccggcctggatgacagagtgagaccatgtctttaaaaaaagaaaagtttctcaccatccatagataattaaacatttccaggccgactgaattcctccacggagaagacaggagagggattcagaaccaacctgagcccagggctgctccactccctgctctctaccttcttccccttgggtttgagcccagattttaggtgagatgagctttcagctggtggaacatctctcttccgttttgctgtgataacaactctagttcttatgtggagggagggnttaaagtgcattggagtgcactatccctccacagaagtgcttcaccctgcagcgcaaatgtgcttcctcctgggttgggcatctagcccaggtatttctgagtctgacgatcatggagtgaaggccgaagaatgtggataaagaaagggaaggagaatcaaataatgccccccaagttactaagtgtcttgctgaacttttgctttttctatgtgggtgaaggtaaaaagagataactcgagacagtgcaggaaaaatatcatttaaaacctaaccttgaggctgggcgtactggctcaggcctgtaatcctagcactttggaaggctgagactggtggatcacctgaggtcaggagttcaagaccagcctggccaatgtggcaaaaccccatctctactaaaaataccacaattagctgggcatggtggtgggcgcctgtaactccagccactcgggaggctgaggcaggagaatcacctgaatccggtggggcggaggttgcagtgagccgagattacgccatttcactccagcctgggcgaaagagcgaaactctgtctc

SEQ ID NO: 386814 - DNA, 391 bp, Homo sapiens
ggaatacttcaggataagtggtcaaggaatgttctcgaggaagcagtatttgagctgaaccctgagtgaagagctgtggaaagaccagaaacagtgtttcaggtgcagagaatagtaactgcaaagactgaggcgaaactaaaaaagtcatcgaaacccacactgagccctgctggcggggaactgatgactcctcgttggtacggtcgtctgccctgtccaacgtggggttcttgagaagctgattctgaaattgagattagggtacaggaagattcttgtgggggtgctcttgtgaggagtgaaggcagcgaggctaggcagaggttgcagtaagccaagatcgcgccactgcattccagcgtgggtgacagagtgagactcagtctca

SEQ ID NO: 386815 - DNA, 484 bp, Homo sapiens
acgacgggttctctcatagaaagaggagtggagcacacagaaggagcacaacgggatggcgaaggaagaggctggagcaatgcagctgcaagctgggaatgcaaagggttgacaaccaccactagaagctaggaagaggaatactggacttctagcctccagaactgtgagataatacatttattttgttttaagccacccaatgtatggtactttgtttcggtagcccccagaaaatgaacataccccccaattataacacaacaggaaacaagattcatggagtgaatggtagaaccagacctgaatgctgattctcttctcacctgaagtgccacagttaccttcttgttgtgtgatgatcaaaatgtgctctgaagacaactacctcacaaagaattgggggtgcttgagaaagaaaagaaaagaagaaaaaagaaaagaaaaaagaaagacaagttcctgagttccatctatgacctag

SEQ ID NO: 386816 - DNA, 538 bp, Homo sapiens
acgacgggttctctcatagaaagaggagtggagcacacagaaggagcacaacgggatggcgaaggaagaggctggagcaatgcagctgcaagctgggaatgcaaagggttgacaaccaccactagaagctaggaagaggcagggaaggtcgctacccacagtctcagagggaccttggccctgtgctcattttaatactggacttctagcctccagaactgtgagataatacatttattttgttttaagccacccaatgtatggtactttgtttcggtagcccccagaaaatgaacataccccccaattataacacaacaggaaacaagattcatggagtgaatggtagaaccagacctgaatgctgattctcttctcacctgaagtgccacagttaccttcttgttgtgtgatgatcaaaatgtgctctgaagacaactacctcacaaagaattgggggtgcttgagaaagaaaagaaaagaagaaaaaagaaaagaaaaaagaaagacaagttcctgagttccatctatgacctag

SEQ ID NO: 386817 - DNA, 2708 bp, Homo sapiens
attcctgcggcgaggatggagggcctggcagtgcggttgctgcgcggcagcaggctgctaagaagaaatttcctgacttgtttgtcttcttggaagattcctcctcatgtctcaaaatcttcccagtcagaagctctactcaatataacaaataatggaatacactttgctcccctgcaaacatttacagatgaggaaatgatgataaagagttcagttaaaaaatttgctcaggaacaaattgcacctttggtttcaaccatggatgaaaattcgaaaatggagaaatcagtaatacaaggattatttcaacaagggttgatgggtattgaagttgacccagaatatggaggcacaggagcttcatttttatccactgtgctcgtgatagaggaattagccaaagttgatgcatctgtggctgtcttttgtgagatccagaacacattaattaacacactgattagaaaacatggaacagaagaacaaaaggccacctatttgcctcagctcactacagaaaaagtaggaagtttctgcctttcagaggctggagcaggtagtgactcatttgctttgaagaccagagctgataaagagggagattattatgtcctcaatggatcaaagatgtggatcagcagtgctgagcacgcagggctctttctggtgatggcaaatgtagaccctaccattggatataagggaattacctccttcttagtagatcgtgatactccgggccttcatatagggaaacctgaaaacaaattggggctcagagcttcttccacctgcccgttaacattcgaaaatgtcaaggttccagaagccaatatcttgggacaaattggacatggctataagtatgccatagggagtctcaatgaaggtagaataggaattgctgcacagatgctgggactggcgcaaggatgttttgactacactattccatatattaaagaaaggatacaatttggcaaaagactatttgattttcagggcctccaacaccaagtggctcacgtggccacccagctggaagctgcaagattactaacatacaatgctgctaggcttttagaagctggaaagccattcataaaagaagcgtcaatggccaaatactatgcatcagagattgcaggacaaacaacgagtaaatgtatcgagtggatggggggagtaggctacaccaaagattaccctgtggagaaatacttccgagatgcaaagattggtacgatatatgaaggagcttccaacatccagttgaacaccattgcaaagcatatcgatgcagaatactgacgtctataggagtgggacccctccctggtgtcactgctgtaaaattttaaacggttgtgtcttgttgggagtaagtgccttgcgtgggaataaacttccacagcattcgaatattttaatgaagcccttagtcagggtcctggtgttggcctttttggttttctcttttcaggctgtttaacttaggcacaggagatccacttttaaacttgggaaataagcacctgtatttttttccaaaactgtttttaaagctgtatacgcatacatatatatatttttactctgtcttactctgtcacccaggctagagtgcagtggcgcgatctcagctcactgcagccttgacctcctgggttccagtgattctcatgcctcatcctcccaagtagctggaactacaggtgtgcaccaccatgcctggttcatttttgtgtttttagtagagatggggttttaccatattgcccaggctggtcttctggcttctggatatcgcccaccttggcctcccaaagtgctgggattacagggatgagccaccgtgcctggctgggtatttatattatcattctagtttcagagtatacagaagtttcatcccatcatttggaaaaataaaggcatctgaagtacaatattacttatagaaatagtttatattcctattaaatcttaatcttgtggcatcagggaaatatttgttacatagtaggcaatttttatccagtactttatagattcaactctaagttgcaagcgaagtcaaaactgatgaaaatttatttagaaaaatctaaaaattctggttttaaatatgagaatcagtggaaaataagggtataattttgtaggtcatatgattgaagaaaatattattttaacaatgtaaagcaatatgatttgttactataattaacctgtataaaagatacattttatggtggtttcagtaggtcattttaaaaaccaatgtgcattagttttcaagtataaggtttaagtaatttggtttaataatcagaaaatattcaatacagtgttggatattctgtcatgcactatttttcagttgacaatttctgtattttaattgaatactgtttcttcagtcatggttattgcactttatcctgaataataattcagaaattgggttttggttcagtgattctcaagaaaaagatctcttgcccattaagaagtgtatcaaaatctcataaggaatgagggagagaagggggctgtagagtttgaaaaagcatattcaatattaaaatagttttatatttgggaaggcaaaaatgaatctattgttttgcaatataggttataaacaggcaaaatgcaataaaatatatatctggttgtattagtctgttttcacgctgctg

SEQ ID NO: 386818 - DNA, 2405 bp, Homo sapiens
  misc_feature (2354)..(2354): n is a, c, g, or t
  misc_feature (2403)..(2403): n is a, c, g, or t
attcctgcggcgaggatggagggcctggcagtgcggttgctgcgcggcagcaggctgctaagaagaaatttcctgacttgtttgtcttcttggaagattcctcctcatgtctcaaaatcttcccagtcagaagctctactcaatataacaaataatggaatacactttgctcccctgcaaacatttacagatgaggaaatgatgataaagagttcagttaaaaaatttgctcaggaacaaattgcacctttggtttcaaccatggatgaaaattcgaaaatggagaaatcagtaatacaaggattatttcaacaagggttgatgggtattgaagttgacccagaatatggaggcacaggagcttcatttttatccactgtgctcgtgatagaggaattagccaaagttgatgcatctgtggctgtcttttgtgagatccagaacacattaattaacacactgattagaaaacatggaacagaagaacaaaaggccacctatttgcctcagctcactacagaaaaagtaggaagtttctgcctttcagaggctggagcaggtagtgactcatttgctttgaagaccagagctgataaagagggagattattatgtcctcaatggatcaaagatgtggatcagcagtgctgagcacgcagggctctttctggtgatggcaaatgtagaccctaccattggatataagggaattacctccttcttagtagatcgtgatactccgggccttcatatagggaaacctgaaaacaaattggggctcagagcttcttccacctgcccgttaacattcgaaaatgtcaaggttccagaagccaatatcttgggacaaattggacatggctataagtatgccatagggagtctcaatgaaggtagaataggaattgctgcacagatgctgggactggcgcaaggatgttttgactacactattccatatattaaagaaaggatacaatttggcaaaagactatttgattttcagggcctccaacaccaagtggctcacgtggccacccagctggaagctgcaagattactaacatacaatgctgctaggcttttagaagctggaaagccattcataaaagaagcgtcaatggccaaatactatgcatcagagattgcaggacaaacaacgagtaaatgtatcgagtggatggggggagtaggctacaccaaagattaccctgtggagaaatacttccgagatgcaaagattggtacgatatatgaaggagcttccaacatccagttgaacaccattgcaaagcatatcgatgcagaatactgacgtctataggagtgggacccctccctggtgtcactgctgtaaaattttaaacggttgtgtcttgttgggagtaagtgccttgcgtgggaataaacttccacagcattcgaatattttaatgaagcccttagtcagggtcctggtgttggcctttttggttttctcttttcaggctgtttaacttaggcacaggagatccacttttaaacttgggaaataagcacctgtatttttttccaaaactgtttttaaagctgtatacgcatacatatatatatttttactctgtcttactctgtcacccaggctagagtgcagtggcgcgatctcagctcactgcagccttgacctcctgggttccagtgattctcatgcctcatcctcccaagtagctggaactacaggtgtgcaccaccatgcctggttcatttttgtgtttttagtagagatggggttttaccatattgcccaggctggtcttctggcttctggatatcgcccaccttggcctcccaaagtgctgggattacagggatgagccaccgtgcctggctgggtatttatattatcattctagtttcagagtatacagaagtttcatcccatcatttggaaaaataaaggcatctgaagtacaatattacttatagaaatagtttatattcctattaaatcttaatcttgtggcatcagggaaatatttgttacatagtaggcaatttttatccagtactttatagattcaactctaagttgcaagcgaagtcaaaactgatgaaaatttatttagaaaaatctaaaaattctggttttaaatatgagaatcagtggaaaataagggtataattttgtaggtcatatgattgaagaaaatattattttaacaatgtaaagcaatatgatttgttactataattaacctgtataaaagatacattttatggtggtttcagtaggcagggggattttaaccatggcattatttcagataggttaagaattggttatatagaaaataatcaggtgattttgatgctttntagtgcatttgattatatctgttagctgttgctatcaaataaatgtgtngt

SEQ ID NO: 386819 - DNA, 1675 bp, Homo sapiens
  misc_feature (1655)..(1656): n is a, c, g, or t
  misc_feature (1659)..(1659): n is a, c, g, or t
  misc_feature (1661)..(1661): n is a, c, g, or t
  misc_feature (1663)..(1663): n is a, c, g, or t
attcctgcggcgaggatggagggcctggcagtgcggttgctgcgcggcagcaggctgctaagaagaaatttcctgacttgtttgtcttcttggaagattcctcctcatgtctcaaaatcttcccagtcagaagctctactcaatataacaaataatggaatacactttgctcccctgcaaacatttacagatgaggaaatgatgataaagagttcagttaaaaaatttgctcaggaacaaattgcacctttggtttcaaccatggatgaaaattcgaaaatggagaaatcagtaatacaaggattatttcaacaagggttgatgggtattgaagttgacccagaatatggaggcacaggagcttcatttttatccactgtgctcgtgatagaggaattagccaaagttgatgcatctgtggctgtcttttgtgagatccagaacacattaattaacacactgattagaaaacatggaacagaagaacaaaaggccacctatttgcctcagctcactacagaaaaagtaggaagtttctgcctttcagaggctggagcaggtagtgactcatttgctttgaagaccagagctgataaagagggagattattatgtcctcaatggatcaaagatgtggatcagcagtgctgagcacgcagggctctttctggtgatggcaaatgtagaccctaccattggatataagggaattacctccttcttagtagatcgtgatactccgggccttcatatagggaaacctgaaaacaaattggggctcagagcttcttccacctgcccgttaacattcgaaaatgtcaaggttccagaagccaatatcttgggacaaattggacatggctataagtatgccatagggagtctcaatgaaggtagaataggaattgctgcacagatgctgggactggcgcaaggatgttttgactacactattccatatattaaagaaaggatacaatttggcaaaagactatttgattttcagggcctccaacaccaagtggctcacgtggccacccagctggaagctgcaagattactaacatacaatgctgctaggcttttagaagctggaaagccattcataaaagaagcgtcaatggccaaatactatgcatcagagattgcaggacaaacaacgagtaaatgtatcgagtggatggggggagtaggctacaccaaagattaccctgtggagaaatacttccgagatgcaaagattggtacgatatatgaaggagcttccaacatccagttgaacaccattgcaaagcatatcgatgcagaatactgacgtctataggagtgggacccctccctggtgtcactgctgtaaaattttaaacggttgtgtcttgttgggagtaagtgccttgcgtgggaataaacttccacagcattcgaatattttaatgaagcccttagtcagggtcctggtgttggcctttttggttttctcttttcaggctgtttaacttaggcacaggagatccacttttaaacttgggaaataagcacctgtatttttttccaaaactgtttttaaagctgtatacgcatacatatatatatttttactctgtcttactctgtcacccaggctagagtgcgccactgtattccagcctgggtgannagnananattcgtctcaat

SEQ ID NO: 386820 - DNA, 2654 bp, Homo sapiens
attcctgcggcgaggatggagggcctggcagtgcggttgctgcgcggcagcaggctgctaagaagaaatttcctgacttgtttgtcttcttggaagattcctcctcatgtctcaaaatcttcccagtcagaagctctactcaatataacaaataatggaatacactttgctcccctgcaaacatttacagatgaggaaatgatgataaagagttcagttaaaaaatttgctcaggaacaaattgcacctttggtttcaaccatggatgaaaattcgaaaatggagaaatcagtaatacaaggattatttcaacaagggttgatgggtattgaagttgacccagaatatggaggcacaggagcttcatttttatccactgtgctcgtgatagaggaattagccaaagttgatgcatctgtggctgtcttttgtgagatccagaacacattaattaacacactgattagaaaacatggaacagaagaacaaaaggccacctatttgcctcagctcactacagaaaaagtaggaagtttctgcctttcagaggctggagcaggtagtgactcatttgctttgaagaccagagctgataaagagggagattattatgtcctcaatggatcaaagatgtggatcagcagtgctgagcacgcagggctctttctggtgatggcaaatgtagaccctaccattggatataagggaattacctccttcttagtagatcgtgatactccgggccttcatatagggaaacctgaaaacaaattggggctcagagcttcttccacctgcccgttaacattcgagtatgccatagggagtctcaatgaaggtagaataggaattgctgcacagatgctgggactggcgcaaggatgttttgactacactattccatatattaaagaaaggatacaatttggcaaaagactatttgattttcagggcctccaacaccaagtggctcacgtggccacccagctggaagctgcaagattactaacatacaatgctgctaggcttttagaagctggaaagccattcataaaagaagcgtcaatggccaaatactatgcatcagagattgcaggacaaacaacgagtaaatgtatcgagtggatggggggagtaggctacaccaaagattaccctgtggagaaatacttccgagatgcaaagattggtacgatatatgaaggagcttccaacatccagttgaacaccattgcaaagcatatcgatgcagaatactgacgtctataggagtgggacccctccctggtgtcactgctgtaaaattttaaacggttgtgtcttgttgggagtaagtgccttgcgtgggaataaacttccacagcattcgaatattttaatgaagcccttagtcagggtcctggtgttggcctttttggttttctcttttcaggctgtttaacttaggcacaggagatccacttttaaacttgggaaataagcacctgtatttttttccaaaactgtttttaaagctgtatacgcatacatatatatatttttactctgtcttactctgtcacccaggctagagtgcagtggcgcgatctcagctcactgcagccttgacctcctgggttccagtgattctcatgcctcatcctcccaagtagctggaactacaggtgtgcaccaccatgcctggttcatttttgtgtttttagtagagatggggttttaccatattgcccaggctggtcttctggcttctggatatcgcccaccttggcctcccaaagtgctgggattacagggatgagccaccgtgcctggctgggtatttatattatcattctagtttcagagtatacagaagtttcatcccatcatttggaaaaataaaggcatctgaagtacaatattacttatagaaatagtttatattcctattaaatcttaatcttgtggcatcagggaaatatttgttacatagtaggcaatttttatccagtactttatagattcaactctaagttgcaagcgaagtcaaaactgatgaaaatttatttagaaaaatctaaaaattctggttttaaatatgagaatcagtggaaaataagggtataattttgtaggtcatatgattgaagaaaatattattttaacaatgtaaagcaatatgatttgttactataattaacctgtataaaagatacattttatggtggtttcagtaggtcattttaaaaaccaatgtgcattagttttcaagtataaggtttaagtaatttggtttaataatcagaaaatattcaatacagtgttggatattctgtcatgcactatttttcagttgacaatttctgtattttaattgaatactgtttcttcagtcatggttattgcactttatcctgaataataattcagaaattgggttttggttcagtgattctcaagaaaaagatctcttgcccattaagaagtgtatcaaaatctcataaggaatgagggagagaagggggctgtagagtttgaaaaagcatattcaatattaaaatagttttatatttgggaaggcaaaaatgaatctattgttttgcaatataggttataaacaggcaaaatgcaataaaatatatatctggttgtattagtctgttttcacgctgctg

SEQ ID NO: 386821 - DNA, 2350 bp, Homo sapiens
attcctgcggcgaggatggagggcctggcagtgcggttgctgcgcggcagcaggctgctaagaagaaatttcctgacttgtttgtcttcttggaagattcctcctcatgtctcaaaatcttcccagtcagaagctctactcaatataacaaataatggaatacactttgctcccctgcaaacatttacagatgaggaaatgatgataaagagttcagttaaaaaatttgctcaggaacaaattgcacctttggtttcaaccatggatgaaaattcgaaaatggagaaatcagtaatacaaggattatttcaacaagggttgatgggtattgaagttgacccagaatatggaggcacaggagcttcatttttatccactgtgctcgtgatagaggaattagccaaagttgatgcatctgtggctgtcttttgtgagatccagaacacattaattaacacactgattagaaaacatggaacagaagaacaaaaggccacctatttgcctcagctcactacagaaaaagtaggaagtttctgcctttcagaggctggagcaggtagtgactcatttgctttgaagaccagagctgataaagagggagattattatgtcctcaatggatcaaagatgtggatcagcagtgctgagcacgcagggctctttctggtgatggcaaatgtagaccctaccattggatataagggaattacctccttcttagtagatcgtgatactccgggccttcatatagggaaacctgaaaacaaattggggctcagagcttcttccacctgcccgttaacattcgaaaatgtcaaggttccagaagccaatatcttgggacaaattggacatggctataagtatgccatagggagtctcaatgaaggtagaataggaattgctgcacagatgctgggactggcgcaaggatgttttgactacactattccatatattaaagaaaggatacaatttggcaaaagactatttgattttcagggcctccaacaccaagtggctcacgtggccacccagctggaagctgcaagattactaacatacaatgctgctaggcttttagaagctggaaagccattcataaaagaagcgtcaatggccaaatactatgcatcagagattgcaggacaaacaacgagtaaatgtatcgagtggatggggggagtaggctacaccaaagattaccctgtggagaaatacttccgagatgcaaagattggtacgatatatgaaggagcttccaacatccagttgaacaccattgcaaagcatatcgatgcagaatactgacgtctataggagtgggacccctccctggtgtcactgctgtaaaattttaaacggttgtgtcttgttgggagtaagtgccttgcgtgggaataaacttccacagcattcgaatattttaatgaagcccttagtcagggtcctggtgttggcctttttggttttctcttttcaggctgtttaacttaggcacaggagatccacttttaaacttgggaaataagcacctgtatttttttccaaaactgtttttaaagctgtatacgcatacatatatatatttttactctgtcttactctgtcacccaggctagagtgcagtggcgcgatctcagctcactgcagccttgacctcctgggttccagtgattctcatgcctcatcctcccaagtagctggaactacaggtgtgcaccaccatgcctggttcatttttgtgtttttagtagagatggggttttaccatattgcccaggctggtcttctggcttctggatatcgcccaccttggcctcccaaagtgctgggattacagggatgagccaccgtgcctggctgggtatttatattatcattctagtttcagagtatacagaagtttcatcccatcatttggaaaaataaaggcatctgaagtacaatattacttatagaaatagtttatattcctattaaatcttaatcttgtggcatcagggaaatatttgttacatagtaggcaatttttatccagtactttatagattcaactctaagttgcaagcgaagtcaaaactgatgaaaatttatttagaaaaatctaaaaattctggttttaaatatgagaatcagtggaaaataagggtataattttgtaggtcatatgattgaagaaaatattattttaacaatgtaaagcaatatgatttgttactataattaacctgtataaaagatacattttatggtggtttcagtaggcaggtggaatttgctgccttttttagtgcaatctgatttaatgaactgttttcagctggtatgactatctgatatataa

SEQ ID NO: 386822 - DNA, 451 bp, Homo sapiens
gcaaagatccttatcaaaatattagcatatcaacccagcaacataaaggagataatacaatgtcatcaagagggttttacccctgaaacgtaaagttagtctaacattcaaaaatcagtccatgtaactcaccatattaaaagaataaaggagaaaaacaatatgaccattatggagatgatgaaaaagcatttgaaaaaaattcaacacccacaaaaaaaatcaaaacaaatgacaaaaataaaaaataataataaaaagaaaaaattcaacacctactcatgataaaaattcttagctcctcagccaaattggaacataggctgagtgcagtggctcacacttgtaatcccaaaactttgtgaggctgaagcaggaggactgcctgaggccaagagttcaagataagcctagtcaacatagtgatatcctgtctctacaaaaaggtaaa

SEQ ID NO: 386823 - DNA, 603 bp, Homo sapiens
cctaggaactatgcccaggcagaaaaaagttactgtaggtgatgaagccagtgctccctgaaccaaataaaccctatcgacgttaccgaactgccgggcaaaaccagagcaactcacttacttggaaggtgaaaaacacttcaacatactccaggcggcaaccgacacttaggggccaggcagatgaaacaccatttgtttaaaaagtctattatttcactgtctcttcaacaaaggtggaaaactgatgattaaacactgaataatgccacccacttactaaacctatgattcactaataagcaggttcaatgcaattcataactttaaagaatgaattaccgaagccccttgcttcacaaattcccccaagaaacagaaagagcattcatcacatataacccgacaaccatttttactatggacacctacagatggcttctcttcctctaaggacacaatttccttcacaatcccacatgtaatcatttacaataccagaaacaaactccaactcagttccaccaactgggtttttaaaaatccttgtgcctaagaacgtcttttttccccaaagtaaaatgtgccattaaaaaatatttt

SEQ ID NO: 386824 - DNA, 410 bp, Homo sapiens
caatttctaacattcaaaataggattatggagtaaggcaatatgcctgcaagtcggacctatatctctcccttaagaatatgaaagatcagggctagtccataaattatagattttatagagtgagggtggtaaccttcccctttctgtcccataaggatagtagtaaatagaaataaagaggaaagactggagtgaaatgttagtttttcatctctgtgatctttactctggtgaaagaaggtgcattagataaatgaggatagtgttgaaggcaggaggggattctcctgttctgccccagccttgtcgtgcttcccatctgaggcctcatctgagaggtcattgcagtgagctgagatcacaccactgcactacaacctgggtgatagagtgagaccctgtctcaaa

SEQ ID NO: 386825 - DNA, 308 bp, Homo sapiens
caatttctaacattcaaaataggattatggagtaaggcaatatgcctgcaagtcggacctatatctctcccttaagaatatgaaagatcagggctagtccataaattatagattttatagagtgagggtggtaaccttcccctttctgtcccataaggatagtagtaaatagaaataaagaggaaagactggagtgaaatgttagtttttcatctctgtgatctttactctggtgaaagaaggtgcgcgcagtcttctaccatcagatacctacaagaggtcaatgtatagaatccctgatgacgcag

SEQ ID NO: 386826 - DNA, 807 bp, Homo sapiens
cagggccagaggccgtccaccccgcctcctgccatacaagctgcaaaggacacctgcttccaccttggaaatattagtgcagttatctggactatgtcccgacatttggctcataggaatgagcccagcggcgtccagttaagcctggcaggctaagtgcttatttatctccactctctcctgaaacgccactgaaacaccagagagtgaagtgcagagaacgggagagggggcagtggcagctgagcacgtctccaggctttgaaaagcagggaagggtgggcaggagaccccatgggccggcaaccaggaggacagccagcagggagcagctgggctgcaccatggggccacagaaagacacagtgggcagacatgggcagctcctggagggctgcagggggaatgtaccacggggcctcagaaagacacagcgggcaaacatgggcagcccctgggggtgctggggggatgtgggggcaaccagcagaagacagtgggtggctctgggcagaagggaggcgccttcctggggtcagcagtggggcccagctgccagcctcacatccccccaacccccaaggccaggagagacaatagagggggtgggggtcctctgccagagaacaaaggggcccagtggagcaaagccacatatgctgatactggggctctcctaaagtcacaggctcctgccctcagcagcccctgccactgccttcaccaggcccagctcacacacggcttggcaccgtgcacagagggatcaacggccaggggacccgacacattggaggctgcgctccc

SEQ ID NO: 386827 - DNA, 627 bp, Homo sapiens
ggcctcccaaagtgctgggattacaggcgtgagccactgcacccggctggaactgaattttaaattccatttacttttaatccacttaaatttaaatagccacctgtgatgggaggctaccatattggaaagcacagatatagacccttctttctcgaactttctagcccatctcccacaacactttcccacacatcatatactgtgaatttccattccgaacctctccttggatcttactcttcatatagaatgaccttccctccctcaacctcttcatttcctgtccacacctagttggcaaagcccaacttaaatggcaactctgccatgaagttgtcctgatcaccccaattaaaaattatctttcctttcctaaattcctctaacagtttgcctttatgttcttgttgtctattactcaataacaaatctctataaaccttagtttttgtcttaaaacaacaggaaacaatttatcatatctcatggcttctatgggtcaggaatttgggaagggctgggctgagtggttgtgatttggagacccttataaaggtggtgactgggactgaaatagggaatcggaactgctggggactaactggacatctttctctcttttcg

SEQ ID NO: 386828 - DNA, 381 bp, Homo sapiens
aaaaaactatgaatttatagagaaaactcccccaagctcctcaattttaaaagtcatcctttttaatgttcagttctatgagtttcacaatgtatacagtcatgtgaccaccatcactgtgaagatatagagcatttcttcacttgatgaatttccatgcctctctgtagttatctcctctcttcacctccaacctctgacaactgctgaactattttctaccttggtttcctcactttatgtagttttgcctttattaggatgccatataaatgtaataaaacaatgtaaccttttgcgtctggcctatttttctcaccatactgcatttgagattctaacatgttgcgtatattaatatgtaatactcactttcttttc

SEQ ID NO: 386829 - DNA, 104 bp, Homo sapiens
gtgggaactcgataaatgttgatttatgaatgaatgcagcgatgaatggttcatccagagtacaggtggagggatggagaccacagcaggaagcacagcctgtc

SEQ ID NO: 386830 - DNA, 451 bp, Homo sapiens
aaaatattattacaagattttttattaaagtggttctcagcatactttctcttattatagctgcagtctcaaaagtacaccgtagtggataaacaaagtatggtatatccttacaatcagtacattctgtcctaaaaaggaatgaagtctgctgtatacttcagcatagatgaacctggaaaacttgtcccaagtaaaagaatttagacacaaaagactgcatattatatgattccatttatacagaatttttatagggatctataggtggttgatggtttccaggggctagaggtaggggaagttgggaaaaagaagtgactgcttcatggatatagtttcttttcagtgaattggataagcatgatgttgcacagcattgtgaatatactaaaatccactgaactggtacaccttaaaatgattgagatggtggatttcatgttacata

SEQ ID NO: 386831 - DNA, 1208 bp, Homo sapiens
gagcggccgcccacatgatgcgcaagacgagctgcctgcagtatctggacgcccgcaacacgcccctgctggaccactcggcgcccttcgtggcccgtgccctgcgcatccgcagcagcctggcagtgctgcacttggagaacgccagcctgtcggggcggcccctcatgctgctcgccacggccctgaagatgaacatgaacctgcgggagctgtacctggcggacaacaagctcaacggcctgcaggactcggcccagctgggtaacctgctcaagttcaactgctccctgcagatcctggacctccggaacaaccacgtgctagactcgggtctggcctacatctgcgagggcctcaaggagcagaggaaggggctggtgaccctggtgctgtggaacaaccagctcacgcacacaggcatggccttcctgggcatgacactgccgcacactcagagcctggagacgctgaacctgggccacaaccccatcgggaacgagggtgtgcggcacctcaagaacgggctcatcagcaaccgcagcgtgctgcgcctcgggctggcctccaccaagctcacgtgcgagggcgcggtggcggtggcggagttcatcgctgagagcccccgcctcctgagactggaccttcgggagaacgagatcaagacaggcgggctcatggcactgtcgttggccctcaaggtgaaccactcactgctgcgcctggacctcgaccgtgaacccaagaaagaggcggtgaagagcttcatcgagacgcagaaggcgctgctggccgagatccagaacggctgcaagcgcaacttggtgctggcgcgggagagggaggagaaggagcagccgccacagctgtcggcctccatgcctgagaccaccgccaccgagccccagcccgacgacgagcccgccgctggggtgcagaacggggcccccagccccgcacccagcccggactcagactcagactcggactcggatggggaggaagaggaggaagaggaaggggagagggacgagaccccctgtcctgccctggtgccccccacggactccctgggccctggggacaggagtcccccaggcagcccactccacacccaccgagcagcggatttccgtgtccaagcccgggccggggccacaaggtgtttgtggtgacccgggtggagagcccgcccgagagggcagagc

SEQ ID NO: 386832 - DNA, 1300 bp, Homo sapiens
gagcggccgcccacatgatgcgcaagacgagctgcctgcagtatctggacgcccgcaacacgcccctgctggaccactcggcgcccttcgtggcccgtgccctgcgcatccgcagcagcctggcagtgctgcacttggagaacgccagcctgtcggggcggcccctcatgctgctcgccacggccctgaagatgaacatgaacctgcgggagctgtacctggcggacaacaagctcaacggcctgcaggactcggcccagctgggtaacctgctcaagttcaactgctccctgcagatcctggacctccggaacaaccacgtgctagactcgggtctggcctacatctgcgagggcctcaaggagcagaggaaggggctggtgaccctggtgctgtggaacaaccagctcacgcacacaggcatggccttcctgggcatgacactgccgcacactcagagcctggagacgctgaacctgggccacaaccccatcgggaacgagggtgtgcggcacctcaagaacgggctcatcagcaaccgcagcgtgctgcgcctcgggctggcctccaccaagctcacgtgcgagggcgcggtggcggtggcggagttcatcgctgagagcccccgcctcctgagactggaccttcgggagaacgagatcaagacaggcgggctcatggcactgtcgttggccctcaaggtgaaccactcactgctgcgcctggacctcgaccgtgaacccaagaaagaggcggtgagcaggggacggtcctgcagccctggggcgggcggaaggccgggtggtggggccggcctgagagccctagccaggcgctcccgccacaggtgaagagcttcatcgagacgcagaaggcgctgctggccgagatccagaacggctgcaagcgcaacttggtgctggcgcgggagagggaggagaaggagcagccgccacagctgtcggcctccatgcctgagaccaccgccaccgagccccagcccgacgacgagcccgccgctggggtgcagaacggggcccccagccccgcacccagcccggactcagactcagactcggactcggatggggaggaagaggaggaagaggaaggggagagggacgagaccccctgtcctgccctggtgccccccacggactccctgggccctggggacaggagtcccccaggcagcccactccacacccaccgagcagcggatttccgtgtccaagcccgggccggggccacaaggtgtttgtggtgacccgggtggagagcccgcccgagagggcagagc

SEQ ID NO: 386833 - DNA, 571 bp, Homo sapiens
  misc_feature (71)..(71): n is a, c, g, or t
taagtcacttttttttttggaaaatttttggttggttgttttgagacagagcctcactctgttgctcaagntgagtgcagcgcgtgatctcgcctcactgggacctctgtctcccagattcaagagattatcctgctcagcctcccgagtagctggggttgcaggtgcctgcctccccttccagctagttttttgtatttttagtggagatggggttttgccgcgttggtcgggctggtcttgagcttcctgccacaggtcatccacctgcgtcggcctcctaaggtgctgggattacaggcatgagccaccaagcctggcctgtttttttttgtttgttttgtttttgttttttttgttttgttttgttttttgagacaggtcctgctctgtcctgcagctggagctgcagtgagctgagaatgaaacactgcactccagcctgagttacagagcaagactctgtctcaaagaaaccccaaaaaagaaaaacagaaaaacccacacaccaaagaacttacttatgtcatcctgctgtttagtttctacataaagtgttttgctcctcagt

SEQ ID NO: 386834 - DNA, 1646 bp, Homo sapiens
cgccggtaataattagcgggcgggcggggcccgcgcgtcagccgcgggagccggccaatccagtggctctcctccgcggtcgcgtcataggccgaacaaccaaacagaaaagtttaataaacagcggacggaggggccggcggtggcggagccggagcaagcaggggttcggcggcattacctgtacccattcaccggcggctaccggcggcggcgcgcagcgtgtcaggcggagagacccgccgccaggtgtgcaactgaggaacatggctcaagaaactaatcacagccaagtgcctatgctttgttccactggctgtggattttatggaaaccctcgtacaaatggcatgtgttcagtatgctataaagaacatcttcaaagacagaatagtagtaatggtagaataagcccacctgcaacctctgtcagtagtctgtctgaatctttaccagttcaatgcacagatggcagtgtgccagaagcccagtcagcattagactctacatcttcatctatgcagcccagccctgtatcaaatcagtcacttttatcagaatctgtagcatcttctcaattggacagtacatctgtggacaaagcagtacctgaaacagaagatgtgcaggcttcagtatcagacacagcacagcagccatctgaagagcaaagcaagtctcttgaaaaaccgaaacaaaaaaagaatcgctgtttcatgtgcaggaagaaagtgggacttactgggtttgaatgccggtgtggaaatgtttactgtggtgtacaccgttactcagatgtacacaattgctcttacaattacaaagccgatgctgctgagaaaatcagaaaagaaaatccagtagttgttggtgaaaagatccaaaagatttgaactcctgctggaatacaaaattcttgagcatctgcaaactaaaaattgacttgaggttttttttttcctagtcattgggaatgtagagcagtgtatcttgcatgtcatcggaagaatagattttggttttggttttgttttgaaaatgactctgaacatttatttccattgcaatttctgtggctgaggagacttaaactttacaagtattatccttttaagatcattttaattttagttgagtgcagagggcttttataacaaacgtgcagaaattttggagggctgtgatttttccagtattaaacatgcatgcattaatcttgcagtttattttctcattgtgtatgtatatatcgcttttctctgcagcacgatttctcttttgataatgccctttagggcacaactagttatcagtaactgaatgtatcttaatcattatggctgcttctgttttttcattaacaaaggttattcatatgttagcatatagtttctttgcacccactatttatgtctgaatcatttgtcacaagagagtgtgtgctgatgagattgtaagtttgtgtgtttaaacttttttttgagcgagggaagaaaaagctgtatgcatttcattgctgtctacaggtttctttcagattatgttcatgggtttgtgtgtatacaatatgaagaatgatctgaagtaattgtgctgtatttatgtttattcaccagtctttgattaaataaaaaggaaaaccagaa

SEQ ID NO: 386835 - DNA, 1809 bp, Homo sapiens
cgccggtaataattagcgggcgggcggggcccgcgcgtcagccgcgggagccggccaatccagtggctctcctccgcggtcgcgtcataggccgaacaaccaaacagaaaagtttaataaacagcggacggaggggccggcggtggcggagccggagcaagcaggggttcggcggcattacctgtacccattcaccggcggctaccggcggcggcgcgcagcgtgtcaggcggagagacccgccgccaggaatgaatctgaagtctgctgcagtaaaacacagaaggctttaaaatgttttcttgcataaaattcaaaacttttaagtagctgcttatgagaatagggaaggcagaaagctaatgtctgtctcaagatacaggacagctgtttgctcatcaacctcaactgtgtgtgcaactgaggaacatggctcaagaaactaatcacagccaagtgcctatgctttgttccactggctgtggattttatggaaaccctcgtacaaatggcatgtgttcagtatgctataaagaacatcttcaaagacagaatagtagtaatggtagaataagcccacctgcaacctctgtcagtagtctgtctgaatctttaccagttcaatgcacagatggcagtgtgccagaagcccagtcagcattagactctacatcttcatctatgcagcccagccctgtatcaaatcagtcacttttatcagaatctgtagcatcttctcaattggacagtacatctgtggacaaagcagtacctgaaacagaagatgtgcaggcttcagtatcagacacagcacagcagccatctgaagagcaaagcaagtctcttgaaaaaccgaaacaaaaaaagaatcgctgtttcatgtgcaggaagaaagtgggacttactgggtttgaatgccggtgtggaaatgtttactgtggtgtacaccgttactcagatgtacacaattgctcttacaattacaaagccgatgctgctgagaaaatcagaaaagaaaatccagtagttgttggtgaaaagatccaaaagatttgaactcctgctggaatacaaaattcttgagcatctgcaaactaaaaattgacttgaggttttttttttcctagtcattgggaatgtagagcagtgtatcttgcatgtcatcggaagaatagattttggttttggttttgttttgaaaatgactctgaacatttatttccattgcaatttctgtggctgaggagacttaaactttacaagtattatccttttaagatcattttaattttagttgagtgcagagggcttttataacaaacgtgcagaaattttggagggctgtgatttttccagtattaaacatgcatgcattaatcttgcagtttattttctcattgtgtatgtatatatcgcttttctctgcagcacgatttctcttttgataatgccctttagggcacaactagttatcagtaactgaatgtatcttaatcattatggctgcttctgttttttcattaacaaaggttattcatatgttagcatatagtttctttgcacccactatttatgtctgaatcatttgtcacaagagagtgtgtgctgatgagattgtaagtttgtgtgtttaaacttttttttgagcgagggaagaaaaagctgtatgcatttcattgctgtctacaggtttctttcagattatgttcatgggtttgtgtgtatacaatatgaagaatgatctgaagtaattgtgctgtatttatgtttattcaccagtctttgattaaataaaaaggaaaaccagaa

SEQ ID NO: 386836 - DNA, 815 bp, Homo sapiens
gggtattcaggtttggttgctttggagtacagcttcaagtgaagttaatctgaggtgaagcaaacagaaaattgtggaggttttgttggtgtgcaactgaggaacatggctcaagaaactaatcacagccaagtgcctatgctttgttccactggctgtggattttatggaaaccctcgtacaaatggcatgtgttcagtatgctataaagaacatcttcaaagacagaatagtagtaatggtagaataagcccacctgcaacctctgtcagtagtctgtctgaatctttaccagttcaatgcacagatggcagtgtgccagaagcccagtcagcattagactctacatcttcatctatgcagcccagccctgtatcaaatcagtcacttttatcagaatctgtagcatcttctcaattggacagtacatctgtggacaaagcagtacctgaaacagaagatgtgcaggcttcagtatcagacacagcacagcagccatctgaagagcaaagcaagtctcttgaaaaaccgaaacaaaaaaagaatcgctgtttcatgtgcaggaagaaagtgggacttactgggtttgaatgccggtgtggaaatgtttactgtggtgtacaccgttactcagatgtacacaattgctcttacaattacaaagccgatgctgctgagaaaatcagaaaagaaaatccagtagttgttggtgaaaagatccaaaagatttgaactcctgctggaatacaaaattcttgagcatctgcaaactattgacttgggtttttttcttgggatgtggacactgtcctgcg

SEQ ID NO: 386837 - DNA, 1208 bp, Homo sapiens
  misc_feature (1169)..(1169): n is a, c, g, or t
cgccggtaataattagcgggcgggcggggcccgcgcgtcagccgcgggagccggccaatccagtggctctcctccgcggtcgcgtcataggccgaacaaccaaacagaaaagtttaataaacagcggacggaggggccggcggtggcggagccggagcaagcaggggttcggcggcattacctgtacccattcaccggcggctaccggcggcggcgcgcagcgtgtcaggcggagagacccgccgccaggaatgaatctgaagtctgctgcagtaaaacacagaaggctttaaaatgttttcttgcataaaattctctcaagatacaggacagctgtttgctcatcaacctcaactgtgtgtgcaactgaggaacatggctcaagaaactaatcacagccaagtgcctatgctttgttccactggctgtggattttatggaaaccctcgtacaaatggcatgtgttcagtatgctataaagaacatcttcaaagacagaatagtagtaatggtagaataagcccacctgcagcctctgccagcaacctgaattactctttcccactctattgctcaaacggctctgagcgtaaagccaaatcagatataaattctacacacttctacactacaaaccatacaatgtattaaagtgaaaaccaataaacatcaaaaatcaataccatgtcaacatatacctcacaaactacctgccgacactcataaacctttacactctatataagtccatcatagaattaacactactcaaattactcttgcctctagttaaaaccaaaatccatatttacataccctaatactaaaaatagtacgggaccctatgatcaccagttaagagatataatcctaataatcaaatcaaacatgtattaataataacacgacaatgactcaaatctatattatcccatcacctacaccgactatacccacaataagacttttatattattataataaccatactttcactctaatttatgctatatctattataataccataccaacgaataataaaataacgccatataaccttacgtttcacaaatcatcactttactgtatgacccactcaaattgacaaatacgaccgcagctacttctccattctcaacgaacgatacactttttaactgatcacantacattaaatactttagatactacatatacgtactctag

SEQ ID NO: 386838 - DNA, 624 bp, Homo sapiens
ctcccttagaatattcaagtagtatttgtttatgtgccttttattgattaaatttgtagttactagaaaaattagaaagtacagttaaaacctaaagaaagtctataaaaccactgttaacatatcattacatattctagattattttctacatgcatatatacatacatttaacaaaaaggggtcatatttttgtaaacaactttgtaatttaatgactagttttctgtgctaataaattcctcagtatcctctgaataatagactagggagggtgggatgaggaatagcaaaatcttacagaataattaaattttgccaccttcgtatttttgttagcttcagtatcagacacagcacagcagccatctgaagagcaaagcaagtctcttgaaaaaccgaaacaaaaaaagaatcgctgtttcatgtgcaggaagaaagtgggacttactggtaaggacctaaatcaaatgtttaaaattaaaatgatgttttataataatgcatagcttactgttgttgacttcaattaagattgttcctgttcccttgagagttaatattggatatacttcaccttctgaattttcttaaggaaataaaaatagctttgattatacacct

SEQ ID NO: 386839 - DNA, 1677 bp, Homo sapiens
cgccggtaataattagcgggcgggcggggcccgcgcgtcagccgcgggagccggccaatccagtggctctcctccgcggtcgcgtcataggccgaacaaccaaacagaaaagtttaataaacagcggacggaggggccggcggtggcggagccggagcaagcaggggttcggcggcattacctgtacccattcaccggcggctaccggcggcggcgcgcagcgtgtcaggcggagagacccgccgccaggtgtgcaactgaggaacatggctcaagaaactaatcacagccaagtgcctatgctttgttccactggctgtggattttatggaaaccctcgtacaaatggcatgtgttcagtatgctataaagaacatcttcaaagacagaatagtagtaatggtagaataagcccacctgcaacctctgtcagtagtctgtctgaatctttaccagttcaatgcacagatggcagtgtgccagaagcccagtcagcattagactctacatcttcatctatgcagcccagccctgtatcaaatcagtcacttttatcagaatctgtagcatcttctcaattggacagtacatctgtggacaaagcagtacctgaaacagaagatgtgcaggcttcagtatcagacacagcacagcagccatctgaagagcaaagcaagtctcttgaaaaaccgaaacaaaaaaagaatcgctgtttcatgtgcaggaagaaagtgggacttactgggtttgaatgccggtgtggaaatgtttactgtggtgtacaccgttactcagatgtacacaattgctcttacaattacaaagccgatgctgctgagaaaatcagaaaagaaaatccagtagttgttggtgaaaagatccaaaagatttgaactcctgctggaatacaaaattcttgagcatctgcaaactaaaaattgacttgaggttttttttttcctagtcattgggaatgtagagcagtgtatcttgcatgtcatcggaagaatagattttggttttggttttgttttgaaaatgactctgaacatttatttccattgcaatttctgtggctgaggagacttaaactttacaagtattatccttttaagatcattttaattttagttgagtgcagagggcttttataacaaacgtgcagaaattttggagggctgtgatttttccagtattaaacatgcatgcattaatcttgcagtttattttctcattgtgtatgtatatatcgcttttctctgcagcacgatttctcttttgataatgccctttagggcacaactagttatcagtaactgaatgtatcttaatcattatggctgcttctgttttttcattaacaaaggttattcatatgttagcatatagtttctttgcacccactatttatgtctgaatcatttgtcacaagagagtgtgtgctgatgagattgtaagtttgtgtgtttaaacttttttttgagcgagggaagaaaaagctgtatgcatttcattgctgtctacaggtttctttcagattatgttcatgggtttgtgtgtatacaatatgaagaatgatctgaagtaattgtgctgtatttatgtttattcaccagtctttgattaaataaaaaggaaaaccagaaaaaaaagatatcactcagcataatgaatcga

SEQ ID NO: 386840 - DNA, 1634 bp, Homo sapiens
aaaattttaggtggttaaaatgtggtacgtaaattttatatgtctcaactctgtttcatgttaaatgtgttacagaatgaatctgaagtctgctgcagtaaaacacagaaggctttaaaatgttttcttgcataaaattcaaaacttttaagtagctgcttatgagaatagggaaggcagaaagctaatgtctgtctcaagatacaggacagctgtttgctcatcaacctcaactgtgtgtgcaactgaggaacatggctcaagaaactaatcacagccaagtgcctatgctttgttccactggctgtggattttatggaaaccctcgtacaaatggcatgtgttcagtatgctataaagaacatcttcaaagacagaatagtagtaatggtagaataagcccacctgcaacctctgtcagtagtctgtctgaatctttaccagttcaatgcacagatggcagtgtgccagaagcccagtcagcattagactctacatcttcatctatgcagcccagccctgtatcaaatcagtcacttttatcagaatctgtagcatcttctcaattggacagtacatctgtggacaaagcagtacctgaaacagaagatgtgcaggcttcagtatcagacacagcacagcagccatctgaagagcaaagcaagtctcttgaaaaaccgaaacaaaaaaagaatcgctgtttcatgtgcaggaagaaagtgggacttactgggtttgaatgccggtgtggaaatgtttactgtggtgtacaccgttactcagatgtacacaattgctcttacaattacaaagccgatgctgctgagaaaatcagaaaagaaaatccagtagttgttggtgaaaagatccaaaagatttgaactcctgctggaatacaaaattcttgagcatctgcaaactaaaaattgacttgaggttttttttttcctagtcattgggaatgtagagcagtgtatcttgcatgtcatcggaagaatagattttggttttggttttgttttgaaaatgactctgaacatttatttccattgcaatttctgtggctgaggagacttaaactttacaagtattatccttttaagatcattttaattttagttgagtgcagagggcttttataacaaacgtgcagaaattttggagggctgtgatttttccagtattaaacatgcatgcattaatcttgcagtttattttctcattgtgtatgtatatatcgcttttctctgcagcacgatttctcttttgataatgccctttagggcacaactagttatcagtaactgaatgtatcttaatcattatggctgcttctgttttttcattaacaaaggttattcatatgttagcatatagtttctttgcacccactatttatgtctgaatcatttgtcacaagagagtgtgtgctgatgagattgtaagtttgtgtgtttaaacttttttttgagcgagggaagaaaaagctgtatgcatttcattgctgtctacaggtttctttcagattatgttcatgggtttgtgtgtatacaatatgaagaatgatctgaagtaattgtgctgtatttatgtttattcaccagtctttgattaaataaaaaggaaaaccagaa

SEQ ID NO: 386841 - DNA, 2124 bp, Homo sapiens
acgcgcgccgccccgagcgggttgcgagcggttggctggcgggggtcggaagggccccgggcacactggggcgcgtcagttccccgcctcctccgagtctcaggtcctcttcgggatgtttttccacctgcggcgtttttcagaaaccagccggaggcagcccggtgtctccaactcctgactggcaccgggaagggaattggtctctttttttcctgcttgggtttagcttgcttaggattctaaattttttgtctgcttttttgaaatagttatatttaagttttagctacctaaaaaagtatgaaagaatattgtgtttgaaatctttttaacttggtttttaagtcacgtgctaactatcctacacagttgggacgctatgatttaccttcacatctcggaagttgtaaccagttgtgaggaagttaggaccttggggttacctaaagataatttatattaagttgttgggccataaaaactgggcagaattggccacgcgcggtgactcaacgcctgtaatcccagcactttgggaggccgacgcggactaatcacgaggaatgaatctgaagtctgctgcagtaaaacacagaaggctttaaaatgttttcttgcataaaattcaaaacttttaagtagctgcttatgagaatagggaaggcagaaagctaatgtctgtctcaagatacaggacagctgtttgctcatcaacctcaactgtgtgtgcaactgaggaacatggctcaagaaactaatcacagccaagtgcctatgctttgttccactggctgtggattttatggaaaccctcgtacaaatggcatgtgttcagtatgctataaagaacatcttcaaagacagaatagtagtaatggtagaataagcccacctgcaacctctgtcagtagtctgtctgaatctttaccagttcaatgcacagatggcagtgtgccagaagcccagtcagcattagactctacatcttcatctatgcagcccagccctgtatcaaatcagtcacttttatcagaatctgtagcatcttctcaattggacagtacatctgtggacaaagcagtacctgaaacagaagatgtgcaggcttcagtatcagacacagcacagcagccatctgaagagcaaagcaagtctcttgaaaaaccgaaacaaaaaaagaatcgctgtttcatgtgcaggaagaaagtgggacttactgggtttgaatgccggtgtggaaatgtttactgtggtgtacaccgttactcagatgtacacaattgctcttacaattacaaagccgatgctgctgagaaaatcagaaaagaaaatccagtagttgttggtgaaaagatccaaaagatttgaactcctgctggaatacaaaattcttgagcatctgcaaactaaaaattgacttgaggttttttttttcctagtcattgggaatgtagagcagtgtatcttgcatgtcatcggaagaatagattttggttttggttttgttttgaaaatgactctgaacatttatttccattgcaatttctgtggctgaggagacttaaactttacaagtattatccttttaagatcattttaattttagttgagtgcagagggcttttataacaaacgtgcagaaattttggagggctgtgatttttccagtattaaacatgcatgcattaatcttgcagtttattttctcattgtgtatgtatatatcgcttttctctgcagcacgatttctcttttgataatgccctttagggcacaactagttatcagtaactgaatgtatcttaatcattatggctgcttctgttttttcattaacaaaggttattcatatgttagcatatagtttctttgcacccactatttatgtctgaatcatttgtcacaagagagtgtgtgctgatgagattgtaagtttgtgtgtttaaacttttttttgagcgagggaagaaaaagctgtatgcatttcattgctgtctacaggtttctttcagattatgttcatgggtttgtgtgtatacaatatgaagaatgatctgaagtaattgtgctgtatttatgtttattcaccagtctttgattaaataaaaaggaaaaccagaa

SEQ ID NO: 386842 - DNA, 1641 bp, Homo sapiens
ggagggcggccggacggcgcagcagatacacagatacttaccatggtgtattactctcttcgtctccagacctataaaaaagaatgaatctgaagtctgctgcagtaaaacacagaaggctttaaaatgttttcttgcataaaattcaaaacttttaagtagctgcttatgagaatagggaaggcagaaagctaatgtctgtctcaagatacaggacagctgtttgctcatcaacctcaactgtgtgtgcaactgaggaacatggctcaagaaactaatcacagccaagtgcctatgctttgttccactggctgtggattttatggaaaccctcgtacaaatggcatgtgttcagtatgctataaagaacatcttcaaagacagaatagtagtaatggtagaataagcccacctgcaacctctgtcagtagtctgtctgaatctttaccagttcaatgcacagatggcagtgtgccagaagcccagtcagcattagactctacatcttcatctatgcagcccagccctgtatcaaatcagtcacttttatcagaatctgtagcatcttctcaattggacagtacatctgtggacaaagcagtacctgaaacagaagatgtgcaggcttcagtatcagacacagcacagcagccatctgaagagcaaagcaagtctcttgaaaaaccgaaacaaaaaaagaatcgctgtttcatgtgcaggaagaaagtgggacttactgggtttgaatgccggtgtggaaatgtttactgtggtgtacaccgttactcagatgtacacaattgctcttacaattacaaagccgatgctgctgagaaaatcagaaaagaaaatccagtagttgttggtgaaaagatccaaaagatttgaactcctgctggaatacaaaattcttgagcatctgcaaactaaaaattgacttgaggttttttttttcctagtcattgggaatgtagagcagtgtatcttgcatgtcatcggaagaatagattttggttttggttttgttttgaaaatgactctgaacatttatttccattgcaatttctgtggctgaggagacttaaactttacaagtattatccttttaagatcattttaattttagttgagtgcagagggcttttataacaaacgtgcagaaattttggagggctgtgatttttccagtattaaacatgcatgcattaatcttgcagtttattttctcattgtgtatgtatatatcgcttttctctgcagcacgatttctcttttgataatgccctttagggcacaactagttatcagtaactgaatgtatcttaatcattatggctgcttctgttttttcattaacaaaggttattcatatgttagcatatagtttctttgcacccactatttatgtctgaatcatttgtcacaagagagtgtgtgctgatgagattgtaagtttgtgtgtttaaacttttttttgagcgagggaagaaaaagctgtatgcatttcattgctgtctacaggtttctttcagattatgttcatgggtttgtgtgtatacaatatgaagaatgatctgaagtaattgtgctgtatttatgtttattcaccagtctttgattaaataaaaaggaaaaccagaa

SEQ ID NO: 386843 - DNA, 2156 bp, Homo sapiens
acgcgcgccgccccgagcgggttgcgagcggttggctggcgggggtcggaagggccccgggcacactggggcgcgtcagttccccgcctcctccgagtctcaggtcctcttcgggatgtttttccacctgcggcgtttttcagaaaccagccggaggcagcccggtgtctccaactcctgactggcaccgggaagggaattggtctctttttttcctgcttgggtttagcttgcttaggattctaaattttttgtctgcttttttgaaatagttatatttaagttttagctacctaaaaaagtatgaaagaatattgtgtttgaaatctttttaacttggtttttaagtcacgtgctaactatcctacacagttgggacgctatgatttaccttcacatctcggaagttgtaaccagttgtgaggaagttaggaccttggggttacctaaagataatttatattaagttgttgggccataaaaactgggcagaattggccacgcgcggtgactcaacgcctgtaatcccagcactttgggaggccgacgcggactaatcacgaggtcaggagatcgagaccatcctggccaacatggaatgaatctgaagtctgctgcagtaaaacacagaaggctttaaaatgttttcttgcataaaattcaaaacttttaagtagctgcttatgagaatagggaaggcagaaagctaatgtctgtctcaagatacaggacagctgtttgctcatcaacctcaactgtgtgtgcaactgaggaacatggctcaagaaactaatcacagccaagtgcctatgctttgttccactggctgtggattttatggaaaccctcgtacaaatggcatgtgttcagtatgctataaagaacatcttcaaagacagaatagtagtaatggtagaataagcccacctgcaacctctgtcagtagtctgtctgaatctttaccagttcaatgcacagatggcagtgtgccagaagcccagtcagcattagactctacatcttcatctatgcagcccagccctgtatcaaatcagtcacttttatcagaatctgtagcatcttctcaattggacagtacatctgtggacaaagcagtacctgaaacagaagatgtgcaggcttcagtatcagacacagcacagcagccatctgaagagcaaagcaagtctcttgaaaaaccgaaacaaaaaaagaatcgctgtttcatgtgcaggaagaaagtgggacttactgggtttgaatgccggtgtggaaatgtttactgtggtgtacaccgttactcagatgtacacaattgctcttacaattacaaagccgatgctgctgagaaaatcagaaaagaaaatccagtagttgttggtgaaaagatccaaaagatttgaactcctgctggaatacaaaattcttgagcatctgcaaactaaaaattgacttgaggttttttttttcctagtcattgggaatgtagagcagtgtatcttgcatgtcatcggaagaatagattttggttttggttttgttttgaaaatgactctgaacatttatttccattgcaatttctgtggctgaggagacttaaactttacaagtattatccttttaagatcattttaattttagttgagtgcagagggcttttataacaaacgtgcagaaattttggagggctgtgatttttccagtattaaacatgcatgcattaatcttgcagtttattttctcattgtgtatgtatatatcgcttttctctgcagcacgatttctcttttgataatgccctttagggcacaactagttatcagtaactgaatgtatcttaatcattatggctgcttctgttttttcattaacaaaggttattcatatgttagcatatagtttctttgcacccactatttatgtctgaatcatttgtcacaagagagtgtgtgctgatgagattgtaagtttgtgtgtttaaacttttttttgagcgagggaagaaaaagctgtatgcatttcattgctgtctacaggtttctttcagattatgttcatgggtttgtgtgtatacaatatgaagaatgatctgaagtaattgtgctgtatttatgtttattcaccagtctttgattaaataaaaaggaaaaccagaa

SEQ ID NO: 386844 - DNA, 1755 bp, Homo sapiens
cgccggtaataattagcgggcgggcggggcccgcgcgtcagccgcgggagccggccaatccagtggctctcctccgcggtcgcgtcataggccgaacaaccaaacagaaaagtttaataaacagcggacggaggggccggcggtggcggagccggagcaagcaggggttcggcggcattacctgtacccattcaccggcggctaccggcggcggcgcgcagcgtgtcaggcggagagacccgccgccaggaatgaatctgaagtctgctgcagtaaaacacagaaggctttaaaatgttttcttgcataaaattctctcaagatacaggacagctgtttgctcatcaacctcaactgtgtgtgcaactgaggaacatggctcaagaaactaatcacagccaagtgcctatgctttgttccactggctgtggattttatggaaaccctcgtacaaatggcatgtgttcagtatgctataaagaacatcttcaaagacagaatagtagtaatggtagaataagcccacctgcaacctctgtcagtagtctgtctgaatctttaccagttcaatgcacagatggcagtgtgccagaagcccagtcagcattagactctacatcttcatctatgcagcccagccctgtatcaaatcagtcacttttatcagaatctgtagcatcttctcaattggacagtacatctgtggacaaagcagtacctgaaacagaagatgtgcaggcttcagtatcagacacagcacagcagccatctgaagagcaaagcaagtctcttgaaaaaccgaaacaaaaaaagaatcgctgtttcatgtgcaggaagaaagtgggacttactgggtttgaatgccggtgtggaaatgtttactgtggtgtacaccgttactcagatgtacacaattgctcttacaattacaaagccgatgctgctgagaaaatcagaaaagaaaatccagtagttgttggtgaaaagatccaaaagatttgaactcctgctggaatacaaaattcttgagcatctgcaaactaaaaattgacttgaggttttttttttcctagtcattgggaatgtagagcagtgtatcttgcatgtcatcggaagaatagattttggttttggttttgttttgaaaatgactctgaacatttatttccattgcaatttctgtggctgaggagacttaaactttacaagtattatccttttaagatcattttaattttagttgagtgcagagggcttttataacaaacgtgcagaaattttggagggctgtgatttttccagtattaaacatgcatgcattaatcttgcagtttattttctcattgtgtatgtatatatcgcttttctctgcagcacgatttctcttttgataatgccctttagggcacaactagttatcagtaactgaatgtatcttaatcattatggctgcttctgttttttcattaacaaaggttattcatatgttagcatatagtttctttgcacccactatttatgtctgaatcatttgtcacaagagagtgtgtgctgatgagattgtaagtttgtgtgtttaaacttttttttgagcgagggaagaaaaagctgtatgcatttcattgctgtctacaggtttctttcagattatgttcatgggtttgtgtgtatacaatatgaagaatgatctgaagtaattgtgctgtatttatgtttattcaccagtctttgattaaataaaaaggaaaaccagaa

SEQ ID NO: 386845 - DNA, 1522 bp, Homo sapiens
gaagagagaaatttaaaattaaaaattttccatatttctatcacaaatattggtaatttgacaacatgtaatttgattgtcgtcttaataaaatttaatgttattgctaccaaatagagataaaggtgtgcaactgaggaacatggctcaagaaactaatcacagccaagtgcctatgctttgttccactggctgtggattttatggaaaccctcgtacaaatggcatgtgttcagtatgctataaagaacatcttcaaagacagaatagtagtaatggtagaataagcccacctgcaacctctgtcagtagtctgtctgaatctttaccagttcaatgcacagatggcagtgtgccagaagcccagtcagcattagactctacatcttcatctatgcagcccagccctgtatcaaatcagtcacttttatcagaatctgtagcatcttctcaattggacagtacatctgtggacaaagcagtacctgaaacagaagatgtgcaggcttcagtatcagacacagcacagcagccatctgaagagcaaagcaagtctcttgaaaaaccgaaacaaaaaaagaatcgctgtttcatgtgcaggaagaaagtgggacttactgggtttgaatgccggtgtggaaatgtttactgtggtgtacaccgttactcagatgtacacaattgctcttacaattacaaagccgatgctgctgagaaaatcagaaaagaaaatccagtagttgttggtgaaaagatccaaaagatttgaactcctgctggaatacaaaattcttgagcatctgcaaactaaaaattgacttgaggttttttttttcctagtcattgggaatgtagagcagtgtatcttgcatgtcatcggaagaatagattttggttttggttttgttttgaaaatgactctgaacatttatttccattgcaatttctgtggctgaggagacttaaactttacaagtattatccttttaagatcattttaattttagttgagtgcagagggcttttataacaaacgtgcagaaattttggagggctgtgatttttccagtattaaacatgcatgcattaatcttgcagtttattttctcattgtgtatgtatatatcgcttttctctgcagcacgatttctcttttgataatgccctttagggcacaactagttatcagtaactgaatgtatcttaatcattatggctgcttctgttttttcattaacaaaggttattcatatgttagcatatagtttctttgcacccactatttatgtctgaatcatttgtcacaagagagtgtgtgctgatgagattgtaagtttgtgtgtttaaacttttttttgagcgagggaagaaaaagctgtatgcatttcattgctgtctacaggtttctttcagattatgttcatgggtttgtgtgtatacaatatgaagaatgatctgaagtaattgtgctgtatttatgtttattcaccagtctttgattaaataaaaaggaaaaccagaa

SEQ ID NO: 386846 - DNA, 1436 bp, Homo sapiens
cgagagccggaagcggagggcggccggccggcgcagcaggtgtgcaactgaggaacatggctcaagaaactaatcacagccaagtgcctatgctttgttccactggctgtggattttatggaaaccctcgtacaaatggcatgtgttcagtatgctataaagaacatcttcaaagacagaatagtagtaatggtagaataagcccacctgcaacctctgtcagtagtctgtctgaatctttaccagttcaatgcacagatggcagtgtgccagaagcccagtcagcattagactctacatcttcatctatgcagcccagccctgtatcaaatcagtcacttttatcagaatctgtagcatcttctcaattggacagtacatctgtggacaaagcagtacctgaaacagaagatgtgcaggcttcagtatcagacacagcacagcagccatctgaagagcaaagcaagtctcttgaaaaaccgaaacaaaaaaagaatcgctgtttcatgtgcaggaagaaagtgggacttactgggtttgaatgccggtgtggaaatgtttactgtggtgtacaccgttactcagatgtacacaattgctcttacaattacaaagccgatgctgctgagaaaatcagaaaagaaaatccagtagttgttggtgaaaagatccaaaagatttgaactcctgctggaatacaaaattcttgagcatctgcaaactaaaaattgacttgaggttttttttttcctagtcattgggaatgtagagcagtgtatcttgcatgtcatcggaagaatagattttggttttggttttgttttgaaaatgactctgaacatttatttccattgcaatttctgtggctgaggagacttaaactttacaagtattatccttttaagatcattttaattttagttgagtgcagagggcttttataacaaacgtgcagaaattttggagggctgtgatttttccagtattaaacatgcatgcattaatcttgcagtttattttctcattgtgtatgtatatatcgcttttctctgcagcacgatttctcttttgataatgccctttagggcacaactagttatcagtaactgaatgtatcttaatcattatggctgcttctgttttttcattaacaaaggttattcatatgttagcatatagtttctttgcacccactatttatgtctgaatcatttgtcacaagagagtgtgtgctgatgagattgtaagtttgtgtgtttaaacttttttttgagcgagggaagaaaaagctgtatgcatttcattgctgtctacaggtttctttcagattatgttcatgggtttgtgtgtatacaatatgaagaatgatctgaagtaattgtgctgtatttatgtttattcaccagtctttgattaaataaaaaggaaaaccagaa

SEQ ID NO: 386847 - DNA, 1417 bp, Homo sapiens
gggtattcaggtttggttgctttggagtacagcttcaagtgaagttaatctgaggtgaagcaaacagaaaattgtggaggttttgttgtgtggattttatggaaaccctcgtacaaatggcatgtgttcagtatgctataaagaacatcttcaaagacagaatagtagtaatggtagaataagcccacctgcaacctctgtcagtagtctgtctgaatctttaccagttcaatgcacagatggcagtgtgccagaagcccagtcagcattagactctacatcttcatctatgcagcccagccctgtatcaaatcagtcacttttatcagaatctgtagcatcttctcaattggacagtacatctgtggacaaagcagtacctgaaacagaagatgtgcaggcttcagtatcagacacagcacagcagccatctgaagagcaaagcaagtctcttgaaaaaccgaaacaaaaaaagaatcgctgtttcatgtgcaggaagaaagtgggacttactgggtttgaatgccggtgtggaaatgtttactgtggtgtacaccgttactcagatgtacacaattgctcttacaattacaaagccgatgctgctgagaaaatcagaaaagaaaatccagtagttgttggtgaaaagatccaaaagatttgaactcctgctggaatacaaaattcttgagcatctgcaaactaaaaattgacttgaggttttttttttcctagtcattgggaatgtagagcagtgtatcttgcatgtcatcggaagaatagattttggttttggttttgttttgaaaatgactctgaacatttatttccattgcaatttctgtggctgaggagacttaaactttacaagtattatccttttaagatcattttaattttagttgagtgcagagggcttttataacaaacgtgcagaaattttggagggctgtgatttttccagtattaaacatgcatgcattaatcttgcagtttattttctcattgtgtatgtatatatcgcttttctctgcagcacgatttctcttttgataatgccctttagggcacaactagttatcagtaactgaatgtatcttaatcattatggctgcttctgttttttcattaacaaaggttattcatatgttagcatatagtttctttgcacccactatttatgtctgaatcatttgtcacaagagagtgtgtgctgatgagattgtaagtttgtgtgtttaaacttttttttgagcgagggaagaaaaagctgtatgcatttcattgctgtctacaggtttctttcagattatgttcatgggtttgtgtgtatacaatatgaagaatgatctgaagtaattgtgctgtatttatgtttattcaccagtctttgattaaataaaaaggaaaaccagaa

SEQ ID NO: 386848 - DNA, 1450 bp, Homo sapiens
gggtattcaggtttggttgctttggagtacagcttcaagtgaagttaatctgaggtgaagcaaacagaaaattgtggaggttttgttggtgtgcaactgaggaacatggctcaagaaactaatcacagccaagtgcctatgctttgttccactggctgtggattttatggaaaccctcgtacaaatggcatgtgttcagtatgctataaagaacatcttcaaagacagaatagtagtaatggtagaataagcccacctggttcaatgcacagatggcagtgtgccagaagcccagtcagcattagactctacatcttcatctatgcagcccagccctgtatcaaatcagtcacttttatcagaatctgtagcatcttctcaattggacagtacatctgtggacaaagcagtacctgaaacagaagatgtgcaggcttcagtatcagacacagcacagcagccatctgaagagcaaagcaagtctcttgaaaaaccgaaacaaaaaaagaatcgctgtttcatgtgcaggaagaaagtgggacttactgggtttgaatgccggtgtggaaatgtttactgtggtgtacaccgttactcagatgtacacaattgctcttacaattacaaagccgatgctgctgagaaaatcagaaaagaaaatccagtagttgttggtgaaaagatccaaaagatttgaactcctgctggaatacaaaattcttgagcatctgcaaactaaaaattgacttgaggttttttttttcctagtcattgggaatgtagagcagtgtatcttgcatgtcatcggaagaatagattttggttttggttttgttttgaaaatgactctgaacatttatttccattgcaatttctgtggctgaggagacttaaactttacaagtattatccttttaagatcattttaattttagttgagtgcagagggcttttataacaaacgtgcagaaattttggagggctgtgatttttccagtattaaacatgcatgcattaatcttgcagtttattttctcattgtgtatgtatatatcgcttttctctgcagcacgatttctcttttgataatgccctttagggcacaactagttatcagtaactgaatgtatcttaatcattatggctgcttctgttttttcattaacaaaggttattcatatgttagcatatagtttctttgcacccactatttatgtctgaatcatttgtcacaagagagtgtgtgctgatgagattgtaagtttgtgtgtttaaacttttttttgagcgagggaagaaaaagctgtatgcatttcattgctgtctacaggtttctttcagattatgttcatgggtttgtgtgtatacaatatgaagaatgatctgaagtaattgtgctgtatttatgtttattcaccagtctttgattaaataaaaaggaaaaccagaa

SEQ ID NO: 386849 - DNA, 1420 bp, Homo sapiens
cgccggtaataattagcgggcgggcggggcccgcgcgtcagccgcgggagccggccaatccagtggctctcctccgcggtcgcgtcataggccgaacaaccaaacagaaaagtttaataaacagcggacggaggggccggcggtggcggagccggagcaagcaggggttcggcggcattacctgtacccattcaccggcggctaccggcggcggcgcgcagcgtgtcaggcggagagacccgccgccaggtgtgcaactgaggaacatggctcaagaaactaatcacagccaagtgcctatgctttgttccactggctgtggattttatggaaaccctcgtacaaatggcatgtgttcagtatgctataaagaacatcttcaaagacagaatagtagtaatggtagaataagcccacctgcaacctctgtcagtagtctgtctgaatctttaccagttcaatgcacagatggcagtgtgccagaagcccagtcagcattagactctacatcttcatctatgcagcccagccctgtatcaaatcagtcacttttatcagaatctgtagcatcttctcaattggacagtacatctgtggacaaagcagtacctgaaacagaagatgtgcaggcttcagtatcagacacagcacagcagccatctgaagagcaaagcaagtctcttgaaaaaccgaaacaaaaaaagaatcgctgtttcatgtgcaggaagaaagtgggacttactgggtttgaatgccggtgtggaaatgtttactgtggtgtacaccgttactcagatgtacacaattgctcttacaattacaaagccgatgctgctgagaaaatcagaaaagaaaatccagtagttgttggtgaaaagatccaaaagatttgaactcctgctggaatacaaaattcttgagcatctgcaaactaaaaattgacttgaggttttttttttcctagtcattgggaatgtagagcagtgtatcttgcatgtcatcggaagaatagattttggttttggttttgttttgaaaatgactctgaacatttatttccattgcaatttctgtggctgaggagacttaaactttacaagtattatccttttaagatcattttaattttagttgagtgcagagggcttttataacaaacgtgcagaaattttggagggctgtgatttttccagtattaaacatgcatgcattaatcttgcagtttattttctcattgtgtatgtatatatcgcttttctctgcagcacgatttctcttttgataatgccctttagggcacaactagttatcagtaactgaatgtatcttaatcattatggctgcttctgttttttcattaacaaaggttattcatatgttagcatatagtttctttgttaatgaaaaaaaagggcgcccg

SEQ ID NO: 386850 - DNA, 1155 bp, Homo sapiens
ctactcctgaagtcctttggaagcatgttaagtgaaatccctgtatcaaatcagtcacttttatcagaatctgtagcatcttctcaattggacagtacatctgtggacaaagcagtacctgaaacagaagatgtgcaggcttcagtatcagacacagcacagcagccatctgaagagcaaagcaagtctcttgaaaaaccgaaacaaaaaaagaatcgctgtttcatgtgcaggaagaaagtgggacttactgggtttgaatgccggtgtggaaatgtttactgtggtgtacaccgttactcagatgtacacaattgctcttacaattacaaagccgatgctgctgagaaaatcagaaaagaaaatccagtagttgttggtgaaaagatccaaaagatttgaactcctgctggaatacaaaattcttgagcatctgcaaactaaaaattgacttgaggttttttttttcctagtcattgggaatgtagagcagtgtatcttgcatgtcatcggaagaatagattttggttttggttttgttttgaaaatgactctgaacatttatttccattgcaatttctgtggctgaggagacttaaactttacaagtattatccttttaagatcattttaattttagttgagtgcagagggcttttataacaaacgtgcagaaattttggagggctgtgatttttccagtattaaacatgcatgcattaatcttgcagtttattttctcattgtgtatgtatatatcgcttttctctgcagcacgatttctcttttgataatgccctttagggcacaactagttatcagtaactgaatgtatcttaatcattatggctgcttctgttttttcattaacaaaggttattcatatgttagcatatagtttctttgcacccactatttatgtctgaatcatttgtcacaagagagtgtgtgctgatgagattgtaagtttgtgtgtttaaacttttttttgagcgagggaagaaaaagctgtatgcatttcattgctgtctacaggtttctttcagattatgttcatgggtttgtgtgtatacaatatgaagaatgatctgaagtaattgtgctgtatttatgtttattcaccagtctttgattaaataaaaaggaaaaccagaa

SEQ ID NO: 386851 - DNA, 1920 bp, Homo sapiens
gtcaaaaaaaaaaaggaaaaaagatagcctttctaaatctcacaaaccctcagacttcaagattagaagggtgagatttagtaattttcatcttgtccagtctgtctaatacagtgctgtttgcttcatttttcattcattattatgaagttacaaatatgtctttgaagttaaaaatgtggcaatggaggttaacatcaaatattaatgtttaaaatattgattcctgtgctccatttctaacaattgtatcataccataaaattctaatttgggggagcaggaccagttttatttaaagactggctgcacccattacatctcgattttggttttaactccaggcattttcttaaaattaagtagcatttattgtgtgttttaccatatgttcagaattaaattccttcctcatttaatccttacttattattattccaaaattacagatgcagaaactcaagctcagagaggctaatttgccttcattagtaagtagattgacactgaggcaggcaggctctagatcccgtgctcttcacctctcaactgcagtacagttcacatctccatgggaggttagcagagaaaagcaaatatcgaagctgtgttcttgttaacagttctttcagaggtattatttgatctttcttaaataaatgccaagactgccttctgacagtaggcttattctcacatcgtagtgtttggatttgaaaaatgttttacattttcaacctagcaactgtgtttttgttaagaagtaattgttgccatatcacaggtgaagaaacaagctcagaggactttctctagggcaaacctgcgtttgtagataggaataagaaatgaagctctcaggtagtgaataagaatgtagtttgtgagacagtgtatttagaatgattctttagtttacattgctgccctaaatatattgtgctgttcagtattaattatgccaaagaccttaatatttcatccttcaactcatgtatgtgtattactccatttccagggtttgaatgccggtgtggaaatgtttactgtggtgtacaccgttactcagatgtacacaattgctcttacaattacaaagccgatgctgctgagaaaatcagaaaagaaaatccagtagttgttggtgaaaagatccaaaagatttgaactcctgctggaatacaaaattcttgagcatctgcaaactaaaaattgacttgaggttttttttttcctagtcattgggaatgtagagcagtgtatcttgcatgtcatcggaagaatagattttggttttggttttgttttgaaaatgactctgaacatttatttccattgcaatttctgtggctgaggagacttaaactttacaagtattatccttttaagatcattttaattttagttgagtgcagagggcttttataacaaacgtgcagaaattttggagggctgtgatttttccagtattaaacatgcatgcattaatcttgcagtttattttctcattgtgtatgtatatatcgcttttctctgcagcacgatttctcttttgataatgccctttagggcacaactagttatcagtaactgaatgtatcttaatcattatggctgcttctgttttttcattaacaaaggttattcatatgttagcatatagtttctttgcacccactatttatgtctgaatcatttgtcacaagagagtgtgtgctgatgagattgtaagtttgtgtgtttaaacttttttttgagcgagggaagaaaaagctgtatgcatttcattgctgtctacaggtttctttcagattatgttcatgggtttgtgtgtatacaatatgaagaatgatctgaagtaattgtgctgtatttatgtttattcaccagtctttgattaaataaaaaggaaaaccagaa

SEQ ID NO: 386852 - DNA, 947 bp, Homo sapiens
  misc_feature (908)..(908): n is a, c, g, or t
  misc_feature (916)..(916): n is a, c, g, or t
  misc_feature (920)..(920): n is a, c, g, or t
cgccggtaataattagcgggcgggcggggcccgcgcgtcagccgcgggagccggccaatccagtggctctcctccgcggtcgcgtcataggccgaacaaccaaacagaaaagtttaataaacagcggacggaggggccggcggtggcggagccggagcaagcaggggttcggcggcattacctgtacccattcaccggcggctaccggcggcggcgcgcagcgtgtcaggcggagagacccgccgccaggaatgaatctgaagtctgctgcagtaaaacacagaaggctttaaaatgttttcttgcataaaattcaaaacttttaagtagctgcttatgagaatagggaaggcagaaagctaatgtctgtctcaagatacaggacagctgtttgctcatcaacctcaactgtgtgtgcaactgaggaacatggctcaagaaactaatcacagccaagtgcctatgctttgttccactggctgtggattttatggaaaccctcgtacaaatggcatgtgttcagtatgctataaagaacatcttcaaagacagaatagtagtaatggtagaataagcccacctgcaacctctgtcagtagtctgtctgaatctttaccagttcaatgcacagatggcagtgtgccagaagcccagtcagcattagactctacatcttcatctatgcagcccagccctgtatcaaatcagtcacttttatcagaatctgtagcatcttctcaattggacagtacatctgtggacaaagcagtacctgaaacagaagatgtgcaggcttcagtatcagacacagcacagcagccatctgaagagcaaagcaagtctcttgaaaaaccgaaacaaaaaaagaatcgctgtttcatgtgcaggaagaaagtgggacttactgngtttgatnccgntgtggaagagattagagacagcaaatc

SEQ ID NO: 386853 - DNA, 1004 bp, Homo sapiens
cgccggtaataattagcgggcgggcggggcccgcgcgtcagccgcgggagccggccaatccagtggctctcctccgcggtcgcgtcataggccgaacaaccaaacagaaaagtttaataaacagcggacggaggggccggcggtggcggagccggagcaagcaggggttcggcggcattacctgtacccattcaccggcggctaccggcggcggcgcgcagcgtgtcaggcggagagacccgccgccaggaatgaatctgaagtctgctgcagtaaaacacagaaggctttaaaatgttttcttgcataaaattcaaaacttttaagtagctgcttatgagaatagggaaggcagaaagctaatgtctgtctcaagatacaggacagctgtttgctcatcaacctcaactgtgtgtgcaactgaggaacatggctcaagaaactaatcacagccaagtgcctatgctttgttccactggctgtggattttatggaaaccctcgtacaaatggcatgtgttcagtatgctataaagaacatcttcaaagacagaatagtagtaatggtagaataagcccacctgcaacctctgtcagtagtctgtctgaatctttaccaccctgtatcaaatcagtcacttttatcagaatctgtagcatcttctcaattggacagtacatctgtggacaaagcagtacctgaaacagaagatgtgcaggcttcagtatcagacacagcacagcagccatctgaagagcaaagcaagtctcttgaaaaaccgaaacaaaaaaagaatcgctgtttcatgtgcaggaagaaagtgggacttactggtaaggacctaaatcaaatgtttaaaattaaaatgatgttttataataatgcatagcttactgttgttgacttcaattaagattgttcctgttcccttgagagttaatattggatatacttcaccttctgaattttcttaaggaaataaaaatagctttgattatacacct

SEQ ID NO: 386854 - DNA, 1485 bp, Homo sapiens
gggtattcaggtttggttgctttggagtacagcttcaagtgaagttaatctgaggtgaagcaaacagaaaattgtggaggttttgttggtgtgcaactgaggaacatggctcaagaaactaatcacagccaagtgcctatgctttgttccactggctgtggattttatggaaaccctcgtacaaatggcatgtgttcagtatgctataaagaacatcttcaaagacagaatagtagtaatggtagaataagcccacctgcaacctctgtcagtagtctgtctgaatctttaccagttcaatgcacagatggcagtgtgccagaagcccagtcagcattagactctacatcttcatctatgcagcccagccctgtatcaaatcagtcacttttatcagaatctgtagcatcttctcaattggacagtacatctgtggacaaagcagtacctgaaacagaagatgtgcaggcttcagtatcagacacagcacagcagccatctgaagagcaaagcaagtctcttgaaaaaccgaaacaaaaaaagaatcgctgtttcatgtgcaggaagaaagtgggacttactgggtttgaatgccggtgtggaaatgtttactgtggtgtacaccgttactcagatgtacacaattgctcttacaattacaaagccgatgctgctgagaaaatcagaaaagaaaatccagtagttgttggtgaaaagatccaaaagatttgaactcctgctggaatacaaaattcttgagcatctgcaaactaaaaattgacttgaggttttttttttcctagtcattgggaatgtagagcagtgtatcttgcatgtcatcggaagaatagattttggttttggttttgttttgaaaatgactctgaacatttatttccattgcaatttctgtggctgaggagacttaaactttacaagtattatccttttaagatcattttaattttagttgagtgcagagggcttttataacaaacgtgcagaaattttggagggctgtgatttttccagtattaaacatgcatgcattaatcttgcagtttattttctcattgtgtatgtatatatcgcttttctctgcagcacgatttctcttttgataatgccctttagggcacaactagttatcagtaactgaatgtatcttaatcattatggctgcttctgttttttcattaacaaaggttattcatatgttagcatatagtttctttgcacccactatttatgtctgaatcatttgtcacaagagagtgtgtgctgatgagattgtaagtttgtgtgtttaaacttttttttgagcgagggaagaaaaagctgtatgcatttcattgctgtctacaggtttctttcagattatgttcatgggtttgtgtgtatacaatatgaagaatgatctgaagtaattgtgctgtatttatgtttattcaccagtctttgattaaataaaaaggaaaaccagaa

SEQ ID NO: 386855 - DNA, 1655 bp, Homo sapiens
cgccggtaataattagcgggcgggcggggcccgcgcgtcagccgcgggagccggccaatccagtggctctcctccgcggtcgcgtcataggccgaacaaccaaacagaaaagtttaataaacagcggacggaggggccggcggtggcggagccggagcaagcaggggttcggcggcattacctgtacccattcaccggcggctaccggcggcggcgcgcagcgtgtcaggcggagagacccgccgccagatcaaaagacactgacttagctgcttaccagaaggggaacttgggtgtgcaactgaggaacatggctcaagaaactaatcacagccaagtgcctatgctttgttccactggctgtggattttatggaaaccctcgtacaaatggcatgtgttcagtatgctataaagaacatcttcaaagacagaatagtagtaatggtagaataagcccacctggttcaatgcacagatggcagtgtgccagaagcccagtcagcattagactctacatcttcatctatgcagcccagccctgtatcaaatcagtcacttttatcagaatctgtagcatcttctcaattggacagtacatctgtggacaaagcagtacctgaaacagaagatgtgcaggcttcagtatcagacacagcacagcagccatctgaagagcaaagcaagtctcttgaaaaaccgaaacaaaaaaagaatcgctgtttcatgtgcaggaagaaagtgggacttactgggtttgaatgccggtgtggaaatgtttactgtggtgtacaccgttactcagatgtacacaattgctcttacaattacaaagccgatgctgctgagaaaatcagaaaagaaaatccagtagttgttggtgaaaagatccaaaagatttgaactcctgctggaatacaaaattcttgagcatctgcaaactaaaaattgacttgaggttttttttttcctagtcattgggaatgtagagcagtgtatcttgcatgtcatcggaagaatagattttggttttggttttgttttgaaaatgactctgaacatttatttccattgcaatttctgtggctgaggagacttaaactttacaagtattatccttttaagatcattttaattttagttgagtgcagagggcttttataacaaacgtgcagaaattttggagggctgtgatttttccagtattaaacatgcatgcattaatcttgcagtttattttctcattgtgtatgtatatatcgcttttctctgcagcacgatttctcttttgataatgccctttagggcacaactagttatcagtaactgaatgtatcttaatcattatggctgcttctgttttttcattaacaaaggttattcatatgttagcatatagtttctttgcacccactatttatgtctgaatcatttgtcacaagagagtgtgtgctgatgagattgtaagtttgtgtgtttaaacttttttttgagcgagggaagaaaaagctgtatgcatttcattgctgtctacaggtttctttcagattatgttcatgggtttgtgtgtatacaatatgaagaatgatctgaagtaattgtgctgtatttatgtttattcaccagtctttgattaaataaaaaggaaaaccagaa

SEQ ID NO: 386856 - DNA, 801 bp, Homo sapiens
  misc_feature (762)..(762): n is a, c, g, or t
  misc_feature (770)..(770): n is a, c, g, or t
  misc_feature (774)..(774): n is a, c, g, or t
acgcgcgccgccccgagcgggttgcgagcggttggctggcgggggtcggaagggccccgggcacactggggcgcgtcagttccccgcctcctccgagtctcaggaatgaatctgaagtctgctgcagtaaaacacagaaggctttaaaatgttttcttgcataaaattcaaaacttttaagtagctgcttatgagaatagggaaggcagaaagctaatgtctgtctcaagatacaggacagctgtttgctcatcaacctcaactgtgtgtgcaactgaggaacatggctcaagaaactaatcacagccaagtgcctatgctttgttccactggctgtggattttatggaaaccctcgtacaaatggcatgtgttcagtatgctataaagaacatcttcaaagacagaatagtagtaatggtagaataagcccacctgcaacctctgtcagtagtctgtctgaatctttaccagttcaatgcacagatggcagtgtgccagaagcccagtcagcattagactctacatcttcatctatgcagcccagccctgtatcaaatcagtcacttttatcagaatctgtagcatcttctcaattggacagtacatctgtggacaaagcagtacctgaaacagaagatgtgcaggcttcagtatcagacacagcacagcagccatctgaagagcaaagcaagtctcttgaaaaaccgaaacaaaaaaagaatcgctgtttcatgtgcaggaagaaagtgggacttactgngtttgatnccgntgtggaagagattagagacagcaaatc

SEQ ID NO: 386857 - DNA, 1648 bp, Homo sapiens
gggtattcaggtttggttgctttggagtacagcttcaagtgaagttaatctgaggtgaagcaaacagaaaattgtggaggttttgttggaatgaatctgaagtctgctgcagtaaaacacagaaggctttaaaatgttttcttgcataaaattcaaaacttttaagtagctgcttatgagaatagggaaggcagaaagctaatgtctgtctcaagatacaggacagctgtttgctcatcaacctcaactgtgtgtgcaactgaggaacatggctcaagaaactaatcacagccaagtgcctatgctttgttccactggctgtggattttatggaaaccctcgtacaaatggcatgtgttcagtatgctataaagaacatcttcaaagacagaatagtagtaatggtagaataagcccacctgcaacctctgtcagtagtctgtctgaatctttaccagttcaatgcacagatggcagtgtgccagaagcccagtcagcattagactctacatcttcatctatgcagcccagccctgtatcaaatcagtcacttttatcagaatctgtagcatcttctcaattggacagtacatctgtggacaaagcagtacctgaaacagaagatgtgcaggcttcagtatcagacacagcacagcagccatctgaagagcaaagcaagtctcttgaaaaaccgaaacaaaaaaagaatcgctgtttcatgtgcaggaagaaagtgggacttactgggtttgaatgccggtgtggaaatgtttactgtggtgtacaccgttactcagatgtacacaattgctcttacaattacaaagccgatgctgctgagaaaatcagaaaagaaaatccagtagttgttggtgaaaagatccaaaagatttgaactcctgctggaatacaaaattcttgagcatctgcaaactaaaaattgacttgaggttttttttttcctagtcattgggaatgtagagcagtgtatcttgcatgtcatcggaagaatagattttggttttggttttgttttgaaaatgactctgaacatttatttccattgcaatttctgtggctgaggagacttaaactttacaagtattatccttttaagatcattttaattttagttgagtgcagagggcttttataacaaacgtgcagaaattttggagggctgtgatttttccagtattaaacatgcatgcattaatcttgcagtttattttctcattgtgtatgtatatatcgcttttctctgcagcacgatttctcttttgataatgccctttagggcacaactagttatcagtaactgaatgtatcttaatcattatggctgcttctgttttttcattaacaaaggttattcatatgttagcatatagtttctttgcacccactatttatgtctgaatcatttgtcacaagagagtgtgtgctgatgagattgtaagtttgtgtgtttaaacttttttttgagcgagggaagaaaaagctgtatgcatttcattgctgtctacaggtttctttcagattatgttcatgggtttgtgtgtatacaatatgaagaatgatctgaagtaattgtgctgtatttatgtttattcaccagtctttgattaaataaaaaggaaaaccagaa

SEQ ID NO: 386858 - DNA, 1612 bp, Homo sapiens
gaagagagaaatttaaaattaaaaattttccatatttctatcacaaatattggaatgaatctgaagtctgctgcagtaaaacacagaaggctttaaaatgttttcttgcataaaattcaaaacttttaagtagctgcttatgagaatagggaaggcagaaagctaatgtctgtctcaagatacaggacagctgtttgctcatcaacctcaactgtgtgtgcaactgaggaacatggctcaagaaactaatcacagccaagtgcctatgctttgttccactggctgtggattttatggaaaccctcgtacaaatggcatgtgttcagtatgctataaagaacatcttcaaagacagaatagtagtaatggtagaataagcccacctgcaacctctgtcagtagtctgtctgaatctttaccagttcaatgcacagatggcagtgtgccagaagcccagtcagcattagactctacatcttcatctatgcagcccagccctgtatcaaatcagtcacttttatcagaatctgtagcatcttctcaattggacagtacatctgtggacaaagcagtacctgaaacagaagatgtgcaggcttcagtatcagacacagcacagcagccatctgaagagcaaagcaagtctcttgaaaaaccgaaacaaaaaaagaatcgctgtttcatgtgcaggaagaaagtgggacttactgggtttgaatgccggtgtggaaatgtttactgtggtgtacaccgttactcagatgtacacaattgctcttacaattacaaagccgatgctgctgagaaaatcagaaaagaaaatccagtagttgttggtgaaaagatccaaaagatttgaactcctgctggaatacaaaattcttgagcatctgcaaactaaaaattgacttgaggttttttttttcctagtcattgggaatgtagagcagtgtatcttgcatgtcatcggaagaatagattttggttttggttttgttttgaaaatgactctgaacatttatttccattgcaatttctgtggctgaggagacttaaactttacaagtattatccttttaagatcattttaattttagttgagtgcagagggcttttataacaaacgtgcagaaattttggagggctgtgatttttccagtattaaacatgcatgcattaatcttgcagtttattttctcattgtgtatgtatatatcgcttttctctgcagcacgatttctcttttgataatgccctttagggcacaactagttatcagtaactgaatgtatcttaatcattatggctgcttctgttttttcattaacaaaggttattcatatgttagcatatagtttctttgcacccactatttatgtctgaatcatttgtcacaagagagtgtgtgctgatgagattgtaagtttgtgtgtttaaacttttttttgagcgagggaagaaaaagctgtatgcatttcattgctgtctacaggtttctttcagattatgttcatgggtttgtgtgtatacaatatgaagaatgatctgaagtaattgtgctgtatttatgtttattcaccagtctttgattaaataaaaaggaaaaccagaa

SEQ ID NO: 386859 - DNA, 1599 bp, Homo sapiens
cgagagccggaagcggagggcggccggccggcgcagcaggaatgaatctgaagtctgctgcagtaaaacacagaaggctttaaaatgttttcttgcataaaattcaaaacttttaagtagctgcttatgagaatagggaaggcagaaagctaatgtctgtctcaagatacaggacagctgtttgctcatcaacctcaactgtgtgtgcaactgaggaacatggctcaagaaactaatcacagccaagtgcctatgctttgttccactggctgtggattttatggaaaccctcgtacaaatggcatgtgttcagtatgctataaagaacatcttcaaagacagaatagtagtaatggtagaataagcccacctgcaacctctgtcagtagtctgtctgaatctttaccagttcaatgcacagatggcagtgtgccagaagcccagtcagcattagactctacatcttcatctatgcagcccagccctgtatcaaatcagtcacttttatcagaatctgtagcatcttctcaattggacagtacatctgtggacaaagcagtacctgaaacagaagatgtgcaggcttcagtatcagacacagcacagcagccatctgaagagcaaagcaagtctcttgaaaaaccgaaacaaaaaaagaatcgctgtttcatgtgcaggaagaaagtgggacttactgggtttgaatgccggtgtggaaatgtttactgtggtgtacaccgttactcagatgtacacaattgctcttacaattacaaagccgatgctgctgagaaaatcagaaaagaaaatccagtagttgttggtgaaaagatccaaaagatttgaactcctgctggaatacaaaattcttgagcatctgcaaactaaaaattgacttgaggttttttttttcctagtcattgggaatgtagagcagtgtatcttgcatgtcatcggaagaatagattttggttttggttttgttttgaaaatgactctgaacatttatttccattgcaatttctgtggctgaggagacttaaactttacaagtattatccttttaagatcattttaattttagttgagtgcagagggcttttataacaaacgtgcagaaattttggagggctgtgatttttccagtattaaacatgcatgcattaatcttgcagtttattttctcattgtgtatgtatatatcgcttttctctgcagcacgatttctcttttgataatgccctttagggcacaactagttatcagtaactgaatgtatcttaatcattatggctgcttctgttttttcattaacaaaggttattcatatgttagcatatagtttctttgcacccactatttatgtctgaatcatttgtcacaagagagtgtgtgctgatgagattgtaagtttgtgtgtttaaacttttttttgagcgagggaagaaaaagctgtatgcatttcattgctgtctacaggtttctttcagattatgttcatgggtttgtgtgtatacaatatgaagaatgatctgaagtaattgtgctgtatttatgtttattcaccagtctttgattaaataaaaaggaaaaccagaa

SEQ ID NO: 386860 - DNA, 1442 bp, Homo sapiens
gtgagccgtagcaagcagtgggttcggcggcgcgcagcgtgtcaggtgtgcaactgaggaacatggctcaagaaactaatcacagccaagtgcctatgctttgttccactggctgtggattttatggaaaccctcgtacaaatggcatgtgttcagtatgctataaagaacatcttcaaagacagaatagtagtaatggtagaataagcccacctgcaacctctgtcagtagtctgtctgaatctttaccagttcaatgcacagatggcagtgtgccagaagcccagtcagcattagactctacatcttcatctatgcagcccagccctgtatcaaatcagtcacttttatcagaatctgtagcatcttctcaattggacagtacatctgtggacaaagcagtacctgaaacagaagatgtgcaggcttcagtatcagacacagcacagcagccatctgaagagcaaagcaagtctcttgaaaaaccgaaacaaaaaaagaatcgctgtttcatgtgcaggaagaaagtgggacttactgggtttgaatgccggtgtggaaatgtttactgtggtgtacaccgttactcagatgtacacaattgctcttacaattacaaagccgatgctgctgagaaaatcagaaaagaaaatccagtagttgttggtgaaaagatccaaaagatttgaactcctgctggaatacaaaattcttgagcatctgcaaactaaaaattgacttgaggttttttttttcctagtcattgggaatgtagagcagtgtatcttgcatgtcatcggaagaatagattttggttttggttttgttttgaaaatgactctgaacatttatttccattgcaatttctgtggctgaggagacttaaactttacaagtattatccttttaagatcattttaattttagttgagtgcagagggcttttataacaaacgtgcagaaattttggagggctgtgatttttccagtattaaacatgcatgcattaatcttgcagtttattttctcattgtgtatgtatatatcgcttttctctgcagcacgatttctcttttgataatgccctttagggcacaactagttatcagtaactgaatgtatcttaatcattatggctgcttctgttttttcattaacaaaggttattcatatgttagcatatagtttctttgcacccactatttatgtctgaatcatttgtcacaagagagtgtgtgctgatgagattgtaagtttgtgtgtttaaacttttttttgagcgagggaagaaaaagctgtatgcatttcattgctgtctacaggtttctttcagattatgttcatgggtttgtgtgtatacaatatgaagaatgatctgaagtaattgtgctgtatttatgtttattcaccagtctttgattaaataaaaaggaaaaccagaa

SEQ ID NO: 386861 - DNA, 1684 bp, Homo sapiens
cgccggtaataattagcgggcgggcggggcccgcgcgtcagccgcgggagccggccaatccagtggctctcctccgcggtcgcgtcataggccgaacaaccaaacagaaaagtttaataaacagcggacggaggggccggcggtggcggagccggagcaagcaggggttcggcggcattacctgtacccattcaccggcggctaccggcggcggcgcgcagcgtgtcaggcggagagacccgccgccaggtgtgcaactgaggaacatggctcaagaaactaatcacagccaagtgcctatgctttgttccactggctgtggattttatggaaaccctcgtacaaatggcatgtgttcagtatgctataaagaacatcttcaaagacagaatagtagtaatggtagaataagcccacctgcaacctctgtcagtagtctgtctgaatctttaccagttcaatgcacagatggcagtgtgccagaagcccagtcagcattagactctacatcttcatctatgcagcccagccctgtatcaaatcagtcacttttatcagaatctgtagcatcttctcaattggacagtacatctgtggacaaagcagtacctgaaacagaagatgtgcaggcttcagtatcagacacagcacagcagccatctgaagagcaaagcaagtctcttgaaaaaccgaaacaaaaaaagaatcgctgtttcatgtgcaggaagaaagtgggacttactgggtttgaatgccggtgtggaaatgtttactgtggtgtacaccgttactcagatgtacacaattgctcttacaattacaaagccgatgctgctgagaaaatcagaaaagaaaatccagtagttgttggtgaaaagatccaaaagatttgaactcctgctggaatacaaaattcttgagcatctgcaaactaaaaattgacttgaggttttttttttcctagtcattgggaatgtagagcagtgtatcttgcatgtcatcggaagaatagattttggttttggttttgttttgaaaatgactctgaacatttatttccattgcaatttctgtggctgaggagacttaaactttacaagtattatccttttaagatcattttaattttagttgagtgcagagggcttttataacaaacgtgcagaaattttggagggctgtgatttttccagtattaaacatgcatgcattaatcttgcagtttattttctcattgtgtatgtatatatcgcttttctctgcagcacgatttctcttttgataatgccctttagggcacaactagttatcagtaactgaatgtatcttaatcattatggctgcttctgttttttcattaacaaaggttattcatatgttagcatatagtttctttgcacccactatttatgtctgaatcatttgtcacaagagagtgtgtgctgatgagattgtaagtttgtgtgtttaaacttttttttgagcgagggaagaaaaagctgtatgcatttcattgctgtctacaggtttctttcagattatgttcatgggtttgtgtgtatacaatatgaagaatgatctgaagtaattgtgctgtatttatgtttattcaccagtctttgattaaataaaaaggaaaaccagaaaaaaaaaagtcgacgcggccgcgaatttagtagtagta

SEQ ID NO: 386862 - DNA, 1613 bp, Homo sapiens
gggtattcaggtttggttgctttggagtacagcttcaagtgaagttaatctgaggtgaagcaaacagaaaattgtggaggttttgttggaatgaatctgaagtctgctgcagtaaaacacagaaggctttaaaatgttttcttgcataaaattcaaaacttttaagtagctgcttatgagaatagggaaggcagaaagctaatgtctgtctcaagatacaggacagctgtttgctcatcaacctcaactgtgtgtgcaactgaggaacatggctcaagaaactaatcacagccaagtgcctatgctttgttccactggctgtggattttatggaaaccctcgtacaaatggcatgtgttcagtatgctataaagaacatcttcaaagacagaatagtagtaatggtagaataagcccacctggttcaatgcacagatggcagtgtgccagaagcccagtcagcattagactctacatcttcatctatgcagcccagccctgtatcaaatcagtcacttttatcagaatctgtagcatcttctcaattggacagtacatctgtggacaaagcagtacctgaaacagaagatgtgcaggcttcagtatcagacacagcacagcagccatctgaagagcaaagcaagtctcttgaaaaaccgaaacaaaaaaagaatcgctgtttcatgtgcaggaagaaagtgggacttactgggtttgaatgccggtgtggaaatgtttactgtggtgtacaccgttactcagatgtacacaattgctcttacaattacaaagccgatgctgctgagaaaatcagaaaagaaaatccagtagttgttggtgaaaagatccaaaagatttgaactcctgctggaatacaaaattcttgagcatctgcaaactaaaaattgacttgaggttttttttttcctagtcattgggaatgtagagcagtgtatcttgcatgtcatcggaagaatagattttggttttggttttgttttgaaaatgactctgaacatttatttccattgcaatttctgtggctgaggagacttaaactttacaagtattatccttttaagatcattttaattttagttgagtgcagagggcttttataacaaacgtgcagaaattttggagggctgtgatttttccagtattaaacatgcatgcattaatcttgcagtttattttctcattgtgtatgtatatatcgcttttctctgcagcacgatttctcttttgataatgccctttagggcacaactagttatcagtaactgaatgtatcttaatcattatggctgcttctgttttttcattaacaaaggttattcatatgttagcatatagtttctttgcacccactatttatgtctgaatcatttgtcacaagagagtgtgtgctgatgagattgtaagtttgtgtgtttaaacttttttttgagcgagggaagaaaaagctgtatgcatttcattgctgtctacaggtttctttcagattatgttcatgggtttgtgtgtatacaatatgaagaatgatctgaagtaattgtgctgtatttatgtttattcaccagtctttgattaaataaaaaggaaaaccagaa

SEQ ID NO: 386863 - DNA, 1623 bp, Homo sapiens
cgccggtaataattagcgggcgggcggggcccgcgcgtcagccgcgggagccggccaatccagtggctctcctccgcggtcgcgtcataggccgaacaaccaaacagaaaagtttaataaacagcggacggaggggccggcggtggcggagccggagcaagcaggggttcggcggcattacctgtacccattcaccggcggctaccggcggcggcgcgcagcgtgtcaggcggagagacccgccgccaggtgtgcaactgaggaacatggctcaagaaactaatcacagccaagtgcctatgctttgttccactggctgtggattttatggaaaccctcgtacaaatggcatgtgttcagtatgctataaagaacatcttcaaagacagaatagtagtaatggtagaataagcccacctgcaacctctgtcagtagtctgtctgaatctttaccagttcaatgcacagatggcagtgtgccagaagcccagtcagcattagactctacatcttcatctatgcagcccagccctgtatcaaatcagtcacttttatcagaatctgtagcatcttctcaattggacagtacatctgtggacaaagcagtacctgaaacagaagatgtgcaggcttcagtatcagacacagcacagcagccatctgaagagcaaagcaagtctcttgaaaaaccgaaacaaaaaaagaatcgctgtttcatgtgcaggaagaaagtgggacttactgggtttgaatgccggtgtggaaatgtttactgtggtgtacaccgttactcagatgtacacaattgctcttacaattacaaagccgatgctgctgagaaaatcagaaaagaaaatccagtagttgttggtgaaaagatccaaaagatttgaactcctgctggaatacaaaattcttgagcatctgcaaactaaaaattgacttgaggttttttttttcctagtcattgggaatgtagagcagtgtatcttgcatgtcatcggaagaatagattttggttttggttttgttttgaaaatgactctgaacatttatttccattgcaatttctgtggctgaggagacttaaactttacaagtattatccttttaagatcattttaattttagttgagtgcagagggcttttataacaaacgtgcagaaattttggagggctgtgatttttccagtattaaacatgcatgcattaatcttgcagtttattttctcattgtgtatgtatatatcgcttttctctgcagcacgatttctcttttgataatgccctttagggcacaactagttatcagtaactgaatgtatcttaatcattatggctgcttctgttttttcattaacaaaggttattcatatgttagcatatagtttctttgcacccactatttatgtctgaatcatttgtcacaagagagtgtgtgctgatgagattgtaagtttgtgtgtttaaacttttttttgagcgagggaagagggtttgtgtgtatacaatatgaagaatgatctgaagtaattgtgctgtatttatgtttattcaccagtctttgattaaataaaaaggaaaaccagaaaaaaaagatatcactcagcataatgaatcga

SEQ ID NO: 386864 - DNA, 1592 bp, Homo sapiens
cgccggtaataattagcgggcgggcggggcccgcgcgtcagccgcgggagccggccaatccagtggctctcctccgcggtcgcgtcataggccgaacaaccaaacagaaaagtttaataaacagcggacggaggggccggcggtggcggagccggagcaagcaggggttcggcggcattacctgtacccattcaccggcggctaccggcggcggcgcgcagcgtgtcaggcggagagacccgccgccaggtgtgcaactgaggaacatggctcaagaaactaatcacagccaagtgcctatgctttgttccactggctgtggattttatggaaaccctcgtacaaatggcatgtgttcagtatgctataaagaacatcttcaaagacagaatagtagtaatggtagaataagcccacctgcaacctctgtcagtagtctgtctgaatctttaccagttcaatgcacagatggcagtgtgccagaagcccagtcagcattagactctacatcttcatctatgcagcccagccctgtatcaaatcagtcacttttatcagaatctgtagcatcttctcaattggacagtacatctgtggacaaagcagtacctgaaacagaagatgtgcaggcttcagtatcagacacagcacagcagccatctgaagagcaaagcaagtctcttgaaaaaccgaaacaaaaaaagaatcgctgtttcatgtgcaggaagaaagtgggacttactgggtttgaatgccggtgtggaaatgtttactgtggtgtacaccgttactcagatgtacacaattgctcttacaattacaaagccgatgctgctgagaaaatcagaaaagaaaatccagtagttgttggtgaaaagatccaaaagatttgaactcctgctggaatacaaaattcttgagcatctgcaaactaaaaattgacttgaggttttttttttcctagtcattgggaatgtagagcagtgtatcttgcatgtcatcggaagaatagattttggttttggttttgttttaaactttacaagtattatccttttaagatcattttaattttagttgagtgcagagggcttttataacaaacgtgcagaaattttggagggctgtgatttttccagtattaaacatgcatgcattaatcttgcagtttattttctcattgtgtatgtatatatcgcttttctctgcagcacgatttctcttttgataatgccctttagggcacaactagttatcagtaactgaatgtatcttaatcattatggctgcttctgttttttcattaacaaaggttattcatatgttagcatatagtttctttgcacccactatttatgtctgaatcatttgtcacaagagagtgtgtgctgatgagattgtaagtttgtgtgtttaaacttttttttgagcgagggaagaaaaagctgtatgcatttcattgctgtctacaggtttctttcagattatgttcatgggtttgtgtgtatacaatatgaagaatgatctgaagtaattgtgctgtatttatgtttattcaccagtctttgattaaataaaaaggaaaaccagaa

SEQ ID NO: 386865 - DNA, 1060 bp, Homo sapiens
cgccggtaataattagcgggcgggcggggcccgcgcgtcagccgcgggagccggccaatccagtggctctcctccgcggtcgcgtcataggccgaacaaccaaacagaaaagtttaataaacagcggacggaggggccggcggtggcggagccggagcaagcaggggttcggcggcattacctgtacccattcaccggcggctaccggcggcggcgcgcagcgtgtcaggcggagagacccgccgccaggaatgaatctgaagtctgctgcagtaaaacacagaaggctttaaaatgttttcttgcataaaattcaaaacttttaagtagctgcttatgagaatagggaaggcagaaagctaatgtctgtctcaagatacaggacagctgtttgctcatcaacctcaactgtgtgtgcaactgaggaacatggctcaagaaactaatcacagccaagtgcctatgctttgttccactggctgtggattttatggaaaccctcgtacaaatggcatgtgttcagtatgctataaagaacatcttcaaagacagaatagtagtaatggtagaataagcccacctgcaacctctgtcagtagtctgtctgaatctttaccagttcaatgcacagatggcagtgtgccagaagcccagtcagcattagactctacatcttcatctatgcagcccagccctgtatcaaatcagtcacttttatcagaatctgtagcatcttctcaattggacagtacatctgtggacaaagcagtacctgaaacagaagatgtgcagggtttgtatatgaactagcatgtattttgttatttgagtattataggccagacactatcctaggtgcatgtataaaaaaattgccagcttaaaatacatgtttttctgttttccctatgaacacaatactttatatctttaagtatttaattaacatgttggggagccatttcacacttacatgtaattttatcatcagcataaatgttgcaaattcaaaatttgtttagtttggaaaatataattaaatgaatgtgtggcagtgtta

SEQ ID NO: 386866 - DNA, 1262 bp, Homo sapiens
  misc_feature (1223)..(1223): n is a, c, g, or t
cgccggtaataattagcgggcgggcggggcccgcgcgtcagccgcgggagccggccaatccagtggctctcctccgcggtcgcgtcataggccgaacaaccaaacagaaaagtttaataaacagcggacggaggggccggcggtggcggagccggagcaagcaggggttcggcggcattacctgtacccattcaccggcggctaccggcggcggcgcgcagcgtgtcaggcggagagacccgccgccaggaatgaatctgaagtctgctgcagtaaaacacagaaggctttaaaatgttttcttgcataaaattcaaaacttttaagtagctgcttatgagaatagggaaggcagaaagctaatgtctgtctcaagatacaggacagctgtttgctcatcaacctcaactgtgtgtgcaactgaggaacatggctcaagaaactaatcacagccaagtgcctatgctttgttccactggctgtggattttatggaaaccctcgtacaaatggcatgtgttcagtatgctataaagaacatcttcaaagacagaatagtagtaatggtagaataagcccacctgcagcctctgccagcaacctgaattactctttcccactctattgctcaaacggctctgagcgtaaagccaaatcagatataaattctacacacttctacactacaaaccatacaatgtattaaagtgaaaaccaataaacatcaaaaatcaataccatgtcaacatatacctcacaaactacctgccgacactcataaacctttacactctatataagtccatcatagaattaacactactcaaattactcttgcctctagttaaaaccaaaatccatatttacataccctaatactaaaaatagtacgggaccctatgatcaccagttaagagatataatcctaataatcaaatcaaacatgtattaataataacacgacaatgactcaaatctatattatcccatcacctacaccgactatacccacaataagacttttatattattataataaccatactttcactctaatttatgctatatctattataataccataccaacgaataataaaataacgccatataaccttacgtttcacaaatcatcactttactgtatgacccactcaaattgacaaatacgaccgcagctacttctccattctcaacgaacgatacactttttaactgatcacantacattaaatactttagatactacatatacgtactctag

SEQ ID NO: 386867 - DNA, 651 bp, Homo sapiens
gatggttcttgttttccttctggcatcaactgaggtcacttagtgggacttaggtggcaaatgagctgctttggagggcccagtttggctttgctctccttgtcttatgtgttggtggtactggctagaagtttgggctcagagcaccatcatgtgacctctgcagtatggtggttttagaacagtcttgttacatggtatctggcttccactgaacaagcattacagaagaaccaggcaaaagcttcatggcctcttctaatctgaccttgaaagtcatacgggattactttcacattttttggcatacaaatgacccaaagcactagcccagattccaggagaggggaattagattccacctgtcgatggggaaattgcaaggtcacagtgtacaagagcatgtgggatgcaggcatctttggaaaatataatctgccactggtttatttatgttaaaagcttgaataaataagacaggatggtaagaacagaactgagaacaatttcagttatatcaaaagttaattcataaaagcagacaattttcaggcttgctaatgaagcagaatttaaccctgtgcagtacataagagtcatacctaccacaaagaagtaaaggttaaaaataaaggactgcatattgctgta

SEQ ID NO: 386868 - DNA, 439 bp, Homo sapiens
tacaacatgtaagaattatgggagctgcaattcaagatgagatttgggtgggaatacagccaaaccatatcaaggatgcgctctctattcttcactttcccagtgacttatctaaaaatgatttctcccttctacgtgcaagacttccactccagtttcttttctccttatattatttgcttccagtttctaaaatatccttgggatcactttgagaacatgggaggagagaagcagagggcttcaggaaatctgatgaccataacttacgttttataagttcttgtacaaagtcaagaacaggtgaaatttccaggaagaatgtagaagacacagttaatcatgatgttattgggttgcccttaagtgggatgcatggtctccctaggggtcacaggctggcttctaaaaagtaactaatttttttctgattacaatc

SEQ ID NO: 386869 - DNA, 175 bp, Homo sapiens
cctcacttggctggagggaacagactccccttcccttgtggctctcaggagcctccaaaggccgctgcttctagttggccatcttggccccaccccgaaacagtaacctttgaagaataaaagaaaaagcaaaagagtagcattactaaaatattaaacggttacatttacagcc

SEQ ID NO: 386870 - DNA, 473 bp, Homo sapiens
tgagccagggctggagaagagcacaaattgggcctccagcccagcacacatcctgtcccctggggtgctgactgccatcattggcactgcgcccatctgagccaggcagtcccccggagcctcacaacagctctgggaagctagtgtcattcctcagtgcccagtgttaccagctcacaagtggccagccagggctccctggtttccactccgtgaaccgccatgccctccgttctgaagcatattcagaggcagaacacctggaaatcaggtgagctttgggaaccccacatattcttgctgtattctactccatcgtgtgaaccaagagtacagaagtcatcagagagcatgacttgcatctgtgtctcaagtctgtatctaaaggaaaagtccataaaatcacccaaggaaacatcctaagccttttctgttggtgttttttttctttgcttctgaatcatttgttttat

SEQ ID NO: 386871 - DNA, 492 bp, Homo sapiens
ctgttgggtaattgtttgctgacctttgtgactgtgctcattgtcttctcttttcttccctttctcttaacatctatctcccttattacttattctctgttttgctcattttgctgctcagtcatatattttatttcattattaatgtgtatataacttgatttttttaaattaaattttaagctatggagggtaggggtctataattttggcctctttattgccttgcatttttataaaagttatgtgcttcgtaaaaattggggaggattgcagagaattaatatctatcatttaatattttgaaagattgttgggtaaattcttttatttcacttattagttttttaaacatatgtcccagaatggttctatctcaatgaatagaagtcatctattcatctgcgaattgattttgttctttgtgtcatgtactgtgattgatgatatgaacagtcctcatttagtctttaccaccccctactttaaaaa

SEQ ID NO: 386872 - DNA, 394 bp, Homo sapiens
cataacccttttaagcgcttttgtaggcatactttgagttctagggaagaagtatggtacaatttctttatgataaagaaaagtatcaacctatagaggaaaggtaatagccaacaacatttgctatctgaggcatttatcctgcaggtttaccccaaagtgatctttggaatccattcagtaaatatgcaaggaattctgctacaacgataaaaaaatgaatcaagtactgggtgtctacacatgtcctggtactcatattattccactcaaaactacgtaatccatgtttgtgttatagttatattgtggctgtagggttgaataacttctattgctttaaaaagacaaataatttcatagaggtgaaaagagttacaacctgggtgtcagg

SEQ ID NO: 386873 - DNA, 365 bp, Homo sapiens
aatttgaaattttaaaagcctatcaagctaagaagattttacttgctgcatctataaatgtgggagaactgttctctttttgaggtcgacaaaatatcctaagcttctaagacttgccaggaagtaaccttccttactcagttgtaaggctgagaaccctgtaagtcaggtaccaggctagttttcccaagagggctttgtatgcattggctccataaagtcagccttagttccttaaaagtgtctgatcatatctgattcagtgagcatcattcacaaatatggcattccaggtaaggccttggttacataccaatgtttctaatcatgatctggtaagaagggcagacagatttttattgaac

SEQ ID NO: 386874 - DNA, 559 bp, Homo sapiens
gggatgaagtcgtcaggatgtggaaactgcattcagtgagtcagctccttgtatgatccttcagaactgctgatgtcgatggggtccttcagatcagctgacctcattagtttcactggtgtgcaggacctgaaaggatatctcccagacggggtcgcggctgggccgaggcgctcctcacatcccagacggggtggcggggcagaggcgctccccacatctcagacgatgggcagccgggcagagacgctcctcacttcctagatgggatggcggccgggaagaggtgctcctcacttcctagatgggatggcggctgggcagagacgctcctcactttccagactgggcagccaggcagagggtgctcctcacatcccagatgatgggtggccaggcagagacgctcctcacttcccagacggggtggcagccgggcagaggctgcaatctcggcattttgggaggccaaggcaggcggctgggaggtggaggttgtagcgagccgagatcacgccactgcactccagcctgggcaccattgagcactgagtgaacg

SEQ ID NO: 386875 - DNA, 358 bp, Homo sapiens
cagttactccaagcctccttaccctgcttttcttcctacataggacttaccaccaccatctgacagtgaattatatactgaatgtgtctatctgcttgttgtcgctttccactagtagaatgtaaactccaaaaaggcagttttgttcactgctgaatcccttgtgccagaaacagtgtctgccacataagtattggataatagtttttccaagtgaataagtgaatggtgtaagaagggacaaagtcccatctatctcaaattttaaaaaatgtgtagagatatgactttaatcagcatcttcaattactgaaacaatgtattttcataggagttaaagaatatatcatttttagaa

SEQ ID NO: 386876 - DNA, 231 bp, Homo sapiens
gttcctcacgtgtataatgaggataacaatacctgctttgtaaggatgatgcaaagactcgatgaggtaatgcttcacaagcactgagtggtataaagtttcatactggtataaagtcagggctcaatatgtttattgtcattattttatttgttcccactctcccatctctccaaggaaaacctaacccatgtcattggtcagacctgagttcaaatcctagttcttcca

SEQ ID NO: 386877 - DNA, 1340 bp, Homo sapiens
tgctccagcttggagtaccacccatagtcctcttcatttttcatgacagaaaaaagttggcaggaccctccttcccttcaccaactcctcctgatacgcaatgttcaaattagcacattttcacaagacctcatatctcccaggcctccaagctgcatgacaacaatgacatttactttaactgacttttctcaaaggactgaaaagaaataatattagaggaaatgctataccttgatggttctctatgttggttggtagtgttagcatctgggaaagccccgttattcccaaagcactacgtatagactatgggatcaagagccaatataacacttctagaaggcaggatccctaaccttctcccagtcaccaggctcttaatgctattttcttgggtatttcaatttcagtctgtctattctcttctctttagctctgtctgttgctcaaattcaagtaagtttctacttagctgcttttgaaacataatcagttttcattcctaaatccaaggtgataaattatacacaaatataataatacatttatgaagggctggcagtgttcatttatctctgcttccacacgccccttatgcacttttatccagataattttttaatttcctcaatatttcttcaaaatttgagatagactctcattttcttcttgcaatgaaaactaaattatgacatgctcaatgagcccgtgtggttgaattcagctataaaatcaaaccagcaattgctcagagcagatgaagaaattctctattaattctaaaatgagtttttactcaacacagaccacggttgaaaaaaacaaaatgatttcttctcatgtacctgatttcattgcctgcctagctcctttttccctgagtcctggaaccttcacccacctggatgaatggtcacatggcctggtggcttaatcttttgagtttgcccattccaagaacaggctcaactctctcacattaaatgtgatccaaaagccagagagtgcggtgaggccaagctctatttgttgcgttctctccctgctttgtagagataactctgccctgatgctggggtttgtagttcagtaaggaaatggcccactaactttttctcaattttccaagaattttagagaatgactggcacccagcaaaacaaagaaggctgttatctccccttcctttattgtcctgtctacttcatggtgtatcgcctccaccactccagacatccactttcagcctggttcagctaagctatggaaaatattttaaatggaatggagaaatgtaaaatttgccatgaaagtaaagatttgtttaaatcttagaa

SEQ ID NO: 386878 - DNA, 286 bp, Homo sapiens
tccaactgaaaaagctggataaaagacaaaacaaattttaaatgcatcattgagttggcacaaaaggaagaaatttgcaaatctcgaaaagaagtgagagcaaatgtgcagtccaaacactaaagccagctttcgctggtagggtttctgctgaactttggggtcactaagcttctgccttgagagacaaataagatggaaggataggagacaaaaacctaggtcctgcctcaggtgagaaggttaatagcaaacacctgtataaagctgggctcttgaaatctgt

SEQ ID NO: 386879 - DNA, 283 bp, Homo sapiens
gtcgacttttgagacagagtcccgctctgtcgcccaggctggagtgcagtggtgaccatctcggctcaccgcaaccccgcttaaacaaaaacaaaaacaaaaaacaaacaaacaaaaaaatccatggagcacatataatcatgtgaaagaaaattaaacaacaaaaattaaaacagcctgacacattttaatagaattccagacacagaaaaaaaacaaaacaaaactgaacactaggactagtctgaagagtggagtatgaattagacagcaaatttccctg

SEQ ID NO: 386880 - DNA, 11865 bp, Homo sapiens
gggctgggcctcccttccccataacactgagctgctctgctgggccaaccgtgctcctgggccagccagaggacccccatgaggcggcatgcaggcggggagcaggccacagaacgcagggtgaaacccaaggcgctctagaggagatgaattatggatccgccctcccggaatcctggctcggccctccccacgccacccagggccagtcgggtctgctcacagcccgaggaggccgcgtgtccagccgcgggcaagagaccgagcaggtccctgtgtctccaagtccctgagcccgtgacaccggccccaggccctgtagagagcaggcagccaccatggcgaaggaggaagatgaggagaagaaagccaagaaagggaagaaggggaagaaggcaccggagccggagaagcccaaacggagcctgaaggggacgtcgcggctgttcatgggcttccgcgaccgtacacccaagatctccaagaagggccagttccgcagcgcctcggccttcttctggggcctccacaccggcccccagaagaccaagcgcaagaggaaggcccgcaccgtgctcaagtccacgtcaaagctcatgacgcagatgcgcatgggcaagaagaagcgggcgatgaagggcaagaagccgtccttcatggtgatccgcttcccaggccgccgtggctacggccgcctgcggccgcgcgcccggtcactcagcaaagcgtccacggccatcaactggctcacaaaaaagttcctcctcaagaaggccgaggagtcgggcagcgaacaggccacagtggacgcctggctgcagcgctcgagctcccgcatgggctcccgcaaactccccttcccgtcgggtgccgagatcctgcggcctgggggccggctccggaggttcccccgcagccgcagcatctacgcgtcaggcgagcccctgggcttcctgcccttcgaggacgaggccccattccatcactcgggctcccgcaagtcgctgtacgggcttgagggcttccaggacctgggcgagtattatgactatcaccgcgacggcgacgactactacgaccggcagtcactccaccgctacgaggagcaggaaccctacctggcgggcctcggcccctacagcccggcctggccaccctacggcgaccactactacgggtacccgcccgaggatccctacgactactaccaccccgactattacggtggcccctttgatccggggtacacctacggctacggctacgacgattacgaacccccatatgcgcccccgtcggggtactcgtctccttacagctaccacgatgggtacgagggcgaggcgcacccttatggctactacctggatccctatgcgccgtacgacgcgccatacccaccctatgacctcccataccacactccctacgatgtaccctactttgatccctacggagtccactacaccgtcccctatgccgaaggcgtctatggcggtggggacgaggccatctacccccccgaggtgccctatttttacccggaggagtcggcttcggcctttgtgtacccctgggtaccaccgcccatcccgtcgccccacaacccgtatgcccacgccatggatgacatcgccgagctggaggaaccagaggacgcgggcgtagagcgtcaggggacctccttccgcctgcccagcgccgccttcttcgagcagcaaggcatggataagcccgccaggtccaagctgtccctcatccgcaagttccgcctcttcccgcgaccccaggtgaagctgtttgggaaggagaagctggaggtgcccctgccaccctctctggacattcctctccccttgggggatgcggacgaagaagaggacgaggaggagctgcccccggtttccgctgtgccctacggccaccctttctggggcttcctcacgccgcgccagcgcaacctccagcgcgcgctgtcggccttcggcgcccaccggggcctgggcttcggccctgagtttggccgccccgtgcctcgccctgccacctcgcttgcgcggttcctcaagaagacgctgtcggagaagaagcccatcgcgcggctcaggggcagccagaagacccgggcgggcggccctgctgtcagggaggcggcctacaaacgcttcggctacaagctggctggcatggaccccgagaagcccggcacgcccatcgtgctgaggagggcccagccgcgcgctcgcagcagcaacgacgcgcgccgcccgcccgcgccacagcccgcgcccaggaccctctcccactggagcgcgctcctgtctccgcccgtgcccccgcggcccccaagctccgggcccccgcccgcgccgccgctctccccggcgctctcgggcctgccccggccggcctcgccctacggctccctccgccgccacccgccgccctgggccgccccagcgcacgtgccaccggcgccgcaggccagcgggtgggccttcgtggagccccctgccgtgagcccggaggtgccccccgacctactagccttcccagggccccgaccctcgttcaggggctcccgccggagaggggcggctttcggcttccccggggcctctccacgggcgtcgcggaggcgagcttggtcaccgctggcctcgccccagccctcgctgaggagctcgccgggcctcggctactgctcacccttggcgcccccgtcgcctcagctgtccttgcgcacgggccccttccagccgcccttcctgcccccggcccgccggccccgctcgctgcaggagtccccagccccacgccgagccgctgggcgcctgggcccacccggctcgccgctgccgggctcacccaggccgccctcgccgcccctggggctctgccacagcccgcggcgcagctccctgaatctgccctcgcgcctcccgcacacgtggcggcgcctcagcgagccacccactcgggctgtgaagccgcaagtgcgcctgcccttccaccgaccgcccagggccggggcctggcgggcgcccctggaacaccgggagagcccgcgagaacccgaggactcagagacgccctggactgtgcccccactggcccccagctgggacgtggacatgcctcccacccaacgcccaccctccccctggccaggaggtgcaggcagccgccgaggcttttccaggccaccccctgtgccggaaaacccctttctccagctcctgggccctgtgccatcccccaccctccagcctgaggatccagctgctgatatgaccagggtcttcctgggcagacaccatgagccggggcctggacagctcaccaaatcagctggcccaacccctgagaagcctgaagaagaggccaccctgggggacccccagctgccagcagagaccaagcctccaaccccagcacctcccaaggatgtcactccccccaaggatatcactccccccaaggatgtcctcccagagcaaaagacattaaggcccagcctctcatacccactggctgcgtgtgaccagaccagggccacatggccaccatggcaccgctggggaacactgccccaagccgcagcccccttggcgcccatcagggccccagagcccctgcccaaggggggtgaacggcgccaggcagcccctgggcgttttgctgtggtcatgcctcgtgtgcagaagctgagctctttccagcgagttgggcctgcaaccctgaagcctcaagtccagcccattcaggaccccaagccaagagcctgtagtcttcgctggtcctgcctctggcttcgggcagatgcctatggaccctggccacgagtacacacccatccccagtcctgccacctgggccctggagctgcctgcctgtcccttaggggctcctgggaggaggtcggcccgccaagctggcggaacaagatgcactccatccgcaacctgccatccatgcggttccgtgagcagcacggggaggatggtgtggaggacatgacacagctggaagacctccaggaaaccactgtgctgtccaacctcaagattagatttgaacggaacctcatctacacatacattgggagcatcctggtgtcggtgaacccataccaaatgtttggaatctatgggccggagcaggtgcagcagtacaacggacgggccctgggagagaatcccccgcacctctttgctgttgcaaatctcgccttcgccaaaatgctcgatgccaaacagaaccagtgcataatcattagtggagagagcggctctggcaaaactgaggccaccaagctgattctgcgctacctggccgccatgaaccagaaacgggaggtcatgcagcagataaagatcctggaggcaacacccctcttggagtccttcggtaatgccaaaaccgtcaggaacgacaactccagccgctttgggaagtttgtggaaatctttctggaagggggcgtgatctctggtgccataacctcccagtacctgcttgagaaatccaggatcgtgtttcaggccaaaaacgagaggaattaccacatcttctacgagttgctggccgggttgcctgcccagctcaggcaggcctttagcctgcaagaggctgagacctactactatctgaaccagggtgggaactgtgagatagcaggaaagagcgatgcagatgactttcgccggctcctggctgccatggaggtgttgggcttcagcagtgaggaccaggacagcatcttccgcatcctggcctccatcctgcacctgggcaacgtctactttgagaagtatgagacggatgcacaggaggtggcctcagtggtgagtgcccgagagatccaggccgtggcagagctgctgcagatctcccctgagggcctgcagaaggccatcaccttcaaagtgaccgagacaatgcgagagaagatcttcacgcccctaactgtggagagcgctgtggatgccagggacgccatcgccaaggtcttgtatgcactgctgttcagctggctcatcaccagggtcaacgcgctggtgtccccaaggcaggacacactgtccatcgccatcctggacatctatggtttcgaggacctgagcttcaacagctttgagcagctgtgtattaactacgcaaacgagaaccttcagtaccttttcaacaagatcgtcttccaggaggagcaggaggagtacatccgtgagcagatagactggcaggagatcacctttgctgacaaccagccccgcatcaacctcatctcactgaagccttatggcatcctgcggatccttgacgaccagtgttgctttccccaggctacagaccacaccttcctacagaagtgccactaccatcatggcgccaacccgctctattccaaacccaagatgccgctgcctgagttcaccatcaagcactatgcaggcaaggtcacctaccaggtgcacaagttcctggacaagaaccacgaccaagtgcgccaggatgtgctggacctgttcgtacggagccggacacgggtggtggcacacctcttctccagccatgccccacaggctgcccctcagcgcctgggcaagagcagctccgtcactcggctctacaaggcgcacactgtggccgccaagttccagcagtcactcctggatctggtggaaaagatggagaggtgcaaccccttgttcatgcgttgcctgaagcccaaccacaagaaggagccaggtctctttgagccagatgtggtaatggcacaattacgctattcaggggtgctggagaccgtgaggatccgcaaggagggatttccagtgcgcctgcctttccaggggttcatcgacaggtactgctgtctagtggccctcaagcatgacctgccggctaatggggacatgtgtgtgtcagtgctgagtcgcctgtgcaaagtcatgccaaacatgtaccgtgttggggtcagcaagctgttccttaaggaacacctataccagctgctggagagtatgcgagagcatgtcctgaatctggcagccctcactctgcagcgctgcctccgtggcttcttcattaagcggcgattccgctctctgcgccacaagatcatcctgctgcaaagccgggcccgtggctaccttgccaggcaacgctatcagcagatgaggaggagtctggtgaagttccggtccctggtacacgcatacgtgagccgccgacgctatctcaagctgagggcagagtggaggtgccaggtggagggggcgctgctgtgggagcaggaggagctgagcaagcgggaggtagtcgctgtggggcacctggaggtaccggctgagctggctgggctcttgcaagcagtggcaggcctcgggctggcccaggtgcctcaggtggcccctgtgaggactcctcgactccaggctgagccccgtgtcacactgcccctggacatcaacaactatcctatggccaagtttgtccagtgccacttcaaggaacctgcctttgggatgctgacagtgcccctgaggacacccctcacgcagctgccagccgagcaccatgcagaagccgtgagcatcttcaagctgatcctgcgcttcatgggcgacccccacctgcatggtgcccgggagaacatcttcgggaactacatcgtgcagaaggggctggcggtgcctgagctgcgggatgagatcctggcacagctggccaatcaggtgtggcacaatcacaatgcccacaatgctgagcggggctggctgctgctggccgcctgcctcagtggctttgcaccttccccgtgcttcaacaagtaccttctcaagtttgtgtctgattatgggcggaatggcttccaggctgtgtgtcagcaccgcctcatgcaggccatgggccgggcccaacagcagggctcgggggctgcccgcaccttacccccgacccagctcgagtggacagcgacctatgagaaggccagcatggcgctggacgtgggctgcttcaatggtgaccagttctcctgcccggtgcactcctggagtacgggggaagaggtggctggagacattctgaggcacagggggctggcagatggctggcgcggctggaccgtggccatgaagaatggtgtccagtgggcagagctggctggccacgactacgtgttagacctggtgtcggacctggagctgctcagggacttccctcgacagaagtcctacttcattgtgggcacagaggggcctgcagccagcaggggaggccccaaagtggtgtttgggaacagctgggactcggatgaggacatgtccactagaccccagccccaggagcacatgcccaaagtacttgactctgatgggtacagcagccacaatcaggacggtacaaatggggagactgaggcccaaagagggacagcaacccaccaagagtcagacagtcttggagagcctgctgtgccccacaaggggctggactgctacctggatagcctcttcgaccctgtgctgtcctacggggatgcggacctggagaagccaacagccattgcctaccgcatgaaagggggaggccagcccggtggaggcagcagtagtggtactgaagacacccccaggagacccccagagccaaagccaatcccaggcctggatgcctccacattggctctgcagcaagccttcatccacaaacaggccgtgctgctggcccgggggatgaccctgcaggccacggcactccagcagcaacccctgagtgctgccctgagatccttgcccgcagagaaacccccagcaccagaggcacagccgacgtctgtgggcaccggtccccctgccaaacccgtgctcctgcgtgccactccaaagcccttggccccagcccctctggccaaggctccaaggctccccatcaagcctgtggctgcccctgttctagctcaggatcaggcttctccagaaaccacttcaccctccccagagctggtccggtactctacgctcaactctgagcacttcccacagcccacacagcagatcaagaatattgtcaggcagtaccagcagccgttccggggaggccggcctgaggccctcaggaaggatggcgggaaagtgttcatgaagcggccagaccctcatgaggaggccctgatgatcctgaaagggcagatgacccacctggcagctgcacctggcacccaggtgtccagagaggccgtggccctggtgaagccggtgaccagtgcaccaaggccatccatggcacccacttcagctctgccctcgcgatcgctggagccccctgaggaactcacgcagacgcggctgcaccgcctcatcaatcccaacttctacggctatcaggacgccccctggaagatcttcctgcgcaaagaggtgttttaccccaaggacagctacagccatcctgtgcagcttgacctcctgttccggcagatcctgcacgacacgctctccgaggcctgccttcgcatctctgaggatgagaggctcaggatgaaggccttgtttgcccagaaccagctggacacacagaagcctctggtaacggaaagcgtgaagcgggccgtggtcagcactgcacgagacacctgggaggtctacttctcccgcatcttccccgccacgggcagcgtgggcactggtgtgcagctcctagctgtgtcccacgtgggcatcaaactcctgaggatggtcaagggtggccaggaggccggcgggcagctgcgggtcctgcgtgcatacagctttgcagatatcctgtttgtgaccatgccctcccagaacatgctggagttcaacctggccagtgagaaggtcatcctcttctcagcccgagcgcaccaggtcaagaccctggtagatgacttcatcttggagctgaagaaggactctgactacgtggtcgctgtgaggaacttcctgcctgaggaccctgcgctgctggctttccacaagggtgacatcatacacctgcagcccctagagccacctcgagtgggctacagtgctggctgcgtggttcgcaggaaggtggtgtacctggaggagctgcgacgtagaggccccgactttggctggaggttcgggaccatccacgggcgcgtgggccgcttcccttcggagctggtgcagcccgctgctgcccccgacttcctgcagctgccaacggagccaggccgcggccgagcagccgccgtggccgctgctgtggcctctgcagccgctgcacaggaggtgggccgcaggagagagggtcccccagtcagggcccgctctgctgaccatggggaggacgccctggcgctcccaccctacacaatgctcgagtttgcccagaagtatttccgagaccctcagaggagaccccaggatggcctcaggctgaaatccaaggagcctcgggagtccagaaccttggaggacatgctttgcttcaccaagactcccctccaggaatccctcatcgaactcagcgacagcagcctcagcaagatggccaccgacatgttcctagctgtaatgaggttcatgggggatgccccactgaagggccagagtgacctggacgtgctttgtaacctcctgaagctgtgcggggaccatgaggtcatgcgggatgaatgttactgccaagttgtgaagcagatcacagacaataccagctccaagcaggacagctgccagcgaggctggaggctgctgtatatcgtgaccgcctaccacagctgctctgaggtcctccacccacacctcactcgcttcctccaagacgtgagccggaccccaggcctgccctttcaggggatcgccaaggcctgcgagcagaacctgcagaaaaccttgcgcttcggaggtcgtctggagctccccagcagcatagagcttcgggccatgttggcaggccgcagttccaagaggcaactctttcttcttcctggaggccttgaacgccatctcaaaatcaaaacatgcactgtggccctggacgtggtggaagagatatgtgctgagatggctctgacacgccctgaggccttcaatgaatatgttatcttcgttgtcaccaaccgtggccagcatgtgtgcccactcagtcgccgtgcttacatcctggatgtggcctcagagatggagcaggtggacggcggctacatgctctggttccggcgtgtgctctgggatcagccactcaagttcgagaatgagctatatgtgaccatgcactacaaccaggtcctgcctgactacctgaagggactcttcagcagtgtgccggccagccggcccagcgagcagctgctgcagcaggtgtccaagctggcttcactgcagcatcgcgccaaggaccacttctacctgccgagcgtgcgggaagtccaggagtacatcccagcccagctctaccgtacaacggcaggctcgacctggctcaacctggtcagccagcaccggcagcagacacaggcgctcagcccccaccaggcccgtgcccagtttctgggcctcctcagcgccttacctatgttcggctcctccttcttcttcatccagagctgcagcaacattgctgtgccagccccttgcatccttgccatcaaccacaatggcctcaactttctcagcacagagactcatgaattgatggtgaagttccccctgaaggagatccagtcgacgcggacccagcggcccacggccaactccagctacccctatgtggagattgcgctgggggacgtggcggcccagcgcaccttgcagctgcagctggagcagggactggaactgtgtcgtgtggtggccgtgcacgtggagaacctgctcagtgcccatgagaagcggctcacattgccccccagcgagatcaccctgctctgacccagcccccagccctccagtaccttctgccagaagactcactgtgtggcctcagagaaatcactgaacctctcaggatcaatgacccctgtaaggggccagagccttggaggacactaagaggaggcaggaggagcaactcaaatccccaagaacacaagaagacccatcctgaactgggatggaatggcagcatgcaaacttggatcagatagcaggaggaactttcaaaagtctggcccactgtgcagtggagcagaaggcaggaccatgaggcctcctgccatgtacccattgcagaccctgcccctaactcctgcctatgacacagaagccccacaccagttgcccagatgaactggcctctgcctttggtttactcagggtctgatgttggaatctgctccaactccacaccctagcccttacatgtcctcctaaggggcccctccttgtgctgccagtcagcctggatttctggtctttggttatttctgtgcaaacaaaaggtgtgcctggcagccatttctccatggagttgctaagtggccggaaaacaggcctgagggaggaggcaggagttggagttaccttaggcccctgattcactggctatgaacagaccatcccccactccttgggtatccccaaccccagacccccatcacttgatgggccacacaagtttgagagtggtacaagggagaagtttgggaaaagccttcttggaaaatgggacattagcattgagttttgaaagatgagtaggagtttgctaagaatagatggaagacagcaggataaacattccagagaaaatcatgtttattccctgctgtatcttccagaacctaggaggatgcctaacagagagtaagcacttaaaaaatatttgtcatatgaatgaaaaaataaacgagtgaatgttgataga

SEQ ID NO: 386881 - DNA, 6537 bp, Homo sapiens
gattccatgcctctgtcccatccgggccttacttttctcatctgtagaatgggcacaggacaatgtccttcactgagggtgaggccaagacccaggtgcacaagttcctggacaagaaccacgaccaagtgcgccaggatgtgctggacctgttcgtacggagccggacacggtctcccggaccctgcctgtctgttttccctgccccgacccctgcccaggtggtggcacacctcttctccagccatgccccacaggctgcccctcagcgcctgggcaagagcagctccgtcactcggctctacaaggcgcacactgtggccgccaagttccagcagtcactcctggatctggtggaaaagatggagaggtgcaaccccttgttcatgcgttgcctgaagcccaaccacaagaaggagccaggtctctttgagccagatgtggtaatggcacaattacgctattcaggggtgctggagaccgtgaggatccgcaaggagggatttccagtgcgcctgcctttccaggggttcatcgacaggtactgctgtctagtggccctcaagcatgacctgccggctaatggggacatgtgtgtgtcagtgctgagtcgcctgtgcaaagtcatgccaaacatgtaccgtgttggggtcagcaagctgttccttaaggaacacctataccagctgctggagagtatgcgagagcatgtcctgaatctggcagccctcactctgcagcgctgcctccgtggcttcttcattaagcggcgattccgctctctgcgccacaagatcatcctgctgcaaagccgggcccgtggctaccttgccaggcaacgctatcagcagatgaggaggagtctggtgaagttccggtccctggtacacgcatacgtgagccgccgacgctatctcaagctgagggcagagtggaggtgccaggtggagggggcgctgctgtgggagcaggaggagctgagcaagcgggaggtagtcgctgtggggcacctggaggtaccggctgagctggctgggctcttgcaagcagtggcaggcctcgggctggcccaggtgcctcaggtggcccctgtgaggactcctcgactccaggctgagccccgtgtcacactgcccctggacatcaacaactatcctatggccaagtttgtccagtgccacttcaaggaacctgcctttgggatgctgacagtgcccctgaggacacccctcacgcagctgccagccgagcaccatgcagaagccgtgagcatcttcaagctgatcctgcgcttcatgggcgacccccacctgcatggtgcccgggagaacatcttcgggaactacatcgtgcagaaggggctggcggtgcctgagctgcgggatgagatcctggcacagctggccaatcaggtgtggcacaatcacaatgcccacaatgctgagcggggctggctgctgctggccgcctgcctcagtggctttgcaccttccccgtgcttcaacaagtaccttctcaagtttgtgtctgattatgggcggaatggcttccaggctgtgtgtcagcaccgcctcatgcaggccatgggccgggcccaacagcagggctcgggggctgcccgcaccttacccccgacccagctcgagtggacagcgacctatgagaaggccagcatggcgctggacgtgggctgcttcaatggtgaccagttctcctgcccggtgcactcctggagtacgggggaagaggtggctggagacattctgaggcacagggggctggcagatggctggcgcggctggaccgtggccatgaagaatggtgtccagtgggcagagctggctggccacgactacgtgttagacctggtgtcggacctggagctgctcagggacttccctcgacagaagtcctacttcattgtgggcacagaggggcctgcagccagcaggggaggccccaaagtggtgtttgggaacagctgggactcggatgaggacatgtccactagaccccagccccaggagcacatgcccaaagtacttgactctgatgggtacagcagccacaatcaggacggtacaaatggggagactgaggcccaaagagggacagcaacccaccaagagtcagacagtcttggagagcctgctgtgccccacaaggggctggactgctacctggatagcctcttcgaccctgtgctgtcctacggggatgcggacctggagaagccaacagccattgcctaccgcatgaaagggggaggccagcccggtggaggcagcagtagtggtactgaagacacccccaggagacccccagagccaaagccaatcccaggcctggatgcctccacattggctctgcagcaagccttcatccacaaacaggccgtgctgctggcccgggggatgaccctgcaggccacggcactccagcagcaacccctgagtgctgccctgagatccttgcccgcagagaaacccccagcaccagaggcacagccgacgtctgtgggcaccggtccccctgccaaacccgtgctcctgcgtgccactccaaagcccttggccccagcccctctggccaaggctccaaggctccccatcaagcctgtggctgcccctgttctagctcaggatcaggcttctccagaaaccacttcaccctccccagagctggtccggtactctacgctcaactctgagcacttcccacagcccacacagcagatcaagaatattgtcaggcagtaccagcagccgttccggggaggccggcctgaggccctcaggaaggatggcgggaaagtgttcatgaagcggccagaccctcatgaggaggccctgatgatcctgaaagggcagatgacccacctggcagctgcacctggcacccaggtgtccagagaggccgtggccctggtgaagccggtgaccagtgcaccaaggccatccatggcacccacttcagctctgccctcgcgatcgctggagccccctgaggaactcacgcagacgcggctgcaccgcctcatcaatcccaacttctacggctatcaggacgccccctggaagatcttcctgcgcaaagaggtgttttaccccaaggacagctacagccatcctgtgcagcttgacctcctgttccggcagatcctgcacgacacgctctccgaggcctgccttcgcatctctgaggatgagaggctcaggatgaaggccttgtttgcccagaaccagctggacacacagaagcctctggtaacggaaagcgtgaagcgggccgtggtcagcactgcacgagacacctgggaggtctacttctcccgcatcttccccgccacgggcagcgtgggcactggtgtgcagctcctagctgtgtcccacgtgggcatcaaactcctgaggatggtcaagggtggccaggaggccggcgggcagctgcgggtcctgcgtgcatacagctttgcagatatcctgtttgtgaccatgccctcccagaacatgctggagttcaacctggccagtgagaaggtcatcctcttctcagcccgagcgcaccaggtcaagaccctggtagatgacttcatcttggagctgaagaaggactctgactacgtggtcgctgtgaggaacttcctgcctgaggaccctgcgctgctggctttccacaagggtgacatcatacacctgcagcccctagagccacctcgagtgggctacagtgctggctgcgtggttcgcaggaaggtggtgtacctggaggagctgcgacgtagaggccccgactttggctggaggttcgggaccatccacgggcgcgtgggccgcttcccttcggagctggtgcagcccgctgctgcccccgacttcctgcagctgccaacggagccaggccgcggccgagcagccgccgtggccgctgctgtggcctctgcagccgctgcacaggaggtgggccgcaggagagagggtcccccagtcagggcccgctctgctgaccatggggaggacgccctggcgctcccaccctacacaatgctcgagtttgcccagaagtatttccgagaccctcagaggagaccccaggatggcctcaggctgaaatccaaggagcctcgggagtccagaaccttggaggacatgctttgcttcaccaagactcccctccaggaatccctcatcgaactcagcgacagcagcctcagcaagatggccaccgacatgttcctagctgtaatgaggttcatgggggatgccccactgaagggccagagtgacctggacgtgctttgtaacctcctgaagctgtgcggggaccatgaggtcatgcgggatgaatgttactgccaagttgtgaagcagatcacagacaataccagctccaagcaggacagctgccagcgaggctggaggctgctgtatatcgtgaccgcctaccacagctgctctgaggtcctccacccacacctcactcgcttcctccaagacgtgagccggaccccaggcctgccctttcaggggatcgccaaggcctgcgagcagaacctgcagaaaaccttgcgcttcggaggtcgtctggagctccccagcagcatagagcttcgggccatgttggcaggccgcagttccaagaggcaactctttcttcttcctggaggccttgaacgccatctcaaaatcaaaacatgcactgtggccctggacgtggtggaagagatatgtgctgagatggctctgacacgccctgaggccttcaatgaatatgttatcttcgttgtcaccaaccgtggccagcatgtgtgcccactcagtcgccgtgcttacatcctggatgtggcctcagagatggagcaggtggacggcggctacatgctctggttccggcgtgtgctctgggatcagccactcaagttcgagaatgagctatatgtgaccatgcactacaaccaggtcctgcctgactacctgaagggactcttcagcagtgtgccggccagccggcccagcgagcagctgctgcagcaggtgtccaagctggcttcactgcagcatcgcgccaaggaccacttctacctgccgagcgtgcgggaagtccaggagtacatcccagcccagctctaccgtacaacggcaggctcgacctggctcaacctggtcagccagcaccggcagcagacacaggcgctcagcccccaccaggcccgtgcccagtttctgggcctcctcagcgccttacctatgttcggctcctccttcttcttcatccagagctgcagcaacattgctgtgccagccccttgcatccttgccatcaaccacaatggcctcaactttctcagcacagagactcatgaattgatggtgaagttccccctgaaggagatccagtcgacgcggacccagcggcccacggccaactccagctacccctatgtggagattgcgctgggggacgtggcggcccagcgcaccttgcagctgcagctggagcagggactggaactgtgtcgtgtggtggccgtgcacgtggagaacctgctcagtgcccatgagaagcggctcacattgccccccagcgagatcaccctgctctgacccagcccccagccctccagtaccttctgccagaagactcactgtgtggcctcagagaaatcactgaacctctcaggatcaatgacccctgtaaggggccagagccttggaggacactaagaggaggcaggaggagcaactcaaatccccaagaacacaagaagacccatcctgaactgggatggaatggcagcatgcaaacttggatcagatagcaggaggaactttcaaaagtctggcccactgtgcagtggagcagaaggcaggaccatgaggcctcctgccatgtacccattgcagaccctgcccctaactcctgcctatgacacagaagccccacaccagttgcccagatgaactggcctctgcctttggtttactcagggtctgatgttggaatctgctccaactccacaccctagcccttacatgtcctcctaaggggcccctccttgtgctgccagtcagcctggatttctggtctttggttatttctgtgcaaacaaaaggtgtgcctggcagccatttctccatggagttgctaagtggccggaaaacaggcctgagggaggaggcaggagttggagttaccttaggcccctgattcactggctatgaacagaccatcccccactccttgggtatccccaaccccagacccccatcacttgatgggccacacaagtttgagagtggtacaagggagaagtttgggaaaagccttcttggaaaatgggacattagcattgagttttgaaagatgagtaggagtttgctaagaatagatggaagacagcaggataaacattccagagaaaatcatgtttattccctgctgtatcttccagaacctaggaggatgcctaacagagagtaagcacttaaaaaatatttgtcatatgaatgaaaaaataaacgagtgaatgttgataga

SEQ ID NO: 386882 - DNA, 462 bp, Homo sapiens
tcctaggatagacagagagacagaggccaggattacccaggccattgttccccttttcaggtgcacaagttcctggacaagaaccacgaccaagtgcgccaggatgtgctggacctgttcgtacggagccggacacgggtaagcctcgcctcccaccgctctggccctgcccccaggcatgtccccacccccacacccagcctgccttcaggcctgggaccgtgttgccacgtcctggctccgcttagctttggccagacaaagacaagggtggcctggacaccctgttcctggcctgttcccacctagcttggctccgccctaaacctagcgcctcatcctgatcctgtcctctggctccccacagccccagtggctagactctggccccgctcccagttctaaccctgtaccccaccagctgtggccttgccctgtacttaccccactctgggccccacc

SEQ ID NO: 386883 - DNA, 808 bp, Homo sapiens
cattcaccagacccccagggtagggagggacccagctgtgcgcccacatgtatgtgccaagtggacaggtagagcatgtgcctgcacaccgtgtgcctccagccgggccccacaggcctgcgtatgtgcccacaggcctacaggaacacctgtgtgcctgggagttgtatgagctgtaaatgccattgagtgtgggtccatatgcaggtgtccacgcattttccccaggatgagcatggggttgtggtgctaagacagtctccatctctgccctcctagaggccccatgcaccaggtcacaagtgtcctttgagttgtcacacaagccaacatatggggtctgctggtgctggaagagttgcggttgggagggagctggcccatgcgcccatgtacctgcatatgcctttgttcaccccctagggcaggacacttgggagctcatgggagggcctgcctgggcactgagggtatgcgtgtgtctcatgtgtgagggtcgcatgcaggttctgggggccacagcattctgtaatgaggagacctgcaggacccacctggccttggggttccctccccaacaatggtagcaggccccaggtatgaccaagccaggggtcagtgggggaggggggtgcccttcaacctgcagacacagcctctctctctcacacagatgcactccatccgcaacctgccatccatgcggttccgtgagcagcacggggaggatggtgtggaggacatgacacagctggagtgagtgggcagggccggcggggtcagcaaggggtcaccatggggtccccac

SEQ ID NO: 386884 - DNA, 5670 bp, Homo sapiens
gattccatgcctctgtcccatccgggccttacttttctcatctgtagaatgggcacaggacaatgtccttcactgagggtgaggccaagacccaggtgcacaagttcctggacaagaaccacgaccaagtgcgccaggatgtgctggacctgttcgtacggagccggacacggtctcccggaccctgcctgtctgttttccctgccccgacccctgcccaggtggtggcacacctcttctccagccatgccccacaggctgcccctcagcgcctgggcaagagcagctccgtcactcggctctacaaggcgcacactgtggccgccaagttccagcagtcactcctggatctggtggaaaagatggagaggtgcaaccccttgttcatgcgttgcctgaagcccaaccacaagaaggagccaggtctctttgagccagatgtggtaatggcacaattacgctattcaggggtgctggagaccgtgaggatccgcaaggagggatttccagtgcgcctgcctttccaggggttcatcgacaggtactgctgtctagtggccctcaagcatgacctgccggctaatggggacatgtgtgtgtcagtgctgagtcgcctgtgcaaagtcatgccaaacatgtaccgtgttggggtcagcaagctgttccttaaggaacacctataccagctgctggagagtatgcgagagcatgtcctgaatctggcagccctcactctgcagcgctgcctccgtggcttcttcattaagcggcgattccgctctctgcgccacaagatcatcctgctgcaaagccgggcccgtggctaccttgccaggcaacgctatcagcagatgaggaggagtctggtgaagttccggtccctggtacacgcatacgtgagccgccgacgctatctcaagctgagggcagagtggaggtgccaggtggagggggcgctgctgtgggagcaggaggagctgagcaagcgggaggtagtcgctgtggggcacctggaggtaccggctgagctggctgggctcttgcaagcagtggcaggcctcgggctggcccaggtgcctcaggtggcccctgtgaggactcctcgactccaggctgagccccgtgtcacactgcccctggacatcaacaactatcctatggccaagtttgtccagtgccacttcaaggaacctgcctttgggatgctgacagtgcccctgaggacacccctcacgcagctgccagccgagcaccatgcagaagccgtgagcatcttcaagctgatcctgcgcttcatgggcgacccccacctgcatggtgcccgggagaacatcttcgggaactacatcgtgcagaaggggctggcggtgcctgagctgcgggatgagatcctggcacagctggccaatcaggtgtggcacaatcacaatgcccacaatgctgagcggggctggctgctgctggccgcctgcctcagtggctttgcaccttccccgtgcttcaacaagtaccttctcaagtttgtgtctgattatgggcggaatggcttccaggctgtgtgtcagcaccgcctcatgcaggccatgggccgggcccaacagcagggctcgggggctgcccgcaccttacccccgacccagctcgagtggacagcgacctatgagaaggccagcatggcgctggacgtgggctgcttcaatggtgaccagttctcctgcccggtgcactcctggagtacgggggaagaggtggctggagacattctgaggcacagggggctggcagatggctggcgcggctggaccgtggccatgaagaatggtgtccagtgggcagagctggctggccacgactacgtgttagacctggtgtcggacctggagctgctcagggacttccctcgacagaagtcctacttcattgtgggcacagaggggcctgcagccagcaggggaggccccaaagtggtgtttgggaacagctgggactcggatgaggacatgtccactagaccccagccccaggagcacatgcccaaagtacttgactctgatgggtacagcagccacaatcaggacggtacaaatggggagactgaggcccaaagagggacagcaacccaccaagagtcagacagtcttggagagcctgctgtgccccacaaggggctggactgctacctggatagcctcttcgaccctgtgctgtcctacggggatgcggacctggagaagccaacagccattgcctaccgcatgaaagggggaggccagcccggtggaggcagcagtagtggtactgaagacacccccaggagacccccagagccaaagccaatcccaggcctggatgcctccacattggctctgcagcaagccttcatccacaaacaggccgtgctgctggcccgggggatgaccctgcaggccacggcactccagcagcaacccctgagtgctgccctgagatccttgcccgcagagaaacccccagcaccagaggcacagccgacgtctgtgggcaccggtccccctgccaaacccgtgctcctgcgtgccactccaaagcccttggccccagcccctctggccaaggctccaaggctccccatcaagcctgtggctgcccctgttctagctcaggatcaggcttctccagaaaccacttcaccctccccagagctggtccggtactctacgctcaactctgagcacttcccacagcccacacagcagatcaagaatattgtcaggcagtaccagcagccgttccggggaggccggcctgaggccctcaggaaggatggcgggaaagtgttcatgaagcggccagaccctcatgaggaggccctgatgatcctgaaagggcagatgacccacctggcagctgcacctggcacccaggtgtccagagaggccgtggccctggtgaagccggtgaccagtgcaccaaggccatccatggcacccacttcagctctgccctcgcgatcgctggagccccctgaggaactcacgcagacgcggctgcaccgcctcatcaatcccaacttctacggctatcaggacgccccctggaagatcttcctgcgcaaagaggtgttttaccccaaggacagctacagccatcctgtgcagcttgacctcctgttccggcagatcctgcacgacacgctctccgaggcctgccttcgcatctctgaggatgagaggctcaggatgaaggccttgtttgcccagaaccagctggacacacagaagcctctggtaacggaaagcgtgaagcgggccgtggtcagcactgcacgagacacctgggaggtctacttctcccgcatcttccccgccacgggcagcgtgggcactggtgtgcagctcctagctgtgtcccacgtgggcatcaaactcctgaggatggtcaagggtggccaggaggccggcgggcagctgcgggtcctgcgtgcatacagctttgcagatatcctgtttgtgaccatgccctcccagaacatgctggagttcaacctggccagtgagaaggtcatcctcttctcagcccgagcgcaccaggtcaagaccctggtagatgacttcatcttggagctgaagaaggactctgactacgtggtcgctgtgaggaacttcctgcctgaggaccctgcgctgctggctttccacaagggtgacatcatacacctgcagcccctagagccacctcgagtgggctacagtgctggctgcgtggttcgcaggaaggtggtgtacctggaggagctgcgacgtagaggccccgactttggctggaggttcgggaccatccacgggcgcgtgggccgcttcccttcggagctggtgcagcccgctgctgcccccgacttcctgcagctgccaacggagccaggccgcggccgagcagccgccgtggccgctgctgtggcctctgcagccgctgcacaggaggtgggccgcaggagagagggtcccccagtcagggcccgctctgctgaccatggggaggacgccctggcgctcccaccctacacaatgctcgagtttgcccagaagtatttccgagaccctcagaggagaccccaggatggcctcaggctgaaatccaaggagcctcgggagtccagaaccttggaggacatgctttgcttcaccaagactcccctccaggaatccctcatcgaactcagcgacagcagcctcagcaagatggccaccgacatgttcctagctgtaatgaggttcatgggggatgccccactgaagggccagagtgacctggacgtgctttgtaacctcctgaagctgtgcggggaccatgaggtcatgcgggatgaatgttactgccaagttgtgaagcagatcacagacaataccagctccaagcaggacagctgccagcgaggctggaggctgctgtatatcgtgaccgcctaccacagctgctctgaggtcctccacccacacctcactcgcttcctccaagacgtgagccggaccccaggcctgccctttcaggggatcgccaaggcctgcgagcagaacctgcagaaaaccttgcgcttcggaggtcgtctggagctccccagcagcatagagcttcgggccatgttggcaggccgcagttccaagaggcaactctttcttcttcctggaggccttgaacgccatctcaaaatcaaaacatgcactgtggccctggacgtggtggaagagatatgtgctgagatggctctgacacgccctgaggccttcaatgaatatgttatcttcgttgtcaccaaccgtggccagcatgtgtgcccactcagtcgccgtgcttacatcctggatgtggcctcagagatggagcaggtggacggcggctacatgctctggttccggcgtgtgctctgggatcagccactcaagttcgagaatgagctatatgtgaccatgcactacaaccaggtcctgcctgactacctgaagggactcttcagcagtgtgccggccagccggcccagcgagcagctgctgcagcaggtgtccaagctggcttcactgcagcatcgcgccaaggaccacttctacctgccgagcgtgcgggaagtccaggagtacatcccagcccagctctaccgtacaacggcaggctcgacctggctcaacctggtcagccagcaccggcagcagacacaggcgctcagcccccaccaggcccgtgcccagtttctgggcctcctcagcgccttacctatgttcggctcctccttcttcttcatccagagctgcagcaacattgctgtgccagccccttgcatccttgccatcaaccacaatggcctcaactttctcagcacagagactcatgtgagtggcctcagcctggcactgccatcgccaccctctgttccctggtccccaaccccctccaagaggccaagacctccagccgccgaagcccagttccactgcttaccaccttcatgatctcaggcaagtctcttccctcctctgagccttgctttcctcatctggaaaatgaggataagagttgagccccacccatagggctgttgtgaaggtgagatgaggtaaaacatactctatgcactcaaatagtacatctgtgtgcttaggctgccataataaaagaccacagactgagtaacttaaacaa

SEQ ID NO: 386885 - DNA, 231 bp, Homo sapiens
agtaaggaaactgaggcccaaagaacatacgaatcatgccccaagtcacaaatcttgtaattgccagaactgggacttgacaaggccccataaattctctaagtgacttgactttaccatatttataagagtagttggagctggaatgtgagggagcagggtaagaggggaaaggattgaactgactttactagagttctttaaaaattaaaacatggtcacttcatgacc

SEQ ID NO: 386886 - DNA, 602 bp, Homo sapiens
gctacaagaacatgttgtaacaatgacaaaaagttcaatgcatcacaaggactggctagaaaaaaaaagtcccaatatgccaagcaatttattgtataaaaatgtgaaaatgcaaagaaatgcagcatagtcttttcaacaaaatggtgcaaggcttactgtatgtttgtgggcaattgcaaataaatcctaccttgaaccatgccaaaaaccacaaatgcgttagagtgttaaatataaacacacaatgtagttgaataggtatctgatcttgaaatgagaagagtttttatcaacatcatgaaaaagaagaaatcttttaaaatgaaaatgtataaatttgctgacatgaaaattaaatgtctgtgggtttaaaactatgggaaaatatttcaacatctgtgtcaaacatgaacttaatatttttaccacatggagtgctactctctgtcccttaaaagataacttctctagtagaatcaggaagaaagtatttaaataagtattgcctggtatgtcttgtctgtgttgaatattttaaaaaatacaaagcaagttgataaataaaagggagagaagtatccttaatagtaaaaaacaaa

SEQ ID NO: 386887 - DNA, 496 bp, Homo sapiens
caagcagtttgggaagagtgtaattattacttgtaaacagttcattagcagaatagagcaaataggccttttgctacaggaaacaagttgctttcaacaccacagcagttttcactgtgctctagaatgttctttccccatcttctccatggtaaatggttgaaagacatttgtttggcaggtttttgggggttttattgtagtttttactatgaaaaattttaaacattaaaaaagtagagaaaataatatagtgaagttctatgtacctatcatgcagctttagcagttaactgattaatggccagctctcacctataccccatcccttctcccatcttggattattttgaaagcaaccccaatgtcaggccatttcatttgtaaatatttttagtaggtatgtctaaaagataaaaatttgttttaaaagatgcaaaacgatatcacatcttaaaacattttaactgattccttaataaattatcaaatatct

SEQ ID NO: 386888 - DNA, 367 bp, Homo sapiens
gttctccttcctatgtccaagtgttctcattgttcaattcccacctgtgagtgagaacatgcggtgtttggttttttgtccttgtgatagtttgctgagaatgatggtttccagctactttttgatttttagtagagacggggtttcatcacgttggccaggctggtctcgaactcctgacctcaagtgatctgcccacctcggcctcccaaagtgccaggatgaccggtgtgagccaccgtgcctggcccatttttccatttttgatcagtttacttctcaagctttgtacttggaattgtactctatgtgcctgaagatgcccctaataaatgtaataatgtacaggtatgtccagtgcattttc

SEQ ID NO: 386889 - DNA, 469 bp, Homo sapiens
ccatctaccccatacacccccagtgaacctaggtattctaatgtctttgtgttttctaagcctcatgaataagactgttgaataccacctccaccggatcaaaattaacacctggtgcactttctacagcaccttttttcttctccacaagtgagaggaatcttgatactttcaagcctgtatctagatctccaggtcatcaggctgaggcctgctgctggcacgactgctggctctgcttgaaggttgctggtccacaatggctagtggctgtagttcatgtccagcagctagttttttagaattctggttatcatcggggaaatcaaaaggctgtgcgtgggagttagagatggtgcttcccgcctgccccattcgattttgttctgcactgtaattagcccagttttgctcacttgcttgcttgtcgtaattgcggcaagaagaattgtttctgtcgccattaacc

SEQ ID NO: 386890 - DNA, 699 bp, Homo sapiens
actggaagactctagagaagtagagatttggtattggtttcagacacttcatgggaagcagtagaggataggagaaatcacatagcatgtggaagtgactccatttaaatttgaattttgacagtgacattaccaattatgtggacttacgcaagtaacttaacttctgtaagtctaggattccccatatgtaaaatggtatacactggtatctacacttataaaccttataaatctgaattacatgaagcatggtgccacataatactacacatgtactctgctagctcttgtctccttttctttctccccttactaaaatagcttaaagtgaatcatagattctatatggaataattatttataatattcatgacaatagtatttatcaataatttacactgagtattaaccatgcacaagccactgggctaaataaattctgtgtaggataaaaagtctctgtcctcaacaagcataaaatctggtagggctcatttacctgtgagatagggcagggtatgaaaagtgctagcacagtggcccaagatgccatggaagctagaggcagatgggagcagagctggccaaggggctacatgggtgaatcacagaactaattaccagagatggaaggtactttacagaagaggttcccaaacctggctgcacaccaaaactaagtggagagtttaaaaa

SEQ ID NO: 386891 - DNA, 189 bp, Homo sapiens
agcgagccgcacggtattgtaaatgttcaagagtgccattattacctctgttttacagatagtaaaccaggagttcaaaagacttgtctaagataaatgaaaactaactaactaactagcagtgaaacagtgatatctagtttctattctattcttatttcccttaccacatagttccatctccctact

SEQ ID NO: 386892 - DNA, 376 bp, Homo sapiens
tgaacatctagccagaaaccacagcacatacctgaagatctaaatgcatatataaacataagctgataccaggcctctccccaggctcatttgatcactatttcgggagctggggccctgctattgaaattgctgaaattccaagaatcattgccccaaccctgacatcttttcaattcttcacaacttgggggcaggtggggtgagaaaggggactgaagacctgctgctatgtctctaactcccgtggtgctcctctgactaggcattgggtgggcagtggtggtcttcagcaagaaccattatgtaggagaagagggtagacctctggctatcaggagcacacagttggactggcttgtggaggctgtggccc

SEQ ID NO: 386893 - DNA, 387 bp, Homo sapiens
tccaatattagtcatagacaccaagccactgtcttaagaatcttagaaaacatcaagcagaattagaacaaaaaacaaaaacaaaccaacaacaaccaaaagtaactgagatatatcctgtttaaaccatagaaaattgaaaccaaagagaaaatcttgaatacatctgaaaagaatgaggacattctctttagagaaacaaggattaaaactactgcagacttctcatcagaaactgtgcaactctgtaatctgagctactcgggagactgagacaggagaattgcttgaacataggagtcggaggttgcagtgagctgagatcatgcccctgcactccagcttgggtgacagagcaagactccgtcaaaaaaaaaaaagaaaaga

SEQ ID NO: 386894 - DNA, 379 bp, Homo sapiens
tgatggtgtaacagataacagaatgaaaggaaatggtttggtttctataaaggaaaaagaatggtttgtataaggaaaccattagtttcctgagattgctataccaaattatcaaaacttggtgtcttaaaacaatagaaattttttctcccacagttctggaggccagaaactcaaaatcagtatttggcggctgaaatcaaggtgttggcagcaccctctggaggctctcggacagaatctgtcccttgtgtctaacagattctgctggctgctggcattccttgacttgtggtcgtatcattcccatctcctcctccatagtcataacgctttctcctcttctctggcatttgcatcccttttataagacacgtat

SEQ ID NO: 386895 - DNA, 2431 bp, Homo sapiens
agagagagagagagagagagagagagagagagcgagagagcgtgagcgcgcgcaagctagcgagcaaaccagagagacagaccgagagagggaccaggagagagacccagagagagaagaagcagccagaagccgagctctgtcagggctcaacctccaacttgtttcagttcattcatccttctctcctttccgctcagactgtagagctcggtctctccaagtttgtgcctaagaagatgataatcacacaaacaagtcactgttacatgaccagccttgggattcttttcctgattaatattctccctggaaccactggtcaaggggaatcaagacgacaagaacccggggactttgtgaagcaggacattggcgggctgtctcctaagcatgccccagatattcctgatgacagcactgacaacatcactatcttcaccagaatcttggatcgtcttctggacggctatgacaaccggctgcgacctgggcttggagatgcagtgactgaagtgaagactgacatctacgtgaccagttttggccctgtgtcagacactgacatggagtacactattgatgtattttttcggcagacatggcatgatgaaagactgaaatttgatggccccatgaagatccttccactgaacaatctcctggctagtaagatctggacaccggacaccttcttccacaatggcaagaaatcagtggctcataacatgaccacgcccaacaagctgctcagattggtggacaacggaaccctcctctatacaatgaggttaacaattcatgctgagtgtcccatgcatttggaagattttcccatggatgtgcatgcctgcccactgaagtttggaagctatgcctatacaacagctgaagtggtttattcttggactctcggaaagaacaaatccgtggaagtggcacaggatggttctcgcttgaaccagtatgaccttttgggccatgttgttgggacagagataatccggtctagtacaggagaatatgtcgtcatgacaacccacttccatctcaagcgaaaaattggctactttgtgatccagacctacttgccatgtatcatgactgtcattctgtcacaagtgtcgttctggctcaacagagagtctgttcctgcccgtacagtctttggtgtcaccactgtgcttaccatgaccaccttgagtatcagtgccagaaattccttacctaaagtggcatatgcgacggccatggactggttcatagccgtctgttatgcctttgtattttctgcactgattgaatttgccactgtcaactatttcaccaagcggagttgggcttgggaaggcaagaaggtgccagaggccctggagatgaagaagaaaacaccagcagccccagcaaagaaaaccagcactaccttcaacatcgtggggaccacctatcccatcaacctggccaaggacactgaattttccaccatctccaagggcgctgctcccagtgcctcctcaaccccaacaatcattgcttcacccaaggccacctacgtgcaggacagcccgactgagaccaagacctacaacagtgtcagcaaggttgacaaaatttcccgcatcatctttcctgtgctctttgccatattcaatctggtctattgggccacatatgtcaaccgggagtcagctatcaagggcatgatccgcaaacagtagatagtggtggcagtgcagcaaccagagcactgtataccccgtgaagcatccaggcacccaaaccccggggctccccttcgcgtatttcaggattctcctttttacccctctaccaagctgtgaccctcaattcatatttatgaatctctacgcaaaaaataactacagaaaaattacttgtccctccaatattgcccagtataaccccatcaaagccaaacactgccatttgtccagttgctcatcttagtctgccaatctcccctagctgagggcactgcatgtattttattgcactctgcccgctgcaaaaagaacaagagattctactctccatagtggaagccttggctgtttgagaggcccagaacaaggagaattgttgactcccatctagatcagatgactctaacttactaggcagccaggttaggctaggccatgtgatcctgcgtgccacctcccctgccttcagcaaggcctactaggcataagtactgatagcaaaggtgggagccagttctacacccccaacccatttattggtttggaaattagtggggacaattggtactaaccaccgtctaccatgtatggccaaaataaatagaactagctctgccagcctggcaccaagatggctggtgccctgccatgtccagcccctcgggaaaatagtcccctccttggtacatctctcctccagaaaatct

SEQ ID NO: 386896 - DNA, 922 bp, Homo sapiens
agagagagagagagagagagagagagagagagcgagagagcgtgagcgcgcgcaagctagcgagcaaaccagagagacagaccgagagagggaccaggagagagacccagagagagaagaagcagccagaagccgagctctgtcagggctcaacctccaacttgtttcagttcattcatccttctctcctttccgctcagactgtagagctcggtctctccaagtttgtgcctaagaagatgataatcacacaaacaagtcactgttacatgaccagccttgggattcttttcctgattaatattctccctggaaccactggtcaaggggaatcaagacgacaagaacccggggactttgtgaagcaggacattggcgggctgtctcctaagcatgccccagatattcctgatgacagcactgacaacatcactatcttcaccagaatcttggatcgtcttctggacggctatgacaaccggctgcgacctgggcttggagatgcagtgactgaagtgaagactgacatctacgtgaccagttttggccctgtgtcagacactgacatggagtacactattgatgtattttttcggcagacatggcatgatgaaagactgaaatttgatggccccatgaagatccttccactgaacaatctcctggctagtaagatctggacaccggacaccttcttccacaatggcaagaaatcagtggctcataacatgaccacgcccaacaagctgctcagattggtggacaacggaaccctcctctatacaatgagaatagaggaagtacagaagcacagaagcatgatgaagccatcggtttcctacacagtagcaccttggatccaggaaggtgggcctggagggagacataggctcaaaatggaaaaataaaagcctggctcttt

SEQ ID NO: 386897 - DNA, 1549 bp, Homo sapiens
agagagagagagagagagagagagagagagagcgagagagcgtgagcgcgcgcaagctagcgagcaaaccagagagacagaccgagagagggaccaggagagagacccagagagagaagaagcagccagaagccgagctctgtcagggctcaacctccaacttgtttcagttcattcatccttctctcctttccgctcagactgtagagctcggtctctccaagtttgtgcctaagaagatgataatcacacaaacaagtcactgttacatgaccagccttgggattcttttcctgattaatattctccctggaaccactggtcaaggggaatcaagacgacaagaacccggggactttgtgaagcaggacattggcgggctgtctcctaagcatgccccagatattcctgatgacagcactgacaacatcactatcttcaccagaatcttggatcgtcttctggacggctatgacaaccggctgcgacctgggcttggagatgcagtgactgaagtgaagactgacatctacgtgaccagttttggccctgtgtcagacactgacatggagtacactattgatgtattttttcggcagacatggcatgatgaaagactgaaatttgatggccccatgaagatccttccactgaacaatctcctggctagtaagatctggacaccggacaccttcttccacaatggcaagaaatcagtggctcataacatgaccacgcccaacaagctgctcagattggtggacaacggaaccctcctctatacaatgaggttaacaattcatgctgagtgtcccatgcatttggaagattttcccatggatgtgcatgcctgcccactgaagtttggaagctatgcctatacaacagctgaagtggtttattcttggactctcggaaagaacaaatccgtggaagtggcacaggatggttctcgcttgaaccagtatgaccttttgggccatgttgttgggacagagataatccggtctagtacaggagaatatgtcgtcatgacaacccacttccatctcaagcgaaaaattggctactttgtgatccagacctacttgccatgtatcatgactgtcattctgtcacaagtgtcgttctggctcaacagagagtctgttcctgcccgtacagtctttggtgtcaccactgtgcttaccatgaccaccttgagtatcagtgccagaaattccttacctaaagtggcatatgcgacggccatggactggttcatagccgtctgttatgcctttgtattttctgcactgattgaatttgccactgtcaactatttcaccaagcggagttgggcttgggaaggcaagaaggtgccagaggccctggagatgaaggtcatgccacacacttttgggacactatccttgacctgaaatctagagcagcaggtatcctcagtgtcatcttcaccctgatctgattttcactgcgcttcactttcacttcacttccgagcccttacttcttgggattaaggttataaaagctgttaagtttcacc

SEQ ID NO: 386898 - DNA, 254 bp, Homo sapiens
tacggcctgcgaggccaagaatgctcagcatctgctctctgatgggaggcgtgtcttatcgcctgctgtggacgcccacaggctctgccacgtggtcggcatttaagattgtccaggaagtgcagctgtaggtggacctttccctcgtcctggcaactgccttgagactgagtttctccatcttttagatgaggctgacacatgtgcctcagaggctctcctgaaggagtcacagacttgagcccttcacgcct

SEQ ID NO: 386899 - DNA, 532 bp, Homo sapiens
cccaccccccaacacagacacacacaaacacaccgcccctacaaacgtatacatgttaggttgagcttcctgctaggggtgacaagcgaagttggcagcaggtctggtgtgctggtgtttggggcacgtccagcctctttggaggtaggctattatagcttaggcaagaccacagacaggtagcataatctgggcctcttttaaaatggcaagaacggcttcaggtgaacttttttgttgcagagatttaattgcaagtaggtgccggttgaaaatgggagcgcaaggaaaaccactaatttccttggcacatgtgctgttgcaattaacctggtagagtgttaaggaatttaacttagccaagaggctttgagggaggattatatgcaagtttggggaaggaattgataagattctggggtatgggactagctacatacacgtgcgtgcaagtttacgttaaattatgtagcattttagatttagcagtattaaatggttgcttttcttggaatggcttctgactacatag

SEQ ID NO: 386900 - DNA, 689 bp, Homo sapiens
gatgcttccagttttacacatgaggagattcaggctctgagagaggtggtcattgtccaaggtgtcttgctacttaataagtaatagaggctgggcatggtggctcacgcctgtaattccagcacttttggaggctgagggaggcagatcacttgaggtcaggagttcaagaccagcctggccaacatggtgaaaccctgtctctactaaaaatacaaaaattagctgggcttggtggcgtgcacctgtaatctcagctacttgggaggctgaagcaggagaattgcttgggcctgggggctgaggctgcagtgagctgagattgcgccactgcactccagcctgggtgacagagtgagactctgtctcaaaaataataataataataataaaataagtaacagaggtaggctttggagcctttgtgtgtcctcttcctgcttttcccatgacacctctctgcagaaggttcatgcctagacctgcctggagaattccttgtgttacaggagatgtatgaaaaggagaacttcgtttccctggagcaattttgaaccttaattattggttttaatctttagcttttcaaattcaaagcttgtttggcttcttagttaaattaaaggtattattctcccatctatttaaatgagaatgctctaaaaatggcagcgtgatgtccctattgc

SEQ ID NO: 386901 - DNA, 815 bp, Homo sapiens
cccagagtcctcaggtactagttgccatccgtgcctctgtagctggcgtcttgggaagcgccaccttgagggccctctcatctctgtgctgtccatctgcattcagcaggttggcattcagctaatatttatagttcaccacgaaaacactgatattctcatagtgccattaaataacagaatccaaacatgcttcgaagtgtatatgaagtggattattttgccatacttctgactcattatttcctgaaatctgaaagaatataacattataaagctcctggcatatctaggggcagcatgaaaaactcagacagcaaatatgcaaatatcctgagatgtacacatttccagaggcttccagacagggctgtaaactacattacttaaatgctattatacttttaggttctttcacccctgataacatctcagcctgacagaagccccaacccaaagctgctagaatgctaagttttgatccaaaaagacccctggcctcacagttggtctggaatttgaacagagaacttgaaagcagaagtttccctggaaaaccaggatgtacaactgccatgagtcgccttttaagctggaacaatatcatgaaacaagaatggtgaccccttgaacttctagaaaaaatattttctatatgagatggaaaaacattattttctgttcttatggatgtgagaagcaatctgaccaaaatcttctggttctaaaaatacataaatagctagtggggcaatatgttaacaatttaataaagggtaaatggaagatctttgtacttgtattcttgcaacttt

SEQ ID NO: 386902 - DNA, 403 bp, Homo sapiens
ggggcagggctggaagcctggcaggcagtcaagactacccccacagtacagtcaggaaaagatgaggactcaggtaaggagagggatgtgggtggcaggggagggagatgaggggagagcatagccctccaggcttagcgaccacaggacatggggaggagtgagtgaaggagaaagtcaagaatggctctgggttcccagcttgagcctggggtaggcgaaacggcccctgacaatgcaggggtggacagaaagccagcttgtgggctctgctcagacatgaaaggcagaggggttcacaggacagccaggtggagatgtttcaatgaagagatctgaggcaccagagagaggtctgaacgggaagcgtgggagtctgtagagggaagaaggcctgggaaac

SEQ ID NO: 386903 - DNA, 845 bp, Homo sapiens
  misc_feature (1)..(1): n is a, c, g, or t
  misc_feature (474)..(474): n is a, c, g, or t
  misc_feature (541)..(541): n is a, c, g, or t
  misc_feature (665)..(665): n is a, c, g, or t
ngtctcagatatgggtattacagaggtgagcaagattctacaaggggccccccatctctgtagtttacaccctaatgagagggtgtaacaaacaacaaacaagtcaaccagtatataaatagaatcatttcagatcaagaaaaatgctggctgcacagaaaataaaacagggtaatggaaaatccagtgatacgccaagttctctaagtcctctgaatctccctggagctggaagtgagatggaagagaagaatgccactagtgacagatgttggagcatctgtttccatggcaaggcaactgctggaactgaactctgctctgaaaactagccatactcccagcatgcctgtgtttggggtcctagaagttggtagctttcctcaaaggatcatgtacttcaagatcctgttaattgattgaaaaaggcattccagaatatccagtctgagtgtaagaaccctgtggactctnctccccgggcacctcttctgtaggagccgatctgccccattgaggacctttcatctgcacaaggggncaggcattctcccaaggcctggcagacagtataggaagcaggatctgctcctgaagaaggggatggctcaagacagtgctgccgcccagacaatgaggaagccagctgggatagctagaaacanagcacagcacttaaatctcagcatcaagtgcttatctatgtcttcaatctgtcacatttggctccgactcctttttctcatgcatctattaggggatggaacaaatgtttcattcagcaatagcttagaatctcatgcccattataaagataaccataaataaatgaaagctagaaggcc

SEQ ID NO: 386904 - DNA, 480 bp, Homo sapiens
gaaatttagattctgatgaagggcaggtacagagaacaatttttataagaagcttttgattctgaattgatgataggtgtatatgtgtgtatatagagagatgtgtaatatatatatggaacacacatgcacacacatggtagttaccttccacgtttgttccaaaggcgctgtgaaaggtggactgggtgcaggatggaaaccgcctcactgtgatggattataagcctccaggcggtggcagcaggagaaatgaagctctgtcctgtcatttctgttcactagcagattttgatgactctatgccattcacacatatttggtgtgccgtgacacaattcagtcctttcactgcaaccaaagagggtacaaactcatagaataatttaggcttttaagaagcccttaaaatgtttaatgatgcctgtattaaagtgtttttaaggacgtgagttttgtccaatgtaatattcaaccgtt

SEQ ID NO: 386905 - DNA, 600 bp, Homo sapiens
gtgcgggggctgggaagtggctgggggtgcacagtcccacacctgtcattcactgaacaggcacgtattgacagcttgtggcgtgtcaggccctgtgcccaactctgggagtcaaggataacctgacagactcaggccactttaggaaaacgaaatccaccccaaccacacttagcgagtcaccctggccgggcctgggctgccctccagtcggtcagccggactggatttccacgcggccgagccctacgcctcccagaccctgagctccagtctgcacaggccaggtgtctggagccgggcctggtgacaggcatcccccaggtgggaggaggggctgtcctggctctgacctggatatcagatccagagctgagggggaggcgcagggtcaggaggggaggggttctgttctgagtttcccctggccaaggctgcagacaagggacgcagacaatcggcacattgtgagcaggggctgcaggatggaaccagcaagctgctgtgctgagcgccccaaacctgggcctacaggggtgagtgcctcccgttactcctgcagcaaggacccagggggtgccccaggccacccagcccctc

SEQ ID NO: 386906 - DNA, 665 bp, Homo sapiens
gtgcgggggctgggaagtggctgggggtgcacagtcccacacctgtcattcactgaacaggcacgtattgacagcttgtggcgtgtcaggccctgtgcccaactctgggagtcaaggataacctgacagactcaggccactttaggaaaacgaaatccaccccaaccacacttagcgagtcaccctggccgggcctgggctgccctccagtcggtcagccggactggatttccacgcggccgagccctacgcctcccagaccctgagctccagtctgcacaggccaggtgtctggagccgggcctggtgacaggcatcccccaggtgggaggaggggctgtcctggctctgacctggatatcagatccagagctgagggggaggcgcagggtcaggaggggaggggttctgttctgagtttcccctggccaaggctgcagacaagggacgcagacaatcggcacattgtgagcaggggctgcaggatggaaccagcaagctgctgtgctgagcgccccaaacctgggcctacaggggtgaagaccaagccctcctgcgggggctggagagccgtgggcctgctcctgctgctgctgctgctggtgctggccgctgtgggggttgtggctggagggcttcttggctctgctcagggccctcccaag

SEQ ID NO: 386907 - DNA, 220 bp, Homo sapiens
gttaaaatgctacaaacagggcaaagacaccttcaataaatattaagtgaattaatcagtccttttctggaacttaaaatcttgtagaatactcaaataataattttattttattttaaaatgcttttgtgccaagatattttatcaaatttctaaaatataattttttagttatataatagtctaacataaaatttaaaaaattatttattaagatatg

SEQ ID NO: 386908 - DNA, 451 bp, Homo sapiens
gaaatatttaagtttgttttattggttaaagcagaatagtaaaatcattttaatgattttaacatgtcaagtttaacaaagtgcatgataaatataaaaattagttgtttaaaaatcatcttcaaaatatgtatttcaaatcaataaggtcctctatattaatttgaaagtcactatgttttgatctgtttttaaatatttttctgtatggaacttttgaatgacatgtgaagaacatgtactgctaaaggatgtataaattaattcatcttgtaataaacagcaatcttattatttaaaacattaatgttaaaatgcattgctagctctgatatatttatttccacatatcaaattcattatttttacctatccaaataccacattctagtatctaaattggtaactcttatacccagatatgtgttgcacttaaaatatcttattgctt

SEQ ID NO: 386909 - DNA, 827 bp, Homo sapiens
cccgccatcatgctcggctaatttttgtagacacggggtttcaccatggccaggctggtcttgaactcctgacctcaggtgatccgacggcctcggcctcccaaagtgctgggagctacagcgcccagccggcatatttcattttattatttgactcccctagtgaaatgtaagcttcacaaggaagggattctgtcttagaacggtgcctggaatacaacagacgctcaataagtgggtgtcgaataaataaatgtcccacgctgaggcttaggtacgttatgatactcattttacaaaagagaaaactaggacacacaaagattaagtcattgggtcgcacacctagtaagtgggggaggcgagtcctcagcacacgcccaataacagcattattatgattactagccgcttactcaggccttgagctaagtgctttaccctgaatcatcgcgctcaatttagcaataaccccgagccggcaccgtcgcgaacgccactttccaaaggaggaagccagggccagacgttgccctgcaaggccggggctgggccgggttcgaacccggacgcctgacgcgccctccgctctcccagaggcgttaccttggtggcccccgcttcctccccacggagcccggcgctcacccccgggccggggtcggggtcgtgagcccacagctcagccaccatctccgtgtgaagaaactcaaacaacacagtatccgccatgccccctcctcgcacgcctaaagatgcgcccagcgcttccagctctcattggccaggcttggtaagccacgcctcttgcgtcatggcgcgagccc

SEQ ID NO: 386910 - DNA, 286 bp, Homo sapiens
gctctctctaccccctcatctaggtatgtgtatagctcatttatttaggggtgatgttaaaaaattgaatgcccttaatggcaagggaaccaaccaatcaatgtggatgccacaactttttcccctgttgactgttgttattggtatggaagtattttttttttctcccagcttttatttcaggttcaagggatacatatgcaggtttgttacatgggtaaattgcatattgtaggggtttagtatacagattatttcatcacccaggtaataagcgtagtacctg

SEQ ID NO: 386911 - DNA, 410 bp, Homo sapiens
tggacactcacctcaaggaggctgcgtgtgtacatgcatgcagaggaaagcccaggtgtagaggggctgacaaggagaggaggaaggaggagagaggagggagaactcctagcgattgaaagaaagataaatgggagctactggtgtgagtgggacaacacaacggaaccgtgggatgtctgaagacactgtgctcactcaaggaagcgtgaaagagaggaagaaaattggagacccatagaaaattaacattagataaggattctagatggttttttggttataaatacttagagctacttggttttagcctgatatctacaagttaatctgttgagttccagataaaaagaatactggtaatggatttagaagagaaatgaataaaagactgttatatttgctgcctg

SEQ ID NO: 386912 - DNA, 234 bp, Homo sapiens
cagaaaacatgcctgggcaggggacagacatcctgttcccattgagggactagtcggcctgaaaatgaagcccccaaggaggacagcagagacaagaagttcccgatagccttgagagactgcaaagattcacccacccctggactttcagtctcagagtcaataaaatagcttttgttgtactttactttgctcaagccagtttactttgtttcactgttatttatttattta

SEQ ID NO: 386913 - DNA, 432 bp, Homo sapiens
taattggtaacagaagcagcagtagcctgtgaggatgggaacatgaattaaaccctccttagtgctggtggtggatcacctccctcaagcatagccctttaatcgggttgtattcactttcataatctgcatctgcctctcccttcttttcttatattgttactgttttcaaatgaaaagtgtggaaggtaagtttttttttaattgtacttaattacaataacaaccagcagtaagatatatctttgccagttgctcttattcatggtgtagataaaaaaatctgagtacagtgggcaataaatagtggaaaaccaatcccactttatctttagattaaattgaatgtactttcttcttaaaaatactgttttgtttagttgttaaatcctgaaaagaaactagtatatttgctaactggagttatttgga

SEQ ID NO: 386914 - DNA, 5281 bp, Homo sapiens
  misc_feature (2256)..(2256): n is a, c, g, or t
acccgcgacccacatccgatcggtaccggagcgggaggtgaggggtcggctcgcggatccagctgcagagcgacgtggggaattggaatggtgctttggatcttatggaggccatttggattctcaggaagatttctgaaactggaaagccatagcataactgaatcaaaatcgttgattccagtagcttggacatccctgacacagatgcttttggaagcacctggtattttcttattgggtcaaagaaaaagattctcaaccatgccagaaacagaaacacatgagagagagactgaattgttttcaccaccttctgatgtccgaggcatgacaaaacttgatagaacagcttttaaaaagacagtcaacattccagtgcttaaagtgaggaaagaaatagtcagtaaattgatgcgatccctaaaaagggcagcattgcagcgcccaggcataagacgtgtgattgaagatccggaagataaagaaagtagactaatcatgttggatccctataaaatatttactcatgattcctttgagaaagcagaactcagtgttttagagcagcttaatgtcagtccacagatctctaaatacaatttggaactaacatatgaacactttaagtcagaagaaatcttgagagctgtgcttcctgaaggtcaagatgtaacttcagggtttagcaggattggacatattgcacacctaaaccttcgagatcatcagctgcctttcaaacatttaattggccaggttatgattgacaaaaatccaggaatcacctcagcagtaaataaaataaataatattgacaatatgtaccgaaatttccaaatggaagtgctatctggagagcagaacatgatgacaaaggttcgagaaaacaactacacctatgaatttgatttttcaaaagtctattggaatcctcgtctgtctacagaacacagccgtatcacagaacttctcaaacctggggatgtcctatttgatgtttttgctggggttgggccctttgccattccagtagcaaagaaaaactgcactgtatttgccaatgatctcaatcctgaatctcataaatggctgttgtacaactgtaaattaaataaagtggaccaaaaggtgaaagtcttcaacttggatgggaaagacttcctccaaggaccagtcaaagaagagttaatgcagctgctgggtctgtcaaaagaaagaaaaccctctgtgcacgttgtcatgaacttgccagcaaaagctatagagtttcttagtgctttcaagtggcttttagatgggcagccatgcagcagtgagttccttcccatagtgcattgttatagcttttccaaagatgctaaccctgctgaggatgttcggcaaagggctggagctgtgttaggcatttctctggaggcatgcagttcagttcacctggtaagaaatgtggccccaaacaaggaaatgctgtgcatcacgtttcagattcctgcctctgtcctctacaagaaccagaccagaaatccagagaatcatgaagatccacctcttaaaaggcagaggacggctgaagccttttcagacgaaaaaacacaaattgtttcaaacacttaattggaaatgttttctccatctccctaccagacttacatgtagtgaaatagaatttgtattatttaataaaattttagggtttggtttttactattgaacccttgtactttgccttattttacaaattgaggattaccaattaaactttaactgaactaaggctaccaaatacattccctgttatctaaattataacatacaattattttataacaaaatatatctaatttttattggataaatatgaataaatattttctctcagggaaaataatttttgaaagtagggtgattgagtactaactaggaaggtattaacaccactttgtagttgtcctttacgtaactactcctttactgccaattaactatcaccataaaagtaataaaaaatgaaattatttagaacggggcaggcaaactacatcctgcaggccaaatctgtcccaccacctgttttcatatggcctgtggcctaataatgttcttacgttttccattggttgaaaaataatcaaaagaacattttgtgacgtgaaaattttatgacatctattatgtatcagttttaaaaattagaattgtatgaaattaagagtttcagagttcataaagtttgattggaacataccatgctcntttgtttacatatcatctgcagctgttttttgtttttaatatggaacgcttcacgaatttgcatgtcatccttgcgcagggaccattctgatcttctctgtaccattccagttttttagtatatgtgctgctgaagtgaggactgcagctgctttcttgaacaatagcagagttgagtggttgcaacacacactgaatgtgactgtcatcacttcacactgctgtttgacacatcacaaatcactgatgtggttgtaacgacagcattttgagtgccatgtatatcacatgaacccacattttattttttattaccagagcatatctattatagcaaaacaagaaaagtggactttgttgttatttttaaagtacagtagggtgtgaattattttgatgttgaattagacgacaaagcatctatatagctaagctaaaagaataaccattgacattaccagacaaaccactcatcacagtattcccaactcacaggcaagcaactgttagaaaaattagaaaatttaaaatggaaataacaaagcagaatttcttcgcaaaatgaaaatgaggctgcaacaacagtaagtctctaagtcaatcatttgttagccaagcaaagccatttattgatggtgtgaattaattatgtttggatgcagcagctgaatatatccagagaaaataaacttaagattactggcctttggcaagaacagttgcttaaagagttaaggacattgaaagcgacataaatagtcactttaaaaaggaaatgattctggatggttctttgactctatttttatttttacttagagacagggtcttgctctgttgcccaggctggagtgtagagacacagttacacctcaatgtaaccttgaactcctaggcttgagatcttcccatctcggcttcccaatgtgtgaaggttacaggtgtgagcccttatatgtggccctcgtgaatggtttagcactatccccttggtggtgtccttacgataatgagttatgagatcttgttgtttcaaagtatgtggcactcgccccccacactctcttgctcctgccttcgccatgtgaagtgccttctcctattttgccttctaccatgagtaaaagcttcctgaggcttccccagaagcagatgccagtgctatgcttcctatagcctggagaactgtgagccaattatacctcttttcttataaattacccagtatcaagtatttctttatagcaatgcaagaatggcctaaaacacaaggcaaaacaactttgatatggtacagtcattttgacaatcgatatttgaatcacaatatttgatgacaatatccttacacatttgtcatactatcaaagagaaagaaacaagatttccattcccacaaattttagtgagtatattttctgagttcagcatttttagggacctaggtgcaagtgcaaaggaaatttccctgtttcaaaatctatttaactgcaattgaggtgattcaacctaattttcagtaagaagtgattaaaataatgacatgctaaaaggcaaatttcaagggaagaaatgtaaaagaattttacaaatgctttccaagtgatgaatatgctcagttaatttcatatgctcctggattgatagcagtatttggcaatacctatctgtatgagaagacatttttaaagatgaaatgtgtaaaatcttattaccattagtattaatggttaatgatggttaatgataaccattaataggcaatcatttacaactgattttgatcacagggaacacttacttagaaccctgattagaggcaatgttattctcaccaaaaaaggcattacaaaaaattgggctatattttgaattttgtcaattaaaaaagcgtgggagcagtgtgaaggagaagaggcaagaacgacccctggaccgaccaaagcccgcgcgctgctgcgtcccacacccggtgcccacatcccgccgccgccgccgccgccgccatgcccaagagaaagactgaaggggatgctaaaggagataaagccaaggtgaaggatgaatcacagagaagatctgcgaggttgtctgctaaacctgctcctccaaagccagagcccaagcctaaaaaggcccctgcaaagaagggagagaaggtacccaaagggaaaaagagaaaagctgatgctggcaaggagcgggaaggtgctggagatcccaagtgaagtgtgtgcattttttataactgtacttctggtgactgtacagtttgaaatattctttatcaagttttataaaaatgcagaattttgttttactttttttaagctatgttgttagcacacagaacacttcattgttgtttttgggggaaggggtatgtgtcactaatagaatatctctgaagctggattgatacggggaaaacatctttcccttctagttttgagagacttcctcttggctcccaggaggagggatttcctgactttgacacacatggccaccttggcacaaaagccttgtggtatggaaaaacaaattcgtttttatgtcttcttttccctttccatctttcagcatagacttaacccttaagcccagacatctgttgggacctgacccccggtcattggttaccagtgtgtctggcaatctggactttccagtgatgccactgagatggcacctgtcaaaagagcagtggttccatttctagattatggatcttcggataaattctgccattttcatttcacttcctgaaagtcagggttggcttgtgaaaagttgttaaacaacatgctaaatgtgaaatgttaaccctctaaactttccctgttcagagcatcagatgaggacttcattgggttttatagtggctgatttttggtagtccattgaagaagagagtttgaaagttgtatactgttaatgactgtctgcccatgtcctgcctgaaataccatgattgtttatggaaagtatctttaataaagctggatacagtttgaaagaaaaa

SEQ ID NO: 386915 - DNA, 1714 bp, Homo sapiens
acccgcgacccacatccgatcggtaccggagcgggaggtgaggggtcggctcgcggatccagctgcagagcgacgtggggaattggaatggtgctttggatcttatggaggccatttggattctcaggaagatttctgaaactggaaagccatagcataactgaatcaaaatcgttgattccagtagcttggacatccctgacacagatgcttttggaagcacctggtattttcttattgggtcaaagaaaaagattctcaaccatgccagaaacagaaacacatgagagagagactgaattgttttcaccaccttctgatgtccgaggcatgacaaaacttgatagaacagcttttaaaaagacagtcaacattccagtgcttaaagtgaggaaagaaatagtcagtaaattgatgcgatccctaaaaagggcagcattgcagcgcccaggcataagacgtgtgattgaagatccggaagataaagaaagtagactaatcatgttggatccctataaaatatttactcatgattcctttgagaaagcagaactcagtgttttagagcagcttaatgtcagtccacagatctctaaatacaatttggaactaacatatgaacactttaagtcagaagaaatcttgagagctgtgcttcctgaaggtcaagatgtaacttcagggtttagcaggattggacatattgcacacctaaaccttcgagatcatcagctgcctttcaaacatttaattggccaggttatgattgacaaaaatccaggaatcacctcagcagtaaataaaataaataatattgacaatatgtaccgaaatttccaaatggaagtgctatctggagagcagaacatgatgacaaaggttcgagaaaacaactacacctatgaatttgatttttcaaaagtctattggaatcctcgtctgtctacagaacacagccgtatcacagaacttctcaaacctggggatgtcctatttgatgtttttgctggggttgggccctttgccattccagtagcaaagaaaaactgcactgtatttgccaatgatctcaatcctgaatctcataaatggctgttgtacaactgtaaattaaataaagtggaccaaaaggtgaaagtcttcaacttggatgggaaagacttcctccaaggaccagtcaaagaagagttaatgcagctgctgggtctgtcaaaagaaagaaaaccctctgtgcacgttgtcatgaacttgccagcaaaagctatagagtttcttagtgctttcaagtggcttttagatgggcagccatgcagcagtgagttccttcccatagtgcattgttatagcttttccaaagatgctaaccctgctgaggatgttcggcaaagggctggagctgtgttaggcatttctctggaggcatgcagttcagttcacctggtaagaaatgtggccccaaacaaggaaatgctgtgcatcacgtttcagattcctgcctctgtcctctacaagaaccagaccagaaatccagagaatcatgaagatccacctcttaaaaggcagaggacggctgaagccttttcagacgaaaaaacacaaattgtttcaaacacttaattggaaatgttttctccatctccctaccagacttacatgtagtgaaatagaatttgtattatttaataaaattttagggtttggtttttactattga

SEQ ID NO: 386916 - DNA, 847 bp, Homo sapiens
  misc_feature (21)..(21): n is a, c, g, or t
ccgagaggcgaatgaggaagnaaagctatcggctaggtagcgaggcctgggtgttaggcttcctgagcgtcccagtacactgacagagacacttggattggacttaatcttaaacctctggagttcaagaccttttaaaaagggctaaataaacaatctctacatgtaaaaggccactgactcctacttcctctgtatagagcaactgttgaactcagctgcctgtaggaaaactgaagactttaataacaaactctccaaggtgaaaatgaacacagatagcggtgggtgtgctcgcaaacgtgccgccatgtctgttacgctaacatctgtgaagagagtgcaaagttctccaaacctattggctgcagggcgtgattctcagtcaccagactcagccaaaaggttttagaagcgttcgaccaaacctacaagataaaagatcaccaactcagagccagataacagtgaatggaaactcaggaggtgccgtgagtcccatgagttactatcagaggccgttttccccctcggcatattctctcccagcctcactcaactccagcattgtcatgcagcacggcacatccctcgattccacagacacatatccccagcatgcgcagtctctggatggcaccaccagcagctctatccccctgtaccgatcctcagaggaagagaagagagtgacagtcatcaaagccccgcattacccagggatcgggcccgtggatgaatccggaatccccacagcaattagaacgcgacgtcgacgggccaggctggctccgacgtgttagccttcctgtgccagccggtgtgacgactgtttcccctttaacgg

SEQ ID NO: 386917 - DNA, 837 bp, Homo sapiens
  misc_feature (21)..(21): n is a, c, g, or t
ccccccaccaccaacacccanacccacccaaaaaaaaaaaaatcaaaccccaacacccccctaggacctcaagaagaaccaaattctttggtactttccccggaaactacgtcaagaggctgtgaattgcgctccctccttctgtagaggccgcctgccagccatgcacctgcgtcaacgcgcctgaaacaccccgcgggcctcccgttgtcatgccttacggtttccaatgcgccgtcaccatctccacctgccaccaaaccaccagcagagtagccgccgctgctgtgagcctggggacgacatggcaggctggtccccctccgtgaaagtgtggattcctacttcctgctctaagctttgacacgtcaaaatgtgggatcagaaagaaaaaaatcatgatatttaaaaatggttccatgtcttgtcgccgaaaatcctggaagcagtgtgtgcagcgaggttctgccgactgcgggctttacttaaacatattcccccaggtgattctctcccccatcatccaccacaaacttgttatttctcgcaacgatgcaccatactatacctcatatcatcttcctacaaatcgccacctgcactcctcctcctttcctctctcatctttttcactccgacttttattcacctgaaacccaccccctcccctcagccttcctcccccgcattactttatcatatgaatccaacaatacaccaccccccttccccgaaccccccgccacacaaacgttaaacccaccagccgacacactcgagtcaaaccgcccactactcagaattaaatatataaaatgcgatcaaccacaaaacacg

SEQ ID NO: 386918 - DNA, 901 bp, Homo sapiens
tccttttattgtggatgaacaccacgtacatgccgtaaatgctccctaggctggctgcggctacaaggcagacccgggagctgagaatagaggaatacctgcccaagcaactcattctgcacagcagccgacaagacagcgattttcctgtgctggaatgtgcccatccaaagacacttggattggacttaatcttaaacctctggagttcaagaccttttaaaaagggctaaataaacaatctctacatgtaaaaggccactgactcctacttcctctgtatagagcaactgttgaactcagctgcctgtagggtgcatttcctgtccatttcagaagctaattatgaaatggccacacaactggatgtttctgtttataaaatagtgttccttggaggggcttgcaacatctaaatatcttatgtcagaataaaagccactgagatccaaagaagtggactaaacttgacaatatctgaaagtcttctgctggaccaggaacccctacagtggacagtgtgcttcctgcttttccacgcagttcgacaggaaaaccatcccaaagtgaacaaaaatggaagcctgcgaagttcatcatgcaagacattgatgccactcacgtctttgtaatagcagaattggttaacgtcctccaggagcgagcgggtgaattaatggaccaaaatgctttttcccttacccagaaatgaaaatactcaatatggaccattcaggaattataagcagcaaatgtgaaagacttgccactcgatatcttaggtgactgattagacgtagagggttgttttagttgttttaggagcatgccacgggaaagaccaaaggatcatttgttcagaaaaaaacctggaactgattttgttataccatagaattaa

SEQ ID NO: 386919 - DNA, 834 bp, Homo sapiens
tccttttattgtggatgaacaccacgtacatgccgtaaatgctccctaggctggctgcggctacaaggcagacccgggagctgagaatagaggaatacctgcccaagcaactcattctgcacagcagccgacaagacagcgattttcctgtgctggaatgtgcccatccaaagacacttggattggacttaatcttaaacctctggagttcaagaccttttaaaaagggctaaataaacaatctctacatgtaaaaggccactgactcctacttcctctgtatagagcaactgttgaactcagctgcctgtagggtaagattttttattctggaattatttaattgttttctggtatgttcataactaatgtctttaaaataacttacttatagtgaaaataataaggggagttgtgaacaattttcaggtaaacacggtgttccagaatacagcaggagcatctgggcatttttgtggctgtaagttttaaactttgcttaaagctctcataatagtgacctgcagtacacgcttgactatgactaagccatggatcagaggtctaattaagcctgattgccagagcaatgagaggatgtttcagacatcatatttttgttgtttagactgctttatttttaactttccaggggcattaaaaaaaaaaaaagaggaaaaagatgcaaccatccacctgagtaaagataatatatataagtaattgttctttaagggcaatgagcgagccgtattgtataatgttctcctttcatcactgtttcgttcattgctcgtgtggaattagagtggttgatttgggggaatctggggg

SEQ ID NO: 386920 - DNA, 1196 bp, Homo sapiens
ttgtatcagcaattgcttgaaaatattccaaaaatatgagtaaaataggaaagctgccattaggggtctcatttttaaattttacagaacacctaagcctgatcttctccatccagttgtatagatctagctggagagaaagcagatgttttaagaactcgaaattgctgaactaatgtatacccttgtctctgtaatatgttccacaacatggaacaatccataccacctaggcttctctctgctagaccatcatgcctccatgtcttcttatgtcacctggaaggagttgagacagtgatttaatttcccaggacacggaataactcttaaaatggaattgtgatgttggtataaagcaagtggccttaatgataaatgctattttaatatcttgaaattatgttatacaggcattcatttctaacgtttcttgaatatcaaatacaaagttaacaagaaaaaggaacattaacagaaatctctaaaagttagaaatgtacaggtaaagactaaaaattgataggaggtttagttgtgtttcctacccggaaatcaaaatttgaaaagcagtaaaggcatttgccctgctctgcctccttcacataggtgcatttcctgtccatttcagaagctaattatgaaatggccacacaactggatgtttctgtttataaaatagtgttccttggaggggcttgcaacatctaaatatcttatgtcagaataaaagccactgagatccaaagaagtggactaaacttgacaatatctgaaagtcttctgctggaccaggaacccctacagtggacagtgtgcttcctgcttttccacgcagttcgacaggaaaaccatcccaaagtgaacaaaaatggaagcctgcgaagttcatcatgcaagacattgatgccactcacgtctttgtaatagcagaattggttaacgtcctccaggagcgagcgggtgaattaatggaccaaaatgctttttcccttacccagaaatgaaaatactcaatatggaccattcaggaattataagcagcaaatgtgaaagacttgccactcgatatcttaggtgactgattagacgtagagggttgttttagttgttttaggagcatgccacgggaaagaccaaaggatcatttgttcagaaaaaaacctggaactgattttgttataccatagaattaa

SEQ ID NO: 386921 - DNA, 2903 bp, Homo sapiens
  misc_feature (1212)..(1212): n is a, c, g, or t
  misc_feature (1717)..(1717): n is a, c, g, or t
accagtttctgcacccctctttcttgcagccccctctcccaacaactccgacacctgttccaagggaacctggccggaagcctctttctagctcccgactcggagaagtcactggtagcccctcccctccgccccggagtggcgcccccacaccaagctcgcgcgccccggctctgtctcccacccgggtgagctccttccttccttacctttcttcatgcccggcagaggtgcaggtgcagcccttgcttgctcagagcctggcgactcccactcccccgggtcccgctcgcacccatccaggccccagaatcttctcatccacaggcccctgagagccccccaatgccctgtccccctccccccagctcgcctgtcttcccacccctcccgcacccttccccatcccaggcttaccacctgcctgcacccgagtgaattgtctgcagactgcgggctcccatgctgggactgctagccaccaatgagggcagggacgatgaagtgactcgcccaaaagagctatttggtgactgggttgagcctattccaaacatcaggcgtgccagccagacccagtctcgctgccgcagagagtggtccatagttcatgcctcaagcgtaagtggatcaactcaagcaagagttgcccacaacttatgccaatcagaaacgatggacgcaggaaacagctagggaccccctgccatggagctcgccttcacatcctcatgctactcgttttactttacttcctccgttctctcctgctgaggttcgtggggtgagagttgatgcatgtttgcgtgtcaatgcgcgcgtgagtttttcatgccacacagcgtttccctcactttgctcagtgtgccttttccttcccttttccttcacatctgctctagactgatcgcataaatccagatgacatagatttagaaaatgagccctggtataaattcttttcagaactggagtttggacgcccggtaagtgaggctagactattaatataagaaaactaggagtatactgtttgatttctaaaatacaattatcagtagacgtgggtgtcattcagagaacaaaggccgaatgcataatgtatacacacacttggtacagcgtagtccagattcatttctgtaccaaatggtcaaatgtgctcagacatttcctatgtggtttgtaggtcattcattaagatttctttanatctaattcattacaagttcaaaatcttgaggtagtttctgtgatggaatattcagacaattattacagctgtatagaagatttgtatttgtttacagtctatttggtctagttcaagcagaagagcaccttgacattgagtcctgtttgctgagcaaacatcaggcacctggagagtgcgggcttctgtcttcattatctcctcgaggcctcctgatgtcccgccaagaagaagaaaatggggactggaggggttaagtaatgtgcacaaaatagtaaatggcagagtaagaagttaaacgcagagcctgttaaagaaaaatgaaaatctctgggcagttctcactataatatactgccagagtaatcccactacaaaatacagtcacgtgttgcttaaggatgtggacgggttctgagaaatgtgtcatcaggtggacttgccattgtgcaaacatcgcagagtacttacacaaacccagatgctagagcctgctacacgccnaggctgtgtgctatggcccgttgctcctgggctacaaacctgtacagcaggttcctgcactccatactgtaggcaactgtaatgcaatggtaggtatttgtgtacctaaacatatctaaacatagaaaaggcatggtaaaaatacagtcttataatcccataggaccaccatcatatataggtgcatcgttgacggaaacgtcattatgcaacacatgactgtacctagtttaccattagggatataaggaaagaaaaaaatcaggaagtcctgtggatcttaatttccagacttgctagtgaaagccatcacagcttctctaatccccagactcccgccagaggaagcccagaggttgggccttattgcttagcctgtttgggataaagagtcaacttgaggccgagcacggtggctcacacctgtaatcccagcactttgggaggccgaggcaggcggatcacgaaatcaacagattgagaccattctggccaacatggtgaaaccccgtctctgctaaaaatacaaacattagttgggcatggtggcgggtgcctgtagtcccagctacttgggagaccgaggcaggagaatcgcttgaacctgggaggcggagattgcagtgagctgggatcacgccactgcactccagcctgggcgacagagtgagactccatctcaaaaaaaaaaaaaaaaaatagtcaactggaggttcagttaacaacttccctgattaggaactgtatccaccaacagcagtgcatttgatgtgtgtcagttacacacgtttttatgcgttttagactcttaaataacctaccaattacactgatagtttttttagaaatcaggatataaccatttctataccatatgctgatttatatacttgcatatggaccatatatggtttactgattggtgatggtagtctcttttgtccattaaactgcaaaggagacttggttagactcaaggtagcttattgaaccgaatcaaaagtgactgtaaacgaatataaaccaaaggatttttcttagggttattatctcataggaggaatgttttctctcattttttctcatttgtatcttagtgtgaatgtaaatgtattttatttcaaggaaaaacattctctagctttattttatatgtattgttgctgttggttagaaagtttatagg

SEQ ID NO: 386922 - DNA, 596 bp, Homo sapiens
tcccacatgcattgcgaataaagcagtgatgtgttcgttttttgaaatagatgtgtgttaacaccgggagattggaagctgtgatttgggagttgggaggtgagatgattggagtgaagagagttaatgtcatggaaaggaaaagctgtctgaagaaaaatacacattttaatgtccctcttcagccgtgcctgctgagagctctcctgggatgataagtgaaagtgtttggatttttttttaagttttaaaactctgccaaagcattgctcagtgtatctgggcagccccttccggcaaaacgcagcagtagcagaggcagcttctgagagcctgggcaggcagcagctggctgaccaagtccactggaagagaaggcttgtgccagccgggagaaggaagccggggacaggatgaaagcaacaacacctttgcaggtgaagttgggggccatgcggggagggactgcagctgcatatactttgcagcaagacccatgtaaagctggggtgtggccaagagctgctcccctggaatgcagacctgggcagccaagacaataagggatagaggcaaagaatgggaaagagagcagg

SEQ ID NO: 386923 - DNA, 704 bp, Homo sapiens
aggaccagccattttacttatggaaaacagtgtggcatattctgctgagcttccccctggaagaaccctcttttatacatctcttcagggaagagagaagcaatgggcatgttagtatacaatgatcacagccacgcaggcctgcaagctgccttttggacaggctgttgactgccgttccaattagctgattggagaatgtggaatgcagagtgataatgctgcatatctgctatcaggcagcagcaaaggtttttgtcttgggaaggcaagctttccctgcaatattatctcagcagctccctagctgcttaccctgaaaacgagggatccaaacggagggtgttgcactctgctaacgctggtcctgtgcgtggctgtggcatatgagcggcaggtctgaaaaagcaggtgtgtgctgggacgggcactggactggaacgcaggcggacgctctcgggtttacctgcttcctgttaacagattgtgggctcccagggcatatgtctgcacgctgaggccgaggcggagaaggggcttcctgagcgtcccagtacactgacagaggtaagcttttttgacctttttgaaagcacagcataaaaataactggggcaaaacttagcctgaaagatttacgttgattgtgtgatttggatttaccaaacaaacatacacagacacatacacacacgcatacacac

SEQ ID NO: 386924 - DNA, 433 bp, Homo sapiens
gtgttgatcttgagaattattgctgtacatcacaaaaagaccatgtcaacgtgtctcttccagggagttgtcatttaagaaaggagatactgtctacatcctcaggaaaattgatcaaaattggtatgagggagaacaccacgggagagtgggcatcttcccgatctcatacgtagagaaactcacacctcctgagaaagcacagcctgcaagaccacctccgccagcccagcccggagaaatcggagaagctatagccaaatacaacttcaacgcagacacaaatgtggagctgtcactgagaaaggtagcccagctggttttttgtttgtttgtttttgtttgtttgttcttcagtgggtttgaaaaggctgtatattttcaaaactaaaataggttatctttttctttagacatttttatgtttacccta

SEQ ID NO: 386925 - DNA, 4636 bp, Homo sapiens
aggcgtgatctcagtcaccagactcagcttggagatcttacaatgatggcaatcaggagacactgaacggagatgctacatattcctctcttgcagcaaaaggttttagaagcgttcgaccaaacctacaagataaaagatcaccaactcagagccaaataacagtgaatggaaactcatcgaggtgccgtgattcccatgagttactatcagaggccgttttccccctcggcatattctctcatttgcctctctcttgctttttttccttcagacacttggattggacttaatcttaaacctctggagttcaagaccttttaaaaagggctaaataaacaatctctacatgtaaaaggccactgactcctacttcctctgtatagagcaactgttgaactcagctgcctgtaggaaaactgaagactttaataacaaactctccaaggtgaaaatgaacacaggcgtgattctcagtcaccagactcagccaaaaggttttagaagcgttcgaccaaacctacaagataaaagatcaccaactcagagccagataacagtgaatggaaactcaggaggtgccgtgagtcccatgagttactatcagaggccgttttccccctcggcatattctctcccagcctcactcaactccagcattgtcatgcagcacggcacatccctcgattccacagacacatatccccagcatgcgcagtctctggatggcaccaccagcagctctatccccctgtaccgatcctcagaggaagagaagagagtgacagtcatcaaagccccgcattacccagggatcgggcccgtggatgaatccggaatccccacagcaattagaacgacagtcgaccggcccaaggactggtacaagacgatgtttaagcaaattcacatggtgcacaagccggatgatgacacagacatgtataatactccttatacatacaatgcaggtctgtacaacccaccctacagtgctcagtcacaccctgctgcaaagacccaaacctacagacctctttccaaaagccactccgacaacagccccaatgcctttaaggatgcgtcctccccagtgcctcccccacatgttccacctccagtcccgccgcttcgaccaagagatcggtcttcaacagaaaagcatgactgggatcctccagacagaaaagtggacacaagaaaatttcggtctgagccaaggagtatttttgaatatgaacctggcaagtcatcaattcttcagcatgaaagaccaccccctctcccaacaactccgacacctgttccaagggaacctggccggaagcctctttctagctcccgactcggagaagtcactggtagcccctcccctccgccccggagtggcgcccccacaccaagctcgcgcgccccggctctgtctcccacccggcctcctaaaaagcctctggactatgttcaagatcattcttctggtgttttcaatgaggcctccttgtatcagtcctctatagacagaagcctggaaagacccatgagttctgcaagcatggccagtgacttcaggaagcggaggaagagcgagcctgcagtgggtccaccacggggcttgggagatcaaagtgcgagcaggactagcccaggccgagtggacctcccaggatcaagcaccactcttacaaagtctttcactagctcttctccttcttccccatcaagagcaaaagaccgtgagtcccctagaagttactcatccactttgactgacatggggagaagtgcaccaagggaaagaagaggaactccagaaaaagagaaattgcctgcaaaagctgtttatgattttaaggctcagacatctaaggagttgtcatttaagaaaggagatactgtctacatcctcaggaaaattgatcaaaattggtatgagggagaacaccacgggagagtgggcatcttcccgatctcatacgtagagaaactcacacctcctgagaaagcacagcctgcaagaccacctccgccagcccagcccggagaaatcggagaagctatagccaaatacaacttcaacgcagacacaaatgtggagctgtcactgagaaagggagatagagttattcttcttaaaagagttgatcaaaactggtatgaaggtaaaatcccaggaaccaacagacaaggcatcttccctgtttcctatgtggaggtcgtcaagaagaacacaaaaggtgctgaggactaccctgaccctccaataccccacagctattctagtgataggattcacagcttgagctcaaataagccacagcgtcctgtgtttactcatgaaaatattcaaggtgggggggaaccgtttcaggctctgtataactatactcccaggaatgaagatgagctggagctcagagaaagtgatgtcattgatgtcatggaaaagtgtgatgacggctggtttgtggggacctcaagaagaaccaaattctttggtactttccccggaaactacgtcaagaggctgtgaattgcgctccctccttctgtagaggccgcctgccagccatgcacctgcgtcaacgcgcctgaaacaccccgcgggcctcccgttgtcatgccttacggtttccaatgcgccgtcaccatctccacctgccaccaaaccaccagcagagtagccgccgctgctgtgagcctggggacgacatggcaggctggtccccctccgtgaaagtgtggattcctacttcctgctctaagctttgacacgtcaaaatgtgggatcagaaagaaaaaaatcatgatatttaaaaatggtcaaatatttgaggcaaaaaaaaaaaaaaaaagtgtctccaggaggctgtccagcctcgtggctccatttcaacatctccccccaggcgatgttctcccccaagacgaccagaaaattgtttattggggaatgctgtggtttgcattttcatattcttcgcttggcagtgtgtattcttttcacaagtttgcctagtgtcttggtttacacaatatgacaactgtaactgtactttagctattgtttgcctgcacatacatgttgtaatatgcacagtgattacaacctttaaagcaagaggaggcgagttaatttggatgagtgtgattttgctgattgaatgtgagttttcaaataggagtctttttctgcaatttgtttgcattttttagaagtgcaaacagtaagtaaataaaagccttcggtaataatcatgacaatacaagaggctgagctaggctacaggggaaaactattgtgttgtaaagttgcatcgctattttatattaaaatgtaatgatcagcatcatgaacaatgagctcttagtgttttatttatctgaaaaaatgtaagtaaaagcagtgttagtgagaggtgcaaagaattattctaacagacacctgaaagtatctgtaagcaatactagtaggtaagatttcactgtgtgtacacatacacatttgagattgtatgagaacatataatccatatgatatgttgtacattttatggaaatgtaatagaatctcacacattattttatagaaatagagtacagaagcatcacaagtattaaagttggttttagcaaggattaggattactacaattatttttactataataattatttttcttctatggaactcagaatcctggctacatttgaggacaggaatatgttgagcctgattttcctggtgtgtgtaaaatatttcctaggaataaattaggcactttttagaagcaatgttaaatcattcaggttttattttctgccctgaagcagaaatttaaaaaatgatattgggacctggaaggtttaatatagttcacagtgcctgaattacacctgctccgaaaactagctttgtatttcttatgactttgcataagaactgttcatctttggatcttgagcaccttacagataaaactttttatggcatctctttcatggacagtgattgatcttttcacaatgtatgtagcctctagaattttgtacatatgtttgctctttttttgtacagactatttagttgttgagaaaacaggggcgtttcctaatttggtctttatcctgcgacaacactttcagcagactagcctctccttatctcacagatcacaagcacccctagatagtgtgattctgtcagatagcatttatgcaaaaatctatgaagttaaaagatcgtagaagccaaatgaaatgtacatatctactgactgatgacaagggaatttcattaggaagaaggtaaagaaacatcgttgagtagcctaccttgatttctgtcaagttcataaccagcttcatattttaaaggcttcaggtttgaaattaagtcaactgcatgcagctttgctgataaatgaataattctctttgatgccatttatgagaaaagacttcaatatctgttgcctgtcatatttaagaaaaattactgtttctactctctgtatctgattttaaaagaaaaaactattcatacctggcttccaggtaattgactttgaattcttacaagcaaaggtcattgtgtttttcttgaatagacatctaataaattttgcttggaagtata

SEQ ID NO: 386926 - DNA, 4487 bp, Homo sapiens
  misc_feature (21)..(21): n is a, c, g, or t
ccgagaggcgaatgaggaagnaaagctatcggctaggtagcgaggcctgggtgttaggcttcctgagcgtcccagtacactgacagagacacttggattggacttaatcttaaacctctggagttcaagaccttttaaaaagggctaaataaacaatctctacatgtaaaaggccactgactcctacttcctctgtatagagcaactgttgaactcagctgcctgtaggaaaactgaagactttaataacaaactctccaaggtgaaaatgaacacagatagcggtgggtgtgctcgcaaacgtgccgccatgtctgttacgctaacatctgtgaagagagtgcaaagttctccaaacctattggctgcagggcgtgattctcagtcaccagactcagccaaaaggttttagaagcgttcgaccaaacctacaagataaaagatcaccaactcagagccagataacagtgaatggaaactcaggaggtgccgtgagtcccatgagttactatcagaggccgttttccccctcggcatattctctcccagcctcactcaactccagcattgtcatgcagcacggcacatccctcgattccacagacacatatccccagcatgcgcagtctctggatggcaccaccagcagctctatccccctgtaccgatcctcagaggaagagaagagagtgacagtcatcaaagccccgcattacccagggatcgggcccgtggatgaatccggaatccccacagcaattagaacgacagtcgaccggcccaaggactggtacaagacgatgtttaagcaaattcacatggtgcacaagccggatgatgacacagacatgtataatactccttatacatacaatgcaggtctgtacaacccaccctacagtgctcagtcacaccctgctgcaaagacccaaacctacagacctctttccaaaagccactccgacaacagccccaatgcctttaaggatgcgtcctccccagtgcctcccccacatgttccacctccagtcccgccgcttcgaccaagagatcggtcttcaacagaaaagcatgactgggatcctccagacagaaaagtggacacaagaaaatttcggtctgagccaaggagtatttttgaatatgaacctggcaagtcatcaattcttcagcatgaaagaccaccccctctcccaacaactccgacacctgttccaagggaacctggccggaagcctctttctagctcccgactcggagaagtcactggtagcccctcccctccgccccggagtggcgcccccacaccaagctcgcgcgccccggctctgtctcccacccgggcctccttgtatcagtcctctatagacagaagcctggaaagacccatgagttctgcaagcatggccagtgacttcaggaagcggaggaagagcgagcctgcagtgggtccaccacggggcttgggagatcaaagtgcgagcaggactagcccaggccgagtggacctcccaggatcaagcaccactcttacaaagtctttcactagctcttctccttcttccccatcaagagcaaaagaccgtgagtcccctagaagttactcatccactttgactgacatggggagaagtgcaccaagggaaagaagaggaactccagaaaaagagaaattgcctgcaaaagctgtttatgattttaaggctcagacatctaaggagttgtcatttaagaaaggagatactgtctacatcctcaggaaaattgatcaaaattggtatgagggagaacaccacgggagagtgggcatcttcccgatctcatacgtagagaaactcacacctcctgagaaagcacagcctgcaagaccacctccgccagcccagcccggagaaatcggagaagctatagccaaatacaacttcaacgcagacacaaatgtggagctgtcactgagaaagggagatagagttattcttcttaaaagagttgatcaaaactggtatgaaggtaaaatcccaggaaccaacagacaaggcatcttccctgtttcctatgtggaggtcgtcaagaagaacacaaaaggtgctgaggactaccctgaccctccaataccccacagctattctagtgataggattcacagcttgagctcaaataagccacagcgtcctgtgtttactcatgaaaatattcaaggtgggggggaaccgtttcaggctctgtataactatactcccaggaatgaagatgagctggagctcagagaaagtgatgtcattgatgtcatggaaaagtgtgatgacggctggtttgtggggacctcaagaagaaccaaattctttggtactttccccggaaactacgtcaagaggctgtgaattgcgctccctccttctgtagaggccgcctgccagccatgcacctgcgtcaacgcgcctgaaacaccccgcgggcctcccgttgtcatgccttacggtttccaatgcgccgtcaccatctccacctgccaccaaaccaccagcagagtagccgccgctgctgtgagcctggggacgacatggcaggctggtccccctccgtgaaagtgtggattcctacttcctgctctaagctttgacacgtcaaaatgtgggatcagaaagaaaaaaatcatgatatttaaaaatggtcaaatatttgaggcaaaaaaaaaaaaaaaaagtgtctccaggaggctgtccagcctcgtggctccatttcaacatctccccccaggcgatgttctcccccaagacgaccagaaaattgtttattggggaatgctgtggtttgcattttcatattcttcgcttggcagtgtgtattcttttcacaagtttgcctagtgtcttggtttacacaatatgacaactgtaactgtactttagctattgtttgcctgcacatacatgttgtaatatgcacagtgattacaacctttaaagcaagaggaggcgagttaatttggatgagtgtgattttgctgattgaatgtgagttttcaaataggagtctttttctgcaatttgtttgcattttttagaagtgcaaacagtaagtaaataaaagccttcggtaataatcatgacaatacaagaggctgagctaggctacaggggaaaactattgtgttgtaaagttgcatcgctattttatattaaaatgtaatgatcagcatcatgaacaatgagctcttagtgttttatttatctgaaaaaatgtaagtaaaagcagtgttagtgagaggtgcaaagaattattctaacagacacctgaaagtatctgtaagcaatactagtaggtaagatttcactgtgtgtacacatacacatttgagattgtatgagaacatataatccatatgatatgttgtacattttatggaaatgtaatagaatctcacacattattttatagaaatagagtacagaagcatcacaagtattaaagttggttttagcaaggattaggattactacaattatttttactataataattatttttcttctatggaactcagaatcctggctacatttgaggacaggaatatgttgagcctgattttcctggtgtgtgtaaaatatttcctaggaataaattaggcactttttagaagcaatgttaaatcattcaggttttattttctgccctgaagcagaaatttaaaaaatgatattgggacctggaaggtttaatatagttcacagtgcctgaattacacctgctccgaaaactagctttgtatttcttatgactttgcataagaactgttcatctttggatcttgagcaccttacagataaaactttttatggcatctctttcatggacagtgattgatcttttcacaatgtatgtagcctctagaattttgtacatatgtttgctctttttttgtacagactatttagttgttgagaaaacaggggcgtttcctaatttggtctttatcctgcgacaacactttcagcagactagcctctccttatctcacagatcacaagcacccctagatagtgtgattctgtcagatagcatttatgcaaaaatctatgaagttaaaagatcgtagaagccaaatgaaatgtacatatctactgactgatgacaagggaatttcattaggaagaaggtaaagaaacatcgttgagtagcctaccttgatttctgtcaagttcataaccagcttcatattttaaaggcttcaggtttgaaattaagtcaactgcatgcagctttgctgataaatgaataattctctttgatgccatttatgagaaaagacttcaatatctgttgcctgtcatatttaagaaaaattactgtttctactctctgtatctgattttaaaagaaaaaactattcatacctggcttccaggtaattgactttgaattcttacaagcaaaggtcattgtgtttttcttgaatagacatctaataaattttgcttggaagtata

SEQ ID NO: 386927 - DNA, 4328 bp, Homo sapiens
  misc_feature (21)..(21): n is a, c, g, or t
ccgagaggcgaatgaggaagnaaagctatcggctaggtagcgaggcctgggtgttaggcttcctgagcgtcccagtacactgacagagacacttggattggacttaatcttaaacctctggagttcaagaccttttaaaaagggctaaataaacaatctctacatgtaaaaggccactgactcctacttcctctgtatagagcaactgttgaactcagctgcctgtaggaaaactgaagactttaataacaaactctccaaggtgaaaatgaacacagatagcggtgggtgtgctcgcaaacgtgccgccatgtctgttacgctaacatctgtgaagagagtgcaaagttctccaaacctattggctgcagggcgtgattctcagtcaccagactcagccaaaaggttttagaagcgttcgaccaaacctacaagataaaagatcaccaactcagagccagataacagtgaatggaaactcaggaggtgccgtgagtcccatgagttactatcagaggccgttttccccctcggcatattctctcccagcctcactcaactccagcattgtcatgcagcacggcacatccctcgattccacagacacatatccccagcatgcgcagtctctggatggcaccaccagcagctctatccccctgtaccgatcctcagaggaagagaagagagtgacagtcatcaaagccccgcattacccagggatcgggcccgtggatgaatccggaatccccacagcaattagaacgacagtcgaccggcccaaggactggtacaagacgatgtttaagcaaattcacatggtgcacaagccggatgatgacacagacatgtataatactccttatacatacaatgcaggtctgtacaacccaccctacagtgctcagtcacaccctgctgcaaagacccaaacctacagacctctttccaaaagccactccgacaacagccccaatgcctttaaggatgcgtcctccccagtgcctcccccacatgttccacctccagtcccgccgcttcgaccaagagatcggtcttcaacagaaaagcatgactgggatcctccagacagaaaagtggacacaagaaaatttcggtctgagccaaggagtatttttgaatatgaacctggcaagtcatcaattcttcagcatgaaagaccagcctccttgtatcagtcctctatagacagaagcctggaaagacccatgagttctgcaagcatggccagtgacttcaggaagcggaggaagagcgagcctgcagtgggtccaccacggggcttgggagatcaaagtgcgagcaggactagcccaggccgagtggacctcccaggatcaagcaccactcttacaaagtctttcactagctcttctccttcttccccatcaagagcaaaagaccgtgagtcccctagaagttactcatccactttgactgacatggggagaagtgcaccaagggaaagaagaggaactccagaaaaagagaaattgcctgcaaaagctgtttatgattttaaggctcagacatctaaggagttgtcatttaagaaaggagatactgtctacatcctcaggaaaattgatcaaaattggtatgagggagaacaccacgggagagtgggcatcttcccgatctcatacgtagagaaactcacacctcctgagaaagcacagcctgcaagaccacctccgccagcccagcccggagaaatcggagaagctatagccaaatacaacttcaacgcagacacaaatgtggagctgtcactgagaaagggagatagagttattcttcttaaaagagttgatcaaaactggtatgaaggtaaaatcccaggaaccaacagacaaggcatcttccctgtttcctatgtggaggtcgtcaagaagaacacaaaaggtgctgaggactaccctgaccctccaataccccacagctattctagtgataggattcacagcttgagctcaaataagccacagcgtcctgtgtttactcatgaaaatattcaaggtgggggggaaccgtttcaggctctgtataactatactcccaggaatgaagatgagctggagctcagagaaagtgatgtcattgatgtcatggaaaagtgtgatgacggctggtttgtggggacctcaagaagaaccaaattctttggtactttccccggaaactacgtcaagaggctgtgaattgcgctccctccttctgtagaggccgcctgccagccatgcacctgcgtcaacgcgcctgaaacaccccgcgggcctcccgttgtcatgccttacggtttccaatgcgccgtcaccatctccacctgccaccaaaccaccagcagagtagccgccgctgctgtgagcctggggacgacatggcaggctggtccccctccgtgaaagtgtggattcctacttcctgctctaagctttgacacgtcaaaatgtgggatcagaaagaaaaaaatcatgatatttaaaaatggtcaaatatttgaggcaaaaaaaaaaaaaaaaagtgtctccaggaggctgtccagcctcgtggctccatttcaacatctccccccaggcgatgttctcccccaagacgaccagaaaattgtttattggggaatgctgtggtttgcattttcatattcttcgcttggcagtgtgtattcttttcacaagtttgcctagtgtcttggtttacacaatatgacaactgtaactgtactttagctattgtttgcctgcacatacatgttgtaatatgcacagtgattacaacctttaaagcaagaggaggcgagttaatttggatgagtgtgattttgctgattgaatgtgagttttcaaataggagtctttttctgcaatttgtttgcattttttagaagtgcaaacagtaagtaaataaaagccttcggtaataatcatgacaatacaagaggctgagctaggctacaggggaaaactattgtgttgtaaagttgcatcgctattttatattaaaatgtaatgatcagcatcatgaacaatgagctcttagtgttttatttatctgaaaaaatgtaagtaaaagcagtgttagtgagaggtgcaaagaattattctaacagacacctgaaagtatctgtaagcaatactagtaggtaagatttcactgtgtgtacacatacacatttgagattgtatgagaacatataatccatatgatatgttgtacattttatggaaatgtaatagaatctcacacattattttatagaaatagagtacagaagcatcacaagtattaaagttggttttagcaaggattaggattactacaattatttttactataataattatttttcttctatggaactcagaatcctggctacatttgaggacaggaatatgttgagcctgattttcctggtgtgtgtaaaatatttcctaggaataaattaggcactttttagaagcaatgttaaatcattcaggttttattttctgccctgaagcagaaatttaaaaaatgatattgggacctggaaggtttaatatagttcacagtgcctgaattacacctgctccgaaaactagctttgtatttcttatgactttgcataagaactgttcatctttggatcttgagcaccttacagataaaactttttatggcatctctttcatggacagtgattgatcttttcacaatgtatgtagcctctagaattttgtacatatgtttgctctttttttgtacagactatttagttgttgagaaaacaggggcgtttcctaatttggtctttatcctgcgacaacactttcagcagactagcctctccttatctcacagatcacaagcacccctagatagtgtgattctgtcagatagcatttatgcaaaaatctatgaagttaaaagatcgtagaagccaaatgaaatgtacatatctactgactgatgacaagggaatttcattaggaagaaggtaaagaaacatcgttgagtagcctaccttgatttctgtcaagttcataaccagcttcatattttaaaggcttcaggtttgaaattaagtcaactgcatgcagctttgctgataaatgaataattctctttgatgccatttatgagaaaagacttcaatatctgttgcctgtcatatttaagaaaaattactgtttctactctctgtatctgattttaaaagaaaaaactattcatacctggcttccaggtaattgactttgaattcttacaagcaaaggtcattgtgtttttcttgaatagacatctaataaattttgcttggaagtata

SEQ ID NO: 386928 - DNA, 6923 bp, Homo sapiens
  misc_feature (21)..(21): n is a, c, g, or t
ccgagaggcgaatgaggaagnaaagctatcggctaggtagcgaggcctgggtgttaggcttcctgagcgtcccagtacactgacagagacacttggattggacttaatcttaaacctctggagttcaagaccttttaaaaagggctaaataaacaatctctacatgtaaaaggccactgactcctacttcctctgtatagagcaactgttgaactcagctgcctgtaggaaaactgaagactttaataacaaactctccaaggtgaaaatgaacacagatagcggtgggtgtgctcgcaaacgtgccgccatgtctgttacgctaacatctgtgaagagagtgcaaagttctccaaacctattggctgcagggcgtgattctcagtcaccagactcagccaaaaggttttagaagcgttcgaccaaacctacaagataaaagatcaccaactcagagccagataacagtgaatggaaactcaggaggtgccgtgagtcccatgagttactatcagaggccgttttccccctcggcatattctctcccagcctcactcaactccagcattgtcatgcagcacggcacatccctcgattccacagacacatatccccagcatgcgcagtctctggatggcaccaccagcagctctatccccctgtaccgatcctcagaggaagagaagagagtgacagtcatcaaagccccgcattacccagggatcgggcccgtggatgaatccggaatccccacagcaattagaacgacagtcgaccggcccaaggactggtacaagacgatgtttaagcaaattcacatggtgcacaagccggatgatgacacagacatgtataatactccttatacatacaatgcaggtctgtacaacccaccctacagtgctcagtcacaccctgctgcaaagacccaaacctacagacctctttccaaaagccactccgacaacagccccaatgcctttaaggatgcgtcctccccagtgcctcccccacatgttccacctccagtcccgccgcttcgaccaagagatcggtcttcaacagaaaagcatgactgggatcctccagacagaaaagtggacacaagaaaatttcggtctgagccaaggagtatttttgaatatgaacctggcaagtcatcaattcttcagcatgaaagaccaccccctctcccaacaactccgacacctgttccaagggaacctggccggaagcctctttctagctcccgactcggagaagtcactggtagcccctcccctccgccccggagtggcgcccccacaccaagctcgcgcgccccggctctgtctcccacccgggtgagctccttccttccttacctttcttcatgcccggcagaggtgcaggtgcagcccttgcttgctcagagcctggcgactcccactcccccgggtcccgctcgcacccatccaggccccagaatcttctcatccacaggcccctgagagccccccaatgccctgtccccctccccccagctcgcctgtcttcccacccctcccgcacccttccccatcccaggcttaccacctgcctgcacccgagtgaattgtctgcagactgcgggctcccatgctgggactgctagccaccaatgagggcagggacgatgaagtgactcgcccaaaagagctatttggtgactgggttgagcctattccaaacatcaggcgtgccagccagacccagtctcgctgccgcagagagtggtccatagttcatgcctcaagcgtaagtggatcaactcaagcaagagttgcccacaacttatgccaatcagaaacgatggacgcaggaaacagctagggaccccctgccatggagctcgccttcacatcctcatgctactcgttttactttacttcctccgttctctcctgctgaggttcgtggggtgagagttgatgcatgtttgcgtgtcaatgcgcgcgtgagtttttcatgccacacagcgtttccctcactttgctcagtgtgccttttccttcccttttccttcacatctgctctagactgatcgcataaatccagatgacatagatttagaaaatgagccctggtataaattcttttcagaactggagtttggacgcccgcctcctaaaaagcctctggactatgttcaagatcattcttctggtgttttcaatgaggcctccttgtatcagtcctctatagacagaagcctggaaagacccatgagttctgcaagcatggccagtgacttcaggaagcggaggaagagcgagcctgcagtgggtccaccacggggcttgggagatcaaagtgcgagcaggactagcccaggccgagtggacctcccaggatcaagcaccactcttacaaagtctttcactagctcttctccttcttccccatcaagagcaaaaggtggggatgatagcaaaatatgtccatccctttgcagttactcagggctcaacggcaacccctccagtgagttagattactgtagcacttacagacagcacttggatgtccctcgggactcaccaagagccattagtttcaagaacggctggcaaatggcccggcaaaacgcagaaatctggagcagcacggaagaaaccgtctctcccaaaatcaaatcccggagctgtgacgatctcctaaacgacgactgcgatagcttcccggacccgaaagtcaagtcggaaagcatgggctccctgttatgtgaggaggactccaaggagagctgccccatggcgtgggggtccccctacgtcccggaggttcgcagtaacggcagatcaaggatcagacacaggtcagcccgcaacgccccggggttcctgaagatgtacaagaaaatgcaccgcatcaaccgcaaggacctgatgaactccgaggtgatctgctccgtgaagtccaggattctgcagtacgagagcgagcagcagcacaaggacctgctgcgcgcctggagccagtgctccacggaggaggtgccccgggacatggtgcccacacgcatctccgaattcgaaaagctgatccagaagtccaaatccatgccaaatttaggggatgacatgctgtctcccgtaaccctagaaccaccgcaaaatggcctatgtcccaagaggcggttttccattgagtatttgctggaggaagaaaatcaaagcggcccccccgctcggggccggcgaggctgccagtctaacgccctggtgcccattcacattgaagtcaccagcgatgagcagccccgagcacacgtggagttttccgacagcgaccaggacggggttgtgtccgaccacagtgactacattcacctagaggggtcatccttctgcagtgaaagtgactttgatcacttttccttcacatcctccgaaagcttttacggatccagccaccaccaccaccatcaccaccaccaccaccaccgccacctcatcagctcctgcaaaggcaggtgcccggcctcctacactcgatttaccacaatgttaaaacacgaaagagccagacacgaaaacaccgaggagcccagaaggcaagaaatggaccctggcctttctaaacttgcttttctagtcagtcctgtgcctttccggaggaaaaaaaattcggctcctaagaaacagactgaaaaggcaaaatgtaaagcatctgtgtttgaggctctggactctgcccttaaagacatctgtgaccaaattaaagctgaaaagaaaagggggagcttgccggacaacagcatcctgcaccgcctcatcagtgagctgctgccagatgttcccgagaggaactcatccctgagagcgctgaggaggagccccctgcaccagcctctccacccactgcctcccgatggtgctattcattgtccaccctaccagaatgactgcggaagaatgccccgcagtgcctctttccaagacgtggacacagccaacagcagctgccaccaccaagaccgtggcggtgcactccaagaccgtgagtcccctagaagttactcatccactttgactgacatggggagaagtgcaccaagggaaagaagaggaactccagaaaaagagaaattgcctgcaaaagctgtttatgattttaaggctcagacatctaaggagttgtcatttaagaaaggagatactgtctacatcctcaggaaaattgatcaaaattggtatgagggagaacaccacgggagagtgggcatcttcccgatctcatacgtagagaaactcacacctcctgagaaagcacagcctgcaagaccacctccgccagcccagcccggagaaatcggagaagctatagccaaatacaacttcaacgcagacacaaatgtggagctgtcactgagaaagggagatagagttattcttcttaaaagagttgatcaaaactggtatgaaggtaaaatcccaggaaccaacagacaaggcatcttccctgtttcctatgtggaggtcgtcaagaagaacacaaaaggtgctgaggactaccctgaccctccaataccccacagctattctagtgataggattcacagcttgagctcaaataagccacagcgtcctgtgtttactcatgaaaatattcaaggtgggggggaaccgtttcaggctctgtataactatactcccaggaatgaagatgagctggagctcagagaaagtgatgtcattgatgtcatggaaaagtgtgatgacggctggtttgtggggacctcaagaagaaccaaattctttggtactttccccggaaactacgtcaagaggctgtgaattgcgctccctccttctgtagaggccgcctgccagccatgcacctgcgtcaacgcgcctgaaacaccccgcgggcctcccgttgtcatgccttacggtttccaatgcgccgtcaccatctccacctgccaccaaaccaccagcagagtagccgccgctgctgtgagcctggggacgacatggcaggctggtccccctccgtgaaagtgtggattcctacttcctgctctaagctttgacacgtcaaaatgtgggatcagaaagaaaaaaatcatgatatttaaaaatggtcaaatatttgaggcaaaaaaaaaaaaaaaaagtgtctccaggaggctgtccagcctcgtggctccatttcaacatctccccccaggcgatgttctcccccaagacgaccagaaaattgtttattggggaatgctgtggtttgcattttcatattcttcgcttggcagtgtgtattcttttcacaagtttgcctagtgtcttggtttacacaatatgacaactgtaactgtactttagctattgtttgcctgcacatacatgttgtaatatgcacagtgattacaacctttaaagcaagaggaggcgagttaatttggatgagtgtgattttgctgattgaatgtgagttttcaaataggagtctttttctgcaatttgtttgcattttttagaagtgcaaacagtaagtaaataaaagccttcggtaataatcatgacaatacaagaggctgagctaggctacaggggaaaactattgtgttgtaaagttgcatcgctattttatattaaaatgtaatgatcagcatcatgaacaatgagctcttagtgttttatttatctgaaaaaatgtaagtaaaagcagtgttagtgagaggtgcaaagaattattctaacagacacctgaaagtatctgtaagcaatactagtaggtaagatttcactgtgtgtacacatacacatttgagattgtatgagaacatataatccatatgatatgttgtacattttatggaaatgtaatagaatctcacacattattttatagaaatagagtacagaagcatcacaagtattaaagttggttttagcaaggattaggattactacaattatttttactataataattatttttcttctatggaactcagaatcctggctacatttgaggacaggaatatgttgagcctgattttcctggtgtgtgtaaaatatttcctaggaataaattaggcactttttagaagcaatgttaaatcattcaggttttattttctgccctgaagcagaaatttaaaaaatgatattgggacctggaaggtttaatatagttcacagtgcctgaattacacctgctccgaaaactagctttgtatttcttatgactttgcataagaactgttcatctttggatcttgagcaccttacagataaaactttttatggcatctctttcatggacagtgattgatcttttcacaatgtatgtagcctctagaattttgtacatatgtttgctctttttttgtacagactatttagttgttgagaaaacaggggcgtttcctaatttggtctttatcctgcgacaacactttcagcagactagcctctccttatctcacagatcacaagcacccctagatagtgtgattctgtcagatagcatttatgcaaaaatctatgaagttaaaagatcgtagaagccaaatgaaatgtacatatctactgactgatgacaagggaatttcattaggaagaaggtaaagaaacatcgttgagtagcctaccttgatttctgtcaagttcataaccagcttcatattttaaaggcttcaggtttgaaattaagtcaactgcatgcagctttgctgataaatgaataattctctttgatgccatttatgagaaaagacttcaatatctgttgcctgtcatatttaagaaaaattactgtttctactctctgtatctgattttaaaagaaaaaactattcatacctggcttccaggtaattgactttgaattcttacaagcaaaggtcattgtgtttttcttgaatagacatctaataaattttgcttggaagtata

SEQ ID NO: 386929 - DNA, 4647 bp, Homo sapiens
aggcgtgatctcagtcaccagactcagcttggagatcttacaatgatggcaatcaggagacactgaacggagatgctacatattcctctcttgcagcaaaaggttttagaagcgttcgaccaaacctacaagataaaagatcaccaactcagagccaaataacagtgaatggaaactcatcgaggtgccgtgattcccatgagttactatcagaggccgttttccccctcggcatattctctcatttgcctctctcttgctttttttccttcagacacttggattggacttaatcttaaacctctggagttcaagaccttttaaaaagggctaaataaacaatctctacatgtaaaaggccactgactcctacttcctctgtatagagcaactgttgaactcagctgcctgtaggaaaactgaagactttaataacaaactctccaaggtgaaaatgaacacaggcgtgattctcagtcaccagactcagcttggagatcttacaatgatggcaatcaggagacactgaacggagatgctacatattcctctcttgcagcaaaaggttttagaagcgttcgaccaaacctacaagataaaagatcaccaactcagagccagataacagtgaatggaaactcaggaggtgccgtgagtcccatgagttactatcagaggccgttttccccctcggcatattctctcccagcctcactcaactccagcattgtcatgcagcacggcacatccctcgattccacagacacatatccccagcatgcgcagtctctggatggcaccaccagcagctctatccccctgtaccgatcctcagaggaagagaagagagtgacagtcatcaaagccccgcattacccagggatcgggcccgtggatgaatccggaatccccacagcaattagaacgacagtcgaccggcccaaggactggtacaagacgatgtttaagcaaattcacatggtgcacaagccggatgatgacacagacatgtataatactccttatacatacaatgcaggtctgtacaacccaccctacagtgctcagtcacaccctgctgcaaagacccaaacctacagacctctttccaaaagccactccgacaacagccccaatgcctttaaggatgcgtcctccccagtgcctcccccacatgttccacctccagtcccgccgcttcgaccaagagatcggtcttcaacagaaaagcatgactgggatcctccagacagaaaagtggacacaagaaaatttcggtctgagccaaggagtatttttgaatatgaacctggcaagtcatcaattcttcagcatgaaagaccaccccctctcccaacaactccgacacctgttccaagggaacctggccggaagcctctttctagctcccgactcggagaagtcactggtagcccctcccctccgccccggagtggcgcccccacaccaagctcgcgcgccccggctctgtctcccacccgggcctccttgtatcagtcctctatagacagaagcctggaaagacccatgagttctgcaagcatggccagtgacttcaggaagcggaggaagagcgagcctgcagtgggtccaccacggggcttgggagatcaaagtgcgagcaggactagcccaggccgagtggacctcccaggatcaagcaccactcttacaaagtctttcactagctcttctccttcttccccatcaagagcaaaagaccgtgagtcccctagaagttactcatccactttgactgacatggggagaagtgcaccaagggaaagaagaggaactccagaaaaagagaaattgcctgcaaaagctgtttatgattttaaggctcagacatctaaggagttgtcatttaagaaaggagatactgtctacatcctcaggaaaattgatcaaaattggtatgagggagaacaccacgggagagtgggcatcttcccgatctcatacgtagagaaactcacacctcctgagaaagcacagcctgcaagaccacctccgccagcccagcccggagaaatcggagaagctatagccaaatacaacttcaacgcagacacaaatgtggagctgtcactgagaaagggagatagagttattcttcttaaaagagttgatcaaaactggtatgaaggtaaaatcccaggaaccaacagacaaggcatcttccctgtttcctatgtggaggtcgtcaagaagaacacaaaaggtgctgaggactaccctgaccctccaataccccacagctattctagtgataggattcacagcttgagctcaaataagccacagcgtcctgtgtttactcatgaaaatattcaaggtgggggggaaccgtttcaggctctgtataactatactcccaggaatgaagatgagctggagctcagagaaagtgatgtcattgatgtcatggaaaagtgtgatgacggctggtttgtggggacctcaagaagaaccaaattctttggtactttccccggaaactacgtcaagaggctgtgaattgcgctccctccttctgtagaggccgcctgccagccatgcacctgcgtcaacgcgcctgaaacaccccgcgggcctcccgttgtcatgccttacggtttccaatgcgccgtcaccatctccacctgccaccaaaccaccagcagagtagccgccgctgctgtgagcctggggacgacatggcaggctggtccccctccgtgaaagtgtggattcctacttcctgctctaagctttgacacgtcaaaatgtgggatcagaaagaaaaaaatcatgatatttaaaaatggtcaaatatttgaggcaaaaaaaaaaaaaaaaagtgtctccaggaggctgtccagcctcgtggctccatttcaacatctccccccaggcgatgttctcccccaagacgaccagaaaattgtttattggggaatgctgtggtttgcattttcatattcttcgcttggcagtgtgtattcttttcacaagtttgcctagtgtcttggtttacacaatatgacaactgtaactgtactttagctattgtttgcctgcacatacatgttgtaatatgcacagtgattacaacctttaaagcaagaggaggcgagttaatttggatgagtgtgattttgctgattgaatgtgagttttcaaataggagtctttttctgcaatttgtttgcattttttagaagtgcaaacagtaagtaaataaaagccttcggtaataatcatgacaatacaagaggctgagctaggctacaggggaaaactattgtgttgtaaagttgcatcgctattttatattaaaatgtaatgatcagcatcatgaacaatgagctcttagtgttttatttatctgaaaaaatgtaagtaaaagcagtgttagtgagaggtgcaaagaattattctaacagacacctgaaagtatctgtaagcaatactagtaggtaagatttcactgtgtgtacacatacacatttgagattgtatgagaacatataatccatatgatatgttgtacattttatggaaatgtaatagaatctcacacattattttatagaaatagagtacagaagcatcacaagtattaaagttggttttagcaaggattaggattactacaattatttttactataataattatttttcttctatggaactcagaatcctggctacatttgaggacaggaatatgttgagcctgattttcctggtgtgtgtaaaatatttcctaggaataaattaggcactttttagaagcaatgttaaatcattcaggttttattttctgccctgaagcagaaatttaaaaaatgatattgggacctggaaggtttaatatagttcacagtgcctgaattacacctgctccgaaaactagctttgtatttcttatgactttgcataagaactgttcatctttggatcttgagcaccttacagataaaactttttatggcatctctttcatggacagtgattgatcttttcacaatgtatgtagcctctagaattttgtacatatgtttgctctttttttgtacagactatttagttgttgagaaaacaggggcgtttcctaatttggtctttatcctgcgacaacactttcagcagactagcctctccttatctcacagatcacaagcacccctagatagtgtgattctgtcagatagcatttatgcaaaaatctatgaagttaaaagatcgtagaagccaaatgaaatgtacatatctactgactgatgacaagggaatttcattaggaagaaggtaaagaaacatcgttgagtagcctaccttgatttctgtcaagttcataaccagcttcatattttaaaggcttcaggtttgaaattaagtcaactgcatgcagctttgctgataaatgaataattctctttgatgccatttatgagaaaagacttcaatatctgttgcctgtcatatttaagaaaaattactgtttctactctctgtatctgattttaaaagaaaaaactattcatacctggcttccaggtaattgactttgaattcttacaagcaaaggtcattgtgtttttcttgaatagacatctaataaattttgcttggaagtata

SEQ ID NO: 386930 - DNA, 4274 bp, Homo sapiens
tctgacctgcagctgccttcttgctgtgtgttcaactgaccgtcctgttgcttgtgtatgagggagaaagagaatgagagagagagagaaagatttcggcttcctcttgttacaagggctctaactccatcatgagggtccccctctgatgacctaatctaaacctaattacctcccccacctggggtcagaggtctgctgtgacagatggcaccaccttaaccaccgctgcggccactcatagccagataacagtgaatggaaactcaggaggtgccgtgagtcccatgagttactatcagaggccgttttccccctcggcatattctctcccagcctcactcaactccagcattgtcatgcagcacggcacatccctcgattccacagacacatatccccagcatgcgcagtctctggatggcaccaccagcagctctatccccctgtaccgatcctcagaggaagagaagagagtgacagtcatcaaagccccgcattacccagggatcgggcccgtggatgaatccggaatccccacagcaattagaacgacagtcgaccggcccaaggactggtacaagacgatgtttaagcaaattcacatggtgcacaagccggatgatgacacagacatgtataatactccttatacatacaatgcaggtctgtacaacccaccctacagtgctcagtcacaccctgctgcaaagacccaaacctacagacctctttccaaaagccactccgacaacagccccaatgcctttaaggatgcgtcctccccagtgcctcccccacatgttccacctccagtcccgccgcttcgaccaagagatcggtcttcaacagaaaagcatgactgggatcctccagacagaaaagtggacacaagaaaatttcggtctgagccaaggagtatttttgaatatgaacctggcaagtcatcaattcttcagcatgaaagaccaccccctctcccaacaactccgacacctgttccaagggaacctggccggaagcctctttctagctcccgactcggagaagtcactggtagcccctcccctccgccccggagtggcgcccccacaccaagctcgcgcgccccggctctgtctcccacccgggcctccttgtatcagtcctctatagacagaagcctggaaagacccatgagttctgcaagcatggccagtgacttcaggaagcggaggaagagcgagcctgcagtgggtccaccacggggcttgggagatcaaagtgcgagcaggactagcccaggccgagtggacctcccaggatcaagcaccactcttacaaagtctttcactagctcttctccttcttccccatcaagagcaaaagaccgtgagtcccctagaagttactcatccactttgactgacatggggagaagtgcaccaagggaaagaagaggaactccagaaaaagagaaattgcctgcaaaagctgtttatgattttaaggctcagacatctaaggagttgtcatttaagaaaggagatactgtctacatcctcaggaaaattgatcaaaattggtatgagggagaacaccacgggagagtgggcatcttcccgatctcatacgtagagaaactcacacctcctgagaaagcacagcctgcaagaccacctccgccagcccagcccggagaaatcggagaagctatagccaaatacaacttcaacgcagacacaaatgtggagctgtcactgagaaagggagatagagttattcttcttaaaagagttgatcaaaactggtatgaaggtaaaatcccaggaaccaacagacaaggcatcttccctgtttcctatgtggaggtcgtcaagaagaacacaaaaggtgctgaggactaccctgaccctccaataccccacagctattctagtgataggattcacagcttgagctcaaataagccacagcgtcctgtgtttactcatgaaaatattcaaggtgggggggaaccgtttcaggctctgtataactatactcccaggaatgaagatgagctggagctcagagaaagtgatgtcattgatgtcatggaaaagtgtgatgacggctggtttgtggggacctcaagaagaaccaaattctttggtactttccccggaaactacgtcaagaggctgtgaattgcgctccctccttctgtagaggccgcctgccagccatgcacctgcgtcaacgcgcctgaaacaccccgcgggcctcccgttgtcatgccttacggtttccaatgcgccgtcaccatctccacctgccaccaaaccaccagcagagtagccgccgctgctgtgagcctggggacgacatggcaggctggtccccctccgtgaaagtgtggattcctacttcctgctctaagctttgacacgtcaaaatgtgggatcagaaagaaaaaaatcatgatatttaaaaatggtcaaatatttgaggcaaaaaaaaaaaaaaaaagtgtctccaggaggctgtccagcctcgtggctccatttcaacatctccccccaggcgatgttctcccccaagacgaccagaaaattgtttattggggaatgctgtggtttgcattttcatattcttcgcttggcagtgtgtattcttttcacaagtttgcctagtgtcttggtttacacaatatgacaactgtaactgtactttagctattgtttgcctgcacatacatgttgtaatatgcacagtgattacaacctttaaagcaagaggaggcgagttaatttggatgagtgtgattttgctgattgaatgtgagttttcaaataggagtctttttctgcaatttgtttgcattttttagaagtgcaaacagtaagtaaataaaagccttcggtaataatcatgacaatacaagaggctgagctaggctacaggggaaaactattgtgttgtaaagttgcatcgctattttatattaaaatgtaatgatcagcatcatgaacaatgagctcttagtgttttatttatctgaaaaaatgtaagtaaaagcagtgttagtgagaggtgcaaagaattattctaacagacacctgaaagtatctgtaagcaatactagtaggtaagatttcactgtgtgtacacatacacatttgagattgtatgagaacatataatccatatgatatgttgtacattttatggaaatgtaatagaatctcacacattattttatagaaatagagtacagaagcatcacaagtattaaagttggttttagcaaggattaggattactacaattatttttactataataattatttttcttctatggaactcagaatcctggctacatttgaggacaggaatatgttgagcctgattttcctggtgtgtgtaaaatatttcctaggaataaattaggcactttttagaagcaatgttaaatcattcaggttttattttctgccctgaagcagaaatttaaaaaatgatattgggacctggaaggtttaatatagttcacagtgcctgaattacacctgctccgaaaactagctttgtatttcttatgactttgcataagaactgttcatctttggatcttgagcaccttacagataaaactttttatggcatctctttcatggacagtgattgatcttttcacaatgtatgtagcctctagaattttgtacatatgtttgctctttttttgtacagactatttagttgttgagaaaacaggggcgtttcctaatttggtctttatcctgcgacaacactttcagcagactagcctctccttatctcacagatcacaagcacccctagatagtgtgattctgtcagatagcatttatgcaaaaatctatgaagttaaaagatcgtagaagccaaatgaaatgtacatatctactgactgatgacaagggaatttcattaggaagaaggtaaagaaacatcgttgagtagcctaccttgatttctgtcaagttcataaccagcttcatattttaaaggcttcaggtttgaaattaagtcaactgcatgcagctttgctgataaatgaataattctctttgatgccatttatgagaaaagacttcaatatctgttgcctgtcatatttaagaaaaattactgtttctactctctgtatctgattttaaaagaaaaaactattcatacctggcttccaggtaattgactttgaattcttacaagcaaaggtcattgtgtttttcttgaatagacatctaataaattttgcttggaagtata

SEQ ID NO: 386931 - DNA, 3864 bp, Homo sapiens
  misc_feature (10)..(10): n is a, c, g, or t
  misc_feature (12)..(12): n is a, c, g, or t
tggttagtgnancgggcgggcgccggcagcttctgagagcctgggcaggcagcagctggctgaccaagtccactggaagagaaggcttgtgccagccgggagaaggaagccggggacaggatgaaagcaacaacacctttgcagacagtcgaccggcccaaggactggtacaagacgatgtttaagcaaattcacatggtgcacaagccggatgatgacacagacatgtataatactccttatacatacaatgcaggtctgtacaacccaccctacagtgctcagtcacaccctgctgcaaagacccaaacctacagacctctttccaaaagccactccgacaacagccccaatgcctttaaggatgcgtcctccccagtgcctcccccacatgttccacctccagtcccgccgcttcgaccaagagatcggtcttcaacagaaaagcatgactgggatcctccagacagaaaagtggacacaagaaaatttcggtctgagccaaggagtatttttgaatatgaacctggcaagtcatcaattcttcagcatgaaagaccaccccctctcccaacaactccgacacctgttccaagggaacctggccggaagcctctttctagctcccgactcggagaagtcactggtagcccctcccctccgccccggagtggcgcccccacaccaagctcgcgcgccccggctctgtctcccacccgggcctccttgtatcagtcctctatagacagaagcctggaaagacccatgagttctgcaagcatggccagtgacttcaggaagcggaggaagagcgagcctgcagtgggtccaccacggggcttgggagatcaaagtgcgagcaggactagcccaggccgagtggacctcccaggatcaagcaccactcttacaaagtctttcactagctcttctccttcttccccatcaagagcaaaagaccgtgagtcccctagaagttactcatccactttgactgacatggggagaagtgcaccaagggaaagaagaggaactccagaaaaagagaaattgcctgcaaaagctgtttatgattttaaggctcagacatctaaggagttgtcatttaagaaaggagatactgtctacatcctcaggaaaattgatcaaaattggtatgagggagaacaccacgggagagtgggcatcttcccgatctcatacgtagagaaactcacacctcctgagaaagcacagcctgcaagaccacctccgccagcccagcccggagaaatcggagaagctatagccaaatacaacttcaacgcagacacaaatgtggagctgtcactgagaaagggagatagagttattcttcttaaaagagttgatcaaaactggtatgaaggtaaaatcccaggaaccaacagacaaggcatcttccctgtttcctatgtggaggtcgtcaagaagaacacaaaaggtgctgaggactaccctgaccctccaataccccacagctattctagtgataggattcacagcttgagctcaaataagccacagcgtcctgtgtttactcatgaaaatattcaaggtgggggggaaccgtttcaggctctgtataactatactcccaggaatgaagatgagctggagctcagagaaagtgatgtcattgatgtcatggaaaagtgtgatgacggctggtttgtggggacctcaagaagaaccaaattctttggtactttccccggaaactacgtcaagaggctgtgaattgcgctccctccttctgtagaggccgcctgccagccatgcacctgcgtcaacgcgcctgaaacaccccgcgggcctcccgttgtcatgccttacggtttccaatgcgccgtcaccatctccacctgccaccaaaccaccagcagagtagccgccgctgctgtgagcctggggacgacatggcaggctggtccccctccgtgaaagtgtggattcctacttcctgctctaagctttgacacgtcaaaatgtgggatcagaaagaaaaaaatcatgatatttaaaaatggtcaaatatttgaggcaaaaaaaaaaaaaaaaagtgtctccaggaggctgtccagcctcgtggctccatttcaacatctccccccaggcgatgttctcccccaagacgaccagaaaattgtttattggggaatgctgtggtttgcattttcatattcttcgcttggcagtgtgtattcttttcacaagtttgcctagtgtcttggtttacacaatatgacaactgtaactgtactttagctattgtttgcctgcacatacatgttgtaatatgcacagtgattacaacctttaaagcaagaggaggcgagttaatttggatgagtgtgattttgctgattgaatgtgagttttcaaataggagtctttttctgcaatttgtttgcattttttagaagtgcaaacagtaagtaaataaaagccttcggtaataatcatgacaatacaagaggctgagctaggctacaggggaaaactattgtgttgtaaagttgcatcgctattttatattaaaatgtaatgatcagcatcatgaacaatgagctcttagtgttttatttatctgaaaaaatgtaagtaaaagcagtgttagtgagaggtgcaaagaattattctaacagacacctgaaagtatctgtaagcaatactagtaggtaagatttcactgtgtgtacacatacacatttgagattgtatgagaacatataatccatatgatatgttgtacattttatggaaatgtaatagaatctcacacattattttatagaaatagagtacagaagcatcacaagtattaaagttggttttagcaaggattaggattactacaattatttttactataataattatttttcttctatggaactcagaatcctggctacatttgaggacaggaatatgttgagcctgattttcctggtgtgtgtaaaatatttcctaggaataaattaggcactttttagaagcaatgttaaatcattcaggttttattttctgccctgaagcagaaatttaaaaaatgatattgggacctggaaggtttaatatagttcacagtgcctgaattacacctgctccgaaaactagctttgtatttcttatgactttgcataagaactgttcatctttggatcttgagcaccttacagataaaactttttatggcatctctttcatggacagtgattgatcttttcacaatgtatgtagcctctagaattttgtacatatgtttgctctttttttgtacagactatttagttgttgagaaaacaggggcgtttcctaatttggtctttatcctgcgacaacactttcagcagactagcctctccttatctcacagatcacaagcacccctagatagtgtgattctgtcagatagcatttatgcaaaaatctatgaagttaaaagatcgtagaagccaaatgaaatgtacatatctactgactgatgacaagggaatttcattaggaagaaggtaaagaaacatcgttgagtagcctaccttgatttctgtcaagttcataaccagcttcatattttaaaggcttcaggtttgaaattaagtcaactgcatgcagctttgctgataaatgaataattctctttgatgccatttatgagaaaagacttcaatatctgttgcctgtcatatttaagaaaaattactgtttctactctctgtatctgattttaaaagaaaaaactattcatacctggcttccaggtaattgactttgaattcttacaagcaaaggtcattgtgtttttcttgaatagacatctaataaattttgcttggaagtata

SEQ ID NO: 386932 - DNA, 4475 bp, Homo sapiens
aggcgtgatctcagtcaccagactcagcttggagatcttacaatgatggcaatcaggagacactgaacggagatgctacatattcctctcttgcagcaaaaggttttagaagcgttcgaccaaacctacaagataaaagatcaccaactcagagccaaataacagtgaatggaaactcatcgaggtgccgtgattcccatgagttactatcagaggccgttttccccctcggcatattctctcatttgcctctctcttgctttttttccttcagacacttggattggacttaatcttaaacctctggagttcaagaccttttaaaaagggctaaataaacaatctctacatgtaaaaggccactgactcctacttcctctgtatagagcaactgttgaactcagctgcctgtaggaaaactgaagactttaataacaaactctccaaggtgaaaatgaacacaggcgtgattctcagtcaccagactcagccaaaaggttttagaagcgttcgaccaaacctacaagataaaagatcaccaactcagagccagataacagtgaatggaaactcaggaggtgccgtgagtcccatgagttactatcagaggccgttttccccctcggcatattctctcccagcctcactcaactccagcattgtcatgcagcacggcacatccctcgattccacagacacatatccccagcatgcgcagtctctggatggcaccaccagcagctctatccccctgtaccgatcctcagaggaagagaagagagtgacagtcatcaaagccccgcattacccagggatcgggcccgtggatgaatccggaatccccacagcaattagaacgacagtcgaccggcccaaggactggtacaagacgatgtttaagcaaattcacatggtgcacaagccggatgatgacacagacatgtataatactccttatacatacaatgcaggtctgtacaacccaccctacagtgctcagtcacaccctgctgcaaagacccaaacctacagacctctttccaaaagccactccgacaacagccccaatgcctttaaggatgcgtcctccccagtgcctcccccacatgttccacctccagtcccgccgcttcgaccaagagatcggtcttcaacagaaaagcatgactgggatcctccagacagaaaagtggacacaagaaaatttcggtctgagccaaggagtatttttgaatatgaacctggcaagtcatcaattcttcagcatgaaagaccaccccctctcccaacaactccgacacctgttccaagggaacctggccggaagcctctttctagctcccgactcggagaagtcactggtagcccctcccctccgccccggagtggcgcccccacaccaagctcgcgcgccccggctctgtctcccacccggcctcctaaaaagcctctggactatgttcaagatcattcttctggtgttttcaatgaggcctccttgtatcagtcctctatagacagaagcctggaaagacccatgagttctgcaagcatggccagtgacttcaggaagcggaggaagagcgagcctgcagtgggtccaccacggggcttgggagatcaaagtgcgagcaggactagcccaggccgagtggacctcccaggatcaagcaccactcttacaaagtctttcactagctcttctccttcttccccatcaagagcaaaagaccgtgagtcccctagaagttactcatccactttgactgacatggggagaagtgcaccaagggaaagaagaggaactccagaaaaagagaaattgcctgcaaaagctgtttatgattttaaggctcagacatctaaggagttgtcatttaagaaaggagatactgtctacatcctcaggaaaattgatcaaaattggtatgagggagaacaccacgggagagtgggcatcttcccgatctcatacgtagagaaactcacacctcctgagaaagcacagcctgcaagaccacctccgccagcccagcccggagaaatcggagaagctatagccaaatacaacttcaacgcagacacaaatgtggagctgtcactgagaaagggagatagagttattcttcttaaaagagttgatcaaaactggtatgaaggtaaaatcccaggaaccaacagacaaggcatcttccctgtttcctatgtggaggtcgtcaagaagaacacaaaaggtgctgaggactaccctgaccctccaataccccacagctattctagtgataggattcacagcttgagctcaaataagccacagcgtcctgtgtttactcatgaaaatattcaaggtgggggggaaccgtttcaggctctgtataactatactcccaggaatgaagatgagctggagctcagagaaagtgatgtcattgatgtcatggaaaagtgtgatgacggctggtttgtggggacctcaagaagaaccaaattctttggtactttccccggaaactacgtcaagaggctgtgaattgcgctccctccttctgtagaggccgcctgccagccatgcacctgcgtcaacgcgcctgaaacaccccgcgggcctcccgttgtcatgccttacggtttccaatgcgccgtcaccatctccacctgccaccaaaccaccagcagagtagccgccgctgctgtgagcctggggacgacatggcaggctggtccccctccgtgaaagtgtggattcctacttcctgctctaagctttgacacgtcaaaatgtgggatcagaaagaaaaaaatcatgatatttaaaaatggtcaaatatttgaggcaaaaaaaaaaaaaaaaagtgtctccaggaggctgtccagcctcgtggctccatttcaacatctccccccaggcgatgttctcccccaagacgaccagaaaattgtttattggggaatgctgtggtttgcattttcatattcttcgcttggcagtgtgtattcttttcacaagtttgcctagtgtcttggtttacacaatatgacaactgtaactgtactttagctattgtttgcctgcacatacatgttgtaatatgcacagtgattacaacctttaaagcaagaggaggcgagttaatttggatgagtgtgattttgctgattgaatgtgagttttcaaataggagtctttttctgcaatttgtttgcattttttagaagtgcaaacagtaagtaaataaaagccttcggtaataatcatgacaatacaagaggctgagctaggctacaggggaaaactattgtgttgtaaagttgcatcgctattttatattaaaatgtaatgatcagcatcatgaacaatgagctcttagtgttttatttatctgaaaaaatgtaagtaaaagcagtgttagtgagaggtgcaaagaattattctaacagacacctgaaagtatctgtaagcaatactagtaggtaagatttcactgtgtgtacacatacacatttgagattgtatgagaacatataatccatatgatatgttgtacattttatggaaatgtaatagaatctcacacattattttatagaaatagagtacagaagcatcacaagtattaaagttggttttagcaaggattaggattactacaattatttttactataataattatttttcttctatggaactcagaatcctggctacatttgaggacaggaatatgttgagcctgattttcctggtgtgtgtaaaatatttcctaggaataaattaggcactttttagaagcaatgttaaatcattcaggttttattttctgccctgaagcagaaatttaaaaaatgatattgggacctggaaggtttaatatagttcacagtgcctgaattacacctgctccgaaaactagctttgtatttcttatgactttgcataagaactgttcatctttggatcttgagcaccttacagataaaactttttatggcatctctttcatggacagtgattgatcttttcacaatgtatgtagcctctagaattttgtacatatgtttgctctttttttgtacagactatttagttgttgagaaaacaggggcgtttcctaatttggtctttatcctgcgacaacactttcagcagactagcctctccttatctcacagatcacaagcacccctagatagtgtgattctgtcagatagcatttatgcaaaaatctatgaagttaaaagatcgtagaagccaaatgaaatgtacatatctactgactgatgacaagggaatttcattaggaagaaggtaaagaaacatcgttgagtagcctaccttgatttctgtcaagttcataaccagcttcatattttaaaggcttcaggtttgaaattaagtcaactgcatgcagctttgctgaggaatgttttttctcggaaacaccctttgtgaaaaatgagggctatatgggcggcgtt

SEQ ID NO: 386933 - DNA, 2041 bp, Homo sapiens
cggctactctgctggtggtttggtggcaggtggagatggtgacggcgcattggaaaccgtaaggcatgacaacgggaggcccgcggggtgtttcaggcgcgttgacgcaggtgcatggcaggctggtccccctccgtgaaagtgtggattcctacttcctgctctaagctttgacacgtcaaaatgtgggatcagaaagaaaaaaatcatgatatttaaaaatggtcaaatatttgaggcaaaaaaaaaaaaaaaaagtgtctccaggaggctgtccagcctcgtggctccatttcaacatctccccccaggcgatgttctcccccaagacgaccagaaaattgtttattggggaatgctgtggtttgcattttcatattcttcgcttggcagtgtgtattcttttcacaagtttgcctagtgtcttggtttacacaatatgacaactgtaactgtactttagctattgtttgcctgcacatacatgttgtaatatgcacagtgattacaacctttaaagcaagaggaggcgagttaatttggatgagtgtgattttgctgattgaatgtgagttttcaaataggagtctttttctgcaatttgtttgcattttttagaagtgcaaacagtaagtaaataaaagccttcggtaataatcatgacaatacaagaggctgagctaggctacaggggaaaactattgtgttgtaaagttgcatcgctattttatattaaaatgtaatgatcagcatcatgaacaatgagctcttagtgttttatttatctgaaaaaatgtaagtaaaagcagtgttagtgagaggtgcaaagaattattctaacagacacctgaaagtatctgtaagcaatactagtaggtaagatttcactgtgtgtacacatacacatttgagattgtatgagaacatataatccatatgatatgttgtacattttatggaaatgtaatagaatctcacacattattttatagaaatagagtacagaagcatcacaagtattaaagttggttttagcaaggattaggattactacaattatttttactataataattatttttcttctatggaactcagaatcctggctacatttgaggacaggaatatgttgagcctgattttcctggtgtgtgtaaaatatttcctaggaataaattaggcactttttagaagcaatgttaaatcattcaggttttattttctgccctgaagcagaaatttaaaaaatgatattgggacctggaaggtttaatatagttcacagtgcctgaattacacctgctccgaaaactagctttgtatttcttatgactttgcataagaactgttcatctttggatcttgagcaccttacagataaaactttttatggcatctctttcatggacagtgattgatcttttcacaatgtatgtagcctctagaattttgtacatatgtttgctctttttttgtacagactatttagttgttgagaaaacaggggcgtttcctaatttggtctttatcctgcgacaacactttcagcagactagcctctccttatctcacagatcacaagcacccctagatagtgtgattctgtcagatagcatttatgcaaaaatctatgaagttaaaagatcgtagaagccaaatgaaatgtacatatctactgactgatgacaagggaatttcattaggaagaaggtaaagaaacatcgttgagtagcctaccttgatttctgtcaagttcataaccagcttcatattttaaaggcttcaggtttgaaattaagtcaactgcatgcagctttgctgataaatgaataattctctttgatgccatttatgagaaaagacttcaatatctgttgcctgtcatatttaagaaaaattactgtttctactctctgtatctgattttaaaagaaaaaactattcatacctggcttccaggtaattgactttgaattcttacaagcaaaggtcattgtgtttttcttgaatagacatctaataaattttgcttggaagtata

SEQ ID NO: 386934 - DNA, 1833 bp, Homo sapiens
  misc_feature (21)..(21): n is a, c, g, or t
ccgagaggcgaatgaggaagnaaagctatcggctaggtagcgaggcctgggtgttaggcttcctgagcgtcccagtacactgacagagacacttggattggacttaatcttaaacctctggagttcaagaccttttaaaaagggctaaataaacaatctctacatgtaaaaggccactgactcctacttcctctgtatagagcaactgttgaactcagctgcctgtaggaaaactgaagactttaataacaaactctccaaggtgaaaatgaacacagatagcggtgggtgtgctcgcaaacgtgccgccatgtctgttacgctaacatctgtgaagagagtgcaaagttctccaaacctattggctgcagggcgtgattctcagtcaccagactcagccaaaaggttttagaagcgttcgaccaaacctacaagataaaagatcaccaactcagagccagataacagtgaatggaaactcaggaggtgccgtgagtcccatgagttactatcagaggccgttttccccctcggcatattctctcccagcctcactcaactccagcattgtcatgcagcacggcacatccctcgattccacagacacatatccccagcatgcgcagtctctggatggcaccaccagcagctctatccccctgtaccgatcctcagaggaagagaagagagtgacagtcatcaaagccccgcattacccagggatcgggcccgtggatgaatccggaatccccacagcaattagaacgacagtcgaccggcccaaggactggtacaagacgatgtttaagcaaattcacatggtgcacaagccggatgatgacacagacatgtataatactccttatacatacaatgcaggtctgtacaacccaccctacagtgctcagtcacaccctgctgcaaagacccaaacctacagacctctttccaaaagccactccgacaacagccccaatgcctttaaggatgcgtcctccccagtgcctcccccacatgttccacctccagtcccgccgcttcgaccaagagatcggtcttcaacagaaaagcatgactgggatcctccagacagaaaagtggacacaagaaaatttcggtctgagccaaggagtatttttgaatatgaacctggcaagtcatcaattcttcagcatgaaagaccagttaccaagcctcaagcttcctgattgattgtcattctaatggatcaagattatatttcactttgcaggattttttccaattatttaattatatgcaaacaaaaatatctatacacttaagaagaaccacttgcctcctcgaagcgcaggttcacacataggtcttcccttggccttctttggttttgattccccaatactcccttgcatgtcctttgcttcccctcagaaatcagtgtcctcaggattttctttgaaactccacagttcctctgcatctccttccaagcctacttctaggaaaacatttgcaatcaattgcaatttactctcatttttgctttaaaagaattttaggtgtcagtgaacaggaaaaagagagttttctttgtggagctccttcaagagtctccaagaaatcacactcatatataatccaaggccagccctgtggtttaattggaaactctagccttgccacacccaacatgagtgtccttgattgagtctttgaaaccctgtgtttgcggttgtgttctggagaagcatgttcaaaaccttatcatcagataattcatacatgatatttgtctaagccttcttaccctttctttaaataactcatatcttttagagtaacaggactaca

SEQ ID NO: 386935 - DNA, 2375 bp, Homo sapiens
  misc_feature (21)..(21): n is a, c, g, or t
ccgagaggcgaatgaggaagnaaagctatcggctaggtagcgaggcctgggtgttaggcttcctgagcgtcccagtacactgacagagacacttggattggacttaatcttaaacctctggagttcaagaccttttaaaaagggctaaataaacaatctctacatgtaaaaggccactgactcctacttcctctgtatagagcaactgttgaactcagctgcctgtaggaaaactgaagactttaataacaaactctccaaggtgaaaatgaacacagatagcggtgggtgtgctcgcaaacgtgccgccatgtctgttacgctaacatctgtgaagagagtgcaaagttctccaaacctattggctgcagggcgtgattctcagtcaccagactcagccaaaaggttttagaagcgttcgaccaaacctacaagataaaagatcaccaactcagagccagataacagtgaatggaaactcaggaggtgccgtgagtcccatgagttactatcagaggccgttttccccctcggcatattctctcccagcctcactcaactccagcattgtcatgcagcacggcacatccctcgattccacagacacatatccccagcatgcgcagtctctggatggcaccaccagcagctctatccccctgtaccgatcctcagaggaagagaagagagtgacagtcatcaaagccccgcattacccagggatcgggcccgtggatgaatccggaatccccacagcaattagaacgacagtcgaccggcccaaggactggtacaagacgatgtttaagcaaattcacatggtgcacaagccggatgatgacacagacatgtataatactccttatacatacaatgcaggtctgtacaacccaccctacagtgctcagtcacaccctgctgcaaagacccaaacctacagacctctttccaaaagccactccgacaacagccccaatgcctttaaggatgcgtcctccccagtgcctcccccacatgttccacctccagtcccgccgcttcgaccaagagatcggtcttcaacagaaaagcatgactgggatcctccagacagaaaagtggacacaagaaaatttcggtctgagccaaggagtatttttgaatatgaacctggcaagtcatcaattcttcagcatgaaagaccagtaagcacttgtcattaaacagaatatgccagctcgctgggctcccagggctccccaataaacctgaatttcagacccattagcaatttttgtcacaaaggtaatcacttagaaatcatgtttattttgtataatgatttgtacatctcatctcagaattgaaagatacatgttctaatatattgtctttactgaccaaatacaagtgtatgtgtgtgtgtatgtgtgtgtatttatatatatatatatacacacacacatgcaggtgtatatacatacacatatatacacatgtgtatgcacacacatatatatatttatatgcaagattcatttgcatgtaactctaactgtgcctaatcattaatcagagtttaacttttaaaaaagttcataagtgcaatacttaattgctatcatagcttgctaatgagagttttccatattggctttttaatatttctttggatgaagggagaattttccaaatgcccttttcataacaagttgttttaattgcttcttattaaatccctcctcaggttaccaagcctcaagcttcctgattgattgtcattctaatggatcaagattatatttcactttgcaggattttttccaattatttaattatatgcaaacaaaaatatctatacacttaagaagaaccacttgcctcctcgaagcgcaggttcacacataggtcttcccttggccttctttggttttgattccccaatactcccttgcatgtcctttgcttcccctcagaaatcagtgtcctcaggattttctttgaaactccacagttcctctgcatctccttccaagcctacttctaggaaaacatttgcaatcaattgcaatttactctcatttttgctttaaaagaattttaggtgtcagtgaacaggaaaaagagagttttctttgtggagctccttcaagagtctccaagaaatcacactcatatataatccaaggccagccctgtggtttaattggaaactctagccttgccacacccaacatgagtgtccttgattgagtctttgaaaccctgtgtttgcggttgtgttctggagaagcatgttcaaaaccttatcatcagataattcatacatgatatttgtctaagccttcttaccctttctttaaataactcatatcttttagagtaacaggactaca

SEQ ID NO: 386936 - DNA, 2629 bp, Homo sapiens
aggcgtgatctcagtcaccagactcagcttggagatcttacaatgatggcaatcaggagacactgaacggagatgctacatattcctctcttgcagcaaaaggttttagaagcgttcgaccaaacctacaagataaaagatcaccaactcagagccaaataacagtgaatggaaactcatcgaggtgccgtgattcccatgagttactatcagaggccgttttccccctcggcatattctctcatttgcctctctcttgctttttttccttcagacacttggattggacttaatcttaaacctctggagttcaagaccttttaaaaagggctaaataaacaatctctacatgtaaaaggccactgactcctacttcctctgtatagagcaactgttgaactcagctgcctgtaggaaaactgaagactttaataacaaactctccaaggtgaaaatgaacacagatagcggtgggtgtgctcgcaaacgtgccgccatgtctgttacgctaacatctgtgaagagagtgcaaagttctccaaacctattggctgcagggcgtgattctcagtcaccagactcagcttggagatcttacaatgatggcaatcaggagacactgaacggagatgctacatattcctctcttgcagcaaaaggttttagaagcgttcgaccaaacctacaagataaaagatcaccaactcagagccagataacagtgaatggaaactcaggaggtgccgtgagtcccatgagttactatcagaggccgttttccccctcggcatattctctcccagcctcactcaactccagcattgtcatgcagcacggcacatccctcgattccacagacacatatccccagcatgcgcagtctctggatggcaccaccagcagctctatccccctgtaccgatcctcagaggaagagaagagagtgacagtcatcaaagccccgcattacccagggatcgggcccgtggatgaatccggaatccccacagcaattagaacgacagtcgaccggcccaaggactggtacaagacgatgtttaagcaaattcacatggtgcacaagccggatgatgacacagacatgtataatactccttatacatacaatgcaggtctgtacaacccaccctacagtgctcagtcacaccctgctgcaaagacccaaacctacagacctctttccaaaagccactccgacaacagccccaatgcctttaaggatgcgtcctccccagtgcctcccccacatgttccacctccagtcccgccgcttcgaccaagagatcggtcttcaacagaaaagcatgactgggatcctccagacagaaaagtggacacaagaaaatttcggtctgagccaaggagtatttttgaatatgaacctggcaagtcatcaattcttcagcatgaaagaccagtaagcacttgtcattaaacagaatatgccagctcgctgggctcccagggctccccaataaacctgaatttcagacccattagcaatttttgtcacaaaggtaatcacttagaaatcatgtttattttgtataatgatttgtacatctcatctcagaattgaaagatacatgttctaatatattgtctttactgaccaaatacaagtgtatgtgtgtgtgtatgtgtgtgtatttatatatatatatatacacacacacatgcaggtgtatatacatacacatatatacacatgtgtatgcacacacatatatatatttatatgcaagattcatttgcatgtaactctaactgtgcctaatcattaatcagagtttaacttttaaaaaagttcataagtgcaatacttaattgctatcatagcttgctaatgagagttttccatattggctttttaatatttctttggatgaagggagaattttccaaatgcccttttcataacaagttgttttaattgcttcttattaaatccctcctcaggttaccaagcctcaagcttcctgattgattgtcattctaatggatcaagattatatttcactttgcaggattttttccaattatttaattatatgcaaacaaaaatatctatacacttaagaagaaccacttgcctcctcgaagcgcaggttcacacataggtcttcccttggccttctttggttttgattccccaatactcccttgcatgtcctttgcttcccctcagaaatcagtgtcctcaggattttctttgaaactccacagttcctctgcatctccttccaagcctacttctaggaaaacatttgcaatcaattgcaatttactctcatttttgctttaaaagaattttaggtgtcagtgaacaggaaaaagagagttttctttgtggagctccttcaagagtctccaagaaatcacactcatatataatccaaggccagccctgtggtttaattggaaactctagccttgccacacccaacatgagtgtccttgattgagtctttgaaaccctgtgtttgcggttgtgttctggagaagcatgttcaaaaccttatcatcagataattcatacatgatatttgtctaagccttcttaccctttctttaaataactcatatcttttagagtaacaggactaca

SEQ ID NO: 386937 - DNA, 1752 bp, Homo sapiens
  misc_feature (10)..(10): n is a, c, g, or t
  misc_feature (12)..(12): n is a, c, g, or t
tggttagtgnancgggcgggcgccggcagcttctgagagcctgggcaggcagcagctggctgaccaagtccactggaagagaaggcttgtgccagccgggagaaggaagccggggacaggatgaaagcaacaacacctttgcagacagtcgaccggcccaaggactggtacaagacgatgtttaagcaaattcacatggtgcacaagccggatgatgacacagacatgtataatactccttatacatacaatgcaggtctgtacaacccaccctacagtgctcagtcacaccctgctgcaaagacccaaacctacagacctctttccaaaagccactccgacaacagccccaatgcctttaaggatgcgtcctccccagtgcctcccccacatgttccacctccagtcccgccgcttcgaccaagagatcggtcttcaacagaaaagcatgactgggatcctccagacagaaaagtggacacaagaaaatttcggtctgagccaaggagtatttttgaatatgaacctggcaagtcatcaattcttcagcatgaaagaccagtaagcacttgtcattaaacagaatatgccagctcgctgggctcccagggctccccaataaacctgaatttcagacccattagcaatttttgtcacaaaggtaatcacttagaaatcatgtttattttgtataatgatttgtacatctcatctcagaattgaaagatacatgttctaatatattgtctttactgaccaaatacaagtgtatgtgtgtgtgtatgtgtgtgtatttatatatatatatatacacacacacatgcaggtgtatatacatacacatatatacacatgtgtatgcacacacatatatatatttatatgcaagattcatttgcatgtaactctaactgtgcctaatcattaatcagagtttaacttttaaaaaagttcataagtgcaatacttaattgctatcatagcttgctaatgagagttttccatattggctttttaatatttctttggatgaagggagaattttccaaatgcccttttcataacaagttgttttaattgcttcttattaaatccctcctcaggttaccaagcctcaagcttcctgattgattgtcattctaatggatcaagattatatttcactttgcaggattttttccaattatttaattatatgcaaacaaaaatatctatacacttaagaagaaccacttgcctcctcgaagcgcaggttcacacataggtcttcccttggccttctttggttttgattccccaatactcccttgcatgtcctttgcttcccctcagaaatcagtgtcctcaggattttctttgaaactccacagttcctctgcatctccttccaagcctacttctaggaaaacatttgcaatcaattgcaatttactctcatttttgctttaaaagaattttaggtgtcagtgaacaggaaaaagagagttttctttgtggagctccttcaagagtctccaagaaatcacactcatatataatccaaggccagccctgtggtttaattggaaactctagccttgccacacccaacatgagtgtccttgattgagtctttgaaaccctgtgtttgcggttgtgttctggagaagcatgttcaaaaccttatcatcagataattcatacatgatatttgtctaagccttcttaccctttctttaaataactcatatcttttagagtaacaggactaca

SEQ ID NO: 386938 - DNA, 445 bp, Homo sapiens
gagggcttctgacagattgcagacttgcttaaggctatgaagctcctagatcgcctaacaagagaagcgcacatatctactgactgatgacaagggaatttcattaggaagaaggtaaagaaacatcgttgagtagcctaccttgatttctgtcaagttcataaccagcttcatattttaaaggcttcaggtttgaaattaagtcaactgcatgcagctttgctgataaatgaataattctctttgatgccatttatgagaaaagacttcaatatctgttgcctgtcatatttaagaaaaattactgtttctactctctgtatctgattttaaaagaaaaaactattcatacctggcttccaggtaattgactttgaattcttacaagcaaaggtcattgtgtttttcttgaatagacatctaataaattttgcttggaagtata

SEQ ID NO: 386939 - DNA, 1002 bp, Homo sapiens
aggcgtgatctcagtcaccagactcagcttggagatcttacaatgatggcaatcaggagacactgaacggagatgctacatattcctctcttgcagcaaaaggttttagaagcgttcgaccaaacctacaagataaaagatcaccaactcagagccaaataacagtgaatggaaactcatcgaggtgccgtgattcccatgagttactatcagaggccgttttccccctcggcatattctctcatttgcctctctcttgctttttttccttcagacacttggattggacttaatcttaaacctctggagttcaagaccttttaaaaagggctaaataaacaatctctacatgtaaaaggccactgactcctacttcctctgtatagagcaactgttgaactcagctgcctgtagggtgcatttcctgtccatttcagaagctaattatgaaatggccacacaactggatgtttctgtttataaaatagtgttccttggaggggcttgcaacatctaaatatcttatgtcagaataaaagccactgagatccaaagaagtggactaaacttgacaatatctgaaagtcttctgctggaccaggaacccctacagtggacagtgtgcttcctgcttttccacgcagttcgacaggaaaaccatcccaaagtgaacaaaaatggaagcctgcgaagttcatcatgcaagacattgatgccactcacgtctttgtaatagcagaattggttaacgtcctccaggagcgagcgggtgaattaatggaccaaaatgctttttcccttacccagaaatgaaaatactcaatatggaccattcaggaattataagcagcaaatgtgaaagacttgccactcgatatcttaggtgactgattagacgtagagggttgttttagttgttttaggagcatgccacgggaaagaccaaaggatcatttgttcagaaaaaaacctggaactgattttgttataccatagaattaa

SEQ ID NO: 386940 - DNA, 1169 bp, Homo sapiens
  misc_feature (1041)..(1041): n is a, c, g, or t
  misc_feature (1045)..(1045): n is a, c, g, or t
  misc_feature (1056)..(1056): n is a, c, g, or t
  misc_feature (1061)..(1061): n is a, c, g, or t
  misc_feature (1067)..(1067): n is a, c, g, or t
  misc_feature (1072)..(1072): n is a, c, g, or t
  misc_feature (1080)..(1081): n is a, c, g, or t
  misc_feature (1091)..(1091): n is a, c, g, or t
  misc_feature (1094)..(1094): n is a, c, g, or t
  misc_feature (1106)..(1107): n is a, c, g, or t
  misc_feature (1109)..(1109): n is a, c, g, or t
aggcgtgatctcagtcaccagactcagcttggagatcttacaatgatggcaatcaggagacactgaacggagatgctacatattcctctcttgcagcaaaaggttttagaagcgttcgaccaaacctacaagataaaagatcaccaactcagagccaaataacagtgaatggaaactcatcgaggtgccgtgattcccatgagttactatcagaggccgttttccccctcggcatattctctcatttgcctctctcttgctttttttccttcagacacttggattggacttaatcttaaacctctggagttcaagaccttttaaaaagggctaaataaacaatctctacatgtaaaaggccactgactcctacttcctctgtatagagcaactgttgaactcagctgcctgtaggaaaactgaagactttaataacaaactctccaaggtgaaaatgaacacagatagcggtgggtgtgctcgcaaacgtgccgccatgtctgttacgctaacatctgtgaagagagtgcaaagttctccaaacctattggctgcagggcgtgattctcagtcaccagactcagccaaaaggttttagaagcgttcgaccaaacctacaagataaaagatcaccaactcagagccagataacagtgaatggaaactcaggaggtgccgtgagtcccatgagttactatcagaggccgttttccccctcggcatattctctcccagcctcactcaactccagcattgtcatgcagcacggcacatccctcggtaagtaatttactcaccgtgatttccatggcaacctcaatgcggcaagtacaaccacaggagaaagatatgcggcatcaaggtgaggcgggagcgctcagcactcatgaccctatccccagggagaaactggggcagaggacccaacatgggaggaaatgggcaccatgctattccaagaccatgtctccacctgtgtctgagcctggtgtgggcacttagatgtctgaggtggtggagtagaagagaaaaaaaaaagtnttantacggcgcagntatcnttatgnggtantagctgcnngcgcgttaanctnctgaacttggtnnantatgctagaacccttgcatgtatgaagcgacgtcctcaatcatgatgatgagcttgcgta

SEQ ID NO: 386941 - DNA, 1214 bp, Homo sapiens
  misc_feature (21)..(21): n is a, c, g, or t
ccgagaggcgaatgaggaagnaaagctatcggctaggtagcgaggcctgggtgttaggcttcctgagcgtcccagtacactgacagagacacttggattggacttaatcttaaacctctggagttcaagaccttttaaaaagggctaaataaacaatctctacatgtaaaaggccactgactcctacttcctctgtatagagcaactgttgaactcagctgcctgtaggaaaactgaagactttaataacaaactctccaaggtgaaaatgaacacagatagcggtgggtgtgctcgcaaacgtgccgccatgtctgttacgctaacatctgtgaagagagtgcaaagttctccaaacctattggctgcagggcgtgattctcagtcaccagactcagccaaaaggttttagaagcgttcgaccaaacctacaagataaaagatcaccaactcagagccagataacagtgaatggaaactcaggaggtgccgtgagtcccatgagttactatcagaggccgttttccccctcggcatattctctcccagcctcactcaactccagcattgtcatgcagcacggcacatccctcgattccacagacacatatccccagcatgcgcagtctctggatggcaccaccagcagctctatccccctgtaccgatcctcagaggaagagaagagagtgacagtcatcaaagccccgcattacccagggatcgggcccgtggatgaatccggaatccccacagcaattagaacgacagtcgaccggcccaaggactggtacaagacgatgtttaagcaaattcacatggtgcacaagccggatgatgacacagacatgtataatactccttatacatacaatgcaggtaggatgggtttccttgctcgcaatgactattttatgctcagcaatgtttggaagaacgacacggtcaccttttttccccttctgtttgagcacatgttttcagttcatatattaggaggaggatttcttttcttttctcagagcgtgcataacaaaaggattgacttttctcatggaaatgagaactaatactggtttatctcattcattcccactgttggtttattctcagcttcaggaatgtttaaccaaagtgtgaaggataggctgaaaggacacactgtaacccagggtacaaaataagataaagatcttttatcagcagagagaatg

SEQ ID NO: 386942 - DNA, 572 bp, Homo sapiens
aggcgtgatctcagtcaccagactcagcttggagatcttacaatgatggcaatcaggagacactgaacggagatgctacatattcctctcttgcagcaaaaggttttagaagcgttcgaccaaacctacaagataaaagatcaccaactcagagccaaataacagtgaatggaaactcatcgaggtgccgtgattcccatgagttactatcagaggccgttttccccctcggcatattctctcatttgcctctctcttgctttttttccttcagacacttggattggacttaatcttaaacctctggagttcaagaccttttaaaaagggctaaataaacaatctctacatgtaaaaggccactgactcctacttcctctgtatagagcaactgttgaactcagctgcctgtagggcgtgattctcagtcaccagactcagccaaaaggttttagaagcgttcgaccaaacctacaagataaaagatcaccaactcaggcaccccctccaccagaaagaaaagagagctttcatagctctttgataaccagtcacacaaagggtgtcatttt

SEQ ID NO: 386943 - DNA, 303 bp, Homo sapiens
  misc_feature (10)..(10): n is a, c, g, or t
  misc_feature (12)..(12): n is a, c, g, or t
tggttagtgnancgggcgggcgccggcagcttctgagagcctgggcaggcagcagctggctgaccaagtccactggaagagaaggcttgtgccagccgggagaaggaagccggggacaggatgaaagcaacaacacctttgcaggtgaagttgggggccatgcggggagggactgcagctgcatatactttgcagcaagacccatgtaaagctggggtgtggccaagagctgctcccctggaatgcagacctgggcagccaagacaataagggatagaggcaaagaatgggaaagagagcagg

SEQ ID NO: 386944 - DNA, 786 bp, Homo sapiens
  misc_feature (13)..(14): n is a, c, g, or t
ttctagttaaacnnccccccgactactgtagcgaggctgggtggcggcttcctgagcgtcccagtacactgacagagacacttggattggacttaatcttaaacctctggagttcaagaccttttaaaaagggctaaataaacaatctctacatgtaaaaggccactgactcctacttcctctgtatagagcaactgttgaactcagctgcctgtaggaaaactgaagactttaataacaaactctccaaggtgaaaatgaacacagatagcggtgggtgtgctcgcaaacgtgccgccatgtctgttacgctaacatctgtgaagagagtgcaaagttctccaaacctattggctgcagggcgtgattctcagtcaccagactcagccaaaaggttttagaagcgttcgaccaaacctacaagataaaagatcaccaactcagagccagataacagtgaatggaaactcaggaggtgccgtgagtcccatgagttactatcagaggccgttttccccctcggcatattctctcccagcctcactcaactccagcattgtcatgcagcacggcacatccctcgattccacagacacatatccccagcatgcgcagtctctggatggcaccaccagcagctctatccccctgtaccgatcctcagaggaagagaagagagtgacagtcatcaaagccccgcattacccagggatcgggcccgtggatgaatccggaatccccacagcaattagaacgacagtcgaaccggccaaggactgggtacaa

SEQ ID NO: 386945 - DNA, 4581 bp, Homo sapiens
aggcgtgatctcagtcaccagactcagcttggagatcttacaatgatggcaatcaggagacactgaacggagatgctacatattcctctcttgcagcaaaaggttttagaagcgttcgaccaaacctacaagataaaagatcaccaactcagagccaaataacagtgaatggaaactcatcgaggtgccgtgattcccatgagttactatcagaggccgttttccccctcggcatattctctcatttgcctctctcttgctttttttccttcagacacttggattggacttaatcttaaacctctggagttcaagaccttttaaaaagggctaaataaacaatctctacatgtaaaaggccactgactcctacttcctctgtatagagcaactgttgaactcagctgcctgtaggaaaactgaagactttaataacaaactctccaaggtgaaaatgaacacaggcgtgattctcagtcaccagactcagccaaaaggttttagaagcgttcgaccaaacctacaagataaaagatcaccaactcagagccagataacagtgaatggaaactcaggaggtgccgtgagtcccatgagttactatcagaggccgttttccccctcggcatattctctcccagcctcactcaactccagcattgtcatgcagcacggcacatccctcgattccacagacacatatccccagcatgcgcagtctctggatggcaccaccagcagctctatccccctgtaccgatcctcagaggaagagaagagagtgacagtcatcaaagccccgcattacccagggatcgggcccgtggatgaatccggaatccccacagcaattagaacgacagtcgaccggcccaaggactggtacaagacgatgtttaagcaaattcacatggtgcacaagccggatgatgacacagacatgtataatactccttatacatacaatgcaggtctgtacaacccaccctacagtgctcagtcacaccctgctgcaaagacccaaacctacagacctctttccaaaagccactccgacaacagccccaatgcctttaaggatgcgtcctccccagtgcctcccccacatgttccacctccagtcccgccgcttcgaccaagagatcggtcttcaacagaaaagcatgactgggatcctccagacagaaaagtggacacaagaaaatttcggtctgagccaaggagtatttttgaatatgaacctggcaagtcatcaattcttcagcatgaaagaccaccccctctcccaacaactccgacacctgttccaagggaacctggccggaagcctctttctagctcccgactcggagaagtcactggtagcccctcccctccgccccggagtggcgcccccacaccaagctcgcgcgccccggctctgtctcccacccggcctcctaaaaagcctctggactatgttcaagatcattcttctggtgttttcaatgaggcctccttgtatcagtcctctatagacagaagcctggaaagacccatgagttctgcaagcatggccagtgacttcaggaagcggaggaagagcgagcctgcagtgggtccaccacggggcttgggagatcaaagtgcgagcaggactagcccaggccgagtggacctcccaggatcaagcaccactcttacaaagtctttcactagctcttctccttcttccccatcaagagcaaaagaccgtgagtcccctagaagttactcatccactttgactgacatggggagaagtgcaccaagggaaagaagaggaactccagaaaaagagaaattgcctgcaaaagctgtttatgattttaaggctcagacatctaaggagttgtcatttaagaaaggagatactgtctacatcctcaggaaaattgatcaaaattggtatgagggagaacaccacgggagagtgggcatcttcccgatctcatacgtagagaaactcacacctcctgagaaagcacagcctgcaagaccacctccgccagcccagcccggagaaatcggagaagctatagccaaatacaacttcaacgcagacacaaatgtggagctgtcactgagaaagggagatagagttattcttcttaaaagagttgatcaaaactggtatgaaggtaaaatcccaggaaccaacagacaaggcatcttccctgtttcctatgtggaggtcgtcaagaagaacacaaaaggtgctgaggactaccctgaccctccaataccccacagctattctagtgataggattcacagcttgagctcaaataagccacagcgtcctgtgtttactcatgaaaatattcaaggtgggggggaaccgtttcaggctctgtataactatactcccaggaatgaagatgagctggagctcagagaaagtgatgtcattgatgtcatggaaaagtgtgatgacggctggtttgtggggacctcaagaagaaccaaattctttggtactttccccggaaactacgtcaagaggctgtgaattgcgctccctccttctgtagaggccgcctgccagccatgcacctgcgtcaacgcgcctgaaacaccccgcgggcctcccgttgtcatgccttacggtttccaatgcgccgtcaccatctccacctgccaccaaaccaccagcagagtagccgccgctgctgtgagcctggggacgacatggcaggctggtccccctccgtgaaagtgtggattcctacttcctgctctaagctttgacacgtcaaaatgtgggatcagaaagaaaaaaatcatgatatttaaaaatggtcaaatatttgaggcaaaaaaaaaaaaaaaaagtgtctccaggaggctgtccagcctcgtggctccatttcaacatctccccccaggcgatgttctcccccaagacgaccagaaaattgtttattggggaatgctgtggtttgcattttcatattcttcgcttggcagtgtgtattcttttcacaagtttgcctagtgtcttggtttacacaatatgacaactgtaactgtactttagctattgtttgcctgcacatacatgttgtaatatgcacagtgattacaacctttaaagcaagaggaggcgagttaatttggatgagtgtgattttgctgattgaatgtgagttttcaaataggagtctttttctgcaatttgtttgcattttttagaagtgcaaacagtaagtaaataaaagccttcggtaataatcatgacaatacaagaggctgagctaggctacaggggaaaactattgtgttgtaaagttgcatcgctattttatattaaaatgtaatgatcagcatcatgaacaatgagctcttagtgttttatttatctgaaaaaatgtaatatctgtaagcaatactagtaggtaagatttcactgtgtgtacacatacacatttgagattgtatgagaacatataatccatatgatatgttgtacattttatggaaatgtaatagaatctcacacattattttatagaaatagagtacagaagcatcacaagtattaaagttggttttagcaaggattaggattactacaattatttttactataataattatttttcttctatggaactcagaatcctggctacatttgaggacaggaatatgttgagcctgattttcctggtgtgtgtaaaatatttcctaggaataaattaggcactttttagaagcaatgttaaatcattcaggttttattttctgccctgaagcagaaatttaaaaaatgatattgggacctggaaggtttaatatagttcacagtgcctgaattacacctgctccgaaaactagctttgtatttcttatgactttgcataagaactgttcatctttggatcttgagcaccttacagataaaactttttatggcatctctttcatggacagtgattgatcttttcacaatgtatgtagcctctagaattttgtacatatgtttgctctttttttgtacagactatttagttgttgagaaaacaggggcgtttcctaatttggtctttatcctgcgacaacactttcagcagactagcctctccttatctcacagatcacaagcacccctagatagtgtgattctgtcagatagcatttatgcaaaaatctatgaagttaaaagatcgtagaagccaaatgaaatgtacatatctactgactgatgacaagggaatttcattaggaagaaggtaaagaaacatcgttgagtagcctaccttgatttctgtcaagttcataaccagcttcatattttaaaggcttcaggtttgaaattaagtcaactgcatgcagctttgctgataaatgaataattctctttgatgccatttatgagaaaagacttcaatatctgttgcctgtcatatttaagaaaaattactgtttctactctctgtatctgattttaaaagaaaaaactattcatacctggcttccaggtaattgactttgaattcttacaagcaaaggtcattgtgtttttcttgaatagacatctaataaattttgcttggaagtata

SEQ ID NO: 386946 - DNA, 5342 bp, Homo sapiens
  misc_feature (21)..(21): n is a, c, g, or t
ccgagaggcgaatgaggaagnaaagctatcggctaggtagcgaggcctgggtgttaggcttcctgagcgtcccagtacactgacagagacacttggattggacttaatcttaaacctctggagttcaagaccttttaaaaagggctaaataaacaatctctacatgtaaaaggccactgactcctacttcctctgtatagagcaactgttgaactcagctgcctgtaggaaaactgaagactttaataacaaactctccaaggtgaaaatgaacacagatagcggtgggtgtgctcgcaaacgtgccgccatgtctgttacgctaacatctgtgaagagagtgcaaagttctccaaacctattggctgcagggcgtgattctcagtcaccagactcagccaaaaggttttagaagcgttcgaccaaacctacaagataaaagatcaccaactcagagccagataacagtgaatggaaactcaggaggtgccgtgagtcccatgagttactatcagaggccgttttccccctcggcatattctctcccagcctcactcaactccagcattgtcatgcagcacggcacatccctcgattccacagacacatatccccagcatgcgcagtctctggatggcaccaccagcagctctatccccctgtaccgatcctcagaggaagagaagagagtgacagtcatcaaagccccgcattacccagggatcgggcccgtggatgaatccggaatccccacagcaattagaacgacagtcgaccggcccaaggactggtacaagacgatgtttaagcaaattcacatggtgcacaagccggatgatgacacagacatgtataatactccttatacatacaatgcaggtctgtacaacccaccctacagtgctcagtcacaccctgctgcaaagacccaaacctacagacctctttccaaaagccactccgacaacagccccaatgcctttaaggatgcgtcctccccagtgcctcccccacatgttccacctccagtcccgccgcttcgaccaagagatcggtcttcaacagaaaagcatgactgggatcctccagacagaaaagtggacacaagaaaatttcggtctgagccaaggagtatttttgaatatgaacctggcaagtcatcaattcttcagcatgaaagaccaccccctctcccaacaactccgacacctgttccaagggaacctggccggaagcctctttctagctcccgactcggagaagtcactggtagcccctcccctccgccccggagtggcgcccccacaccaagctcgcgcgccccggctctgtctcccacccgggtgagctccttccttccttacctttcttcatgcccggcagaggtgcaggtgcagcccttgcttgctcagagcctggcgactcccactcccccgggtcccgctcgcacccatccaggccccagaatcttctcatccacaggcccctgagagccccccaatgccctgtccccctccccccagctcgcctgtcttcccacccctcccgcacccttccccatcccaggcttaccacctgcctgcacccgagtgaattgtctgcagactgcgggctcccatgctgggactgctagccaccaatgagggcagggacgatgaagtgactcgcccaaaagagctatttggtgactgggttgagcctattccaaacatcaggcgtgccagccagacccagtctcgctgccgcagagagtggtccatagttcatgcctcaagcgtaagtggatcaactcaagcaagagttgcccacaacttatgccaatcagaaacgatggacgcaggaaacagctagggaccccctgccatggagctcgccttcacatcctcatgctactcgttttactttacttcctccgttctctcctgctgaggttcgtggggtgagagttgatgcatgtttgcgtgtcaatgcgcgcgtgagtttttcatgccacacagcgtttccctcactttgctcagtgtgccttttccttcccttttccttcacatctgctctagactgatcgcataaatccagatgacatagatttagaaaatgagccctggtataaattcttttcagaactggagtttggacgcccgcctcctaaaaagcctctggactatgttcaagatcattcttctggtgttttcaatgaggcctccttgtatcagtcctctatagacagaagcctggaaagacccatgagttctgcaagcatggccagtgacttcaggaagcggaggaagagcgagcctgcagtgggtccaccacggggcttgggagatcaaagtgcgagcaggactagcccaggccgagtggacctcccaggatcaagcaccactcttacaaagtctttcactagctcttctccttcttccccatcaagagcaaaagaccgtgagtcccctagaagttactcatccactttgactgacatggggagaagtgcaccaagggaaagaagaggaactccagaaaaagagaaattgcctgcaaaagctgtttatgattttaaggctcagacatctaaggagttgtcatttaagaaaggagatactgtctacatcctcaggaaaattgatcaaaattggtatgagggagaacaccacgggagagtgggcatcttcccgatctcatacgtagagaaactcacacctcctgagaaagcacagcctgcaagaccacctccgccagcccagcccggagaaatcggagaagctatagccaaatacaacttcaacgcagacacaaatgtggagctgtcactgagaaagggagatagagttattcttcttaaaagagttgatcaaaactggtatgaaggtaaaatcccaggaaccaacagacaaggcatcttccctgtttcctatgtggaggtcgtcaagaagaacacaaaaggtgctgaggactaccctgaccctccaataccccacagctattctagtgataggattcacagcttgagctcaaataagccacagcgtcctgtgtttactcatgaaaatattcaaggtgggggggaaccgtttcaggctctgtataactatactcccaggaatgaagatgagctggagctcagagaaagtgatgtcattgatgtcatggaaaagtgtgatgacggctggtttgtggggacctcaagaagaaccaaattctttggtactttccccggaaactacgtcaagaggctgtgaattgcgctccctccttctgtagaggccgcctgccagccatgcacctgcgtcaacgcgcctgaaacaccccgcgggcctcccgttgtcatgccttacggtttccaatgcgccgtcaccatctccacctgccaccaaaccaccagcagagtagccgccgctgctgtgagcctggggacgacatggcaggctggtccccctccgtgaaagtgtggattcctacttcctgctctaagctttgacacgtcaaaatgtgggatcagaaagaaaaaaatcatgatatttaaaaatggtcaaatatttgaggcaaaaaaaaaaaaaaaaagtgtctccaggaggctgtccagcctcgtggctccatttcaacatctccccccaggcgatgttctcccccaagacgaccagaaaattgtttattggggaatgctgtggtttgcattttcatattcttcgcttggcagtgtgtattcttttcacaagtttgcctagtgtcttggtttacacaatatgacaactgtaactgtactttagctattgtttgcctgcacatacatgttgtaatatgcacagtgattacaacctttaaagcaagaggaggcgagttaatttggatgagtgtgattttgctgattgaatgtgagttttcaaataggagtctttttctgcaatttgtttgcattttttagaagtgcaaacagtaagtaaataaaagccttcggtaataatcatgacaatacaagaggctgagctaggctacaggggaaaactattgtgttgtaaagttgcatcgctattttatattaaaatgtaatgatcagcatcatgaacaatgagctcttagtgttttatttatctgaaaaaatgtaagtaaaagcagtgttagtgagaggtgcaaagaattattctaacagacacctgaaagtatctgtaagcaatactagtaggtaagatttcactgtgtgtacacatacacatttgagattgtatgagaacatataatccatatgatatgttgtacattttatggaaatgtaatagaatctcacacattattttatagaaatagagtacagaagcatcacaagtattaaagttggttttagcaaggattaggattactacaattatttttactataataattatttttcttctatggaactcagaatcctggctacatttgaggacaggaatatgttgagcctgattttcctggtgtgtgtaaaatatttcctaggaataaattaggcactttttagaagcaatgttaaatcattcaggttttattttctgccctgaagcagaaatttaaaaaatgatattgggacctggaaggtttaatatagttcacagtgcctgaattacacctgctccgaaaactagctttgtatttcttatgactttgcataagaactgttcatctttggatcttgagcaccttacagataaaactttttatggcatctctttcatggacagtgattgatcttttcacaatgtatgtagcctctagaattttgtacatatgtttgctctttttttgtacagactatttagttgttgagaaaacaggggcgtttcctaatttggtctttatcctgcgacaacactttcagcagactagcctctccttatctcacagatcacaagcacccctagatagtgtgattctgtcagatagcatttatgcaaaaatctatgaagttaaaagatcgtagaagccaaatgaaatgtacatatctactgactgatgacaagggaatttcattaggaagaaggtaaagaaacatcgttgagtagcctaccttgatttctgtcaagttcataaccagcttcatattttaaaggcttcaggtttgaaattaagtcaactgcatgcagctttgctgataaatgaataattctctttgatgccatttatgagaaaagacttcaatatctgttgcctgtcatatttaagaaaaattactgtttctactctctgtatctgattttaaaagaaaaaactattcatacctggcttccaggtaattgactttgaattcttacaagcaaaggtcattgtgtttttcttgaatagacatctaataaattttgcttggaagtata

SEQ ID NO: 386947 - DNA, 4598 bp, Homo sapiens
aggcgtgatctcagtcaccagactcagcttggagatcttacaatgatggcaatcaggagacactgaacggagatgctacatattcctctcttgcagcaaaaggttttagaagcgttcgaccaaacctacaagataaaagatcaccaactcagagccaaataacagtgaatggaaactcatcgaggtgccgtgattcccatgagttactatcagaggccgttttccccctcggcatattctctcatttgcctctctcttgctttttttccttcagacacttggattggacttaatcttaaacctctggagttcaagaccttttaaaaagggctaaataaacaatctctacatgtaaaaggccactgactcctacttcctctgtatagagcaactgttgaactcagctgcctgtagggcgtgattctcagtcaccagactcagcttggagatcttacaatgatggcaatcaggagacactgaacggagatgctacatattcctctcttgcagcaaaaggttttagaagcgttcgaccaaacctacaagataaaagatcaccaactcagagccagataacagtgaatggaaactcaggaggtgccgtgagtcccatgagttactatcagaggccgttttccccctcggcatattctctcccagcctcactcaactccagcattgtcatgcagcacggcacatccctcgattccacagacacatatccccagcatgcgcagtctctggatggcaccaccagcagctctatccccctgtaccgatcctcagaggaagagaagagagtgacagtcatcaaagccccgcattacccagggatcgggcccgtggatgaatccggaatccccacagcaattagaacgacagtcgaccggcccaaggactggtacaagacgatgtttaagcaaattcacatggtgcacaagccggatgatgacacagacatgtataatactccttatacatacaatgcaggtctgtacaacccaccctacagtgctcagtcacaccctgctgcaaagacccaaacctacagacctctttccaaaagccactccgacaacagccccaatgcctttaaggatgcgtcctccccagtgcctcccccacatgttccacctccagtcccgccgcttcgaccaagagatcggtcttcaacagaaaagcatgactgggatcctccagacagaaaagtggacacaagaaaatttcggtctgagccaaggagtatttttgaatatgaacctggcaagtcatcaattcttcagcatgaaagaccaccccctctcccaacaactccgacacctgttccaagggaacctggccggaagcctctttctagctcccgactcggagaagtcactggtagcccctcccctccgccccggagtggcgcccccacaccaagctcgcgcgccccggctctgtctcccacccgggcctccttgtatcagtcctctatagacagaagcctggaaagacccatgagttctgcaagcatggccagtgacttcaggaagcggaggaagagcgagcctgcagtgggtccaccacggggcttgggagatcaaagtgcgagcaggactagcccaggccgagtggacctcccaggatcaagcaccactcttacaaagtctttcactagctcttctccttcttccccatcaagagcaaaagaccgtgagtcccctagaagttactcatccactttgactgacatggggagaagtgcaccaagggaaagaagaggaactccagaaaaagagaaattgcctgcaaaagctgtttatgattttaaggctcagacatctaaggagttgtcatttaagaaaggagatactgtctacatcctcaggaaaattgatcaaaattggtatgagggagaacaccacgggagagtgggcatcttcccgatctcatacgtagagaaactcacacctcctgagaaagcacagcctgcaagaccacctccgccagcccagcccggagaaatcggagaagctatagccaaatacaacttcaacgcagacacaaatgtggagctgtcactgagaaagggagatagagttattcttcttaaaagagttgatcaaaactggtatgaaggtaaaatcccaggaaccaacagacaaggcatcttccctgtttcctatgtggaggtcgtcaagaagaacacaaaaggtgctgaggactaccctgaccctccaataccccacagctattctagtgataggattcacagcttgagctcaaataagccacagcgtcctgtgtttactcatgaaaatattcaaggtgggggggaaccgtttcaggctctgtataactatactcccaggaatgaagatgagctggagctcagagaaagtgatgtcattgatgtcatggaaaagtgtgatgacggctggtttgtggggacctcaagaagaaccaaattctttggtactttccccggaaactacgtcaagaggctgtgaattgcgctccctccttctgtagaggccgcctgccagccatgcacctgcgtcaacgcgcctgaaacaccccgcgggcctcccgttgtcatgccttacggtttccaatgcgccgtcaccatctccacctgccaccaaaccaccagcagagtagccgccgctgctgtgagcctggggacgacatggcaggctggtccccctccgtgaaagtgtggattcctacttcctgctctaagctttgacacgtcaaaatgtgggatcagaaagaaaaaaatcatgatatttaaaaatggtcaaatatttgaggcaaaaaaaaaaaaaaaaagtgtctccaggaggctgtccagcctcgtggctccatttcaacatctccccccaggcgatgttctcccccaagacgaccagaaaattgtttattggggaatgctgtggtttgcattttcatattcttcgcttggcagtgtgtattcttttcacaagtttgcctagtgtcttggtttacacaatatgacaactgtaactgtactttagctattgtttgcctgcacatacatgttgtaatatgcacagtgattacaacctttaaagcaagaggaggcgagttaatttggatgagtgtgattttgctgattgaatgtgagttttcaaataggagtctttttctgcaatttgtttgcattttttagaagtgcaaacagtaagtaaataaaagccttcggtaataatcatgacaatacaagaggctgagctaggctacaggggaaaactattgtgttgtaaagttgcatcgctattttatattaaaatgtaatgatcagcatcatgaacaatgagctcttagtgttttatttatctgaaaaaatgtaagtaaaagcagtgttagtgagaggtgcaaagaattattctaacagacacctgaaagtatctgtaagcaatactagtaggtaagatttcactgtgtgtacacatacacatttgagattgtatgagaacatataatccatatgatatgttgtacattttatggaaatgtaatagaatctcacacattattttatagaaatagagtacagaagcatcacaagtattaaagttggttttagcaaggattaggattactacaattatttttactataataattatttttcttctatggaactcagaatcctggctacatttgaggacaggaatatgttgagcctgattttcctggtgtgtgtaaaatatttcctaggaataaattaggcactttttagaagcaatgttaaatcattcaggttttattttctgccctgaagcagaaatttaaaaaatgatattgggacctggaaggtttaatatagttcacagtgcctgaattacacctgctccgaaaactagctttgtatttcttatgactttgcataagaactgttcatctttggatcttgagcaccttacagataaaactttttatggcatctctttcatggacagtgattgatcttttcacaatgtatgtagcctctagaattttgtacatatgtttgctctttttttgtacagactatttagttgttgagaaaacaggggcgtttcctaatttggtctttatcctgcgacaacactttcagcagactagcctctccttatctcacagatcacaagcacccctagatagtgtgattctgtcagatagcatttatgcaaaaatctatgaagttaaaagatcgtagaagccaaatgaaatgtacatatctactgactgatgacaagggaatttcattaggaagaaggtaaagaaacatcgttgagtagcctaccttgatttctgtcaagttcataaccagcttcatattttaaaggcttcaggtttgaaattaagtcaactgcatgcagctttgctgataaatgaataattctctttgatgccatttatgagaaaagacttcaatatctgttgcctgtcatatttaagaaaaattactgtttctactctctgtatctgattttaaaagaaaaaactattcatacctggcttccaggtaattgactttgaattcttacaagcaaaggtcattgtgtttttcttgaatagacatctaataaattttgcttggaagtata

SEQ ID NO: 386948 - DNA, 4717 bp, Homo sapiens
aggcgtgatctcagtcaccagactcagcttggagatcttacaatgatggcaatcaggagacactgaacggagatgctacatattcctctcttgcagcaaaaggttttagaagcgttcgaccaaacctacaagataaaagatcaccaactcagagccaaataacagtgaatggaaactcatcgaggtgccgtgattcccatgagttactatcagaggccgttttccccctcggcatattctctcatttgcctctctcttgctttttttccttcagacacttggattggacttaatcttaaacctctggagttcaagaccttttaaaaagggctaaataaacaatctctacatgtaaaaggccactgactcctacttcctctgtatagagcaactgttgaactcagctgcctgtaggaaaactgaagactttaataacaaactctccaaggtgaaaatgaacacaggcgtgattctcagtcaccagactcagccaaaaggttttagaagcgttcgaccaaacctacaagataaaagatcaccaactcagagccagataacagtgaatggaaactcaggaggtgccgtgagtcccatgagttactatcagaggccgttttccccctcggcatattctctcccagcctcactcaactccagcattgtcatgcagcacggcacatccctcgattccacagacacatatccccagcatgcgcagtctctggatggcaccaccagcagctctatccccctgtaccgatcctcagaggaagagaagagagtgacagtcatcaaagccccgcattacccagggatcgggcccgtggatgaatccggaatccccacagcaattagaacgacagtcgaccggcccaaggactggtacaagacgatgtttaagcaaattcacatggtgcacaagccggatgatgacacagacatgtataatactccttatacatacaatgcaggtctgtacaacccaccctacagtgctcagtcacaccctgctgcaaagacccaaacctacagacctctttccaaaagccactccgacaacagccccaatgcctttaaggatgcgtcctccccagtgcctcccccacatgttccacctccagtcccgccgcttcgaccaagagatcggtcttcaacagaaaagcatgactgggatcctccagacagaaaagtggacacaagaaaatttcggtctgagccaaggagtatttttgaatatgaacctggcaagtcatcaattcttcagcatgaaagaccaccccctctcccaacaactccgacacctgttccaagggaacctggccggaagcctctttctagctcccgactcggagaagtcactggtagcccctcccctccgccccggagtggcgcccccacaccaagctcgcgcgccccggctctgtctcccacccggcctcctaaaaagcctctggactatgttcaagatcattcttctggtgttttcaatgaggcctccttgtatcagtcctctatagacagaagcctggaaagacccatgagttctgcaagcatggccagtgacttcaggaagcggaggaagagcgagcctgcagtgggtccaccacggggcttgggagatcaaagtgcgagcaggactagcccaggccgagtggacctcccaggatcaagcaccactcttacaaagtctttcactagctcttctccttcttccccatcaagagcaaaagaccgtgagtcccctagaagttactcatccactttgactgacatggggagaagtgcaccaagggaaagaagaggaactccagaaaaagagaaattgcctgcaaaagctgtttatgattttaaggctcagacatctaaggagttgtcatttaagaaaggagatactgtctacatcctcaggaaaattgatcaaaattggtatgagggagaacaccacgggagagtgggcatcttcccgatctcatacgtagagaaactcacacctcctgagaaagcacagcctgcaagaccacctccgccagcccagcccggagaaatcggagaagctatagccaaatacaacttcaacgcagacacaaatgtggagctgtcactgagaaagggagatagagttattcttcttaaaagagttgatcaaaactggtatgaaggtaaaatcccaggaaccaacagacaaggcatcttccctgtttcctatgtggaggtcgtcaagaagaacacaaaaggtgctgaggactaccctgaccctccaataccccacagctattctagtgataggattcacagcttgagctcaaataagccacagcgtcctgtgtttactcatgaaaatattcaaggtgggggggaaccgtttcaggctctgtataactatactcccaggaatgaagatgagctggagctcagagaaagtgatgtcattgatgtcatggaaaagtgtgatgacggctggtttgtggggacctcaagaagaaccaaattctttggtactttccccggaaactacgtcaagaggctgtgaattgcgctccctccttctgtagaggccgcctgccagccatgcacctgcgtcaacgcgcctgaaacaccccgcgggcctcccgttgtcatgccttacggtttccaatgcgccgtcaccatctccacctgccaccaaaccaccagcagagtagccgccgctgctgtgagcctggggacgacatggcaggctggtccccctccgtgaaagtgtggattcctacttcctgctctaagctttgacacgtcaaaatgtgggatcagaaagaaaaaaatcatgatatttaaaaatggtcaaatatttgaggcaaaaaaaaaaaaaaaaagtgtctccaggaggctgtccagcctcgtggctccatttcaacatctccccccaggcgatgttctcccccaagacgaccagaaaattgtttattggggaatgctgtggtttgcattttcatattcttcgcttggcagtgtgtattcttttcacaagtttgcctagtgtcttggtttacacaatatgacaactgtaactgtactttagctattgtttgcctgcacatacatgttgtaatatgcacagtgattacaacctttaaagcaagaggaggcgagttaatttggatgagtgtgattttgctgattgaatgtgagttttcaaataggagtctttttctgcaatttgtttgcattttttagaagtgcaaacagtaagtaaataaaagccttcggtaataatcatgacaatacaagaggctgagctaggctacaggggaaaactattgtgttgtaaagttgcatcgctattttatattaaaatgtaatgatcagcatcatgaacaatgagctcttagtgttttatttatctgaaaaaatgtaagtaaaagcagtgttagtgagaggtgcaaagaattattctaacagacacctgaaagtatctgtaagcaatactagtaggtaagatttcactgtgtgtacacatacacatttgagattgtatgagaacatataatccatatgatatgttgtacattttatggaaatgtaatagaatctcacacattattttatagaaatagagtacagaagcatcacaagtattaaagttggttttagcaaggattaggattactacaattatttttactataataattatttttcttctatggaactcagaatcctggctacatttgaggacaggaatatgttgagcctgattttcctggtgtgtgtaaaatatttcctaggaataaattaggcactttttagaagcaatgttaaatcattcaggttttattttctgccctgaagcagaaatttaaaaaatgatattgggacctggaaggtttaatatagttcacagtgcctgaattacacctgctccgaaaactagctttgtatttcttatgactttgcataagaactgttcatctttggatcttgagcaccttacagataaaactttttatggcatctctttcatggacagtgattgatcttttcacaatgtatgtagcctctagaattttgtacatatgtttgctctttttttgtacagactatttagttgttgagaaaacaggggcgtttcctaatttggtctttatcctgcgacaacactttcagcagactagcctctccttatctcacagatcacaagcacccctagatagtgtgattctgtcagatagcatttatgcaaaaatctatgaagttaaaagatcgtagaagccaaatgaaatgtacatatctactgactgatgacaagggaatttcattaggaagaaggtaaagaaacatcgttgagtagcctaccttgatttctgtcaagttcataaccagcttcatattttaaaggcttcaggtttgaaattaagtcaactgcatgcagctttgctgataaatgaataattctctttgatgccatttatgagaaaagacttcaatatctgttgcctgtcatatttaagaaaaattactgtttctactctctgtatctgattttaaaagaaaaaactattcatacctggcttccaggtaattgactttgaattcttacaagcaaaggtcattgtgtttttcttgaatagacatctaataaattttgcttggaagtatacttcagtttttcttcttgacatttatctttataaaaattgtgtattttattccaacttgttaaactaagagaaaatgcaaa

SEQ ID NO: 386949 - DNA, 3660 bp, Homo sapiens
  misc_feature (10)..(10): n is a, c, g, or t
  misc_feature (12)..(12): n is a, c, g, or t
tggttagtgnancgggcgggcgccggcagcttctgagagcctgggcaggcagcagctggctgaccaagtccactggaagagaaggcttgtgccagccgggagaaggaagccggggacaggatgaaagcaacaacacctttgcagacagtcgaccggcccaaggactggtacaagacgatgtttaagcaaattcacatggtgcacaagccgggtctgtacaacccaccctacagtgctcagtcacaccctgctgcaaagacccaaacctacagacctctttccaaaagccactccgacaacagccccaatgcctttaaggatgcgtcctccccagtgcctcccccacatgttccacctccagtcccgccgcttcgaccaagagatcggtcttcaacagaaaagcatgactgggatcctccagacagaaaagtggacacaagaaaatttcggtctgagccaaggagtatttttgaatatgaacctggcaagtcatcaattcttcagcatgaaagaccagcctccttgtatcagtcctctatagacagaagcctggaaagacccatgagttctgcaagcatggccagtgacttcaggaagcggaggaagagcgagcctgcagtgggtccaccacggggcttgggagatcaaagtgcgagcaggactagcccaggccgagtggacctcccaggatcaagcaccactcttacaaagtctttcactagctcttctccttcttccccatcaagagcaaaagaccgtgagtcccctagaagttactcatccactttgactgacatggggagaagtgcaccaagggaaagaagaggaactccagaaaaagagaaattgcctgcaaaagctgtttatgattttaaggctcagacatctaaggagttgtcatttaagaaaggagatactgtctacatcctcaggaaaattgatcaaaattggtatgagggagaacaccacgggagagtgggcatcttcccgatctcatacgtagagaaactcacacctcctgagaaagcacagcctgcaagaccacctccgccagcccagcccggagaaatcggagaagctatagccaaatacaacttcaacgcagacacaaatgtggagctgtcactgagaaagggagatagagttattcttcttaaaagagttgatcaaaactggtatgaaggtaaaatcccaggaaccaacagacaaggcatcttccctgtttcctatgtggaggtcgtcaagaagaacacaaaaggtgctgaggactaccctgaccctccaataccccacagctattctagtgataggattcacagcttgagctcaaataagccacagcgtcctgtgtttactcatgaaaatattcaaggtgggggggaaccgtttcaggctctgtataactatactcccaggaatgaagatgagctggagctcagagaaagtgatgtcattgatgtcatggaaaagtgtgatgacggctggtttgtggggacctcaagaagaaccaaattctttggtactttccccggaaactacgtcaagaggctgtgaattgcgctccctccttctgtagaggccgcctgccagccatgcacctgcgtcaacgcgcctgaaacaccccgcgggcctcccgttgtcatgccttacggtttccaatgcgccgtcaccatctccacctgccaccaaaccaccagcagagtagccgccgctgctgtgagcctggggacgacatggcaggctggtccccctccgtgaaagtgtggattcctacttcctgctctaagctttgacacgtcaaaatgtgggatcagaaagaaaaaaatcatgatatttaaaaatggtcaaatatttgaggcaaaaaaaaaaaaaaaaagtgtctccaggaggctgtccagcctcgtggctccatttcaacatctccccccaggcgatgttctcccccaagacgaccagaaaattgtttattggggaatgctgtggtttgcattttcatattcttcgcttggcagtgtgtattcttttcacaagtttgcctagtgtcttggtttacacaatatgacaactgtaactgtactttagctattgtttgcctgcacatacatgttgtaatatgcacagtgattacaacctttaaagcaagaggaggcgagttaatttggatgagtgtgattttgctgattgaatgtgagttttcaaataggagtctttttctgcaatttgtttgcattttttagaagtgcaaacagtaagtaaataaaagccttcggtaataatcatgacaatacaagaggctgagctaggctacaggggaaaactattgtgttgtaaagttgcatcgctattttatattaaaatgtaatgatcagcatcatgaacaatgagctcttagtgttttatttatctgaaaaaatgtaagtaaaagcagtgttagtgagaggtgcaaagaattattctaacagacacctgaaagtatctgtaagcaatactagtaggtaagatttcactgtgtgtacacatacacatttgagattgtatgagaacatataatccatatgatatgttgtacattttatggaaatgtaatagaatctcacacattattttatagaaatagagtacagaagcatcacaagtattaaagttggttttagcaaggattaggattactacaattatttttactataataattatttttcttctatggaactcagaatcctggctacatttgaggacaggaatatgttgagcctgattttcctggtgtgtgtaaaatatttcctaggaataaattaggcactttttagaagcaatgttaaatcattcaggttttattttctgccctgaagcagaaatttaaaaaatgatattgggacctggaaggtttaatatagttcacagtgcctgaattacacctgctccgaaaactagctttgtatttcttatgactttgcataagaactgttcatctttggatcttgagcaccttacagataaaactttttatggcatctctttcatggacagtgattgatcttttcacaatgtatgtagcctctagaattttgtacatatgtttgctctttttttgtacagactatttagttgttgagaaaacaggggcgtttcctaatttggtctttatcctgcgacaacactttcagcagactagcctctccttatctcacagatcacaagcacccctagatagtgtgattctgtcagatagcatttatgcaaaaatctatgaagttaaaagatcgtagaagccaaatgaaatgtacatatctactgactgatgacaagggaatttcattaggaagaaggtaaagaaacatcgttgagtagcctaccttgatttctgtcaagttcataaccagcttcatattttaaaggcttcaggtttgaaattaagtcaactgcatgcagctttgctgataaatgaataattctctttgatgccatttatgagaaaagacttcaatatctgttgcctgtcatatttaagaaaaattactgtttctactctctgtatctgattttaaaagaaaaaactattcatacctggcttccaggtaattgactttgaattcttacaagcaaaggtcattgtgtttttcttgaatagacatctaataaattttgcttggaagtata

SEQ ID NO: 386950 - DNA, 4154 bp, Homo sapiens
  misc_feature (21)..(21): n is a, c, g, or t
ccgagaggcgaatgaggaagnaaagctatcggctaggtagcgaggcctgggtgttaggcttcctgagcgtcccagtacactgacagagacacttggattggacttaatcttaaacctctggagttcaagaccttttaaaaagggctaaataaacaatctctacatgtaaaaggccactgactcctacttcctctgtatagagcaactgttgaactcagctgcctgtaggaaaactgaagactttaataacaaactctccaaggtgaaaatgaacacagatagcggtgggtgtgctcgcaaacgtgccgccatgtctgttacgctaacatctgtgaagagagtgcaaagttctccaaacctattggctgcagggcgtgattctcagtcaccagactcagccaaaaggttttagaagcgttcgaccaaacctacaagataaaagatcaccaactcagagccagataacagtgaatggaaactcaggaggtgccgtgagtcccatgagttactatcagaggccgttttccccctcggcatattctctcccagcctcactcaactccagcattgtcatgcagcacggcacatccctcgattccacagacacatatccccagcatgcgcagtctctggatggcaccaccagcagctctatccccctgtaccgatcctcagaggaagagaagagagtgacagtcatcaaagccccgcattacccagggatcgggcccgtggatgaatccggaatccccacagcaattagaacgacagtcgaccggcccaaggactggtacaagacgatgtttaagcaaattcacatggtgcacaagccggatgatgacacagacatgtataatactccttatacatacaatgcaggtctgtacaacccaccctacagtgctcagtcacaccctgctgcaaagacccaaacctacagacctctttccaaaagccactccgacaacagccccaatgcctttaaggatgcgtcctccccagtgcctcccccacatgttccacctccagtcccgccgcttcgaccaagagatcggtcttcaacagaaaagcatgactgggatcctccagacagaaaagtggacacaagaaaatttcggtctgagccaaggagtatttttgaatatgaacctggcaagtcatcaattcttcagcatgaaagaccaccccctctcccaacaactccgacacctgttccaagggaacctggccggaagcctctttctagctcccgactcggagaagtcactggtagcccctcccctccgccccggagtggcgcccccacaccaagctcgcgcgccccggctctgtctcccacccgggcctccttgtatcagtcctctatagacagaagcctggaaagacccatgagttctgcaagcatggccagtgacttcaggaagcggaggaagagcgagcctgcagtgggtccaccacggggcttgggagatcaaagtgcgagcaggactagcccaggccgagtggacctcccaggatcaagcaccactcttacaaagtctttcactagctcttctccttcttccccatcaagagcaaaagaccgtgagtcccctagaagttactcatccactttgactgacatggggagaagtgcaccaagggaaagaagaggaactccagaaaaagagaaattgcctgcaaaagctgtttatgattttaaggctcagacatctaaggagttgtcatttaagaaaggagatactgtctacatcctcaggaaaattgatcaaaattggtatgagggagaacaccacgggagagtgggcatcttcccgatctcatacgtagagaaactcacacctcctgagaaagcacagcctgcaagaccacctccgccagcccagcccggagaaatcggagaagctatagccaaatacaacttcaacgcagacacaaatgtggagctgtcactgagaaagggagatagagttattcttcttaaaagagttgatcaaaactggtatgaaggtaaaatcccaggaaccaacagacaaggcatcttccctgtttcctatgtggaggtcgtcaagaagaacacaaaaggtgctgaggactaccctgaccctccaataccccgcgggcctcccgttgtcatgccttacggtttccaatgcgccgtcaccatctccacctgccaccaaaccaccagcagagtagccgccgctgctgtgagcctggggacgacatggcaggctggtccccctccgtgaaagtgtggattcctacttcctgctctaagctttgacacgtcaaaatgtgggatcagaaagaaaaaaatcatgatatttaaaaatggtcaaatatttgaggcaaaaaaaaaaaaaaaaagtgtctccaggaggctgtccagcctcgtggctccatttcaacatctccccccaggcgatgttctcccccaagacgaccagaaaattgtttattggggaatgctgtggtttgcattttcatattcttcgcttggcagtgtgtattcttttcacaagtttgcctagtgtcttggtttacacaatatgacaactgtaactgtactttagctattgtttgcctgcacatacatgttgtaatatgcacagtgattacaacctttaaagcaagaggaggcgagttaatttggatgagtgtgattttgctgattgaatgtgagttttcaaataggagtctttttctgcaatttgtttgcattttttagaagtgcaaacagtaagtaaataaaagccttcggtaataatcatgacaatacaagaggctgagctaggctacaggggaaaactattgtgttgtaaagttgcatcgctattttatattaaaatgtaatgatcagcatcatgaacaatgagctcttagtgttttatttatctgaaaaaatgtaagtaaaagcagtgttagtgagaggtgcaaagaattattctaacagacacctgaaagtatctgtaagcaatactagtaggtaagatttcactgtgtgtacacatacacatttgagattgtatgagaacatataatccatatgatatgttgtacattttatggaaatgtaatagaatctcacacattattttatagaaatagagtacagaagcatcacaagtattaaagttggttttagcaaggattaggattactacaattatttttactataataattatttttcttctatggaactcagaatcctggctacatttgaggacaggaatatgttgagcctgattttcctggtgtgtgtaaaatatttcctaggaataaattaggcactttttagaagcaatgttaaatcattcaggttttattttctgccctgaagcagaaatttaaaaaatgatattgggacctggaaggtttaatatagttcacagtgcctgaattacacctgctccgaaaactagctttgtatttcttatgactttgcataagaactgttcatctttggatcttgagcaccttacagataaaactttttatggcatctctttcatggacagtgattgatcttttcacaatgtatgtagcctctagaattttgtacatatgtttgctctttttttgtacagactatttagttgttgagaaaacaggggcgtttcctaatttggtctttatcctgcgacaacactttcagcagactagcctctccttatctcacagatcacaagcacccctagatagtgtgattctgtcagatagcatttatgcaaaaatctatgaagttaaaagatcgtagaagccaaatgaaatgtacatatctactgactgatgacaagggaatttcattaggaagaaggtaaagaaacatcgttgagtagcctaccttgatttctgtcaagttcataaccagcttcatattttaaaggcttcaggtttgaaattaagtcaactgcatgcagctttgctgataaatgaataattctctttgatgccatttatgagaaaagacttcaatatctgttgcctgtcatatttaagaaaaattactgtttctactctctgtatctgattttaaaagaaaaaactattcatacctggcttccaggtaattgactttgaattcttacaagcaaaggtcattgtgtttttcttgaatagacatctaataaattttgcttggaagtata

SEQ ID NO: 386951 - DNA, 2087 bp, Homo sapiens
  misc_feature (21)..(21): n is a, c, g, or t
ccgagaggcgaatgaggaagnaaagctatcggctaggtagcgaggcctgggtgttaggcttcctgagcgtcccagtacactgacagagacacttggattggacttaatcttaaacctctggagttcaagaccttttaaaaagggctaaataaacaatctctacatgtaaaaggccactgactcctacttcctctgtatagagcaactgttgaactcagctgcctgtaggaaaactgaagactttaataacaaactctccaaggtgaaaatgaacacagatagcggtgggtgtgctcgcaaacgtgccgccatgtctgttacgctaacatctgtgaagagagtgcaaagttctccaaacctattggctgcagggcgtgattctcagtcaccagactcagccaaaaggttttagaagcgttcgaccaaacctacaagataaaagatcaccaactcagagccagataacagtgaatggaaactcaggaggtgccgtgagtcccatgagttactatcagaggccgttttccccctcggcatattctctcccagcctcactcaactccagcattgtcatgcagcacggcacatccctcgattccacagacacatatccccagcatgcgcagtctctggatggcaccaccagcagctctatccccctgtaccgatcctcagaggaagagaagagagtgacagtcatcaaagccccgcattacccagggatcgggcccgtggatgaatccggaatccccacagcaattagaacgacagtcgaccggcccaaggactggtacaagacgatgtttaagcaaattcacatggtgcacaagccggatgatgacacagacatgtataatactccttatacatacaatgcaggtctgtacaacccaccctacagtgctcagtcacaccctgctgcaaagacccaaacctacagacctctttccaaaagccactccgacaacagccccaatgcctttaaggatgcgtcctccccagtgcctcccccacatgttccacctccagtcccgccgcttcgaccaagagatcggtcttcaacagaaaagcatgactgggatcctccagacagaaaagtggacacaagaaaatttcggtctgagccaaggagtatttttgaatatgaacctggcaagtcatcaattcttcagcatgaaagaccaccccctctcccaacaactccgacacctgttccaagggaacctggccggaagcctctttctagctcccgactcggagaagtcactggtagcccctcccctccgccccggagtggcgcccccacaccaagctcgcgcgccccggctctgtctcccacccgggcctccttgtatcagtcctctatagacagaagcctggaaagacccatgagttctgcaagcatggccagtgacttcaggaagcggaggaagagcgagcctgcagtgggtccaccacggggcttgggagatcaaagtgcgagcaggactagcccaggccgagtggacctcccaggatcaagcaccactcttacaaagtctttcactagctcttctccttcttccccatcaagagcaaaagaccgtgagtcccctagaagttactcatccactttgactgacatggggagaagtgcaccaagggaaagaagaggaactccagaaaaagagaaattgcctgcaaaagctgtttatgattttaaggctcagacatctaaggagttgtcatttaagaaaggagatactgtctacatcctcaggaaaattgatcaaaattggtatgagggagaacaccacgggagagtgggcatcttcccgatctcatacgtagagaaactcacacctcctgagaaagcacagcctgcaagaccacctccgccagcccagcccggagaaatcggagaagctatagccaaatacaacttcaacgcagacacaaatgtggagctgtcactgagaaaggtagcccagctggttttttgtttgtttgtttttgtttgtttgttcttcagtgggtttgaaaaggctgtatattttcaaaactaaaataggttatctttttctttagacatttttatgtttacccta

SEQ ID NO: 386952 - DNA, 4058 bp, Homo sapiens
  misc_feature (21)..(21): n is a, c, g, or t
  misc_feature (2367)..(2367): n is a, c, g, or t
  misc_feature (2872)..(2872): n is a, c, g, or t
ccgagaggcgaatgaggaagnaaagctatcggctaggtagcgaggcctgggtgttaggcttcctgagcgtcccagtacactgacagagacacttggattggacttaatcttaaacctctggagttcaagaccttttaaaaagggctaaataaacaatctctacatgtaaaaggccactgactcctacttcctctgtatagagcaactgttgaactcagctgcctgtaggaaaactgaagactttaataacaaactctccaaggtgaaaatgaacacagatagcggtgggtgtgctcgcaaacgtgccgccatgtctgttacgctaacatctgtgaagagagtgcaaagttctccaaacctattggctgcagggcgtgattctcagtcaccagactcagccaaaaggttttagaagcgttcgaccaaacctacaagataaaagatcaccaactcagagccagataacagtgaatggaaactcaggaggtgccgtgagtcccatgagttactatcagaggccgttttccccctcggcatattctctcccagcctcactcaactccagcattgtcatgcagcacggcacatccctcgattccacagacacatatccccagcatgcgcagtctctggatggcaccaccagcagctctatccccctgtaccgatcctcagaggaagagaagagagtgacagtcatcaaagccccgcattacccagggatcgggcccgtggatgaatccggaatccccacagcaattagaacgacagtcgaccggcccaaggactggtacaagacgatgtttaagcaaattcacatggtgcacaagccggatgatgacacagacatgtataatactccttatacatacaatgcaggtctgtacaacccaccctacagtgctcagtcacaccctgctgcaaagacccaaacctacagacctctttccaaaagccactccgacaacagccccaatgcctttaaggatgcgtcctccccagtgcctcccccacatgttccacctccagtcccgccgcttcgaccaagagatcggtcttcaacagaaaagcatgactgggatcctccagacagaaaagtggacacaagaaaatttcggtctgagccaaggagtatttttgaatatgaacctggcaagtcatcaattcttcagcatgaaagaccaccccctctcccaacaactccgacacctgttccaagggaacctggccggaagcctctttctagctcccgactcggagaagtcactggtagcccctcccctccgccccggagtggcgcccccacaccaagctcgcgcgccccggctctgtctcccacccgggtgagctccttccttccttacctttcttcatgcccggcagaggtgcaggtgcagcccttgcttgctcagagcctggcgactcccactcccccgggtcccgctcgcacccatccaggccccagaatcttctcatccacaggcccctgagagccccccaatgccctgtccccctccccccagctcgcctgtcttcccacccctcccgcacccttccccatcccaggcttaccacctgcctgcacccgagtgaattgtctgcagactgcgggctcccatgctgggactgctagccaccaatgagggcagggacgatgaagtgactcgcccaaaagagctatttggtgactgggttgagcctattccaaacatcaggcgtgccagccagacccagtctcgctgccgcagagagtggtccatagttcatgcctcaagcgtaagtggatcaactcaagcaagagttgcccacaacttatgccaatcagaaacgatggacgcaggaaacagctagggaccccctgccatggagctcgccttcacatcctcatgctactcgttttactttacttcctccgttctctcctgctgaggttcgtggggtgagagttgatgcatgtttgcgtgtcaatgcgcgcgtgagtttttcatgccacacagcgtttccctcactttgctcagtgtgccttttccttcccttttccttcacatctgctctagactgatcgcataaatccagatgacatagatttagaaaatgagccctggtataaattcttttcagaactggagtttggacgcccggtaagtgaggctagactattaatataagaaaactaggagtatactgtttgatttctaaaatacaattatcagtagacgtgggtgtcattcagagaacaaaggccgaatgcataatgtatacacacacttggtacagcgtagtccagattcatttctgtaccaaatggtcaaatgtgctcagacatttcctatgtggtttgtaggtcattcattaagatttctttanatctaattcattacaagttcaaaatcttgaggtagtttctgtgatggaatattcagacaattattacagctgtatagaagatttgtatttgtttacagtctatttggtctagttcaagcagaagagcaccttgacattgagtcctgtttgctgagcaaacatcaggcacctggagagtgcgggcttctgtcttcattatctcctcgaggcctcctgatgtcccgccaagaagaagaaaatggggactggaggggttaagtaatgtgcacaaaatagtaaatggcagagtaagaagttaaacgcagagcctgttaaagaaaaatgaaaatctctgggcagttctcactataatatactgccagagtaatcccactacaaaatacagtcacgtgttgcttaaggatgtggacgggttctgagaaatgtgtcatcaggtggacttgccattgtgcaaacatcgcagagtacttacacaaacccagatgctagagcctgctacacgccnaggctgtgtgctatggcccgttgctcctgggctacaaacctgtacagcaggttcctgcactccatactgtaggcaactgtaatgcaatggtaggtatttgtgtacctaaacatatctaaacatagaaaaggcatggtaaaaatacagtcttataatcccataggaccaccatcatatataggtgcatcgttgacggaaacgtcattatgcaacacatgactgtacctagtttaccattagggatataaggaaagaaaaaaatcaggaagtcctgtggatcttaatttccagacttgctagtgaaagccatcacagcttctctaatccccagactcccgccagaggaagcccagaggttgggccttattgcttagcctgtttgggataaagagtcaacttgaggccgagcacggtggctcacacctgtaatcccagcactttgggaggccgaggcaggcggatcacgaaatcaacagattgagaccattctggccaacatggtgaaaccccgtctctgctaaaaatacaaacattagttgggcatggtggcgggtgcctgtagtcccagctacttgggagaccgaggcaggagaatcgcttgaacctgggaggcggagattgcagtgagctgggatcacgccactgcactccagcctgggcgacagagtgagactccatctcaaaaaaaaaaaaaaaaaatagtcaactggaggttcagttaacaacttccctgattaggaactgtatccaccaacagcagtgcatttgatgtgtgtcagttacacacgtttttatgcgttttagactcttaaataacctaccaattacactgatagtttttttagaaatcaggatataaccatttctataccatatgctgatttatatacttgcatatggaccatatatggtttactgattggtgatggtagtctcttttgtccattaaactgcaaaggagacttggttagactcaaggtagcttattgaaccgaatcaaaagtgactgtaaacgaatataaaccaaaggatttttcttagggttattatctcataggaggaatgttttctctcattttttctcatttgtatcttagtgtgaatgtaaatgtattttatttcaaggaaaaacattctctagctttattttatatgtattgttgctgttggttagaaagtttatagg

SEQ ID NO: 386953 - DNA, 1210 bp, Homo sapiens
  misc_feature (10)..(10): n is a, c, g, or t
  misc_feature (12)..(12): n is a, c, g, or t
tggttagtgnancgggcgggcgccggcagcttctgagagcctgggcaggcagcagctggctgaccaagtccactggaagagaaggcttgtgccagccgggagaaggaagccggggacaggatgaaagcaacaacacctttgcagacagtcgaccggcccaaggactggtacaagacgatgtttaagcaaattcacatggtgcacaagccggatgatgacacagacatgtataatactccttatacatacaatgcaggtctgtacaacccaccctacagtgctcagtcacaccctgctgcaaagacccaaacctacagacctctttccaaaagccactccgacaacagccccaatgcctttaaggatgcgtcctccccagtgcctcccccacatgttccacctccagtcccgccgcttcgaccaagagatcggtcttcaacagaaaagcatgactgggatcctccagacagaaaagtggacacaagaaaatttcggtctgagccaaggagtatttttgaatatgaacctggcaagtcatcaattcttcagcatgaaagaccagttaccaagcctcaagcttcctgattgattgtcattctaatggatcaagattatatttcactttgcaggattttttccaattatttaattatatgcaaacaaaaatatctatacacttaagaagaaccacttgcctcctcgaagcgcaggttcacacataggtcttcccttggccttctttggttttgattccccaatactcccttgcatgtcctttgcttcccctcagaaatcagtgtcctcaggattttctttgaaactccacagttcctctgcatctccttccaagcctacttctaggaaaacatttgcaatcaattgcaatttactctcatttttgctttaaaagaattttaggtgtcagtgaacaggaaaaagagagttttctttgtggagctccttcaagagtctccaagaaatcacactcatatataatccaaggccagccctgtggtttaattggaaactctagccttgccacacccaacatgagtgtccttgattgagtctttgaaaccctgtgtttgcggttgtgttctggagaagcatgttcaaaaccttatcatcagataattcatacatgatatttgtctaagccttcttaccctttctttaaataactcatatcttttagagtaacaggactaca

SEQ ID NO: 386954 - DNA, 452 bp, Homo sapiens
tgtcatgataggtctgtacaacccaccctacagtgctcagtcacaccctgctgcaaagacccaaacctacagacctctttccaaaagccactccgacaacagccccaatgcctttaaggatgcgtcctccccagtgcctcccccacatgttccacctccagtcccgccgcttcgaccaagagatcggtcttcaacagaaaagtaaggcatttccccccagggtggcctatgtttcgcttaggataaaaataagtctacatggcattcagtagaagaatcagtgcacctgccacagagagagcggatgtgtaatcttgctagtctatacatataccatattgacctcctctgctgggattgtagcaaatgttttccctgtcttctttcatgatactggagtgccctaaattagacttgaagtaatatggacacattttctgctttttgatcaa

SEQ ID NO: 386955 - DNA, 559 bp, Homo sapiens
tggacatctgactgtctcctagagaaagttgtttttctgccagagaaggtacagcaggcagggcattgcttcctatttagtcgaaggcttattttaaattgggactaggccaagttcaagtgcaggagcacactggcccctgggagagcctggccaggtacatttggcttgtgagaccagccgtcagcactttggctcatggaacacacgtctgtccgagcagtgcagacctggcttgtgtgaactgggctctgtgtgccctcagggaaaatgccgaggccacatctagaaattctggctgaggctgagagccgtgtgcagagctgcccccacacatttccttgtgtatattttgggttcaggctgacatttcctcttagcatgggtggaggtaatggctgaatttttaggaggcttgaatcccttctacaaatatgcctcctcgccctgtaaccaagttttgctgggttgcagttcaggaatgtatcttgctgcttgtacagcccatcatggaatgtgaggacttagctcagaagactaaagcactattccttctagg

SEQ ID NO: 386956 - DNA, 614 bp, Homo sapiens
gccatttgaagcaagttgacagttccatcagtttgtttttgtttttgtttttggttcaataatttgagttcaaccatcgtcattttaaacataattaatcccaacaaagttgcctatagtttaatttaaacctcacagcatttttaatttattttgcatgggtgtttaaatagttctgttacgaatattgtccctgcacagttctaaattgtccttttataaaaaaaaaaagtgatattctagtttcttcacaatgtagtgattatcagccttactaattaccttgtagcctttcttaatatgcacataatgcacattttccgatggctagaaaaatgcaaaacacagtggatatcattgcatctattttcatgtctttctaaaaacaggactattaaaatctctgggatacatgagatagtaaaaaatgaggattataaatgaatagcacataagaattattttcttgaatttaaacttattgcagccagtttcagcatgtaaatatataataatgtacactaacgcgtaaaccttgaacatcacaactacaaaatcaaccataacactcacgccgaaaccgctatacactactcgataacgtcaaaacacaa

SEQ ID NO: 386957 - DNA, 246 bp, Homo sapiens
agaaaaatgcaaaacacagtggatatcattgcatctattttcatgtctttctaaaaacaggactattaaaatctctgggatacatgagatagtaaaaaatgaggattataaatgaatagcacataagaattattttcttgaatttaaacttattgcagccagtttcagcatgtaaatatataataatgttggctagtgtgtaattcttgaactaagaaatataaataaaaataaaaagattgtgtg

SEQ ID NO: 386958 - DNA, 590 bp, Homo sapiens
atgagcagtgcctgtgtgcattgcaatctcagccaaccgaagtaaatgttattggagttttgtgctgtaaaattgctgctttcatgcccactgcatctgacaacaggaatccttggtctactaggaaggtgggaggttgttgtgccttctagccagattcctacattcctaagaaaagggctgggaagtggggtaaaacttctattgttcctaatgggctagggacaatgagactcaagttggtggcatatttggtcagagaaagagactaaacaacaaaaaaagtactaatattacttcctgcattaagcattaggacctgggaagttattcttttagagaaactcttcagtgtttgtagaataaaaaaagtaattccagaggcctcaggacctgggaagttattcttttagagaaactcttaagtgttcgtagaaaaaaaaaaagtaattccagagagtagtggattaatgacttaagtttttaattttcaggaaatttaaaaaagcatattttacaaatcataaaatcaagatcaataaatacattattgcattttgaagggcaacaatttaaaacccatataaatg

SEQ ID NO: 386959 - DNA, 589 bp, Homo sapiens
gacgatcctatagaagagtgtgctgaacctcagctacgaagtaaatgttattggagttttgtgctgtaaaattgctgctttcatgcccactgcatctgacaacaggaatccttggtctactaggaaggtgggaggttgttgtgccttctagccagattcctacattcctaagaaaagggctgggaagtggggtaaaacttctattgttcctaatgggctagggacaatgagactcaagttggtggcatatttggtcagagaaagagactaaacaacaaaaaaagtactaatattacttcctgcattaagcattaggacctgggaagttattcttttagagaaactcttcagtgtttgtagaataaaaaaagtaattccagaggcctcaggacctgggaagttattcttttagagaaactcttaagtgttcgtagaaaaaaaaaaagtaattccagagagtagtggattaatgacttaagtttttaattttcaggaaatttaaaaaagcatattttacaaatcataaaatcaagatcaataaatacattattgcattttgaagggcaacaatttaaaacccatataaatg

SEQ ID NO: 386960 - DNA, 456 bp, Homo sapiens
aaaagcaatacatacaatacaaaaataacaaagaaagcaagtaaaaaacagccagtataacaactatttatgtattgtttatgttgtgttagggattataagtaatctgaagattatttaaagtatgctggaggatgtgcataggttatatgcaaatactgtgccattttatataagcaagttaacgtttgcggattttggtgttccaggggagtcctggaatcaatttcccacagataccaagggacaactggatatctgatttttcattattacagataactagtaaacattctatatgcaggtttgattctttttaggataaattctaaagatagcattactagttcacatgcaaaacatcattaaaatttttaatgcatgttaccagattttccacttttcagaaagattgtgctaatttatcctagtagacatatccaaatttaaatatgt

SEQ ID NO: 386961 - DNA, 130 bp, Homo sapiens
aagattatgccactgcactccagcctgggcgacagagtgagagtctgtcttaaaaaaaaaaaatgtccgtcaacagattaatggctaaagataatggggtgtgtatacactatggaatacacttcaacct

SEQ ID NO: 386962 - DNA, 6767 bp, Homo sapiens
catggatcctttggattttgattccagttgatccctggagtaaggtcctaaccggggtctcccgaggtcgtttcgccgtccaggatggagcaggcggggagctcgcaccgccgcgcccgggccgcgagtgatgataacctaagaggccggcgcgggcgggcgtgagcggcggaggagccgggcgcggcgacacgcggccatggagcgggagccggcggggaccgaggagcccgggcctccgggacggcggaggcgccgagagggcaggacgcgcacggtgcgctccaacctgctgccgcccccgggcgccgaggaccctgcggctggcgcggccaagggcgagcggcgacggcggcgcgggtgtgcccagcacctggccgacaaccggctcaagactaccaagtacacgctgctgtccttcctgcccaagaacctgttcgagcagttccaccgcccggccaacgtgtactttgtcttcatcgcgctgctcaacttcgtgccggcggtgaacgccttccagcccggcctggcactggcgccggtgctcttcatcctggccatcacggccttcagggacctgtgggaggactacagccgccaccgctccgaccacaagatcaaccacctgggctgcctggtcttcagcagggaagaaaagaaatacgtgaaccgattctggaaagaaatccacgtgggagactttgtgcgtcttcgctgcaacgaaatcttccctgcggacattctgctgctctcctccagtgaccccgacgggctatgccacatcgagaccgccaacctggatggagagaccaacctgaagcggcggcaggtggtccgcggcttctcggagcttgtctccgaattcaatcctttgacgttcaccagcgtgatcgaatgcgagaagccaaacaacgacctgagtaggtttcgcggctgcatcatacatgacaacgggaaaaaggccgggctgtataaagaaaacctgctgctgaggggctgcacccttaggaacacggacgcagtcgtcggcattgtcatctacgcaggacatgaaaccaaggctctgctgaacaacagtgggccccgctacaagcgcagcaagctggagaggcagatgaactgcgacgtgctctggtgtgtcctgctccttgtttgcatgtctctgttttcagcagtcggacatggactgtggatatggcggtatcaagagaagaagtcattattttatgtccccaagtctgatggaagctccttatccccagtcacagctgcagtttactcatttttaacaatgataatagttctgcaggttttgatcccaatttccttatacgtttccattgaaattgttaaagcatgccaagtgtacttcattaaccaggacatgcagttgtatgacgaagaaacagactcgcagctgcagtgccgagctctgaacatcacggaagacttaggacagatacagtacattttctcagataaaactggcactttgacagagaataagatggttttccgaagatgcactgtgtctggtgtagaatattctcatgatgcaaatgcgcagcgtctggccaggtaccaagaggcagactcggaggaggaggaggtggtgcccagagggggctcggtgtcccagcgcggcagcatcggcagccaccagagtgtccgggtggtgcacagaacccagagcaccaagtcccaccggcgcacgggcagccgggccgaggccaagagggccagcatgctgtccaagcacacggccttcagcagccccatggagaaggatatcacgcccgacccaaagctgctggagaaggtgagtgagtgtgacaagagcctagccgtggcgaggcatcaggagcacctgctggcccacctctcgcccgagctgtctgacgtctttgatttcttcatcgcactcaccatctgcaacacagtcgtcgtcacgtccccggatcagccacgaacaaaggtgagggtgaggtttgagctgaagtccccggtgaagacgatagaagacttcctgcggaggttcacacccagctgcctgacctcaggctgcagcagcatcgggagcctggccgccaacaagtccagccacaagttgggctccagcttcccgtccaccccgtccagcgacggcatgcttctcaggctggaggagaggctgggccagcccacctcggccatcgccagcaacggctacagcagccaggcggacaactgggcctcggagcttgctcaggagcaggagtcagagcgcgagctgcggtacgaggcggagagcccggatgaggccgcactggtgtatgcggccagagcctacaactgcgtgcttgtggagcggctgcacgaccaagtgtcagtggagctgccccacctgggcaggctcaccttcgagctcctgcacacactgggtttcgattccgtccgcaagaggatgtcagtggtgatccggcacccgcttaccgatgagatcaacgtctacaccaagggggccgactcagtggtcatggatctcctgcagccctgctcttcagttgacgccagagggaggcatcaaaaaaagattcggagcaaaactcagaattacctcaacgtgtatgcggcggaaggcctgcgcaccttgtgcatcgccaagagagttctgagtaaagaagagtatgcctgctggttgcaaagccacctagaagccgaatcctccctggaaaacagcgaggagctcctcttccagtctgccattcgcctggagaccaacctgcacttgttaggtgccactgggattgaagaccgcctgcaggacggagtccctgaaactatttctaaattgcgtcaagcgggcctgcagatttgggttctcactggtgacaaacaagaaacagctgtcaacattgcatatgcctgcaaactgctggaccacgacgaggaggtcatcaccctgaatgccacctcccaggaggcgtgtgcagccctgctagaccagtgcctatgctacgtgcagtccagaggcctccagagagcccctgagaagaccaagggcaaagtgagcatgaggttctcctctctctgcccaccctccacgtccactgcctctggccgcagacccagcctcgtgatcgatgggagaagcctggcctacgctctcgagaaaaacctggaggacaaattcctcttccttgccaagcagtgccgctccgtcctctgctgtcggtcgacgcctctgcagaagagcatggtggtgaagctggtgcggagcaagctcaaggccatgaccctggccataggtgatggagccaatgatgtcagcatgatccaggtggcagatgtgggtgtgggaatctccggccaggagggtatgcaggcagtgatggccagcgactttgcagtgccgaaattccgatacctggagaggctcttgattcttcacgggcattggtgctactcccgacttgccaacatggtgctgtacttcttctacaaaaacacaatgttcgtgggcctcctgttttggttccagtttttctgtggcttctctgcatctaccatgattgaccagtggtatctaatcttctttaatctgctcttctcgtcacttcccccgctcgtgactggggtgctggacagggatgtgccagccaatgtgctgctgaccaacccgcagctctacaagagtggccagaacatggaggaataccggccacgaacgttctggtttaacatggccgacgccgccttccagagcctggtttgcttttccattccttacctggcctactatgactcgaacgtggacctgtttacctgggggacccctattgtgacaatcgcgctgctcactttcctgctccacctgggcattgaaaccaaaacctggacctggctcaactggataacgtgtggcttcagtgtccttttgtttttcaccgtggctttgatttacaatgcgtcttgtgccacgtgctatcctccgtccaacccttactggactatgcaagccttactgggtgacccagtgttttacttgacttgcctgatgacgcctgtcgctgcactgctgcccagattgtttttcagatccctccaggggagggttttccccacacaacttcagctggcacgtcagttgaccaggaagtcccccaggagatgcagtgctcccaaagagacctttgctcagggacgcctcccgaaggactcgggaaccgagcactcatcagggaggacagtcaagacctctgtgcccctgtcccagccttcttggcacacacagcagccggtctgctccctggaggccagcggggagcccagcacagtggacatgagcatgccagtgagggagcacaccctgctggaggggctgagcgcaccggcccccatgtcctctgcgccaggggaggctgtcctgaggagtccaggagggtgtcctgaggagtccaaggtgagagctgccagcaccggcagggtgacccccctgtcttccctcttcagcctgcctaccttcagcttactcaactggatttcctcctggtcgctggtcagcaggctggggagtgtcttacagttctcccggacggagcagcttgcagatggacaagcgggacgtggacttcctgtccagccccactcaggccgatcaggacttcaagggccagaccacagactacttataggagcatcttcaaggcggtcacagtgaaaaccttgaaatggccttttttaatatatataaataaatgttaatattatttatgtttattatttgcacagaagagttctagggagatgtatttctaaatgtttcccaggctaatacaggaaacaagaggtaccaaaaaagaaagtttattttttaaaattctaagtagagtatattgaaaagaaaaagaagagccttaacatatataaaagtttaaagaagagtaacacttgaaaagtgtgtttagatttattttttcatctcatttttaagaacaagcagtacgatttgttttcttcaacatgtgtgactgcgcactgagtacaaatgtgtgactgctcatggttaatgcaggcaggtgtgaacatgggggaacaatgagcagagatggcagagggcagagcacatggcccccagaggcttccagtctcactgacacaggagggctgggctccacttcatccagatgaaggaaaggaagacctcaagaaaaattcacagttgagtgcatcccagcattctgttccgggcaggcatttcaggaagaccgccttgtaggtattacatccctggtgtcgtattttgcctgttaaatcgtaacaagcaataaacaactttcactttgcaaagacagtgtgtccagttaccactggtgtatgaaatgattaatacctgacctcacagagtatgatctgagggcacttccgtaaggcaagtccttttagaggctatgaagaaaacagctgcatggcacataccaaagctgctgcacagccggccaccatggcaccctgcaccaggccatcagcaccacgtgccaaggagctcagcggtcttcaggcatttttgtaatgagccattagttctgtccctctaaaactagaaaaggaagggcaggaaatgataacaacccaaggcaatgatatggcatgtcatcttctgagcccttctttctactttgtcaaacagttcttagttgctggctctgctcggcaccggggctgtgaagggtgtactccctgctgtgtgggagggacctagggcctctttggatgctgtcttcgaggacagcaatgcagagagggcataggatctgaggacaaggaaattcctcagcatggcgtatcaggaaagcatggctcattctgcaatgagccatgagtgtgggccatcgcaagtcacagaaattgcacctcattccagtcaagcagaaaaacaggcacaggctcagtgtaggtcccaagagagggtgcctggactcagcaactcggacctgggcttttctcccagctttcagggacagctttgtcctgagtctgcctctgttcacggggatgcttggctggagtcacccccaggacttatccatgcatcactattcagaagacacagagggcccctctctccacattccaaacagagtcctggtttcctcagcctcaccctgcatagcttgcacaacatcctcagaaccattcactggcaaatggaggggaacgtgctgactgggactcccagctggagctgggaggagaggtccacttcccttagaacacctgagctgctgcatgagtggacgtcagaagaatctctatgccctgttaaatggggagacaaaggggtggtgggggcttcagccagtgatttcggaccgaaggtgacagccgtcccaaccctgcccagcctgatgccacctcctctgttcttggaacaacgcataggaaaagaatctcctttggaaggtgacactgctccctgaattaaggtaatggttgcgagcaccaagtacaaggactagacgcatatttacctgcgtatctgagagttccagattcccagcttccagatgatccttgcacagacaacctaccttctttccagaggatgtctttctcctctggagagtagatgcttgctcttgggaaacggaatgaccttggcgctggcttcaggaatatgcatcccacagccagtttagagaaatacatgttgtaaatggcattgacagctgctctttaggatggggagtattatggaaatccacaataacaatctatggcaagcaact

SEQ ID NO: 386963 - DNA, 544 bp, Homo sapiens
aagccttactgggtgacccagtgttttacttgacttgcctgatgacgcctgtcgctgcactgctgcccagattgtttttcagatccctccaggggagggttttccccacacaacttcacctggcctactatgactcgaacgtggacctgtttacctgggggacccctattgtgacaatcgcgctgctcactttcctgctccacctgggcattgaaaccaaaacctggacctggctcaactggataacgtgtggcttcagtgtccttttgtttttcaccgtggctttgatttacaatgcgtcttgtgccacgtgctatcctccgtccaacccttactggactatgcaagccttactgggtgacccagtgttttacttgacttgcagatggacaagcgggacgtggacttcctgtccagccccactcaggccgatcaggacttcaagggccagaccacagactacttataggagcatcttcaaggcggtcacagtgaaaaccttgaaatggccttttttaatatatataaataaatgttaatatta

SEQ ID NO: 386964 - DNA, 5397 bp, Homo sapiens
ttctgagaaggataaggagacctctcaccttggggctgggcctgaaccagggaggggctgaagaaaatcagcaagctggttcccctcagggcctcaagggacctctgcctgaggaatcagcatttggctttgtaagcaccaggagtactcctggaagctccagggcggggagctcgcaccgccgcgcccgggccgcgagtgatgataacctaagaggccggcgcgggcgggcgtgagcggcggaggagccgggcgcggcgacacgcggccatggagcgggagccggcggggaccgaggagcccgggcctccgggacggcggaggcgccgagagggcaggacgcgcacggtgcgctccaacctgctgccgcccccgggcgccgaggaccctgcggctggcgcggccaagggcgagcggcgacggcggcgcgggtgtgcccagcacctggccgacaaccggctcaagactaccaagtacacgctgctgtccttcctgcccaagaacctgttcgagcagttccaccgcccggccaacgtgtactttgtcttcatcgcgctgctcaacttcgtgccggcggtgaacgccttccagcccggcctggcactggcgccggtgctcttcatcctggccatcacggccttcagggacctgtgggaggactacagccgccaccgctccgaccacaagatcaaccacctgggctgcctggtcttcagcagggaagaaaagaaatacgtgaaccgattctggaaagaaatccacgtgggagactttgtgcgtcttcgctgcaacgaaatcttccctgcggacattctgctgctctcctccagtgaccccgacgggctatgccacatcgagaccgccaacctggatggagagaccaacctgaagcggcggcaggtggtccgcggcttctcggagcttgtctccgaattcaatcctttgacgttcaccagcgtgatcgaatgcgagaagccaaacaacgacctgagtaggtttcgcggctgcatcatacatgacaacgggaaaaaggccgggctgtataaagaaaacctgctgctgaggggctgcacccttaggaacacggacgcagtcgtcggcattgtcatctacgcaggacatgaaaccaaggctctgctgaacaacagtgggccccgctacaagcgcagcaagctggagaggcagatgaactgcgacgtgctctggtgtgtcctgctccttgtttgcatgtctctgttttcagcagtcggacatggactgtggatatggcggtatcaagagaagaagtcattattttatgtccccaagtctgatggaagctccttatccccagtcacagctgcagtttactcatttttaacaatgataatagttctgcaggttttgatcccaatttccttatacgtttccattgaaattgttaaagcatgccaagtgtacttcattaaccaggacatgcagttgtatgacgaagaaacagactcgcagctgcagtgccgagctctgaacatcacggaagacttaggacagatacagtacattttctcagataaaactggcactttgacagagaataagatggttttccgaagatgcactgtgtctggtgtagaatattctcatgatgcaaatgcgcagcgtctggccaggtaccaagaggcagactcggaggaggaggaggtggtgcccagagggggctcggtgtcccagcgcggcagcatcggcagccaccagagtgtccgggtggtgcacagaacccagagcaccaagtcccaccggcgcacgggcagccgggccgaggccaagagggccagcatgctgtccaagcacacggccttcagcagccccatggagaaggatatcacgcccgacccaaagctgctggagaaggtgagtgagtgtgacaagagcctagccgtggcgaggcatcaggagcacctgctggcccacctctcgcccgagctgtctgacgtctttgatttcttcatcgcactcaccatctgcaacacagtcgtcgtcacgtccccggatcagccacgaacaaaggtgagggtgaggtttgagctgaagtccccggtgaagacgatagaagacttcctgcggaggttcacacccagctgcctgacctcaggctgcagcagcatcgggagcctggccgccaacaagtccagccacaagttgggctccagcttcccgtccaccccgtccagcgacggcatgcttctcaggctggaggagaggctgggccagcccacctcggccatcgccagcaacggctacagcagccaggcggacaactgggcctcggagcttgctcaggagcaggagtcagagcgcgagctgcggtacgaggcggagagcccggatgaggccgcactggtgtatgcggccagagcctacaactgcgtgcttgtggagcggctgcacgaccaagtgtcagtggagctgccccacctgggcaggctcaccttcgagctcctgcacacactgggtttcgattccgtccgcaagaggatgtcagtggtgatccggcacccgcttaccgatgagatcaacgtctacaccaagggggccgactcagtggtcatggatctcctgcagccctgctcttcagttgacgccagagggaggcatcaaaaaaagattcggagcaaaactcagaattacctcaacgtgtatgcggcggaaggcctgcgcaccttgtgcatcgccaagagagttctgagtaaagaagagtatgcctgctggttgcaaagccacctagaagccgaatcctccctggaaaacagcgaggagctcctcttccagtctgccattcgcctggagaccaacctgcacttgttaggtgccactgggattgaagaccgcctgcaggacggagtccctgaaactatttctaaattgcgtcaagcgggcctgcagatttgggttctcactggtgacaaacaagaaacagctgtcaacattgcatatgcctgcaaactgctggaccacgacgaggaggtcatcaccctgaatgccacctcccaggaggcgtgtgcagccctgctagaccagtgcctatgctacgtgcagtccagaggcctccagagagcccctgagaagaccaagggcaaagtgagcatgaggttctcctctctctgcccaccctccacgtccactgcctctggccgcagacccagcctcgtgatcgatgggagaagcctggcctacgctctcgagaaaaacctggaggacaaattcctcttccttgccaagcagtgccgctccgtcctctgctgtcggtcgacgcctctgcagaagagcatggtggtgaagctggtgcggagcaagctcaaggccatgaccctggccataggtgatggagccaatgatgtcagcatgatccaggtggcagatgtgggtgtgggaatctccggccaggagggtatgcaggcagtgatggccagcgactttgcagtgccgaaattccgatacctggagaggctcttgattcttcacgggcattggtgctactcccgacttgccaacatggtgctgtacttcttctacaaaaacacaatgttcgtgggcctcctgttttggttccagtttttctgtggcttctctgcatctaccatgattgaccagtggtatctaatcttctttaatctgctcttctcgtcacttcccccgctcgtgactggggtgctggacagggatgtgccagccaatgtgctgctgaccaacccgcagctctacaagagtggccagaacatggaggaataccggccacgaacgttctggtttaacatggccgacgccgccttccagagcctggtttgcttttccattccttacctggcctactatgactcgaacgtggacctgtttacctgggggacccctattgtgacaatcgcgctgctcactttcctgctccacctgggcattgaaaccaaaacctggacctggctcaactggataacgtgtggcttcagtgtccttttgtttttcaccgtggctttgatttacaatgcgtcttgtgccacgtgctatcctccgtccaacccttactggactatgcaagccttactgggtgacccagtgttttacttgacttgcctgatgacgcctgtcgctgcactgctgcccagattgtttttcagatccctccaggggagggttttccccacacaacttcagctggcacgtcagttgaccaggaagtcccccaggagatgcagtgctcccaaagagacctttgctcagggacgcctcccgaaggactcgggaaccgagcactcatcagggaggacagtcaagacctctgtgcccctgtcccagccttcttggcacacacagcagccggtctgctccctggaggccagcggggagcccagcacagtggacatgagcatgccagtgagggagcacaccctgctggaggggctgagcgcaccggcccccatgtcctctgcgccaggggaggctgtcctgaggagtccaggagggtgtcctgaggagtccaaggtgagagctgccagcaccggcagggtgacccccctgtcttccctcttcagcctgcctaccttcagcttactcaactggatttcctcctggtcgctggtcagcaggctggggagtgtcttacagttctcccggacggagcagcttgcagatggacaagcgggacgtggacttcctgtccagccccactcaggccgatcaggacttcaagggccagaccacagactacttataggagcatcttcaaggcggtcacagtgaaaaccttgaaatggccttttttaatatatataaataaatgttaatattatttatgtttattatttgcacagaagagttctagggagatgtatttctaaatgtttcccaggctaatacaggaaacaagaggtaccaaaaaagaaagtttattttttaaaattctaagtagagtatattgaaaagaaaaagaagagccttaacatatataaaagtttaaagaagagtaacacttgaaaagtgtgtttagatttattttttcatctcatttttaagaacaagcagtacgatttgttttcttcaacatgtgtgactgcgcactgagtacaaatgtgtgactgctcatggttaatgcaggcaggtgtgaacatgggggaacaatgagcagagatggcagagggcagagcacatggcccccagaggcttccagtctcactgacacaggagggctgggctccacttcatccagatgaaggaaaggaagacctcaagaaaaattcacagttgagtgcatcccagcattctgttccgggcaggcatttcaggaagaccgccttgtaggtattacatccctggtgtcgtattttgcctgttaaatcgtaacaagcaataaacaactttcactttgca

SEQ ID NO: 386965 - DNA, 6764 bp, Homo sapiens
ttctgagaaggataaggagacctctcaccttggggctgggcctgaaccagggaggggctgaagaaaatcagcaagctggttcccctcagggcctcaagggacctctgcctgaggaatcagcatttggctttgtaagcaccaggagtactcctggaagctccagggcggggagctcgcaccgccgcgcccgggccgcgagtgatgataacctaagaggccggcgcgggcgggcgtgagcggcggaggagccgggcgcggcgacacgcggccatggagcgggagccggcggggaccgaggagcccgggcctccgggacggcggaggcgccgagagggcaggacgcgcacggtgcgctccaacctgctgccgcccccgggcgccgaggaccctgcggctggcgcggccaagggcgagcggcgacggcggcgcgggtgtgcccagcacctggccgacaaccggctcaagactaccaagtacacgctgctgtccttcctgcccaagaacctgttcgagcagttccaccgcccggccaacgtgtactttgtcttcatcgcgctgctcaacttcgtgccggcggtgaacgccttccagcccggcctggcactggcgccggtgctcttcatcctggccatcacggccttcagggacctgtgggaggactacagccgccaccgctccgaccacaagatcaaccacctgggctgcctggtcttcagcagggaagaaaagaaatacgtgaaccgattctggaaagaaatccacgtgggagactttgtgcgtcttcgctgcaacgaaatcttccctgcggacattctgctgctctcctccagtgaccccgacgggctatgccacatcgagaccgccaacctggatggagagaccaacctgaagcggcggcaggtggtccgcggcttctcggagcttgtctccgaattcaatcctttgacgttcaccagcgtgatcgaatgcgagaagccaaacaacgacctgagtaggtttcgcggctgcatcatacatgacaacgggaaaaaggccgggctgtataaagaaaacctgctgctgaggggctgcacccttaggaacacggacgcagtcgtcggcattgtcatctacgcaggacatgaaaccaaggctctgctgaacaacagtgggccccgctacaagcgcagcaagctggagaggcagatgaactgcgacgtgctctggtgtgtcctgctccttgtttgcatgtctctgttttcagcagtcggacatggactgtggatatggcggtatcaagagaagaagtcattattttatgtccccaagtctgatggaagctccttatccccagtcacagctgcagtttactcatttttaacaatgataatagttctgcaggttttgatcccaatttccttatacgtttccattgaaattgttaaagcatgccaagtgtacttcattaaccaggacatgcagttgtatgacgaagaaacagactcgcagctgcagtgccgagctctgaacatcacggaagacttaggacagatacagtacattttctcagataaaactggcactttgacagagaataagatggttttccgaagatgcactgtgtctggtgtagaatattctcatgatgcaaatgcgcagcgtctggccaggtaccaagaggcagactcggaggaggaggaggtggtgcccagagggggctcggtgtcccagcgcggcagcatcggcagccaccagagtgtccgggtggtgcacagaacccagagcaccaagtcccaccggcgcacgggcagccgggccgaggccaagagggccagcatgctgtccaagcacacggccttcagcagccccatggagaaggatatcacgcccgacccaaagctgctggagaaggtgagtgagtgtgacaagagcctagccgtggcgaggcatcaggagcacctgctggcccacctctcgcccgagctgtctgacgtctttgatttcttcatcgcactcaccatctgcaacacagtcgtcgtcacgtccccggatcagccacgaacaaaggtgagggtgaggtttgagctgaagtccccggtgaagacgatagaagacttcctgcggaggttcacacccagctgcctgacctcaggctgcagcagcatcgggagcctggccgccaacaagtccagccacaagttgggctccagcttcccgtccaccccgtccagcgacggcatgcttctcaggctggaggagaggctgggccagcccacctcggccatcgccagcaacggctacagcagccaggcggacaactgggcctcggagcttgctcaggagcaggagtcagagcgcgagctgcggtacgaggcggagagcccggatgaggccgcactggtgtatgcggccagagcctacaactgcgtgcttgtggagcggctgcacgaccaagtgtcagtggagctgccccacctgggcaggctcaccttcgagctcctgcacacactgggtttcgattccgtccgcaagaggatgtcagtggtgatccggcacccgcttaccgatgagatcaacgtctacaccaagggggccgactcagtggtcatggatctcctgcagccctgctcttcagttgacgccagagggaggcatcaaaaaaagattcggagcaaaactcagaattacctcaacgtgtatgcggcggaaggcctgcgcaccttgtgcatcgccaagagagttctgagtaaagaagagtatgcctgctggttgcaaagccacctagaagccgaatcctccctggaaaacagcgaggagctcctcttccagtctgccattcgcctggagaccaacctgcacttgttaggtgccactgggattgaagaccgcctgcaggacggagtccctgaaactatttctaaattgcgtcaagcgggcctgcagatttgggttctcactggtgacaaacaagaaacagctgtcaacattgcatatgcctgcaaactgctggaccacgacgaggaggtcatcaccctgaatgccacctcccaggaggcgtgtgcagccctgctagaccagtgcctatgctacgtgcagtccagaggcctccagagagcccctgagaagaccaagggcaaagtgagcatgaggttctcctctctctgcccaccctccacgtccactgcctctggccgcagacccagcctcgtgatcgatgggagaagcctggcctacgctctcgagaaaaacctggaggacaaattcctcttccttgccaagcagtgccgctccgtcctctgctgtcggtcgacgcctctgcagaagagcatggtggtgaagctggtgcggagcaagctcaaggccatgaccctggccataggtgatggagccaatgatgtcagcatgatccaggtggcagatgtgggtgtgggaatctccggccaggagggtatgcaggcagtgatggccagcgactttgcagtgccgaaattccgatacctggagaggctcttgattcttcacgggcattggtgctactcccgacttgccaacatggtgctgtacttcttctacaaaaacacaatgttcgtgggcctcctgttttggttccagtttttctgtggcttctctgcatctaccatgattgaccagtggtatctaatcttctttaatctgctcttctcgtcacttcccccgctcgtgactggggtgctggacagggatgtgccagccaatgtgctgctgaccaacccgcagctctacaagagtggccagaacatggaggaataccggccacgaacgttctggtttaacatggccgacgccgccttccagagcctggtttgcttttccattccttacctggcctactatgactcgaacgtggacctgtttacctgggggacccctattgtgacaatcgcgctgctcactttcctgctccacctgggcattgaaaccaaaacctggacctggctcaactggataacgtgtggcttcagtgtccttttgtttttcaccgtggctttgatttacaatgcgtcttgtgccacgtgctatcctccgtccaacccttactggactatgcaagccttactgggtgacccagtgttttacttgacttgcctgatgacgcctgtcgctgcactgctgcccagattgtttttcagatccctccaggggagggttttccccacacaacttcagctggcacgtcagttgaccaggaagtcccccaggagatgcagtgctcccaaagagacctttgctcagggacgcctcccgaaggactcgggaaccgagcactcatcagggaggacagtcaagacctctgtgcccctgtcccagccttcttggcacacacaccctgctggaggggctgagcgcaccggcccccatgtcctctgcgccaggggaggctgtcctgaggagtccaggagggtgtcctgaggagtccaaggtgagagctgccagcaccggcagggtgacccccctgtcttccctcttcagcctgcctaccttcagcttactcaactggatttcctcctggtcgctggtcagcaggctggggagtgtcttacagttctcccggacggagcagcttgcagatggacaagcgggacgtggacttcctgtccagccccactcaggccgatcaggacttcaagggccagaccacagactacttataggagcatcttcaaggcggtcacagtgaaaaccttgaaatggccttttttaatatatataaataaatgttaatattatttatgtttattatttgcacagaagagttctagggagatgtatttctaaatgtttcccaggctaatacaggaaacaagaggtaccaaaaaagaaagtttattttttaaaattctaagtagagtatattgaaaagaaaaagaagagccttaacatatataaaagtttaaagaagagtaacacttgaaaagtgtgtttagatttattttttcatctcatttttaagaacaagcagtacgatttgttttcttcaacatgtgtgactgcgcactgagtacaaatgtgtgactgctcatggttaatgcaggcaggtgtgaacatgggggaacaatgagcagagatggcagagggcagagcacatggcccccagaggcttccagtctcactgacacaggagggctgggctccacttcatccagatgaaggaaaggaagacctcaagaaaaattcacagttgagtgcatcccagcattctgttccgggcaggcatttcaggaagaccgccttgtaggtattacatccctggtgtcgtattttgcctgttaaatcgtaacaagcaataaacaactttcactttgcaaagacagtgtgtccagttaccactggtgtatgaaatgattaatacctgacctcacagagtatgatctgagggcacttccgtaaggcaagtccttttagaggctatgaagaaaacagctgcatggcacataccaaagctgctgcacagccggccaccatggcaccctgcaccaggccatcagcaccacgtgccaaggagctcagcggtcttcaggcatttttgtaatgagccattagttctgtccctctaaaactagaaaaggaagggcaggaaatgataacaacccaaggcaatgatatggcatgtcatcttctgagcccttctttctactttgtcaaacagttcttagttgctggctctgctcggcaccggggctgtgaagggtgtactccctgctgtgtgggagggacctagggcctctttggatgctgtcttcgaggacagcaatgcagagagggcataggatctgaggacaaggaaattcctcagcatggcgtatcaggaaagcatggctcattctgcaatgagccatgagtgtgggccatcgcaagtcacagaaattgcacctcattccagtcaagcagaaaaacaggcacaggctcagtgtaggtcccaagagagggtgcctggactcagcaactcggacctgggcttttctcccagctttcagggacagctttgtcctgagtctgcctctgttcacggggatgcttggctggagtcacccccaggacttatccatgcatcactattcagaagacacagagggcccctctctccacattccaaacagagtcctggtttcctcagcctcaccctgcatagcttgcacaacatcctcagaaccattcactggcaaatggaggggaacgtgctgactgggactcccagctggagctgggaggagaggtccacttcccttagaacacctgagctgctgcatgagtggacgtcagaagaatctctatgccctgttaaatggggagacaaaggggtggtgggggcttcagccagtgatttcggaccgaaggtgacagccgtcccaaccctgcccagcctgatgccacctcctctgttcttggaacaacgcataggaaaagaatctcctttggaaggtgacactgctccctgaattaaggtaatggttgcgagcaccaagtacaaggactagacgcatatttacctgcgtatctgagagttccagattcccagcttccagatgatccttgcacagacaacctaccttctttccagaggatgtctttctcctctggagagtagatgcttgctcttgggaaacggaatgaccttggcgctggcttcaggaatatgcatcccacagccagtttagagaaatacatgttgtaaatggcattgacagctgctctttaggatggggagtattatggaaatccacaataacaatctatggcaagcaact

SEQ ID NO: 386966 - DNA, 4265 bp, Homo sapiens
ttctgagaaggataaggagacctctcaccttggggctgggcctgaaccagggaggggctgaagaaaatcagcaagctggttcccctcagggcctcaagggacctctgcctgaggaatcagcatttggctttgtaagcaccaggagtactcctggaagctccagggcggggagctcgcaccgccgcgcccgggccgcgagtgatgataacctaagaggccggcgcgggcgggcgtgagcggcggaggagccgggcgcggcgacacgcggccatggagcgggagccggcggggaccgaggagcccgggcctccgggacggcggaggcgccgagagggcaggacgcgcacggtgcgctccaacctgctgccgcccccgggcgccgaggaccctgcggctggcgcggccaagggcgagcggcgacggcggcgcgggtgtgcccagcacctggccgacaaccggctcaagactaccaagtacacgctgctgtccttcctgcccaagaacctgttcgagcagttccaccgcccggccaacgtgtactttgtcttcatcgcgctgctcaacttcgtgccggcggtgaacgccttccagcccggcctggcactggcgccggtgctcttcatcctggccatcacggccttcagggacctgtgggaggactacagccgccaccgctccgaccacaagatcaaccacctgggctgcctggtcttcagcagggaagaaaagaaatacgtgaaccgattctggaaagaaatccacgtgggagactttgtgcgtcttcgctgcaacgaaatcttccctgcggacattctgctgctctcctccagtgaccccgacgggctatgccacatcgagaccgccaacctggatggagagaccaacctgaagcggcggcaggtggtccgcggcttctcggagcttgtctccgaattcaatcctttgacgttcaccagcgtgatcgaatgcgagaagccaaacaacgacctgagtaggtttcgcggctgcatcatacatgacaacgggaaaaaggccgggctgtataaagaaaacctgctgctgaggggctgcacccttaggaacacggacgcagtcgtcggcattgtcatctacgcaggacatgaaaccaaggctctgctgaacaacagtgggccccgctacaagcgcagcaagctggagaggcagatgaactgcgacgtgctctggtgtgtcctgctccttgtttgcatgtctctgttttcagcagtcggacatggactgtggatatggcggtatcaagagaagaagtcattattttatgtccccaagtctgatggaagctccttatccccagtcacagctgcagtttactcatttttaacaatgataatagttctgcaggttttgatcccaatttccttatacgtttccattgaaattgttaaagcatgccaagtgtacttcattaaccaggacatgcagttgtatgacgaagaaacagactcgcagctgcagtgccgagctctgaacatcacggaagacttaggacagatacagtacattttctcagataaaactggcactttgacagagaataagatggttttccgaagatgcactgtgtctggtgtagaatattctcatgatgcaaatgcgcagcgtctggccaggtaccaagaggcagactcggaggaggaggaggtggtgcccagagggggctcggtgtcccagcgcggcagcatcggcagccaccagagtgtccgggtggtgcacagaacccagagcaccaagtcccaccggcgcacgggcagccgggccgaggccaagagggccagcatgctgtccaagcacacggccttcagcagccccatggagaaggatatcacgcccgacccaaagctgctggagaaggtgagtgagtgtgacaagagcctagccgtggcgaggcatcaggagcacctgctggcccacctctcgcccgagctgtctgacgtctttgatttcttcatcgcactcaccatctgcaacacagtcgtcgtcacgtccccggatcagccacgaacaaaggtgagggtgaggtttgagctgaagtccccggtgaagacgatagaagacttcctgcggaggttcacacccagctgcctgacctcaggctgcagcagcatcgggagcctggccgccaacaagtccagccacaagttgggctccagcttcccgtccaccccgtccagcgacggcatgcttctcaggctggaggagaggctgggccagcccacctcggccatcgccagcaacggctacagcagccaggcggacaactgggcctcggagcttgctcaggagcaggagtcagagcgcgagctgcggtacgaggcggagagcccggatgaggccgcactggtgtatgcggccagagcctacaactgcgtgcttgtggagcggctgcacgaccaagtgtcagtggagctgccccacctgggcaggctcaccttcgagctcctgcacacactgggtttcgattccgtccgcaagaggatgtcagtggtgatccggcacccgcttaccgatgagatcaacgtctacaccaagggggccgactcagtggtcatggatctcctgcagccctgctcttcagttgacgccagagggaggcatcaaaaaaagattcggagcaaaactcagaattacctcaacgtgtatgcggcggaaggcctgcgcaccttgtgcatcgccaagagagttctgagtaaagaagagtatgcctgctggttgcaaagccacctagaagccgaatcctccctggaaaacagcgaggagctcctcttccagtctgccattcgcctggagaccaacctgcacttgttaggtgccactgggattgaagaccgcctgcaggacggagtccctgaaactatttctaaattgcgtcaagcgggcctgcagatttgggttctcactggtgacaaacaagaaacagctgtcaacattgcatatgcctgcaaactgctggaccacgacgaggaggtcatcaccctgaatgccacctcccaggaggcgtgtgcagccctgctagaccagtgcctatgctacgtgcagtccagaggcctccagagagcccctgagaagaccaagggcaaagtgagcatgaggttctcctctctctgcccaccctccacgtccactgcctctggccgcagacccagcctcgtgatcgatgggagaagcctggcctacgctctcgagaaaaacctggaggacaaattcctcttccttgccaagcagtgccgctccgtcctctgctgtcggtcgacgcctctgcagaagagcatggtggtgaagctggtgcggagcaagctcaaggccatgaccctggccataggtgatggagccaatgatgtcagcatgatccaggtggcagatgtgggtgtgggaatctccggccaggagggtatgcaggcagtgatggccagcgactttgcagtgccgaaattccgatacctggagaggctcttgattcttcacgggcattggtgctactcccgacttgccaacatggtgctgtacttcttctacaaaaacacaatgttcgtgggcctcctgttttggttccagtttttctgtggcttctctgcatctaccatgattgaccagtggtatctaatcttctttaatctgctcttctcgtcacttcccccgctcgtgactggggtgctggacagggatgtgccagccaatgtgctgctgaccaacccgcagctctacaagagtggccagaacatggaggaataccggccacgaacgttctggtttaacatggccgacgccgccttccagagcctggtttgcttttccattccttacctggcctactatgactcgaacgtggacctgtttacctgggggacccctattgtgacaatcgcgctgctcactttcctgctccacctgggcattgaaaccaaaacctggacctggctcaactggataacgtgtggcttcagtgtccttttgtttttcaccgtggctttgatttacaatgcgtcttgtgccacgtgctatcctccgtccaacccttactggactatgcaagccttactgggtgacccagtgttttacttgacttgcagatggacaagcgggacgtggacttcctgtccagccccactcaggccgatcaggacttcaagggccagaccacagactacttataggagcatcttcaaggcggtcacagtgaaaaccttgaaatggccttttttaatatatataaataaatgttaatatta

SEQ ID NO: 386967 - DNA, 591 bp, Homo sapiens
aaaaaagaaaaagaatttatttaggagaggaaggaaaggcagtaatgatgatggtggaaaggaaacggtctagttcgcccaacaacggaatctgaaagtggtgggggctgggaagtggggtaggaaagaagttcttagaggcaacgcggaatcgcccttcccagggctccccaggagcagaggtcctgcgtaaaaaagacttaaaaattggagcactggatgccatggatcctttggattttgattccagttgatccctggagtaaggtcctaaccggggtctcccgaggtcgtttcgccgtccaggatggagcaggtctggcccctggaagggcgcgcgggctgcttggggacgggggcgccttttctcgcgcttcgcggtttcctctctcctactgcaggcagcgcgcgtttgcagcgttttgggaccgaactgatgcttctgggaaacgaaactaaacctctctgaagtttccagctcgggctttttttgtttcccgctatccggcgtggcccagtccgggcgcggaacgagggcggggccgtggccaccgcggcggaaacgacccgggccgggggcgggcggcgagg

SEQ ID NO: 386968 - DNA, 6838 bp, Homo sapiens
ttctgagaaggataaggagacctctcaccttggggctgggcctgaaccagggaggggctgaagaaaatcagcaagctggttcccctcagggcctcaagggacctctgcctgaggaatcagcatttggctttgtaagcaccaggagtactcctggaagctccagggcggggagctcgcaccgccgcgcccgggccgcgagtgatgataacctaagaggccggcgcgggcgggcgtgagcggcggaggagccgggcgcggcgacacgcggccatggagcgggagccggcggggaccgaggagcccgggcctccgggacggcggaggcgccgagagggcaggacgcgcacggtgcgctccaacctgctgccgcccccgggcgccgaggaccctgcggctggcgcggccaagggcgagcggcgacggcggcgcgggtgtgcccagcacctggccgacaaccggctcaagactaccaagtacacgctgctgtccttcctgcccaagaacctgttcgagcagttccaccgcccggccaacgtgtactttgtcttcatcgcgctgctcaacttcgtgccggcggtgaacgccttccagcccggcctggcactggcgccggtgctcttcatcctggccatcacggccttcagggacctgtgggaggactacagccgccaccgctccgaccacaagatcaaccacctgggctgcctggtcttcagcagggaagaaaagaaatacgtgaaccgattctggaaagaaatccacgtgggagactttgtgcgtcttcgctgcaacgaaatcttccctgcggacattctgctgctctcctccagtgaccccgacgggctatgccacatcgagaccgccaacctggatggagagaccaacctgaagcggcggcaggtggtccgcggcttctcggagcttgtctccgaattcaatcctttgacgttcaccagcgtgatcgaatgcgagaagccaaacaacgacctgagtaggtttcgcggctgcatcatacatgacaacgggaaaaaggccgggctgtataaagaaaacctgctgctgaggggctgcacccttaggaacacggacgcagtcgtcggcattgtcatctacgcaggacatgaaaccaaggctctgctgaacaacagtgggccccgctacaagcgcagcaagctggagaggcagatgaactgcgacgtgctctggtgtgtcctgctccttgtttgcatgtctctgttttcagcagtcggacatggactgtggatatggcggtatcaagagaagaagtcattattttatgtccccaagtctgatggaagctccttatccccagtcacagctgcagtttactcatttttaacaatgataatagttctgcaggttttgatcccaatttccttatacgtttccattgaaattgttaaagcatgccaagtgtacttcattaaccaggacatgcagttgtatgacgaagaaacagactcgcagctgcagtgccgagctctgaacatcacggaagacttaggacagatacagtacattttctcagataaaactggcactttgacagagaataagatggttttccgaagatgcactgtgtctggtgtagaatattctcatgatgcaaatgcgcagcgtctggccaggtaccaagaggcagactcggaggaggaggaggtggtgcccagagggggctcggtgtcccagcgcggcagcatcggcagccaccagagtgtccgggtggtgcacagaacccagagcaccaagtcccaccggcgcacgggcagccgggccgaggccaagagggccagcatgctgtccaagcacacggccttcagcagccccatggagaaggatatcacgcccgacccaaagctgctggagaaggtgagtgagtgtgacaagagcctagccgtggcgaggcatcaggagcacctgctggcccacctctcgcccgagctgtctgacgtctttgatttcttcatcgcactcaccatctgcaacacagtcgtcgtcacgtccccggatcagccacgaacaaaggtgagggtgaggtttgagctgaagtccccggtgaagacgatagaagacttcctgcggaggttcacacccagctgcctgacctcaggctgcagcagcatcgggagcctggccgccaacaagtccagccacaagttgggctccagcttcccgtccaccccgtccagcgacggcatgcttctcaggctggaggagaggctgggccagcccacctcggccatcgccagcaacggctacagcagccaggcggacaactgggcctcggagcttgctcaggagcaggagtcagagcgcgagctgcggtacgaggcggagagcccggatgaggccgcactggtgtatgcggccagagcctacaactgcgtgcttgtggagcggctgcacgaccaagtgtcagtggagctgccccacctgggcaggctcaccttcgagctcctgcacacactgggtttcgattccgtccgcaagaggatgtcagtggtgatccggcacccgcttaccgatgagatcaacgtctacaccaagggggccgactcagtggtcatggatctcctgcagccctgctcttcagttgacgccagagggaggcatcaaaaaaagattcggagcaaaactcagaattacctcaacgtgtatgcggcggaaggcctgcgcaccttgtgcatcgccaagagagttctgagtaaagaagagtatgcctgctggttgcaaagccacctagaagccgaatcctccctggaaaacagcgaggagctcctcttccagtctgccattcgcctggagaccaacctgcacttgttaggtgccactgggattgaagaccgcctgcaggacggagtccctgaaactatttctaaattgcgtcaagcgggcctgcagatttgggttctcactggtgacaaacaagaaacagctgtcaacattgcatatgcctgcaaactgctggaccacgacgaggaggtcatcaccctgaatgccacctcccaggaggcgtgtgcagccctgctagaccagtgcctatgctacgtgcagtccagaggcctccagagagcccctgagaagaccaagggcaaagtgagcatgaggttctcctctctctgcccaccctccacgtccactgcctctggccgcagacccagcctcgtgatcgatgggagaagcctggcctacgctctcgagaaaaacctggaggacaaattcctcttccttgccaagcagtgccgctccgtcctctgctgtcggtcgacgcctctgcagaagagcatggtggtgaagctggtgcggagcaagctcaaggccatgaccctggccataggtgatggagccaatgatgtcagcatgatccaggtggcagatgtgggtgtgggaatctccggccaggagggtatgcaggcagtgatggccagcgactttgcagtgccgaaattccgatacctggagaggctcttgattcttcacgggcattggtgctactcccgacttgccaacatggtgctgtacttcttctacaaaaacacaatgttcgtgggcctcctgttttggttccagtttttctgtggcttctctgcatctaccatgattgaccagtggtatctaatcttctttaatctgctcttctcgtcacttcccccgctcgtgactggggtgctggacagggatgtgccagccaatgtgctgctgaccaacccgcagctctacaagagtggccagaacatggaggaataccggccacgaacgttctggtttaacatggccgacgccgccttccagagcctggtttgcttttccattccttacctggcctactatgactcgaacgtggacctgtttacctgggggacccctattgtgacaatcgcgctgctcactttcctgctccacctgggcattgaaaccaaaacctggacctggctcaactggataacgtgtggcttcagtgtccttttgtttttcaccgtggctttgatttacaatgcgtcttgtgccacgtgctatcctccgtccaacccttactggactatgcaagccttactgggtgacccagtgttttacttgacttgcctgatgacgcctgtcgctgcactgctgcccagattgtttttcagatccctccaggggagggttttccccacacaacttcagctggcacgtcagttgaccaggaagtcccccaggagatgcagtgctcccaaagagacctttgctcagggacgcctcccgaaggactcgggaaccgagcactcatcagggaggacagtcaagacctctgtgcccctgtcccagccttcttggcacacacagcagccggtctgctccctggaggccagcggggagcccagcacagtggacatgagcatgccagtgagggagcacaccctgctggaggggctgagcgcaccggcccccatgtcctctgcgccaggggaggctgtcctgaggagtccaggagggtgtcctgaggagtccaaggtgagagctgccagcaccggcagggtgacccccctgtcttccctcttcagcctgcctaccttcagcttactcaactggatttcctcctggtcgctggtcagcaggctggggagtgtcttacagttctcccggacggagcagcttgcagatggacaagcgggacgtggacttcctgtccagccccactcaggccgatcaggacttcaagggccagaccacagactacttataggagcatcttcaaggcggtcacagtgaaaaccttgaaatggccttttttaatatatataaataaatgttaatattatttatgtttattatttgcacagaagagttctagggagatgtatttctaaatgtttcccaggctaatacaggaaacaagaggtaccaaaaaagaaagtttattttttaaaattctaagtagagtatattgaaaagaaaaagaagagccttaacatatataaaagtttaaagaagagtaacacttgaaaagtgtgtttagatttattttttcatctcatttttaagaacaagcagtacgatttgttttcttcaacatgtgtgactgcgcactgagtacaaatgtgtgactgctcatggttaatgcaggcaggtgtgaacatgggggaacaatgagcagagatggcagagggcagagcacatggcccccagaggcttccagtctcactgacacaggagggctgggctccacttcatccagatgaaggaaaggaagacctcaagaaaaattcacagttgagtgcatcccagcattctgttccgggcaggcatttcaggaagaccgccttgtaggtattacatccctggtgtcgtattttgcctgttaaatcgtaacaagcaataaacaactttcactttgcaaagacagtgtgtccagttaccactggtgtatgaaatgattaatacctgacctcacagagtatgatctgagggcacttccgtaaggcaagtccttttagaggctatgaagaaaacagctgcatggcacataccaaagctgctgcacagccggccaccatggcaccctgcaccaggccatcagcaccacgtgccaaggagctcagcggtcttcaggcatttttgtaatgagccattagttctgtccctctaaaactagaaaaggaagggcaggaaatgataacaacccaaggcaatgatatggcatgtcatcttctgagcccttctttctactttgtcaaacagttcttagttgctggctctgctcggcaccggggctgtgaagggtgtactccctgctgtgtgggagggacctagggcctctttggatgctgtcttcgaggacagcaatgcagagagggcataggatctgaggacaaggaaattcctcagcatggcgtatcaggaaagcatggctcattctgcaatgagccatgagtgtgggccatcgcaagtcacagaaattgcacctcattccagtcaagcagaaaaacaggcacaggctcagtgtaggtcccaagagagggtgcctggactcagcaactcggacctgggcttttctcccagctttcagggacagctttgtcctgagtctgcctctgttcacggggatgcttggctggagtcacccccaggacttatccatgcatcactattcagaagacacagagggcccctctctccacattccaaacagagtcctggtttcctcagcctcaccctgcatagcttgcacaacatcctcagaaccattcactggcaaatggaggggaacgtgctgactgggactcccagctggagctgggaggagaggtccacttcccttagaacacctgagctgctgcatgagtggacgtcagaagaatctctatgccctgttaaatggggagacaaaggggtggtgggggcttcagccagtgatttcggaccgaaggtgacagccgtcccaaccctgcccagcctgatgccacctcctctgttcttggaacaacgcataggaaaagaatctcctttggaaggtgacactgctccctgaattaaggtaatggttgcgagcaccaagtacaaggactagacgcatatttacctgcgtatctgagagttccagattcccagcttccagatgatccttgcacagacaacctaccttctttccagaggatgtctttctcctctggagagtagatgcttgctcttgggaaacggaatgaccttggcgctggcttcaggaatatgcatcccacagccagtttagagaaatacatgttgtaaatggcattgacagctgctctttaggatggggagtattatggaaatccacaataacaatctatggcaagcaact

SEQ ID NO: 386969 - DNA, 4819 bp, Homo sapiens
ttctgagaaggataaggagacctctcaccttggggctgggcctgaaccagggaggggctgaagaaaatcagcaagctggttcccctcagggcctcaagggacctctgcctgaggaatcagcatttggctttgtaagcaccaggagtactcctggaagctccagggcggggagctcgcaccgccgcgcccgggccgcgagtgatgataacctaagaggccggcgcgggcgggcgtgagcggcggaggagccgggcgcggcgacacgcggccatggagcgggagccggcggggaccgaggagcccgggcctccgggacggcggaggcgccgagagggcaggacgcgcacggtgcgctccaacctgctgccgcccccgggcgccgaggaccctgcggctggcgcggccaagggcgagcggcgacggcggcgcgggtgtgcccagcacctggccgacaaccggctcaagactaccaagtacacgctgctgtccttcctgcccaagaacctgttcgagcagttccaccgcccggccaacgtgtactttgtcttcatcgcgctgctcaacttcgtgccggcggtgaacgccttccagcccggcctggcactggcgccggtgctcttcatcctggccatcacggccttcagggacctgtgggaggactacagccgccaccgctccgaccacaagatcaaccacctgggctgcctggtcttcagcagggaagaaaagaaatacgtgaaccgattctggaaagaaatccacgtgggagactttgtgcgtcttcgctgcaacgaaatcttccctgcggacattctgctgctctcctccagtgaccccgacgggctatgccacatcgagaccgccaacctggatggagagaccaacctgaagcggcggcaggtggtccgcggcttctcggagcttgtctccgaattcaatcctttgacgttcaccagcgtgatcgaatgcgagaagccaaacaacgacctgagtaggtttcgcggctgcatcatacatgacaacgggaaaaaggccgggctgtataaagaaaacctgctgctgaggggctgcacccttaggaacacggacgcagtcgtcggcattgtcatctacgcaggacatgaaaccaaggctctgctgaacaacagtgggccccgctacaagcgcagcaagctggagaggcagatgaactgcgacgtgctctggtgtgtcctgctccttgtttgcatgtctctgttttcagcagtcggacatggactgtggatatggcggtatcaagagaagaagtcattattttatgtccccaagtctgatggaagctccttatccccagtcacagctgcagtttactcatttttaacaatgataatagttctgcaggttttgatcccaatttccttatacgtttccattgaaattgttaaagcatgccaagtgtacttcattaaccaggacatgcagttgtatgacgaagaaacagactcgcagctgcagtgccgagctctgaacatcacggaagacttaggacagatacagtacattttctcagataaaactggcactttgacagagaataagatggttttccgaagatgcactgtgtctggtgtagaatattctcatgatgcaaatgcgcagcgtctggccaggtaccaagaggcagactcggaggaggaggaggtggtgcccagagggggctcggtgtcccagcgcggcagcatcggcagccaccagagtgtccgggtggtgcacagaacccagagcaccaagtcccaccggcgcacgggcagccgggccgaggccaagagggccagcatgctgtccaagcacacggccttcagcagccccatggagaaggatatcacgcccgacccaaagctgctggagaaggtgagtgagtgtgacaagagcctagccgtggcgaggcatcaggagcacctgctggcccacctctcgcccgagctgtctgacgtctttgatttcttcatcgcactcaccatctgcaacacagtcgtcgtcacgtccccggatcagccacgaacaaaggtgagggtgaggtttgagctgaagtccccggtgaagacgatagaagacttcctgcggaggttcacacccagctgcctgacctcaggctgcagcagcatcgggagcctggccgccaacaagtccagccacaagttgggctccagcttcccgtccaccccgtccagcgacggcatgcttctcaggctggaggagaggctgggccagcccacctcggccatcgccagcaacggctacagcagccaggcggacaactgggcctcggagcttgctcaggagcaggagtcagagcgcgagctgcggtacgaggcggagagcccggatgaggccgcactggtgtatgcggccagagcctacaactgcgtgcttgtggagcggctgcacgaccaagtgtcagtggagctgccccacctgggcaggctcaccttcgagctcctgcacacactgggtttcgattccgtccgcaagaggatgtcagtggtgatccggcacccgcttaccgatgagatcaacgtctacaccaagggggccgactcagtggtcatggatctcctgcagccctgctcttcagttgacgccagagggaggcatcaaaaaaagattcggagcaaaactcagaattacctcaacgtgtatgcggcggaaggcctgcgcaccttgtgcatcgccaagagagttctgagtaaagaagagtatgcctgctggttgcaaagccacctagaagccgaatcctccctggaaaacagcgaggagctcctcttccagtctgccattcgcctggagaccaacctgcacttgttaggtgccactgggattgaagaccgcctgcaggacggagtccctgaaactatttctaaattgcgtcaagcgggcctgcagatttgggttctcactggtgacaaacaagaaacagctgtcaacattgcatatgcctgcaaactgctggaccacgacgaggaggtcatcaccctgaatgccacctcccaggaggcgtgtgcagccctgctagaccagtgcctatgctacgtgcagtccagaggcctccagagagcccctgagaagaccaagggcaaagtgagcatgaggttctcctctctctgcccaccctccacgtccactgcctctggccgcagacccagcctcgtgatcgatgggagaagcctggcctacgctctcgagaaaaacctggaggacaaattcctcttccttgccaagcagtgccgctccgtcctctgctgtcggtcgacgcctctgcagaagagcatggtggtgaagctggtgcggagcaagctcaaggccatgaccctggccataggtgatggagccaatgatgtcagcatgatccaggtggcagatgtgggtgtgggaatctccggccaggagggtatgcaggcagtgatggccagcgactttgcagtgccgaaattccgatacctggagaggctcttgattcttcacgggcattggtgctactcccgacttgccaacatggtgctgtacttcttctacaaaaacacaatgttcgtgggcctcctgttttggttccagtttttctgtggcttctctgcatctaccatgattgaccagtggtatctaatcttctttaatctgctcttctcgtcacttcccccgctcgtgactggggtgctggacagggatgtgccagccaatgtgctgctgaccaacccgcagctctacaagagtggccagaacatggaggaataccggccacgaacgttctggtttaacatggccgacgccgccttccagagcctggtttgcttttccattccttacctggcctactatgactcgaacgtggacctgtttacctgggggacccctattgtgacaatcgcgctgctcactttcctgctccacctgggcattgaaaccaaaacctggacctggctcaactggataacgtgtggcttcagtgtccttttgtttttcaccgtggctttgatttacaatgcgtcttgtgccacgtgctatcctccgtccaacccttactggactatgcaagccttactgggtgacccagtgttttacttgacttgcctgatgacgcctgtcgctgcactgctgcccagattgtttttcagatccctccaggggagggttttccccacacaacttcagctggcacgtcagttgaccaggaagtcccccaggagatgcagtgctcccaaagagacctttgctcagggacgcctcccgaaggactcgggaaccgagcactcatcagggaggacagtcaagacctctgtgcccctgtcccagccttcttggcacacacagcagccggtctgctccctggaggccagcggggagcccagcacagtggacatgagcatgccagtgagggagcacaccctgctggaggggctgagcgcaccggcccccatgtcctctgcgccaggggaggctgtcctgaggagtccaggagggtgtcctgaggagtccaaggtgagagctgccagcaccggcagggtgacccccctgtcttccctcttcagcctgcctaccttcagcttactcaactggatttcctcctggtcgctggtcagcaggctggggagtgtcttacagttctcccggacggagcagcttgcagatggacaagcgggacgtggacttcctgtccagccccactcaggccgatcaggacttcaagggccagaccacagactacttataggagcatcttcaaggcggtcacagtgaaaaccttgaaatggccttttttaatatatataaataaatgttaatatta

SEQ ID NO: 386970 - DNA, 4166 bp, Homo sapiens
ttctgagaaggataaggagacctctcaccttggggctgggcctgaaccagggaggggctgaagaaaatcagcaagctggttcccctcagggcctcaagggacctctgcctgaggaatcagcatttggctttgtaagcaccaggagtactcctggaagctccagggcggggagctcgcaccgccgcgcccgggccgcgagtgatgataacctaagaggccggcgcgggcgggcgtgagcggcggaggagccgggcgcggcgacacgcggccatggagcgggagccggcggggaccgaggagcccgggcctccgggacggcggaggcgccgagagggcaggacgcgcacggtgcgctccaacctgctgccgcccccgggcgccgaggaccctgcggctggcgcggccaagggcgagcggcgacggcggcgcgggtgtgcccagcacctggccgacaaccggctcaagactaccaagtacacgctgctgtccttcctgcccaagaacctgttcgagcagttccaccgcccggccaacgtgtactttgtcttcatcgcgctgctcaacttcgtgccggcggtgaacgccttccagcccggcctggcactggcgccggtgctcttcatcctggccatcacggccttcagggacctgtgggaggactacagccgccaccgctccgaccacaagatcaaccacctgggctgcctggtcttcagcagggaagaaaagaaatacgtgaaccgattctggaaagaaatccacgtgggagactttgtgcgtcttcgctgcaacgaaatcttccctgcggacattctgctgctctcctccagtgaccccgacgggctatgccacatcgagaccgccaacctggatggagagaccaacctgaagcggcggcaggtggtccgcggcttctcggagcttgtctccgaattcaatcctttgacgttcaccagcgtgatcgaatgcgagaagccaaacaacgacctgagtaggtttcgcggctgcatcatacatgacaacgggaaaaaggccgggctgtataaagaaaacctgctgctgaggggctgcacccttaggaacacggacgcagtcgtcggcattgtcatctacgcaggacatgaaaccaaggctctgctgaacaacagtgggccccgctacaagcgcagcaagctggagaggcagatgaactgcgacgtgctctggtgtgtcctgctccttgtttgcatgtctctgttttcagcagtcggacatggactgtggatatggcggtatcaagagaagaagtcattattttatgtccccaagtctgatggaagctccttatccccagtcacagctgcagtttactcatttttaacaatgataatagttctgcaggttttgatcccaatttccttatacgtttccattgaaattgttaaagcatgccaagtgtacttcattaaccaggacatgcagttgtatgacgaagaaacagactcgcagctgcagtgccgagctctgaacatcacggaagacttaggacagatacagtacattttctcagataaaactggcactttgacagagaataagatggttttccgaagatgcactgtgtctggtgtagaatattctcatgatgcaaatgcgcagcgtctggccaggtaccaagaggcagactcggaggaggaggaggtggtgcccagagggggctcggtgtcccagcgcggcagcatcggcagccaccagagtgtccgggtggtgcacagaacccagagcaccaagtcccaccggcgcacgggcagccgggccgaggccaagagggccagcatgctgtccaagcacacggccttcagcagccccatggagaaggatatcacgcccgacccaaagctgctggagaaggtgagtgagtgtgacaagagcctagccgtggcgaggcatcaggagcacctgctggcccacctctcgcccgagctgtctgacgtctttgatttcttcatcgcactcaccatctgcaacacagtcgtcgtcacgtccccggatcagccacgaacaaaggtgagggtgaggtttgagctgaagtccccggtgaagacgatagaagacttcctgcggaggttcacacccagctgcctgacctcaggctgcagcagcatcgggagcctggccgccaacaagtccagccacaagttgggctccagcttcccgtccaccccgtccagcgacggcatgcttctcaggctggaggagaggctgggccagcccacctcggccatcgccagcaacggctacagcagccaggcggacaactgggcctcggagcttgctcaggagcaggagtcagagcgcgagctgcggtacgaggcggagagcccggatgaggccgcactggtgtatgcggccagagcctacaactgcgtgcttgtggagcggctgcacgaccaagtgtcagtggagctgccccacctgggcaggctcaccttcgagctcctgcacacactgggtttcgattccgtccgcaagaggatgtcagtggtgatccggcacccgcttaccgatgagatcaacgtctacaccaagggggccgactcagtggtcatggatctcctgcagccctgctcttcagttgacgccagagggaggcatcaaaaaaagattcggagcaaaactcagaattacctcaacgtgtatgcggcggaaggcctgcgcaccttgtgcatcgccaagagagttctgagtaaagaagagtatgcctgctggttgcaaagccacctagaagccgaatcctccctggaaaacagcgaggagctcctcttccagtctgccattcgcctggagaccaacctgcacttgttaggtgccactgggattgaagaccgcctgcaggacggagtccctgaaactatttctaaattgcgtcaagcgggcctgcagatttgggttctcactggtgacaaacaagaaacagctgtcaacattgcatatgcctgcaaactgctggaccacgacgaggaggtcatcaccctgaatgccacctcccaggaggcgtgtgcagccctgctagaccagtgcctatgctacgtgcagtccagaggcctccagagagcccctgagaagaccaagggcaaagtgagcatgaggttctcctctctctgcccaccctccacgtccactgcctctggccgcagacccagcctcgtgatcgatgggagaagcctggcctacgctctcgagaaaaacctggaggacaaattcctcttccttgccaagcagtgccgctccgtcctctgctgtcggtcgacgcctctgcagaagagcatggtggtgaagctggtgcggagcaagctcaaggccatgaccctggccataggtgatggagccaatgatgtcagcatgatccaggtggcagatgtgggtgtgggaatctccggccaggagggtatgcaggcagtgatggccagcgactttgcagtgccgaaattccgatacctggagaggctcttgattcttcacgggcattggtgctactcccgacttgccaacatggtgctgtacttcttctacaaaaacacaatgttcgtgggcctcctgttttggttccagtttttctgtggcttctctgcatctaccatgattgaccagtggtatctaatcttctttaatctgctcttctcgtcacttcccccgctcgtgactggggtgctggacagggatgtgccagccaatgtgctgctgaccaacccgcagctctacaagagtggccagaacatggaggaataccggccacgaacgttctggtttaacatggccgacgccgccttccagagcctggtttgcttttccattccttacctggcctactatgactcgaacgtggacctgtttacctgggggacccctattgtgacaatcgcgctgctcactttcctgctccacctgggcattgaaaccaaaacctgggtaagagccgctgcatggccacttctcagaagagcactgatgccgtggaccccacacttcctgcagattcatgaggtcggggaggccgtttgagtagacaggagactgcaaagctgacctcagtgtgatgagaaggacaatgacacattcccgagccctgtggtgtggggagccgctgcagcctgatgctcgcacttccccggccatgctcatctccc

SEQ ID NO: 386971 - DNA, 414 bp, Homo sapiens
aatgactcctttcaatcatctccattgccccaaataggaaagaagtggcaatgttaaaactgtctctcagcccattttccccagtgttttccttccagttaaatgccatcaatttgtatagaagtatcatatcaagaggaaagagggatattcagagaaataaaacccagaagaattactgccatataaattcttaaacctaaaaacatgacatagtggagtcacaaaactgaggtcctaccctcatttgccattcaccatgtgaccaagtaaagttgctgaacttctctggacatggtactttcctaagagcaaagtaaattatacttctgaatattcatttcaattcaactcatttgtagcatacagaataaaaagtcagatcaaccggttgggtaggcagcaaaagttagt

SEQ ID NO: 386972 - DNA, 381 bp, Homo sapiens
gactaatcacatgacgtgctttaaaatatcttgtcctaacacatttcactttcctcgacatttcttactctattttctgaagatatgtacttttatatgaatagggagttattctagaataaaagctccatgaagataagaattttgactgctttcttctttgctgagtgtgcaatgcctagaacagtgcttgagaacaaactgtactcaatgaatatgagtattttgagtgaatgaataaatgaatttcatagaaaaaatgacatattccatatccattgcttcctctttacttctgaaatagcttctcaactgtgtctattttatatcccctaaattaaattgcacagacatgctacagccagatggggcttcctcaca

SEQ ID NO: 386973 - DNA, 395 bp, Homo sapiens
gccatcagaacagtacctggcccaagggaggctatggaagtgcttgttgaataaaaaaatggcttcatctctggcctagccccaaaggtttgagttcctgccattgccacccagacagccctgggtggaggccctgctgacattgaagagtgcctgccctcctcccctcaatgcggtagacactttccaaaacttacgtcatcctcactctcactccagtgggataatgggaggcttggtgtacctcattcccaagatgagggaacaggctctgagaggaccacatcgccagcaagtgacaggctgggaccaaggccaggcctgtctgcctcctagactaggcctgagtgaggaccggcctgagtacggcccacctgcttcctcctccgtttaga

SEQ ID NO: 386974 - DNA, 406 bp, Homo sapiens
aaaaagggaagaaaaaaacctatgattttgttaaaataaaaggtcagatagcaaaagtaattcagcacaaactctggatcatttagtcttagcaatcttctactgtgaggagttttagaacgtaactccatactcacaaagtagaagctagattttttcaaaccaagcaactagttagacagaggtagaaacaaaacccttggcttcaaaataatcccagaaatactcttctcaccaagcgagtcttatagcatctgatgtgtaaaaatcttttttttaaagtaaaaattattcatttcttaactgaaatgttttaagggtaagaagaaaaaatataaaataatttaaaataggggtagtaaaacattttaagttgtttctatttctgttcagtatactctcgagt

SEQ ID NO: 386975 - DNA, 552 bp, Homo sapiens
gcgttcatatacaagttttggtaccattaagtatttttgggaatgacagtatagcaacaaagacctgtcttaggtttgtataatttggaaagcacttttcattcgatcatcccaatttcagcacctaaacactgctagaaaacttgccggtgagtggcagttttcccactcagttctcatattcttctcactacacactgctctcactttccccgccactgggtagtgttttgactgtgataattacgagtgatgttcaaagaaaaggaaagttggctgggcacagtggctcacgcctgtaatcccagcattttgggaggccgagggaggcggatcacctgaggttgggagttcaagaccagcctgatgaacatagaaaaaccccgtctctactaaaaatataaaattagctgggagtgggggtgcatgcctgtaatcccagctacttgggagactgaggcaggagaatcgcttgaacgcataaggcagaggttgctgtgagccgagattgcgccactgcactccagcatgggcaacaagagtgaaactcca

SEQ ID NO: 386976 - DNA, 280 bp, Homo sapiens
ttgttttctagatgctactttggagtcatgtaaatattttctgtgattgtaaaacaaaaattttaaataaaaactcctaaaaatcaaaaataaaatgtgacaaatgaaccctgcatttataaggtggtagcataaccacacagagaagaatgactgacagtgaaatacattaatcctatatccgtagtgggacataaactaatgacaaaagaaaaatggtggtattggtgctggcattagtagtctgaactgctgtgtatatcaaagcaagtaagtaatt

SEQ ID NO: 386977 - DNA, 99 bp, Homo sapiens
aaatactgtatttataaataaatactgtatttataaataaatactgtaaatactatttacatagtaataaataaagaactccaaatactagtctaacct

SEQ ID NO: 386978 - DNA, 284 bp, Homo sapiens
aatggatttttcttcaagcttagcttctccttcctaatttgcttgcattcttaatttttttagagctctcaagtagttgcagtttatgttttgtccactattttcagttgtaatccatgagagacagtggctgtagtggacttgttccctcttggctagcaataggagttctctgtatctatgcacgtttgtattgattcttcatagctcacagtgtctgtcacctaggtgatgagcaaaacgtatgtattgagtgaaaggatgaatgaatagacaaaggaatg

SEQ ID NO: 386979 - DNA, 344 bp, Homo sapiens
agtggtagccactctttaagacagctatcacttaggtttatgtttatattaatactacatcagtaagtatatgctagggactagcacatccttaccttgaatctataatgaggaaccttaacccctctttgctttggctctgcttgtctatatttagtcatgaatttttggcaaggctttttatacttgttccatttttctcaatgtcatagtgtatcagaagtgtgttatggatgtggaaataatgcagatcacacttggacacttttactaatatacttaacctctgaatgtcattttcctttactgaaattgaagaaaataacgtctttattctgatattt

SEQ ID NO: 386980 - DNA, 656 bp, Homo sapiens
ttgggaagaatctcttatatatatccacaaaattagaatgtaatagggtgaggccaaatggaatattggagaatcagttttcatttgttccacggcaccccatctttcctgtgatacccgtgaaacggttgcacaatacttataagctggtgctggggcactctgtcttccttcttcctgccaaatgcatggaggtgatcctgtctcaccaaaagtcctatagacagggacaaatgaacttctgcccattgttctcccagaagagcggcacccaccacgaatgctccatttcacctcatgtctagttcacctaatggcctagttctgggtttatttatatttacatattcaaggagtacatattgaacacttactaggtgcaagacaccctgatagtcccattacggaagttccaaaagaatagtttataggtatttctgtttaatcaatcctttttatttagaaagatataaaaatgacttacattattccacattccatgaaatatttccactttattcagcataaatgacattaataggctaacataagctctaaatgttataaataaaacagagccccaacactgttttattaaaactaccaaaagcccattaaaatcatgaggaaaaatgaatactttttgtgagttaaaa

SEQ ID NO: 386981 - DNA, 599 bp, Homo sapiens
cagaacccgccctgccagtacagagggcccactggatttattgaaaaaaacccacatataaatggacctgtgcagtccaaacccatgctgttcaagggtcaactgtagtacataagatctgataatctggcagtcaggtggtgagggttgatgatcagccacatttatcaagggggttaagatttaagagcaatttaaaagggccaggtctcagacctgtgcaaggccacgagttagaaagtgagactatccctgagtaaaaccaggacacttaagtaaatacatcctcagtaaaacaatatatagaatgtgaaaaattcacccactagcaagcagagaagaaaaggaatattgtcatttttaactgcgcttctagtgaggaaaaggagtctctcctaagaatttgtcatcataagctttggaatttgggcttcattatactacctacatagactgagaaatcctaaattaaaagtggtactctcctaatattgtgtggtgcttggaagaaacaaaaaaatcttttcggaaccacatactcttaacctaggcaacccataattcccacagataaaagcattgcaaacacaagcttttaa

SEQ ID NO: 386982 - DNA, 447 bp, Homo sapiens
agagatggggttacaccatgttagccaggctggtcttgaactcctgacctcaggtgatccacccacctcggcctcccaaagtgctgggattacaggtgtgagccactccatctggcctgggatgcccatatgttctaatcttaccttgaagatttcttgacccagacctagagtcttcatttctcttaggagacttggttctttgtattacaaaattgtatttagagaccataatctgagtcatatggggttctcattgatactgtattggacatcagtcttggttttttccatggctagtttagctcttctcttactcagaaacttggaaaatacagagaagcaaacagcttgctggattatgtagcaccacttcagctgatgagtaccagaatgccagtttcctaatttggaataggagctctacctgatacttgggccagtcag

SEQ ID NO: 386983 - DNA, 660 bp, Homo sapiens
ggtttataggtcccggcccgagcctccggccgcccgccgggtttgtcccgcgatccccgaccatgcccgccgacctcagcggtacttggaccctgctcagcagcgacaacttcgagggctacatgctggccctaggtattgactttgccactcgtaaaatagccaagttgctgaagccacagaaagtgattgagcagaatggggattcttttaccatccacacgaacagcagcctaaggaactactttgtgaaatttaaagttggagaagaatttgatgaagataacagaggcctggacaacagaaaatgcaagagtttggttatctgggacaatgacaggctcacctgtatccagaagggagaaaagaagaacagaggctggacccattggatcgaaggagacaaactccacctggaaatgttctgtgaaggtcaagtgtgcaaacagacattccagagagcctgatccacatccagcagcagagcccacttgtggctgcagctttatgccaaattatattgcagactgaacagacgtttatctatcccatttggcgacgaggactcgtggctggagagagccacacagcgtgtaacctgaagtcatctagattatggggaaactgctcagcttcaataaacctgtccaaatgacaaaa

SEQ ID NO: 386984 - DNA, 556 bp, Homo sapiens
  misc_feature (325)..(325): n is a, c, g, or t
  misc_feature (330)..(330): n is a, c, g, or t
  misc_feature (347)..(347): n is a, c, g, or t
  misc_feature (349)..(349): n is a, c, g, or t
  misc_feature (368)..(368): n is a, c, g, or t
  misc_feature (375)..(375): n is a, c, g, or t
  misc_feature (438)..(438): n is a, c, g, or t
  misc_feature (479)..(479): n is a, c, g, or t
  misc_feature (481)..(481): n is a, c, g, or t
  misc_feature (490)..(490): n is a, c, g, or t
ttgggcctgcattcaggggctgtttctaggggaaactgtgactgagaaagcgctttgggggggcgagctctgggctgagtgcccctgttcaagggctggaggaggctcctgcttcctccctcaaggatgctcttcaagtgtggggagctcccaggggagagcccaggggcttcctctttccccacaggtcagagagggcttggggggagacaagtggagctgggtaggggtcccttggggcagtggggcacaggtggacggggcttgcctccttttaggtgagatagatccacacacacacacacacacacacacacacttctgnctcanatgcacagctgtcttcngnataaaaattcttctatcantggccanttactcttgggcattagcccccaagttaccgaatccaatctactcagctccctgacacttgtngggactcgggtctcctaggtcgtgccatcctataaaatcgngncattctatnactctgattgggtaaaagaagcaactctgcacatccctgaggggagcccaaggggtaccgagctcg

SEQ ID NO: 386985 - DNA, 679 bp, Homo sapiens
ggagatggatcttgcagtaagctgagatcgcgccactgcactccagcgtgggcaacacagtgagactctgtctcaaaaagaaaaaaaaaaaagaaaattgtcaaaacacaaccaatagataatgttaacatgcattctaacatgcaatttattggatttagcgaatagaatgtgagtggaagttacttttggtagaactgttgggaaaagggcttgtggagtgcctgcataaactggccataaaaatatgggacaataagttgtggaaagccacaagaggcctctgaggaggaaagcctcctaattgccatcacgttcctatgaccagagtgtgacctgctctcttatctataaacactgtgctcaaggagaaagacactcctttgaagcattggaatgtggccagatatgctggcttctagttaggcccactccccacagctgctctctgataagtaaaagaataaatcagtagttaagtttatgctgcttcagcacaaagaaaatgtacctaaactgccattgcccccctttcactgtttcacccctgaacatctgcttcttagatctaagtgattgtactcaataaatagtgtggagaccagagcttggcgcctttgcagcttttgatttgctctggccccttggctcccacctttatgaactcttaacctgtctc

SEQ ID NO: 386986 - DNA, 839 bp, Homo sapiens
attctggactttgagctcaatgccatgactgaggaagaccacggggttttctctcttagaggggagggctcagtaaacacttaaggaagttgccgtgcactgcagcctgccggagacatgaaggaatgtacgggaggataatcgcaacatcatcaacccaattctccaagtaatttgccatgggacaggcacaccccatgtgtttgggaagacaatgggaaggttctgttttctgctccaagactgattcaaccagttggatctggaaggggataaagggctgtgtggctgcttgattttcattgtctagtggcagccaaaattggaaaagagagaagtgcagactttaaagacaagcagcgacagctcatcagcagtctaacaacacgacagatgacaggcccagaggcacacccagggccgccagcccatcaccctgtgcaggatgtcaaagagcagctgcagcaaaggaagaagatcatccagacttaaatgtttgggccttgctaagaccatagagtctttgtgctttggaaacagtcctccatacaaagaccccttcctagaaaagagtggaaagaaaccaaggtggaatggatacaacagaaaggagaccatgctaatattcttgtgcaatgcttcctgggcagaaattatgtcataaaggatgttccattctgcaaagctatgtgtctctctgtggtttgcctcagaggaggggcctttcatagctgtagtgagtaagggggcccttgctgatgttcatcagatattgccaaggcacaggaagaaagcattgaggtcacagggcagctcaggtccgcctgtggtaattgaaa

SEQ ID NO: 386987 - DNA, 883 bp, Homo sapiens
attctggactttgagctcaatgccatgactgaggaagaccacggggttttctctcttagaggggaggaatccttgatattcttcattccaattgttcacctctactgtagggctcagtaaacacttaaggaagttgccgtgcactgcagcctgccggagacatgaaggaatgtacgggaggataatcgcaacatcatcaacccaattctccaagtaatttgccatgggacaggcacaccccatgtgtttgggaagacaatgggaaggttctgttttctgctccaagactgattcaaccagttggatctggaaggggataaagggctgtgtggctgcttgattttcattgtctagtggcagccaaaattggaaaagagagaagtgcagactttaaagacaagcagcgacagctcatcagcagtctaacaacacgacagatgacaggcccagaggcacacccagggccgccagcccatcaccctgtgcaggatgtcaaagagcagctgcagcaaaggaagaagatcatccagacttaaatgtttgggccttgctaagaccatagagtctttgtgctttggaaacagtcctccatacaaagaccccttcctagaaaagagtggaaagaaaccaaggtggaatggatacaacagaaaggagaccatgctaatattcttgtgcaatgcttcctgggcagaaattatgtcataaaggatgttccattctgcaaagctatgtgtctctctgtggtttgcctcagaggaggggcctttcatagctgtagtgagtaagggggcccttgctgatgttcatcagatattgccaaggcacaggaagaaagcattgaggtcacagggcagctcaggtccgcctgtggtaattgaaa

SEQ ID NO: 386988 - DNA, 397 bp, Homo sapiens
tcaaacacattctaattctgattttttttaacagtaatttgccatgggacaggcacaccccatgtgtttgggaagacaatgggaaggttctgttttctgctccaagactgattcaaccagttggatctggaaggggataaagggctgtgtggctgcttgattttcattgtctagtggcagccaaaattggaaaagagagaagtgcagactttaaagacaagcagcgacagctcatcagcagtctaacaacacgacagatgacaggcccagaggcacacccagggccgccagcccatcaccctgtgcaggatgtcaaagagcagctgcagcaaaggaagaagatcatccagacttaaatgtttgggccttgctaagaccatagagtctttgtgctttg

SEQ ID NO: 386989 - DNA, 484 bp, Homo sapiens
tgtagcctcagtggtaatgcaaaataaactctcaatgtccttatagctgaagtagtgggcgcctgtgcactcttaaataaaacatgctgtttctggatcaacacttccagtcaggtagagaaaaatttacaagtccttaaaaaccaaattgaaatcactaacaaattaagggaaaatgcaaactcccgtcccagttggctacaatccctttttaataaattcgagtcttggttttgggcctggttagctcccctacgaaaacctcttttccttatatgttttatattagtgtttggcctttgcatactcaatgatataacccaaattgtttcctttcccgaggggctaacaagcaccaaatggtaatgcaaataaaaccacacatggatgtgcctttcttccgcggacccttaaaccaaccccaggaggaaccctagctgctcttcccccacacaatgcccctttccagcaggaagtagccaaa

SEQ ID NO: 386990 - DNA, 2120 bp, Homo sapiens
  misc_feature (1811)..(1811): n is a, c, g, or t
gcagccgccgcggtcgggctgccccctcccctcgccccgaccgctcccctgctggtgagggcctgcgcaggcggcggcggcggcgcccttggtggcagtggtggcggcggagcagcctcccgggatcgtgtctggagctcgaggagagggtagtgcccggcgagctatgcacgggggcggcggcgtctcctcctgttccgcctcctcagtctcctcggtctcgcagaatccgccggcggcggcggcgccaggacatggagctcgagaacatcgtggccaactcgctgctgctgaaagcgcgtcaaggaggatatggcaaaaaaagtggtcgtagtaaaaaatggaaggagatactgacactgcctcctgtcagccagtgcagtgagcttagacattccattgaaaaggattatagcagtctttgtgacaagcaaccgataggaagacgtctcttcaggcagttctgtgataccaaacccactctaaagaggcacattgaattcttggatgcagtggcagaatatgaagttgccgatgatgaggaccgaagtgattgtggactgtcaatcttagatagattcttcaatgataagttggcagcccctttaccagaaatacctccagatgttgtgacagaatgtagattgggactgaaggaggagaacccttccaaaaaagcctttgaggaatgtactagagttgcccataactacctaagaggggaaccatttgaagaataccaagaaagctcatatttttctcagtttttacaatggaaatggctggaaaggcaacccgtaacaaagaacacatttagacattacagagttctaggaaaaggcggatttggagaggtttgcgcctgtcaagtgcgagccacaggaaaaatgtatgcctgcaaaaagctacaaaaaaaaagaataaagaagaggaaaggtgaagctatggctctaaatgagaaaagaattctggagaaagtgcaaagtagattcgtagttagtttagcctacgcttatgaaaccaaagatgccttgtgcttggtgctcaccattatgaatggaggggatttgaagtttcacatttacaacctgggcaatcccggctttgatgagcagagagccgttttctatgctgcagagctgtgttgcggcttggaagatttacagagggaaagaattgtatacagagacttgaagcctgagaatattctccttgatgatcgtggacacatccggatttcagacctcggtttggccacagagatcccagaaggacagagggttcgaggaagagttggaacagtcggctacatggcacctgaagttgtcaataatgaaaagtatacgtttagtcccgattggtggggacttggctgtctgatctatgaaatgattcagggacattctccattcaaaaaatacaaagagaaagtcaaatgggaggaggtcgatcaaagaatcaagaatgataccgaggagtattctgagaagttttcagaggatgccaaatctatctgcaggatgttactcaccaagaatccaagcaagcggctgggctgcaggggcgagggagcggctggggtgaagcagcaccccgtgttcaaggacatcaacttcaggaggctggaggcaaacatgctggagccccctttctgtcctgatcctcatgccgtttactgtaaggacgtcctggatatcgagcagttctcggcggtgaaagggatctacctggacaccgcagatgaagacttctatgctcggtttgctaccgggtgtgtctccatcccctggcagaatgagatgatcgaatcngggtgtttcaaagacatcaacaaaagtgaaagtgaggaagctttgccattagatctagacaagaacatacataccccggtttccagaccaaacagaggcttcttctatagactcttcagaagagggggctgcctgaccatggtccccagtgagaaggaagtggaacccaagcaatgctgagcaccccggtgcggaccacagagcagaccctggcgccaggaaggagcatgtgttagcgtctcgtcccacctggaattgtaataaatacatctaaataaaacatgccttgggagtgtacagacaaaaaaa

SEQ ID NO: 386991 - DNA, 2024 bp, Homo sapiens
  misc_feature (1715)..(1715): n is a, c, g, or t
gcagccgccgcggtcgggctgccccctcccctcgccccgaccgctcccctgctggtgagggcctgcgcaggcggcggcggcggcgcccttggtggcagtggtggcggcggagcagcctcccgggatcgtgtctggagctcgaggagagggtagtgcccggcgagctatgcacgggggcggcggcgtctcctcctgttccgcctcctcagtctcctcggtctcgcagaatccgccggcggcggcggcgccaggacatggagctcgagaacatcgtggccaactcgctgctgctgaaagcgcgtcaagaaaaggattatagcagtctttgtgacaagcaaccgataggaagacgtctcttcaggcagttctgtgataccaaacccactctaaagaggcacattgaattcttggatgcagtggcagaatatgaagttgccgatgatgaggaccgaagtgattgtggactgtcaatcttagatagattcttcaatgataagttggcagcccctttaccagaaatacctccagatgttgtgacagaatgtagattgggactgaaggaggagaacccttccaaaaaagcctttgaggaatgtactagagttgcccataactacctaagaggggaaccatttgaagaataccaagaaagctcatatttttctcagtttttacaatggaaatggctggaaaggcaacccgtaacaaagaacacatttagacattacagagttctaggaaaaggcggatttggagaggtttgcgcctgtcaagtgcgagccacaggaaaaatgtatgcctgcaaaaagctacaaaaaaaaagaataaagaagaggaaaggtgaagctatggctctaaatgagaaaagaattctggagaaagtgcaaagtagattcgtagttagtttagcctacgcttatgaaaccaaagatgccttgtgcttggtgctcaccattatgaatggaggggatttgaagtttcacatttacaacctgggcaatcccggctttgatgagcagagagccgttttctatgctgcagagctgtgttgcggcttggaagatttacagagggaaagaattgtatacagagacttgaagcctgagaatattctccttgatgatcgtggacacatccggatttcagacctcggtttggccacagagatcccagaaggacagagggttcgaggaagagttggaacagtcggctacatggcacctgaagttgtcaataatgaaaagtatacgtttagtcccgattggtggggacttggctgtctgatctatgaaatgattcagggacattctccattcaaaaaatacaaagagaaagtcaaatgggaggaggtcgatcaaagaatcaagaatgataccgaggagtattctgagaagttttcagaggatgccaaatctatctgcaggatgttactcaccaagaatccaagcaagcggctgggctgcaggggcgagggagcggctggggtgaagcagcaccccgtgttcaaggacatcaacttcaggaggctggaggcaaacatgctggagccccctttctgtcctgatcctcatgccgtttactgtaaggacgtcctggatatcgagcagttctcggcggtgaaagggatctacctggacaccgcagatgaagacttctatgctcggtttgctaccgggtgtgtctccatcccctggcagaatgagatgatcgaatcngggtgtttcaaagacatcaacaaaagtgaaagtgaggaagctttgccattagatctagacaagaacatacataccccggtttccagaccaaacagaggcttcttctatagactcttcagaagagggggctgcctgaccatggtccccagtgagaaggaagtggaacccaagcaatgctgagcaccccggtgcggaccacagagcagaccctggcgccaggaaggagcatgtgttagcgtctcgtcccacctggaattgtaataaatacatctaaataaaacatgccttgggagtgtacagacaaaaaaa

SEQ ID NO: 386992 - DNA, 1886 bp, Homo sapiens
gcagccgccgcggtcgggctgccccctcccctcgccccgaccgctcccctgctggtgagggcctgcgcaggcggcggcggcggcgcccttggtggcagtggtggcggcggagcagcctcccgggatcgtgtctggagctcgaggagagggtagtgcccggcgagctatgcacgggggcggcggcgtctcctcctgttccgcctcctcagtctcctcggtctcgcagaatccgccggcggcggcggcgccaggacatggagctcgagaacatcgtggccaactcgctgctgctgaaagcgcgtcaagaaaaggattatagcagtctttgtgacaagcaaccgataggaagacgtctcttcaggcagttctgtgataccaaacccactctaaagaggcacattgaattcttggatgcagtggcagaatatgaagttgccgatgatgaggaccgaagtgattgtggactgtcaatcttagatagattcttcaatgataagttggcagcccctttaccagaaatacctccagatgttgtgacagaatgtagattgggactgaaggaggagaacccttccaaaaaagcctttgaggaatgtactagagttgcccataactacctaagaggggaaccatttgaagaataccaagaaagctcatatttttctcagtttttacaatggaaatggctggaaaggcaacccgtaacaaagaacacatttagacattacagagttctaggaaaaggcggatttggagaggtttgcgcctgtcaagtgcgagccacaggaaaaatgtatgcctgcaaaaagctacaaaaaaaaagaataaagaagaggaaaggtgaagctatggctctaaatgagaaaagaattctggagaaagtgcaaagtagattcgtagttagtttagcctacgcttatgaaaccaaagatgccttgtgcttggtgctcaccattatgaatggaggggatttgaagtttcacatttacaacctgggcaatcccggctttgatgagcagagagccgttttctatgctgcagagctgtgttgcggcttggaagatttacagagggaaagaattgtatacagagacttgaagcctgagaatattctccttgatgatcgtggacacatccggatttcagacctcggtttggccacagagatcccagaaggacagagggttcgaggaagagttggaacagtcggctacatggcacctgaagttgtcaataatgaaaagtatacgtttagtcccgattggtggggacttggctgtctgatctatgaaatgattcagggacattctccattcaaaaaatacaaagagaaagtcaaatgggaggaggtcgatcaaagaatcaagaatgataccgaggagtattctgagaagttttcagaggatgccaaatctatctgcaggatgttactcaccaagaatccaagcaagcggctgggctgcaggggcgagggagcggctggggtgaagcagcaccccgtgttcaaggacatcaacttcaggaggctggaggcaaacatgctggagccccctttctgtcctgatcctcatgccgtttactgtaaggacgtcctggatatcgagcagttctcggcggtgaaagggatctacctggacaccgcagatgaagacttctatgctcggtttgctaccgggtgtgtctccatcccctggcagaatgagggctgcctgaccatggtccccagtgagaaggaagtggaacccaagcaatgctgagcaccccggtgcggaccacagagcagaccctggcgccaggaaggagcatgtgttagcgtctcgtcccacctggaattgtaataaatacatctaaataaaacatgccttgggagtgtacagacaaaaaaa

SEQ ID NO: 386993 - DNA, 1982 bp, Homo sapiens
gcagccgccgcggtcgggctgccccctcccctcgccccgaccgctcccctgctggtgagggcctgcgcaggcggcggcggcggcgcccttggtggcagtggtggcggcggagcagcctcccgggatcgtgtctggagctcgaggagagggtagtgcccggcgagctatgcacgggggcggcggcgtctcctcctgttccgcctcctcagtctcctcggtctcgcagaatccgccggcggcggcggcgccaggacatggagctcgagaacatcgtggccaactcgctgctgctgaaagcgcgtcaaggaggatatggcaaaaaaagtggtcgtagtaaaaaatggaaggagatactgacactgcctcctgtcagccagtgcagtgagcttagacattccattgaaaaggattatagcagtctttgtgacaagcaaccgataggaagacgtctcttcaggcagttctgtgataccaaacccactctaaagaggcacattgaattcttggatgcagtggcagaatatgaagttgccgatgatgaggaccgaagtgattgtggactgtcaatcttagatagattcttcaatgataagttggcagcccctttaccagaaatacctccagatgttgtgacagaatgtagattgggactgaaggaggagaacccttccaaaaaagcctttgaggaatgtactagagttgcccataactacctaagaggggaaccatttgaagaataccaagaaagctcatatttttctcagtttttacaatggaaatggctggaaaggcaacccgtaacaaagaacacatttagacattacagagttctaggaaaaggcggatttggagaggtttgcgcctgtcaagtgcgagccacaggaaaaatgtatgcctgcaaaaagctacaaaaaaaaagaataaagaagaggaaaggtgaagctatggctctaaatgagaaaagaattctggagaaagtgcaaagtagattcgtagttagtttagcctacgcttatgaaaccaaagatgccttgtgcttggtgctcaccattatgaatggaggggatttgaagtttcacatttacaacctgggcaatcccggctttgatgagcagagagccgttttctatgctgcagagctgtgttgcggcttggaagatttacagagggaaagaattgtatacagagacttgaagcctgagaatattctccttgatgatcgtggacacatccggatttcagacctcggtttggccacagagatcccagaaggacagagggttcgaggaagagttggaacagtcggctacatggcacctgaagttgtcaataatgaaaagtatacgtttagtcccgattggtggggacttggctgtctgatctatgaaatgattcagggacattctccattcaaaaaatacaaagagaaagtcaaatgggaggaggtcgatcaaagaatcaagaatgataccgaggagtattctgagaagttttcagaggatgccaaatctatctgcaggatgttactcaccaagaatccaagcaagcggctgggctgcaggggcgagggagcggctggggtgaagcagcaccccgtgttcaaggacatcaacttcaggaggctggaggcaaacatgctggagccccctttctgtcctgatcctcatgccgtttactgtaaggacgtcctggatatcgagcagttctcggcggtgaaagggatctacctggacaccgcagatgaagacttctatgctcggtttgctaccgggtgtgtctccatcccctggcagaatgagggctgcctgaccatggtccccagtgagaaggaagtggaacccaagcaatgctgagcaccccggtgcggaccacagagcagaccctggcgccaggaaggagcatgtgttagcgtctcgtcccacctggaattgtaataaatacatctaaataaaacatgccttgggagtgtacagacaaaaaaa

SEQ ID NO: 386994 - DNA, 333 bp, Homo sapiens
ttttttttgctcccttctcaatctaagaatgacaggaattatcagtaatgatgtagtgtagatcaggaatccccaacccccaggccatggatgggtggggtattggtccagggtctgttaggaacccggccgcacaacaggagtgagtggcaggtgagtgagcattaccacccgagctctgcctcctatcagatcagtggcgacattagattctcataggagcacgaaccctattgtgaaccgcacacacaaggccagctccttatgagactctcatgcctgatgatctgtcactgtctcccatcacccacagatgggaccatctagttgcag

SEQ ID NO: 386995 - DNA, 430 bp, Homo sapiens
gacggaagcacccctccaagcctgccaataggcctcctccagagggcacagcccagctgcctctgctgtggggtggagctctcaaggcctagtggcagccctgtaaattgttaactaaataagtagatctttgagcagaagagaggggagtgcaaaggaccctgctcctgagctggtaaggaatgtcagacgaaacaagcttttcaaaaagacacttccattcactctaaacctacaagaaagccagagtgacagggccatttatttgcagaagagctggggagggggtggaaagggaagcagagataaggagaaggagcagagaaataagtaaaggagggaaaggcagggagagagagagaaggttcgcaaagcatgcagagagagggagacagagaaggagagggggcaggctctaccccagggtcca

SEQ ID NO: 386996 - DNA, 440 bp, Homo sapiens
aaggtgctatcagccttgcaccaggccactgctgtcatgtcttatttggagtatttcagtaagcacctcactactatccttgacttcagtttctttctctccagtctaatatgtgtgaagcacggttctgactatatcccttgcaagctgaaaaagcctttgctggtttccttttcttacaaaataaagtccagcctccttaacaagggattcaaggtcctctgtaatctcctcttatctgtctttcgtccctagtctcccttcgccctacgctttcaacatgcatactgtattataggcatagctgtgttttacattttcctgcttttgtgtctttgcctggagttttctttggcctggaattttctcccatccaatttctgctcttcagaggatcccttgttcttcaaagtctagttcaggcatcacctttccctcag

SEQ ID NO: 386997 - DNA, 598 bp, Homo sapiens
ctgctggtgggaagagccgtggtaaggtgtctcctttctttcactccggagcgggggtgatgacaggagagggaccgggcaggagcgaagtgatgatggtgataatgggggtaactgctgagagcgggagagtgggggccaggaacaggaggagtgtgagcgtgagaagacagtgctcagaagccgacacccaggtgacttctctggaatctccctgctctgaaatgggtaacgtggctcctttctctgaagctccaacacttaaaggagcttcttgttttaagcttcttgtgttaagctccagatttttacaagcatctcttcagagcctggtctccaaagccatccgtccagtcagatcaagagctacttgccctgtttctccatagtcacgaactggttaatgtgaggggaaggcaagaatggtctccatcgtcacgggtttctgccttggtttgaagcaagctccagcagttacatgaacaccagttacggaatgtctacagttatgacaagacacagcagggctgacccggctcacccagcaagggaacaaaggccatccacacgtcagacccagcaattcaggtgaaggaac

SEQ ID NO: 386998 - DNA, 544 bp, Homo sapiens
ggtttttttttttacaagtgtgctagttattttcatagttttgaaatttcagtattgtttcttgttaaggaaatacttttcagtaaacttgttctgaatataattcttgtggaatacttaagttggctaacctaaatatcgaaaggttctgaacatgcgtattatgtgaacagaactgtatttaaaatttgaaagcagaaagtaagatgtattgaaggaattgtgatgtttgtaatttacaagaagcttgagcacgtgtcgggagcacagtgggaataatacaaagggtatcatcttttgtaacattaatgttaaagtttgggatatttgttcacatgaaacattgtgtttattttccttgtcttggcttttcacggtggctcatgcctgtaatcccagcactttgggaggccgaggcgggtggatcacttgaagtcaggaggctgaggcaggagaatcacttgaaccccagaggtggaggtgacagtgagccaagattgcgccattgcaccccagtctgggccacaagtgggaaacttcgtct

SEQ ID NO: 386999 - DNA, 563 bp, Homo sapiens
tttaaatgtacttatactgcaagtcacctgtaattacgtatcctgctacttgtatcctaagaaatctagaagcccactgaagaacttgcctcaatttattaaaataaaatcattatcttggagtatacactctgcattcccatattctttattctagatgtctggagaattatgaaatcatttcctgaatacttacattctattaatttagggtacattttttccaaagacagaatgtaaccagttgtatagtatttatgacaaaaacattaagaaataacagccgagcgcaatggctcacgcctgtaatcccagaactttcggaggctaaggagggcagatcacctgaggtcaggagtttgagaccggcatggctaacatggcaaaaccacatctctactaaaaatacaaaaattagccaggtgtgggggcacaggcctataaccccagctactcaagaaactgaggcacaagaattgcttgaacccggggggcagaagttgcagtgagcccagattgccccactccactccagcctgggtgacagagcaagattccatttc

SEQ ID NO: 387000 - DNA, 244 bp, Homo sapiens
gttgttgttgttgctgttgttgttatggctaccattatttcttatctggctttaaactatagatcactttattttatacttttttagtatttgcataatgatgtaaaatacctgcaggaattaacgaatcaaatgtcctcttatattgccagcttcttggcgatatactaggtttgtaagtaaactatttcaacatctaaacttttatactaacaaggagttcaatattatacctaaatttgtg

SEQ ID NO: 387001 - DNA, 132 bp, Homo sapiens
cctgggctgtgtggttctcagaatgagccacctggaaggtcgatccaagtacatgaagattggattttctggtgtccagagtaacctcttcactttgggtctctggcaggcccctattccctttatggattt

SEQ ID NO: 387002 - DNA, 533 bp, Homo sapiens
tccagttgaaaaatcattaacaaaaaagtgtaagagtgcctaaataccagaatgtagattttttaagtaatgaaagtacttgctatgaaactgtggcaaatgcttaatcgttttatataatatgttcctaatgaatttaaattattttatggaatgcattctcagtcagatattttagcacacagaacttgagtcagatgtttgtattaaacataactgccttcaggtgaaaatgtggtcagtgaattacatctcccacaatgcagaacatccgtgcttcatagattgcagaatagctacagatagtgttgaagcataatttagaattcaaatgctaccactgagaggtaggaattcacttgtgaaaaatatttgaaagaaatacagtaaaattttattaatttaggtttgaacaatttagaattgttaattattcagtgaggttgaattcagatgaagttaacagtataccttagttagtgaagtaaaaagcttcccaagcatacatgtagaagaactcaaaagggacacag

SEQ ID NO: 387003 - DNA, 960 bp, Homo sapiens
aaagcaaaaagttcccagaacgtttttgcttagattttgttctaatcaccacgtgaaggaatgagattagcaccacaagtttcatgccaataaaagagactggtgtgatcccacatgcaaaatttaatcctaagggtagtgagatcacaaacagaataaaaataagagcaatcaaccatataaatcaagtacctattgggaacagacataacattcaatttttcatttatgctaagtgaccacagtatacaaagtaataagcaggaaatttgatatgggttaaattatgcattttgttcagattttggaaattggtatgcattataagtttctcaatgtacatctttttatcccaacaccctcaaactagaatatttgtcagtggtcaagagaaaaaattttacctgaattcttgggggccggcggggagcttttacattaaaaatctactaacgcctactttttaaaaaatgagattctttctaatctttatatatgacattttctagacaatcgcacctttgggtatattaaacagctggtatcataacaaagaatccaaatgaaccttcaatatactagaagttctagtaggttaatattgttcagaagatttttacaaattaaaaactgatttccaaatatgttcaacatttacttctatttgatatctgctcaagaagtcatagaagtcttgggaaactattcgagtatcacagaggttttcaaaagcccttatggtgacatctacctaggtaaaagcctgacatgtggctttataattgttatgttacccaagggataaacttgaactggctttgaacatcctttaggtcattttctctttggataattttcatcgcatatccagcaactatagacccaaagtttgcttaaggtttgaccctagagcagaggtgggcaaactatgacctggaaaccaaatctgacttaccacct

SEQ ID NO: 387004 - DNA, 917 bp, Homo sapiens
tgtaaatatgtttggataacccagcagagccatttaacctttgggaacaaggcaactagcgtctggcagcaggaatccaaccagtgccctgagttctgaggcagagaggaggacagaagaaacaagaggctggagattgtcaaattcagtatcccagttggctcttgattcttggtgaaaccatccctcagctcctagagggagattgttagatcatgaaactaattaccatccttttcctctgctccaggctgctactaagtttaacccaggaatcacagtccgaggaaattgactgcaatgacaaggatttatttaaagctgtggatgctgctctgaagaaatataacagtcaaaaccaaagtaacaaccagtttgtattgtaccgcataactgaagccactaagacggttggctctgacacgttttattccttcaagtacgaaatcaaggagggggattgtcctgttcaaagtggcaaaacctggcaggactgtgagtacaaggatgctgcaaaagcacagtaagtgtattggccattcttgggccttctgttttctccgttgaccctgccagatttttttactgatgcagaaatgatggctactggtgagcctgtttatgagaaatgcaaataaacattccaatgtgtagaaaagtcagatgctttatatctgtgttcttgtatagacagaaaaatcatggagaagccagcagttaaacatggagaaagcctttccatgagaagggggctctagtgtccagccagaacatgtggctcagactccagagagataacaaattgacatttgggccaagccaaagagctggcgaggggagggggtgggtgcttccattgcacaatgttaagtgcaaatcttgactctgccttccattagctgtgtgatagcagggga

SEQ ID NO: 387005 - DNA, 4233 bp, Homo sapiens
tgtaaatatgtttggataacccagcagagccatttaacctttgggaacaaggcaactagcgtctggcagcaggaatccaaccagtgccctgagttctgaggcagagaggaggacagaagaaacaagaggctggagattgtcaaattcagtatcccagttggctcttgattcttggtgaaaccatccctcagctcctagagggagattgttagatcatgaaactaattaccatccttttcctctgctccaggctgctactaagtttaacccaggaatcacagtccgaggaaattgactgcaatgacaaggatttatttaaagctgtggatgctgctctgaagaaatataacagtcaaaaccaaagtaacaaccagtttgtattgtaccgcataactgaagccactaagacggttggctctgacacgttttattccttcaagtacgaaatcaaggagggggattgtcctgttcaaagtggcaaaacctggcaggactgtgagtacaaggatgctgcaaaagcagccactggagaatgcacggcaaccgtggggaagaggagcagtacgaaattctccgtggctacccagacctgccagattactccagccgagggccctgtggtgacagcccagtacgactgcctcggctgtgtgcatcctatatcaacgcagagcccagacctggagcccattctgagacacggcattcagtactttaacaacaacactcaacattcctccctcttcatgcttaatgaagtaaaacgggcccaaagacaggtggtggctggattgaactttcgaattacctactcaattgtgcaaacgaattgttccaaagagaattttctgttcttaactccagactgcaagtccctttggaatggtgataccggtgaatgtacagataatgcatacatcgatattcagctacgaattgcttccttctcacagaactgtgacatttatccagggaaggattttgtacaaccacctaccaagatttgcgtgggctgccccagagatatacccaccaacagcccagagctggaggagacactgactcacaccatcacaaagcttaatgcagagaataacgcaactttctatttcaagattgacaatgtgaaaaaagcaagagtacaggtggtggctggcaagaaatattttattgacttcgtggccagggaaaccacatgttccaaggaaagtaatgaagagttgaccgaaagctgtgagaccaaaaaacttggccaaagcctagattgcaacgctgaagtttatgtggtaccctgggagaaaaaaatttaccctactgtcaactgtcaaccactgggaatgatctcactgatgaaaaggcctccaggtttttcacctttccgatcatcacgaataggggaaataaaagaagaaacaactgtaagtccaccccacacttccatggcacctgcacaagatgaagagcgggattcaggaaaagaacaagggcatactcgtagacatgactggggccatgaaaaacaaagaaaacataatcttggccatggccataaacatgaacgtgaccaagggcatgggcaccaaagaggacatggccttggccatggacacgaacaacagcatggtcttggtcatggacataagttcaaacttgatgatgatcttgaacaccaagggggccatgtccttgaccatggacataagcataagcatggtcatggccacggaaaacataaaaataaaggcaaaaagaatggaaagcacaatggttggaaaacagagcatttggcaagctcttctgaagacagtactacaccttctgcacagacacaagagaagacagaagggccaacacccatcccttccctagccaagccaggtgtaacagttaccttttctgactttcaggactctgatctcattgcaactatgatgcctcctatatcaccagctcccacacagagtgatgacgattggatccctgatatccagatagacccaaatggcctttcatttaacccaatatcagattttccagacacgacctccccaaaatgtcctggacgcccctggaagtcagttagtgaaattaatccaaccacacaaatgaaagaatcttattatttcgatctcactgatggcctttcttaatttaagtggctatgggtatttctttcatactttattaaagtatcaatatccctctctccattgtccagatgaaaatatcctgatataatgcaccaaaaaccatgcagcttcggaacagtctaaagagaagtggtgagactcccagtggagacaccatcagtctccacggactgcataaaattgtgtgccacaattctaactcttttctgaatcttcttcccaagttttctaaactagcacagtaaacagacaaactaatgtgccgtatggcctgctgcaattggcttctctgataacaaatatgtaccttacaacatatgtcatgaatttgcatacaaagattcttgtcattcttaataaactgtggcacttggtatttgaatgtgtgtgaaaataagggaagtcaagagattaaatgctgaacttattaatggaatagaaataataaggaggctgaggctggagaattgcttgaacccgggaggcggaggttgcagtgagccgagatcgtgccactgcgctccagcctgggcatcagagcaagattctgtctcagaaaaaaagaaaaaaaaagaaataataagaaaaacttccagatttcaaagtaacaagaaagaagacaggttggccaaagggaggaaaggggggacataaattaattgactttctattcccaaaatgggctagttatatcaaataaatactcccactgccctttctgagtgagagtgtttctcataagtcaaaaatttctgtctactcattaactactctttgcaacaggctttcatatagaagtattctgtttatttttgctgagcctagattgagtaattcttagtttacagaagctccgagcttaatgataaggatgaaaagcagagggagcaatatagaagcaggcttgctaataaaactttttaaataattgacaagggaatattatggaatgtgatgcaaagtttgttccgaaattttatgaggaaattactctctagtctcactttatagtctttttgctatgactttgaagaccattgatttttgagaagcagaataataggattgcctttcattgccctatagtgcaaagaaagtatatgctttataaccaatgttgtacttttgcctagaaaaacaagatatggctttaaatagctacaatcatctttggatgtatatgtcactgctgcttcaagttattggatgcatttgaacctctgagtttgtctttcattttaaatattgtctgttcttttaaataaacaaccacagatgtcaggaaaaagtcttaccttgtcaactggttgctccactttttaaaaatgattgaatgataacatcatattaactgcgttttactatacttacagagtcacctaaggtcctgcgagtacaagggtcgacccccaaaggcaggggcagagccagcatctgagagggaggtctcttgaccaatgggcagaatcttcactccaggcacatagccccaaccacctctgccagcaaccttgagaggaaggacaagaagaaagatgggatagaatttaaatagagaagaatgccattttatcactctgcctctgggtgaaataaagatcagtcttgatgttctaactctaattcacagtggtctcctttcagccctacccattctgcagcaaattccagctggtcagagagtcagtgctgtggctctgccatggaggctcataacccaacactggaacattccctagccaaggcagaagtccttaggcgggacttccttaccaccacgggtgctaaaagaagagttagtaggtcatgcttctaccagtaatctaaggactctctccttctcttcttcctctttctccagatttccaagccttagctaagagtaatttggcttgtttagtattgttttcttatggtccagttaattaccaaaaatatttttaaaatcatctctgttaatagaatgtctaccaacttctcactatcagaaaatactcaacctccaaacaatttgaaattatctttctgatccaggtaaagaagcaaattgaaaatcaataaagtaaaaagtgacggagatttt

SEQ ID NO: 387006 - DNA, 3477 bp, Homo sapiens
tgtaaatatgtttggataacccagcagagccatttaacctttgggaacaaggcaactagcgtctggcagcaggaatccaaccagtgccctgagttctgaggcagagaggaggacagaagaaacaagaggctggagattgtcaaattcagtatcccagttggctcttgattcttggtgaaaccatccctcagctcctagagggagattgttagatcatgaaactaattaccatccttttcctctgctccaggctgctactaagtttaacccaggaatcacagtccgaggaaattgactgcaatgacaaggatttatttaaagctgtggatgctgctctgaagaaatataacagtcaaaaccaaagtaacaaccagtttgtattgtaccgcataactgaagccactaagacggttggctctgacacgttttattccttcaagtacgaaatcaaggagggggattgtcctgttcaaagtggcaaaacctggcaggactgtgagtacaaggatgctgcaaaagcagccactggagaatgcacggcaaccgtggggaagaggagcagtacgaaattctccgtggctacccagacctgccagattactccagccgagggccctgtggtgacagcccagtacgactgcctcggctgtgtgcatcctatatcaacgcagagcccagacctggagcccattctgagacacggcattcagtactttaacaacaacactcaacattcctccctcttcatgcttaatgaagtaaaacgggcccaaagacaggtggtggctggattgaactttcgaattacctactcaattgtgcaaacgaattgttccaaagagaattttctgttcttaactccagactgcaagtccctttggaatggtgataccggtgaatgtacagataatgcatacatcgatattcagctacgaattgcttccttctcacagaactgtgacatttatccagggaaggattttgtacaaccacctaccaagatttgcgtgggctgccccagagatatacccaccaacagcccagagctggaggagacactgactcacaccatcacaaagcttaatgcagagaataacgcaactttctatttcaagattgacaatgtgaaaaaagcaagagtacaggtggtggctggcaagaaatattttattgacttcgtggccagggaaaccacatgttccaaggaaagtaatgaagagttgaccgaaagctgtgagaccaaaaaacttggccaaagcctagattgcaacgctgaagtttatgtggtaccctgggagaaaaaaatttaccctactgtcaactgtcaaccactgggaatgatctcactgatgaaaaggcctccaggtttttcacctttccgatcatcacgaataggggaaataaaagaagaaacaactgtaagtccaccccacacttccatggcacctgcacaagatgaagagcgggattcaggaaaagaacaagggcatactcgtagacatgactggggccatgaaaaacaaagaaaacataatcttggccatggccataaacatgaacgtgaccaagggcatgggcaccaaagaggacatggccttggccatggacacgaacaacagcatggtcttggtcatggacataagttcaaacttgatgatgatcttgaacaccaagggggccatgtccttgaccatggacataagcataagcatggtcatggccacggaaaacataaaaataaaggcaaaaagaatggaaagcacaatggttggaaaacagagcatttggcaagctcttctgaagacagtactacaccttctgcacagacacaagagaagacagaagggccaacacccatcccttccctagccaagccaggtgtaacagttaccttttctgactttcaggactctgatctcattgcaactatgatgcctcctatatcaccagctcccacacagagtgatgacgattggatccctgatatccagatagacccaaatggcctttcatttaacccaatatcagattttccagacacgacctccccaaaatgtcctggacgcccctggaagtcagttagtgaaattaatccaaccacacaaatgaaagaatcttattatttcgatctcactgatggcctttcttaatttaagtggctatgggtatttctttcatactttattaaagtatcaatatccctctctccattgtccagatgaaaatatcctgatataatgcaccaaaaaccatgcagcttcggaacagtctaaagagaagtggtgagactcccagtggagacaccatcagtctccacggactgcataaaattgtgtgccacaattctaactcttttctgaatcttcttcccaagttttctaaactagcacagtaaacagacaaactaatgtgccgtatggcctgctgcaattggcttctctgataacaaatatgtaccttacaacatatgtcatgaatttgcatacaaagattcttgtcattcttaataaactgtggcacttggtatttgaatgtgtgtgaaaataagggaagtcaagagattaaatgctgaacttattaatggaatagaaataataaggaggctgaggctggagaattgcttgaacccgggaggcggaggttgcagtgagccgagatcgtgccactgcgctccagcctgggcatcagagcaagattctgtctcagaaaaaaagaaaaaaaaagaaataataagaaaaacttccagatttcaaagtaacaagaaagaagacaggttggccaaagggaggaaaggggggacataaattaattgactttctattcccaaaatgggctagttatatcaaataaatactcccactgccctttctgagtgagagtgtttctcataagtcaaaaatttctgtctactcattaactactctttgcaacaggctttcatatagaagtattctgtttatttttgctgagcctagattgagtaattcttagtttacagaagctccgagcttaatgataaggatgaaaagcagagggagcaatatagaagcaggcttgctaataaaactttttaaataattgacaagggaatattatggaatgtgatgcaaagtttgttccgaaattttatgaggaaattactctctagtctcactttatagtctttttgctatgactttgaagaccattgatttttgagaagcagaataataggattgcctttcattgccctatagtgcaaagaaagtatatgctttataaccaatgttgtacttttgcctagaaaaacaagatatggctttaaatagctacaatcatctttggatgtatatgtcactgctgcttcaagttattggatgcatttgaacctctgagtttgtctttcattttaaatattgtctgttcttttaaataaacaaccacagatgtcaggaaaaagtccaaaacacaaaaccacaacacaccaccaacaacatg

SEQ ID NO: 387007 - DNA, 4180 bp, Homo sapiens
tgtaaatatgtttggataacccagcagagccatttaacctttgggaacaaggcaactagcgtctggcagcaggaatccaaccagtgccctgagttctgaggcagagaggaggacagaagaaacaagaggctggagattgtcaaattcagtatcccagttggctcttgattcttggtgaaaccatccctcagctcctagagggagattgttagatcatgaaactaattaccatccttttcctctgctccaggctgctactaagtttaacccaggaatcacagtccgaggaaattgactgcaatgacaaggatttatttaaagctgtggatgctgctctgaagaaatataacagtcaaaaccaaagtaacaaccagtttgtattgtaccgcataactgaagccactaagacggttggctctgacacgttttattccttcaagtacgaaatcaaggagggggattgtcctgttcaaagtggcaaaacctggcaggactgtgagtacaaggatgctgcaaaagcagccactggagaatgcacggcaaccgtggggaagaggagcagtacgaaattctccgtggctacccagacctgccagattactccagccgagggccctgtggtgacagcccagtacgactgcctcggctgtgtgcatcctatatcaacgcagagcccagacctggagcccattctgagacacggcattcagtactttaacaacaacactcaacattcctccctcttcatgcttaatgaagtaaaacgggcccaaagacaggtggtggctggattgaactttcgaattacctactcaattgtgcaaacgaattgttccaaagagaattttctgttcttaactccagactgcaagtccctttggaatggtgataccggtgaatgtacagataatgcatacatcgatattcagctacgaattgcttccttctcacagaactgtgacatttatccagggaaggattttgtacaaccacctaccaagatttgcgtgggctgccccagagatatacccaccaacagcccagagctggaggagacactgactcacaccatcacaaagcttaatgcagagaataacgcaactttctatttcaagattgacaatgtgaaaaaagcaagagtacaggtggtggctggcaagaaatattttattgacttcgtggccagggaaaccacatgttccaaggaaagtaatgaagagttgaccgaaagctgtgagaccaaaaaacttggccaaagcctagattgcaacgctgaagtttatgtggtaccctgggagaaaaaaatttaccctactgtcaactgtcaaccactgggaatgatctcactgatgaaaaggcctccaggtttttcacctttccgatcatcacgaataggggaaataaaagaagaaacaactgtaagtccaccccacacttccatggcacctgcacaagatgaagagcgggattcaggaaaagaacaagggcatactcgtagacatgactggggccatgaaaaacaaagaaaacataatcttggccatggccataaacatgaacgtgaccaagggcatgggcaccaaagaggacatggccttggccatggacacgaacaacagcatggtcttggtcatggacataagttcaaacttgatgatgatcttgaacaccaagggggccatgtccttgaccatggacataagcataagcatggtcatggccacggaaaacataaaaataaaggcaaaaagaatggaaagcacaatggttggaaaacagagcatttggcaagctcttctgaagacagtactacaccttctgcacagacacaagagaagacagaagggccaacacccatcccttccctagccaagccaggtgtaacagttaccttttctgactttcaggactctgatctcattgcaactatgatgcctcctatatcaccagctcccacacagagtgatgacgattggatccctgatatccagatagacccaaatggcctttcatttaacccaatatcagattttccagacacgacctccccaaaatgtcctggacgcccctggaagtcagttagtgaaattaatccaaccacacaaatgaaagaatcttattatttcgatctcactgatggcctttcttaatttaagtggctatgggtatttctttcatactttattaaagtatcaatatccctctctccattgtccagatgaaaatatcctgatataatgcaccaaaaaccatgcagcttcggaacagtctaaagagaagtggtgagactcccagtggagacaccatcagtctccacggactgcataaaattgtgtgccacaattctaactcttttctgaatcttcttcccaagttttctaaactagcacagtaaacagacaaactaatgtgccgtatggcctgctgcaattggcttctctgataacaaatatgtaccttacaacatatgtcatgaatttgcatacaaagattcttgtcattcttaataaactgtggcacttggtatttgaatgtgtgtgaaaataagggaagtcaagagattaaatgctgaacttattaatggaatagaaataataaggaggctgaggctggagaattgcttgaacccgggaggcggaggttgcagtgagccgagatcgtgccactgcgctccagcctgggcatcagagcaagattctgtctcagaaaaaaagaaaaaaaaagaaataataagaaaaacttccagatttcaaagtaacaagaaagaagacaggttggccaaagggaggaaaggggggacataaattaattgactttctattcccaaaatgggctagttatatcaaataaatactcccactgccctttctgagtgagagtgtttctcataagtcaaaaatttctgtctactcattaactactctttgcaacaggctttcatatagaagtattctgtttatttttgctgagcctagattgagtaattcttagtttacagaagctccgagcttaatgataaggatgaaaagcagagggagcaatatagaagcaggcttgctaataaaactttttaaataattgacaagggaatattatggaatgtgatgcaaagtttgttccgaaattttatgaggaaattactctctagtctcactttatagtctttttgctatgactttgaagaccattgatttttgagaagcagaataataggattgcctttcattgccctatagtgcaaagaaagtatatgctttataaccaatgttgtacttttgcctagatgctgcttcaagttattggatgcatttgaacctctgagtttgtctttcattttaaatattgtctgttcttttaaataaacaaccacagatgtcaggaaaaagtcttaccttgtcaactggttgctccactttttaaaaatgattgaatgataacatcatattaactgcgttttactatacttacagagtcacctaaggtcctgcgagtacaagggtcgacccccaaaggcaggggcagagccagcatctgagagggaggtctcttgaccaatgggcagaatcttcactccaggcacatagccccaaccacctctgccagcaaccttgagaggaaggacaagaagaaagatgggatagaatttaaatagagaagaatgccattttatcactctgcctctgggtgaaataaagatcagtcttgatgttctaactctaattcacagtggtctcctttcagccctacccattctgcagcaaattccagctggtcagagagtcagtgctgtggctctgccatggaggctcataacccaacactggaacattccctagccaaggcagaagtccttaggcgggacttccttaccaccacgggtgctaaaagaagagttagtaggtcatgcttctaccagtaatctaaggactctctccttctcttcttcctctttctccagatttccaagccttagctaagagtaatttggcttgtttagtattgttttcttatggtccagttaattaccaaaaatatttttaaaatcatctctgttaatagaatgtctaccaacttctcactatcagaaaatactcaacctccaaacaatttgaaattatctttctgatccaggtaaagaagcaaattgaaaatcaataaagtaaaaagtgacggagatttt

SEQ ID NO: 387008 - DNA, 4184 bp, Homo sapiens
tgtaaatatgtttggataacccagcagagccatttaacctttgggaacaaggcaactagcgtctggcagcaggaatccaaccagtgccctgagttctgaggcagagaggaggacagaagaaacaagaggctggagattgtcaaattcagtatcccagttggctcttgattcttggtgaaaccatccctcagctcctagagggagattgttagatcatgaaactaattaccatccttttcctctgctccaggctgctactaagtttaacccaggaatcacagtccgaggaaattgactgcaatgacaaggatttatttaaagctgtggatgctgctctgaagaaatataacagtcaaaaccaaagtaacaaccagtttgtattgtaccgcataactgaagccactaagacggttggctctgacacgttttattccttcaagtacgaaatcaaggagggggattgtcctgttcaaagtggcaaaacctggcaggactgtgagtacaaggatgctgcaaaagcagccactggagaatgcacggcaaccgtggggaagaggagcagtacgaaattctccgtggctacccagacctgccagattactccagccgagggccctgtggtgacagcccagtacgactgcctcggctgtgtgcatcctatatcaacgcagagcccagacctggagcccattctgagacacggcattcagtactttaacaacaacactcaacattcctccctcttcatgcttaatgaagtaaaacgggcccaaagacaggtggtggctggattgaactttcgaattacctactcaattgtgcaaacgaattgttccaaagagaattttctgttcttaactccagactgcaagtccctttggaatggtgataccggtgaatgtacagataatgcatacatcgatattcagctacgaattgcttccttctcacagaactgtgacatttatccagggaaggattttgtacaaccacctaccaagatttgcgtgggctgccccagagatatacccaccaacagcccagagctggaggagacactgactcacaccatcacaaagcttaatgcagagaataacgcaactttctatttcaagattgacaatgtgaaaaaagcaagagtacaggtggtggctggcaagaaatattttattgacttcgtggccagggaaaccacatgttccaaggaaagtaatgaagagttgaccgaaagctgtgagaccaaaaaacttggccaaagcctagattgcaacgctgaagtttatgtggtaccctgggagaaaaaaatttaccctactgtcaactgtcaaccactgggaatgatctcactgatgaaaaggcctccaggtttttcacctttccgatcatcacgaataggggaaataaaagaagaaacaactgtaagtccaccccacacttccatggcacctgcacaagatgaagagcgggattcaggaaaagaacaagggcatactcgtagacatgactggggccatgaaaaacaaagaaaacataatcttggccatggccataaacatgaacgtgaccaagggcatgggcaccaaagaggacatggccttggccatggacacgaacaacagcatggtcttggtcatggacataagttcaaacttgatgatgatcttgaacaccaagggggccatgtccttgaccatggacataagcataagcatggtcatggccacggaaaacataaaaataaaggcaaaaagaatggaaagcacaatggttggaaaacagagcatttggcaagctcttctgaagacagtactacaccttctgcacagacacaagagaagacagaagggccaacacccatcccttccctagccaagccaggtgtaacagttaccttttctgactttcaggactctgatctcattgcaactatgatgcctcctatatcaccagctcccacacagagtgatgacgattggatccctgatatccagatagacccaaatggcctttcatttaacccaatatcagattttccagacacgacctccccaaaaaaatgaaagaatcttattatttcgatctcactgatggcctttcttaatttaagtggctatgggtatttctttcatactttattaaagtatcaatatccctctctccattgtccagatgaaaatatcctgatataatgcaccaaaaaccatgcagcttcggaacagtctaaagagaagtggtgagactcccagtggagacaccatcagtctccacggactgcataaaattgtgtgccacaattctaactcttttctgaatcttcttcccaagttttctaaactagcacagtaaacagacaaactaatgtgccgtatggcctgctgcaattggcttctctgataacaaatatgtaccttacaacatatgtcatgaatttgcatacaaagattcttgtcattcttaataaactgtggcacttggtatttgaatgtgtgtgaaaataagggaagtcaagagattaaatgctgaacttattaatggaatagaaataataaggaggctgaggctggagaattgcttgaacccgggaggcggaggttgcagtgagccgagatcgtgccactgcgctccagcctgggcatcagagcaagattctgtctcagaaaaaaagaaaaaaaaagaaataataagaaaaacttccagatttcaaagtaacaagaaagaagacaggttggccaaagggaggaaaggggggacataaattaattgactttctattcccaaaatgggctagttatatcaaataaatactcccactgccctttctgagtgagagtgtttctcataagtcaaaaatttctgtctactcattaactactctttgcaacaggctttcatatagaagtattctgtttatttttgctgagcctagattgagtaattcttagtttacagaagctccgagcttaatgataaggatgaaaagcagagggagcaatatagaagcaggcttgctaataaaactttttaaataattgacaagggaatattatggaatgtgatgcaaagtttgttccgaaattttatgaggaaattactctctagtctcactttatagtctttttgctatgactttgaagaccattgatttttgagaagcagaataataggattgcctttcattgccctatagtgcaaagaaagtatatgctttataaccaatgttgtacttttgcctagaaaaacaagatatggctttaaatagctacaatcatctttggatgtatatgtcactgctgcttcaagttattggatgcatttgaacctctgagtttgtctttcattttaaatattgtctgttcttttaaataaacaaccacagatgtcaggaaaaagtcttaccttgtcaactggttgctccactttttaaaaatgattgaatgataacatcatattaactgcgttttactatacttacagagtcacctaaggtcctgcgagtacaagggtcgacccccaaaggcaggggcagagccagcatctgagagggaggtctcttgaccaatgggcagaatcttcactccaggcacatagccccaaccacctctgccagcaaccttgagaggaaggacaagaagaaagatgggatagaatttaaatagagaagaatgccattttatcactctgcctctgggtgaaataaagatcagtcttgatgttctaactctaattcacagtggtctcctttcagccctacccattctgcagcaaattccagctggtcagagagtcagtgctgtggctctgccatggaggctcataacccaacactggaacattccctagccaaggcagaagtccttaggcgggacttccttaccaccacgggtgctaaaagaagagttagtaggtcatgcttctaccagtaatctaaggactctctccttctcttcttcctctttctccagatttccaagccttagctaagagtaatttggcttgtttagtattgttttcttatggtccagttaattaccaaaaatatttttaaaatcatctctgttaatagaatgtctaccaacttctcactatcagaaaatactcaacctccaaacaatttgaaattatctttctgatccaggtaaagaagcaaattgaaaatcaataaagtaaaaagtgacggagatttt

SEQ ID NO: 387009 - DNA, 4179 bp, Homo sapiens
tgtaaatatgtttggataacccagcagagccatttaacctttgggaacaaggcaactagcgtctggcagcaggaatccaaccagtgccctgagttctgaggcagagaggaggacagaagaaacaagaggctggagattgtcaaattcagtatcccagttggctcttgattcttggtgaaaccatccctcagctcctagagggagattgttagatcatgaaactaattaccatccttttcctctgctccaggctgctactaagtttaacccaggaatcacagtccgaggaaattgactgcaatgacaaggatttatttaaagctgtggatgctgctctgaagaaatataacagtcaaaaccaaagtaacaaccagtttgtattgtaccgcataactgaagccactaagacggttggctctgacacgttttattccttcaagtacgaaatcaaggagggggattgtcctgttcaaagtggcaaaacctggcaggactgtgagtacaaggatgctgcaaaagcagccactggagaatgcacggcaaccgtggggaagaggagcagtacgaaattctccgtggctacccagacctgccagattactccagccgagggccctgtggtgacagcccagtacgactgcctcggctgtgtgcatcctatatcaacgcagagcccagacctggagcccattctgagacacggcattcagtactttaacaacaacactcaacattcctccctcttcatgcttaatgaatcaattgtgcaaacgaattgttccaaagagaattttctgttcttaactccagactgcaagtccctttggaatggtgataccggtgaatgtacagataatgcatacatcgatattcagctacgaattgcttccttctcacagaactgtgacatttatccagggaaggattttgtacaaccacctaccaagatttgcgtgggctgccccagagatatacccaccaacagcccagagctggaggagacactgactcacaccatcacaaagcttaatgcagagaataacgcaactttctatttcaagattgacaatgtgaaaaaagcaagagtacaggtggtggctggcaagaaatattttattgacttcgtggccagggaaaccacatgttccaaggaaagtaatgaagagttgaccgaaagctgtgagaccaaaaaacttggccaaagcctagattgcaacgctgaagtttatgtggtaccctgggagaaaaaaatttaccctactgtcaactgtcaaccactgggaatgatctcactgatgaaaaggcctccaggtttttcacctttccgatcatcacgaataggggaaataaaagaagaaacaactgtaagtccaccccacacttccatggcacctgcacaagatgaagagcgggattcaggaaaagaacaagggcatactcgtagacatgactggggccatgaaaaacaaagaaaacataatcttggccatggccataaacatgaacgtgaccaagggcatgggcaccaaagaggacatggccttggccatggacacgaacaacagcatggtcttggtcatggacataagttcaaacttgatgatgatcttgaacaccaagggggccatgtccttgaccatggacataagcataagcatggtcatggccacggaaaacataaaaataaaggcaaaaagaatggaaagcacaatggttggaaaacagagcatttggcaagctcttctgaagacagtactacaccttctgcacagacacaagagaagacagaagggccaacacccatcccttccctagccaagccaggtgtaacagttaccttttctgactttcaggactctgatctcattgcaactatgatgcctcctatatcaccagctcccacacagagtgatgacgattggatccctgatatccagatagacccaaatggcctttcatttaacccaatatcagattttccagacacgacctccccaaaatgtcctggacgcccctggaagtcagttagtgaaattaatccaaccacacaaatgaaagaatcttattatttcgatctcactgatggcctttcttaatttaagtggctatgggtatttctttcatactttattaaagtatcaatatccctctctccattgtccagatgaaaatatcctgatataatgcaccaaaaaccatgcagcttcggaacagtctaaagagaagtggtgagactcccagtggagacaccatcagtctccacggactgcataaaattgtgtgccacaattctaactcttttctgaatcttcttcccaagttttctaaactagcacagtaaacagacaaactaatgtgccgtatggcctgctgcaattggcttctctgataacaaatatgtaccttacaacatatgtcatgaatttgcatacaaagattcttgtcattcttaataaactgtggcacttggtatttgaatgtgtgtgaaaataagggaagtcaagagattaaatgctgaacttattaatggaatagaaataataaggaggctgaggctggagaattgcttgaacccgggaggcggaggttgcagtgagccgagatcgtgccactgcgctccagcctgggcatcagagcaagattctgtctcagaaaaaaagaaaaaaaaagaaataataagaaaaacttccagatttcaaagtaacaagaaagaagacaggttggccaaagggaggaaaggggggacataaattaattgactttctattcccaaaatgggctagttatatcaaataaatactcccactgccctttctgagtgagagtgtttctcataagtcaaaaatttctgtctactcattaactactctttgcaacaggctttcatatagaagtattctgtttatttttgctgagcctagattgagtaattcttagtttacagaagctccgagcttaatgataaggatgaaaagcagagggagcaatatagaagcaggcttgctaataaaactttttaaataattgacaagggaatattatggaatgtgatgcaaagtttgttccgaaattttatgaggaaattactctctagtctcactttatagtctttttgctatgactttgaagaccattgatttttgagaagcagaataataggattgcctttcattgccctatagtgcaaagaaagtatatgctttataaccaatgttgtacttttgcctagaaaaacaagatatggctttaaatagctacaatcatctttggatgtatatgtcactgctgcttcaagttattggatgcatttgaacctctgagtttgtctttcattttaaatattgtctgttcttttaaataaacaaccacagatgtcaggaaaaagtcttaccttgtcaactggttgctccactttttaaaaatgattgaatgataacatcatattaactgcgttttactatacttacagagtcacctaaggtcctgcgagtacaagggtcgacccccaaaggcaggggcagagccagcatctgagagggaggtctcttgaccaatgggcagaatcttcactccaggcacatagccccaaccacctctgccagcaaccttgagaggaaggacaagaagaaagatgggatagaatttaaatagagaagaatgccattttatcactctgcctctgggtgaaataaagatcagtcttgatgttctaactctaattcacagtggtctcctttcagccctacccattctgcagcaaattccagctggtcagagagtcagtgctgtggctctgccatggaggctcataacccaacactggaacattccctagccaaggcagaagtccttaggcgggacttccttaccaccacgggtgctaaaagaagagttagtaggtcatgcttctaccagtaatctaaggactctctccttctcttcttcctctttctccagatttccaagccttagctaagagtaatttggcttgtttagtattgttttcttatggtccagttaattaccaaaaatatttttaaaatcatctctgttaatagaatgtctaccaacttctcactatcagaaaatactcaacctccaaacaatttgaaattatctttctgatccaggtaaagaagcaaattgaaaatcaataaagtaaaaagtgacggagatttt

SEQ ID NO: 387010 - DNA, 1554 bp, Homo sapiens
tgtaaatatgtttggataacccagcagagccatttaacctttgggaacaaggcaactagcgtctggcagcaggaatccaaccagtgccctgagttctgaggcagagaggaggacagaagaaacaagaggctggagattgtcaaattcagtatcccagttggctcttgattcttggtgaaaccatccctcagctcctagagggagattgttagatcatgaaactaattaccatccttttcctctgctccaggctgctactaagtttaacccaggaatcacagtccgaggaaattgactgcaatgacaaggatttatttaaagctgtggatgctgctctgaagaaatataacagtcaaaaccaaagtaacaaccagtttgtattgtaccgcataactgaagccactaagacggttggctctgacacgttttattccttcaagtacgaaatcaaggagggggattgtcctgttcaaagtggcaaaacctggcaggactgtgagtacaaggatgctgcaaaagcagccactggagaatgcacggcaaccgtggggaagaggagcagtacgaaattctccgtggctacccagacctgccagattactccagccgagggccctgtggtgacagcccagtacgactgcctcggctgtgtgcatcctatatcaacgcagagcccagacctggagcccattctgagacacggcattcagtactttaacaacaacactcaacattcctccctcttcatgcttaatgaagtaaaacgggcccaaagacaggtggtggctggattgaactttcgaattacctactcaattgtgcaaacgaattgttccaaagagaattttctgttcttaactccagactgcaagtccctttggaatggtgataccggtgaatgtacagataatgcatacatcgatattcagctacgaattgcttccttctcacagaactgtgacatttatccagggaaggattttgtacaaccacctaccaagatttgcgtgggctgccccagagatatacccaccaacagcccagagctggaggagacactgactcacaccatcacaaagcttaatgcagagaataacgcaactttctatttcaagattgacaatgtgaaaaaagcaagagtacaggtggtggctggcaagaaatattttattgacttcgtggccagggaaaccacatgttccaaggaaagtaatgaagagttgaccgaaagctgtgagaccaaaaaacttggccaaagcctagattgcaacgctgaagtttatgtggtaccctgggagaaaaaaatttaccctactgtcaactgtcaaccactgggaatggtatgattctaattacagtcagcgtggggtcagttctgctcattctgaaaatccatatttgggggctgaaaatgaaccattactgaaatgaattggggagctatcttttttaaatgggaagtaactctcacacttctgtgctgatctctgtttaatggctagaaagaagagtaacaatcctcctgatcacttctcacacattgtcagtgtctca

SEQ ID NO: 387011 - DNA, 4189 bp, Homo sapiens
tgtaaatatgtttggataacccagcagagccatttaacctttgggaacaaggcaactagcgtctggcagcaggaatccaaccagtgccctgagttctgaggcagagaggaggacagaagaaacaagaggctggagattgtcaaattcagtatcccagttggctcttgattcttggtgaaaccatccctcagctcctagagggagattgttagatcatgaaactaattaccatccttttcctctgctccaggctgctactaagtttaacccaggaatcacagtccgaggaaattgactgcaatgacaaggatttatttaaagctgtggatgctgctctgaagaaatataacagtcaaaaccaaagtaacaaccagtttgtattgtaccgcataactgaagccactaagacggttggctctgacacgttttattccttcaagtacgaaatcaaggagggggattgtcctgttcaaagtggcaaaacctggcaggactgtgagtacaaggatgctgcaaaagcagaaattctccgtggctacccagacctgccagattactccagccgagggccctgtggtgacagcccagtacgactgcctcggctgtgtgcatcctatatcaacgcagagcccagacctggagcccattctgagacacggcattcagtactttaacaacaacactcaacattcctccctcttcatgcttaatgaagtaaaacgggcccaaagacaggtggtggctggattgaactttcgaattacctactcaattgtgcaaacgaattgttccaaagagaattttctgttcttaactccagactgcaagtccctttggaatggtgataccggtgaatgtacagataatgcatacatcgatattcagctacgaattgcttccttctcacagaactgtgacatttatccagggaaggattttgtacaaccacctaccaagatttgcgtgggctgccccagagatatacccaccaacagcccagagctggaggagacactgactcacaccatcacaaagcttaatgcagagaataacgcaactttctatttcaagattgacaatgtgaaaaaagcaagagtacaggtggtggctggcaagaaatattttattgacttcgtggccagggaaaccacatgttccaaggaaagtaatgaagagttgaccgaaagctgtgagaccaaaaaacttggccaaagcctagattgcaacgctgaagtttatgtggtaccctgggagaaaaaaatttaccctactgtcaactgtcaaccactgggaatgatctcactgatgaaaaggcctccaggtttttcacctttccgatcatcacgaataggggaaataaaagaagaaacaactgtaagtccaccccacacttccatggcacctgcacaagatgaagagcgggattcaggaaaagaacaagggcatactcgtagacatgactggggccatgaaaaacaaagaaaacataatcttggccatggccataaacatgaacgtgaccaagggcatgggcaccaaagaggacatggccttggccatggacacgaacaacagcatggtcttggtcatggacataagttcaaacttgatgatgatcttgaacaccaagggggccatgtccttgaccatggacataagcataagcatggtcatggccacggaaaacataaaaataaaggcaaaaagaatggaaagcacaatggttggaaaacagagcatttggcaagctcttctgaagacagtactacaccttctgcacagacacaagagaagacagaagggccaacacccatcccttccctagccaagccaggtgtaacagttaccttttctgactttcaggactctgatctcattgcaactatgatgcctcctatatcaccagctcccacacagagtgatgacgattggatccctgatatccagatagacccaaatggcctttcatttaacccaatatcagattttccagacacgacctccccaaaatgtcctggacgcccctggaagtcagttagtgaaattaatccaaccacacaaatgaaagaatcttattatttcgatctcactgatggcctttcttaatttaagtggctatgggtatttctttcatactttattaaagtatcaatatccctctctccattgtccagatgaaaatatcctgatataatgcaccaaaaaccatgcagcttcggaacagtctaaagagaagtggtgagactcccagtggagacaccatcagtctccacggactgcataaaattgtgtgccacaattctaactcttttctgaatcttcttcccaagttttctaaactagcacagtaaacagacaaactaatgtgccgtatggcctgctgcaattggcttctctgataacaaatatgtaccttacaacatatgtcatgaatttgcatacaaagattcttgtcattcttaataaactgtggcacttggtatttgaatgtgtgtgaaaataagggaagtcaagagattaaatgctgaacttattaatggaatagaaataataaggaggctgaggctggagaattgcttgaacccgggaggcggaggttgcagtgagccgagatcgtgccactgcgctccagcctgggcatcagagcaagattctgtctcagaaaaaaagaaaaaaaaagaaataataagaaaaacttccagatttcaaagtaacaagaaagaagacaggttggccaaagggaggaaaggggggacataaattaattgactttctattcccaaaatgggctagttatatcaaataaatactcccactgccctttctgagtgagagtgtttctcataagtcaaaaatttctgtctactcattaactactctttgcaacaggctttcatatagaagtattctgtttatttttgctgagcctagattgagtaattcttagtttacagaagctccgagcttaatgataaggatgaaaagcagagggagcaatatagaagcaggcttgctaataaaactttttaaataattgacaagggaatattatggaatgtgatgcaaagtttgttccgaaattttatgaggaaattactctctagtctcactttatagtctttttgctatgactttgaagaccattgatttttgagaagcagaataataggattgcctttcattgccctatagtgcaaagaaagtatatgctttataaccaatgttgtacttttgcctagaaaaacaagatatggctttaaatagctacaatcatctttggatgtatatgtcactgctgcttcaagttattggatgcatttgaacctctgagtttgtctttcattttaaatattgtctgttcttttaaataaacaaccacagatgtcaggaaaaagtcttaccttgtcaactggttgctccactttttaaaaatgattgaatgataacatcatattaactgcgttttactatacttacagagtcacctaaggtcctgcgagtacaagggtcgacccccaaaggcaggggcagagccagcatctgagagggaggtctcttgaccaatgggcagaatcttcactccaggcacatagccccaaccacctctgccagcaaccttgagaggaaggacaagaagaaagatgggatagaatttaaatagagaagaatgccattttatcactctgcctctgggtgaaataaagatcagtcttgatgttctaactctaattcacagtggtctcctttcagccctacccattctgcagcaaattccagctggtcagagagtcagtgctgtggctctgccatggaggctcataacccaacactggaacattccctagccaaggcagaagtccttaggcgggacttccttaccaccacgggtgctaaaagaagagttagtaggtcatgcttctaccagtaatctaaggactctctccttctcttcttcctctttctccagatttccaagccttagctaagagtaatttggcttgtttagtattgttttcttatggtccagttaattaccaaaaatatttttaaaatcatctctgttaatagaatgtctaccaacttctcactatcagaaaatactcaacctccaaacaatttgaaattatctttctgatccaggtaaagaagcaaattgaaaatcaataaagtaaaaagtgacggagatttt

SEQ ID NO: 387012 - DNA, 3121 bp, Homo sapiens
attttatggtattattaacaacaataattaatgtccacaaattttaagatcaatcaaaagacaaaaaaaattattcatcctttctggaatgttaatatagcatttaaaatctggcaaacacctcccccattgtaaactaagatagcattgccagatctcagtgtttttttctatcatcaatagcatgatttttgcagtaatacattcatcttaatattttctgtttagatctcactgatgaaaaggcctccaggtttttcacctttccgatcatcacgaataggggaaataaaagaagaaacaactgtaagtccaccccacacttccatggcacctgcacaagatgaagagcgggattcaggaaaagaacaagggcatactcgtagacatgactggggccatgaaaaacaaagaaaacataatcttggccatggccataaacatgaacgtgaccaagggcatgggcaccaaagaggacatggccttggccatggacacgaacaacagcatggtcttggtcatggacataagttcaaacttgatgatgatcttgaacaccaagggggccatgtccttgaccatggacataagcataagcatggtcatggccacggaaaacataaaaataaaggcaaaaagaatggaaagcacaatggttggaaaacagagcatttggcaagctcttctgaagacagtactacaccttctgcacagacacaagagaagacagaagggccaacacccatcccttccctagccaagccaggtgtaacagttaccttttctgactttcaggactctgatctcattgcaactatgatgcctcctatatcaccagctcccacacagagtgatgacgattggatccctgatatccagatagacccaaatggcctttcatttaacccaatatcagattttccagacacgacctccccaaaatgtcctggacgcccctggaagtcagttagtgaaattaatccaaccacacaaatgaaagaatcttattatttcgatctcactgatggcctttcttaatttaagtggctatgggtatttctttcatactttattaaagtatcaatatccctctctccattgtccagatgaaaatatcctgatataatgcaccaaaaaccatgcagcttcggaacagtctaaagagaagtggtgagactcccagtggagacaccatcagtctccacggactgcataaaattgtgtgccacaattctaactcttttctgaatcttcttcccaagttttctaaactagcacagtaaacagacaaactaatgtgccgtatggcctgctgcaattggcttctctgataacaaatatgtaccttacaacatatgtcatgaatttgcatacaaagattcttgtcattcttaataaactgtggcacttggtatttgaatgtgtgtgaaaataagggaagtcaagagattaaatgctgaacttattaatggaatagaaataataaggaggctgaggctggagaattgcttgaacccgggaggcggaggttgcagtgagccgagatcgtgccactgcgctccagcctgggcatcagagcaagattctgtctcagaaaaaaagaaaaaaaaagaaataataagaaaaacttccagatttcaaagtaacaagaaagaagacaggttggccaaagggaggaaaggggggacataaattaattgactttctattcccaaaatgggctagttatatcaaataaatactcccactgccctttctgagtgagagtgtttctcataagtcaaaaatttctgtctactcattaactactctttgcaacaggctttcatatagaagtattctgtttatttttgctgagcctagattgagtaattcttagtttacagaagctccgagcttaatgataaggatgaaaagcagagggagcaatatagaagcaggcttgctaataaaactttttaaataattgacaagggaatattatggaatgtgatgcaaagtttgttccgaaattttatgaggaaattactctctagtctcactttatagtctttttgctatgactttgaagaccattgatttttgagaagcagaataataggattgcctttcattgccctatagtgcaaagaaagtatatgctttataaccaatgttgtacttttgcctagaaaaacaagatatggctttaaatagctacaatcatctttggatgtatatgtcactgctgcttcaagttattggatgcatttgaacctctgagtttgtctttcattttaaatattgtctgttcttttaaataaacaaccacagatgtcaggaaaaagtcttaccttgtcaactggttgctccactttttaaaaatgattgaatgataacatcatattaactgcgttttactatacttacagagtcacctaaggtcctgcgagtacaagggtcgacccccaaaggcaggggcagagccagcatctgagagggaggtctcttgaccaatgggcagaatcttcactccaggcacatagccccaaccacctctgccagcaaccttgagaggaaggacaagaagaaagatgggatagaatttaaatagagaagaatgccattttatcactctgcctctgggtgaaataaagatcagtcttgatgttctaactctaattcacagtggtctcctttcagccctacccattctgcagcaaattccagctggtcagagagtcagtgctgtggctctgccatggaggctcataacccaacactggaacattccctagccaaggcagaagtccttaggcgggacttccttaccaccacgggtgctaaaagaagagttagtaggtcatgcttctaccagtaatctaaggactctctccttctcttcttcctctttctccagatttccaagccttagctaagagtaatttggcttgtttagtattgttttcttatggtccagttaattaccaaaaatatttttaaaatcatctctgttaatagaatgtctaccaacttctcactatcagaaaatactcaacctccaaacaatttgaaattatctttctgatccaggtaaagaagcaaattgaaaatcaataaagtaaaaagtgacggagatttt

SEQ ID NO: 387013 - DNA, 2128 bp, Homo sapiens
tgtaaatatgtttggataacccagcagagccatttaacctttgggaacaaggcaactagcgtctggcagcaggaatccaaccagtgccctgagttctgaggcagagaggaggacagaagaaacaagaggctggagattgtcaaattcagtatcccagttggctcttgattcttggtgaaaccatccctcagctcctagagggagattgttagatcatgaaactaattaccatccttttcctctgctccaggctgctactaagtttaacccaggaatcacagtccgaggaaattgactgcaatgacaaggatttatttaaagctgtggatgctgctctgaagaaatataacagtcaaaaccaaagtaacaaccagtttgtattgtaccgcataactgaagccactaagacggttggctctgacacgttttattccttcaagtacgaaatcaaggagggggattgtcctgttcaaagtggcaaaacctggcaggactgtgagtacaaggatgctgcaaaagcagccactggagaatgcacggcaaccgtggggaagaggagcagtacgaaattctccgtggctacccagacctgccagattactccagccgagggccctgtggtgacagcccagtacgactgcctcggctgtgtgcatcctatatcaacgcagagcccagacctggagcccattctgagacacggcattcagtactttaacaacaacactcaacattcctccctcttcatgcttaatgaagtaaaacgggcccaaagacaggtggtggctggattgaactttcgaattacctactcaattgtgcaaacgaattgttccaaagagaattttctgttcttaactccagactgcaagtccctttggaatggtgataccggtgaatgtacagataatgcatacatcgatattcagctacgaattgcttccttctcacagaactgtgacatttatccagggaaggattttgtacaaccacctaccaagatttgcgtgggctgccccagagatatacccaccaacagcccagagctggaggagacactgactcacaccatcacaaagcttaatgcagagaataacgcaactttctatttcaagattgacaatgtgaaaaaagcaagagtacaggtggtggctggcaagaaatattttattgacttcgtggccagggaaaccacatgttccaaggaaagtaatgaagagttgaccgaaagctgtgagaccaaaaaacttggccaaagcctagattgcaacgctgaagtttatgtggtaccctgggagaaaaaaatttaccctactgtcaactgtcaaccactgggaatgatctcactgatgaaaaggcctccaggtttttcacctttccgatcatcacgaataggggaaataaaagaagaaacaactagtcacctaaggtcctgcgagtacaagggtcgacccccaaaggcaggggcagagccagcatctgagagggaggtctcttgaccaatgggcagaatcttcactccaggcacatagccccaaccacctctgccagcaaccttgagaggaaggacaagaagaaagatgggatagaatttaaatagagaagaatgccattttatcactctgcctctgggtgaaataaagatcagtcttgatgttctaactctaattcacagtggtctcctttcagccctacccattctgcagcaaattccagctggtcagagagtcagtgctgtggctctgccatggaggctcataacccaacactggaacattccctagccaaggcagaagtccttaggcgggacttccttaccaccacgggtgctaaaagaagagttagtaggtcatgcttctaccagtaatctaaggactctctccttctcttcttcctctttctccagatttccaagccttagctaagagtaatttggcttgtttagtattgttttcttatggtccagttaattaccaaaaatatttttaaaatcatctctgttaatagaatgtctaccaacttctcactatcagaaaatactcaacctccaaacaatttgaaattatctttctgatccaggtaaagaagcaaattgaaaatcaataaagtaaaaagtgacggagatttt

SEQ ID NO: 387014 - DNA, 4179 bp, Homo sapiens
tgtaaatatgtttggataacccagcagagccatttaacctttgggaacaaggcaactagcgtctggcagcaggaatccaaccagtgccctgagttctgaggcagagaggaggacagaagaaacaagaggctggagattgtcaaattcagtatcccagttggctcttgattcttggtgaaaccatccctcagctcctagagggagattgttagatcatgaaactaattaccatccttttcctctgctccaggctgctactaagtttaacccaggaatcacagtccgaggaaattgactgcaatgacaaggatttatttaaagctgtggatgctgctctgaagaaatataacagtcaaaaccaaagtaacaaccagtttgtattgtaccgcataactgaagccactaagacggttggctctgacacgttttattccttcaagtacgaaatcaaggagggggattgtcctgttcaaagtggcaaaacctggcaggactgtgagtacaaggatgctgcaaaagcagccactggagaatgcacggcaaccgtggggaagaggagcagtacgaaattctccgtggctacccagacctgccagattactccagccgagggccctgtggtgacagcccagtacgactgcctcggctgtgtgcatcctatatcaacgcagagcccagacctggagcccattctgagacacggcattcagtactttaacaacaacactcaacattcctccctcttcatgcttaatgaagtaaaacgggcccaaagacaggtggtggctggattgaactttcgaattacctactcaattgtgcaaacgaattgttccaaagagaattttctgttcttaactccagactgcaagtccctttggaatggtgataccggtgaatgtacagataatgcatacatcgatattcagctacgaattgcttccttctcacagaactgtgacatttatccagggaaggattttgtacaaccacctaccaagatttgcgtgggctgccccagagatatacccaccaacagcccagagctggaggagacactgactcacaccatcacaaagcttaatgcagagaataacgcaactttctatttcaagattgacaatgtgaaaaaagcaagagtacaggtggtggctggcaagaaatattttattgacttcgtggccagggaaaccacatgttccaaggaaagtaatgaagagttgaccgaaagctgtgagaccaaaaaacttggccaaagcctagattgcaacgctgaagtttatgtggtaccctgggagaaaaaaatttaccctactgtcaactgtcaaccactgggaatgatctcactgatgaaaaggcctccaggtttttcacctttccgatcatcacgaataggggaaataaaagaagaaacaactgtaagtccaccccacacttccatggcacctgcacaagatgaagagcgggattcaggaaaagaacaagggcatactcgtagacatgactggggccatgaaaaacaaagaaaacataatcttggccatggccataaacatgaacgtgaccaagggcatgggcaccaaagaggacatggccttggccatggacacgaacaacagcatggtcttggtcatggacataagttcaaacttgatgatgatcttgaacaccaagggggccatgtccttgaccatggacataagcataagcatggtcatggccacggaaaacataaaaataaaggcaaaaagaatggaaagcacaatggttggacacaagagaagacagaagggccaacacccatcccttccctagccaagccaggtgtaacagttaccttttctgactttcaggactctgatctcattgcaactatgatgcctcctatatcaccagctcccacacagagtgatgacgattggatccctgatatccagatagacccaaatggcctttcatttaacccaatatcagattttccagacacgacctccccaaaatgtcctggacgcccctggaagtcagttagtgaaattaatccaaccacacaaatgaaagaatcttattatttcgatctcactgatggcctttcttaatttaagtggctatgggtatttctttcatactttattaaagtatcaatatccctctctccattgtccagatgaaaatatcctgatataatgcaccaaaaaccatgcagcttcggaacagtctaaagagaagtggtgagactcccagtggagacaccatcagtctccacggactgcataaaattgtgtgccacaattctaactcttttctgaatcttcttcccaagttttctaaactagcacagtaaacagacaaactaatgtgccgtatggcctgctgcaattggcttctctgataacaaatatgtaccttacaacatatgtcatgaatttgcatacaaagattcttgtcattcttaataaactgtggcacttggtatttgaatgtgtgtgaaaataagggaagtcaagagattaaatgctgaacttattaatggaatagaaataataaggaggctgaggctggagaattgcttgaacccgggaggcggaggttgcagtgagccgagatcgtgccactgcgctccagcctgggcatcagagcaagattctgtctcagaaaaaaagaaaaaaaaagaaataataagaaaaacttccagatttcaaagtaacaagaaagaagacaggttggccaaagggaggaaaggggggacataaattaattgactttctattcccaaaatgggctagttatatcaaataaatactcccactgccctttctgagtgagagtgtttctcataagtcaaaaatttctgtctactcattaactactctttgcaacaggctttcatatagaagtattctgtttatttttgctgagcctagattgagtaattcttagtttacagaagctccgagcttaatgataaggatgaaaagcagagggagcaatatagaagcaggcttgctaataaaactttttaaataattgacaagggaatattatggaatgtgatgcaaagtttgttccgaaattttatgaggaaattactctctagtctcactttatagtctttttgctatgactttgaagaccattgatttttgagaagcagaataataggattgcctttcattgccctatagtgcaaagaaagtatatgctttataaccaatgttgtacttttgcctagaaaaacaagatatggctttaaatagctacaatcatctttggatgtatatgtcactgctgcttcaagttattggatgcatttgaacctctgagtttgtctttcattttaaatattgtctgttcttttaaataaacaaccacagatgtcaggaaaaagtcttaccttgtcaactggttgctccactttttaaaaatgattgaatgataacatcatattaactgcgttttactatacttacagagtcacctaaggtcctgcgagtacaagggtcgacccccaaaggcaggggcagagccagcatctgagagggaggtctcttgaccaatgggcagaatcttcactccaggcacatagccccaaccacctctgccagcaaccttgagaggaaggacaagaagaaagatgggatagaatttaaatagagaagaatgccattttatcactctgcctctgggtgaaataaagatcagtcttgatgttctaactctaattcacagtggtctcctttcagccctacccattctgcagcaaattccagctggtcagagagtcagtgctgtggctctgccatggaggctcataacccaacactggaacattccctagccaaggcagaagtccttaggcgggacttccttaccaccacgggtgctaaaagaagagttagtaggtcatgcttctaccagtaatctaaggactctctccttctcttcttcctctttctccagatttccaagccttagctaagagtaatttggcttgtttagtattgttttcttatggtccagttaattaccaaaaatatttttaaaatcatctctgttaatagaatgtctaccaacttctcactatcagaaaatactcaacctccaaacaatttgaaattatctttctgatccaggtaaagaagcaaattgaaaatcaataaagtaaaaagtgacggagatttt

SEQ ID NO: 387015 - DNA, 4179 bp, Homo sapiens
tgtaaatatgtttggataacccagcagagccatttaacctttgggaacaaggcaactagcgtctggcagcaggaatccaaccagtgccctgagttctgaggcagagaggaggacagaagaaacaagaggctggagattgtcaaattcagtatcccagttggctcttgattcttggtgaaaccatccctcagctcctagagggagattgttagatcatgaaactaattaccatccttttcctctgctccaggctgctactaagtttaacccaggaatcacagtccgaggaaattgactgcaatgacaaggatttatttaaagctgtggatgctgctctgaagaaatataacagtcaaaaccaaagtaacaaccagtttgtattgtaccgcataactgaagccactaagacggttggctctgacacgttttattccttcaagtacgaaatcaaggagggggattgtcctgttcaaagtggcaaaacctggcaggactgtgagtacaaggatgctgcaaaagcagccactggagaatgcacggcaaccgtggggaagaggagcagtacgaaattctccgtggctacccagacctgccagattactccagccgagggccctgtggtgacagcccagtacgactgcctcggctgtgtgcatcctatatcaacgcagagcccagacctggagcccattctgagacacggcattcagtactttaacaacaacactcaacattcctccctcttcatgcttaatgaagtaaaacgggcccaaagacaggtggtggctggattgaactttcgaattacctactcaattgtgcaaacgaattgttccaaagagaattttctgttcttaactccagactgcaagtccctttggaatggtgataccggtgaatgtacagataatgcatacatcgatattcagctacgaattgcttccttctcacagaactgtgacatttatccagggaaggattttgtacaaccacctaccaagatttgcgtgggctgccccagagatatacccaccaacagcccagagctggaggagacactgactcacaccatcacaaagcttaatgcagagaataacgcaactttctatttcaagattgacaatgtgaaaaaagcaagagtacaggtggtggctggcaagaaatattttattgacttcgtggccagggaaaccacatgttccaaggaaagtaatgaagagttgaccgaaagctgtgagaccaaaaaacttggccaaagcctagattgcaacgctgaagtttatgtggtaccctgggagaaaaaaatttaccctactgtcaactgtcaaccactgggaatgatctcactgatgaaaaggcctccaggtttttcacctttccgatcatcacgaataggggaaataaaagaagaaacaactgtaagtccaccccacacttccatggcacctgcacaagatgaagagcgggattcaggaaaagaacaagggcatactcgtagacatgactggggccatgaaaaacaaagaaaacataatcttggccatggccataaacatgaacgtgaccaagggcatgggcaccaaagaggacatggccttggccatggacacgaacaacagcatggtcttggtcatggacataagttcaaacttgatgatgatcttgaacaccaagggggccatgtccttgaccatggacataagcataagcatggtcatggccacggaaaacataaaaataaaggcaaaaagaatggaaagcacaatggttggaaaacagagcatttggcaagctcttctgaagacagtactacaccttctgcacagacacaagagaagacagaagggccaacacccatcccttccctagccaagccaggtgtaacagttaccttttctgactttcaggactctgatctcattgcaactatgatgcctcctatatcaccagctcccacacagagtgatgacgattggatccctgatatccagatagacccaaatggcctttcatttaacccaatatcagattttccagacacgacctccccaaaatgtcctggacgcccctggaagtcagttagtgaaattaatccaaccacacaaatgaaagaatcttattatttcgatctcactgatggcctttcttaatttaagtggctatgggtatttctttcatactttattaaagtatcaatatccctctctccattgtccagatgaaaatatcctgatataatgcaccaaaaaccatgcagcttcggaacagtctaaagagaagtggtgagactcccagtggagacaccatcagtctccacggactgcataaaattgtgtgccacaattctaactcttttctgaatcttcttcccaagttttctaaactagcacagtaaacagacaaactaatgtgccgtatggcctgctgcaattggcttctctgataacaaatatgtaccttacaacatatgtcatgaatttgcatacaaagattcttgtcattcttaataaactgtggcacttggtatttgaatgtgtgtgaaaataagggaagtcaagagattaaatgctgaacttattaatggaatagaaataataaggaggctgaggctggagaattgcttgaacccgggaggcggaggttgcagtgagccgagatcgtgccactgcgctccagcctgggcatcagagcaagattctgtctcagaaaaaaagaaaaaaaaagaaataataagaaaaacttccagatttcaaagtaacaagaaagaagacaggttggccaaagggaggaaaggggggacataaattaattgactttctattcccaaaatgggctagttatatcaaataaatactcccactgccctttctgagtgagagtgtttctcataagtcaaaaatttctgtctactcattaactactctttgcaacaggctttcatatagaagtattctgtttatttttgctgagcctagattgagtaattcttagtttacagaagctccgagcttaatgataaggatgaaaagcagagggagcaatatagaagcaggcttgctaataaaactttttaaataattgacaagggaatattatggaatgtgatgcaaagtttgttccactttgaagaccattgatttttgagaagcagaataataggattgcctttcattgccctatagtgcaaagaaagtatatgctttataaccaatgttgtacttttgcctagaaaaacaagatatggctttaaatagctacaatcatctttggatgtatatgtcactgctgcttcaagttattggatgcatttgaacctctgagtttgtctttcattttaaatattgtctgttcttttaaataaacaaccacagatgtcaggaaaaagtcttaccttgtcaactggttgctccactttttaaaaatgattgaatgataacatcatattaactgcgttttactatacttacagagtcacctaaggtcctgcgagtacaagggtcgacccccaaaggcaggggcagagccagcatctgagagggaggtctcttgaccaatgggcagaatcttcactccaggcacatagccccaaccacctctgccagcaaccttgagaggaaggacaagaagaaagatgggatagaatttaaatagagaagaatgccattttatcactctgcctctgggtgaaataaagatcagtcttgatgttctaactctaattcacagtggtctcctttcagccctacccattctgcagcaaattccagctggtcagagagtcagtgctgtggctctgccatggaggctcataacccaacactggaacattccctagccaaggcagaagtccttaggcgggacttccttaccaccacgggtgctaaaagaagagttagtaggtcatgcttctaccagtaatctaaggactctctccttctcttcttcctctttctccagatttccaagccttagctaagagtaatttggcttgtttagtattgttttcttatggtccagttaattaccaaaaatatttttaaaatcatctctgttaatagaatgtctaccaacttctcactatcagaaaatactcaacctccaaacaatttgaaattatctttctgatccaggtaaagaagcaaattgaaaatcaataaagtaaaaagtgacggagatttt

SEQ ID NO: 387016 - DNA, 4185 bp, Homo sapiens
tgtaaatatgtttggataacccagcagagccatttaacctttgggaacaaggcaactagcgtctggcagcaggaatccaaccagtgccctgagttctgaggcagagaggaggacagaagaaacaagaggctggagattgtcaaattcagtatcccagttggctcttgattcttggtgaaaccatccctcagctcctagagggagattgttagatcatgaaactaattaccatccttttcctctgctccaggctgctactaagtttaacccaggaatcacagtccgaggaaattgactgcaatgacaaggatttatttaaagctgtggatgctgctctgaagaaatataacagtcaaaaccaaagtaacaaccagtttgtattgtaccgcataactgaagccactaagacggttggctctgacacgttttattccttcaagtacgaaatcaaggagggggattgtcctgttcaaagtggcaaaacctggcaggactgtgagtacaaggatgctgcaaaagcagccactggagaatgcacggcaaccgtggggaagaggagcagtacgaaattctccgtggctacccagacctgccagattactccagccgagggccctgtggtgacagcccagtacgactgcctcggctgtgtgcatcctatatcaacgcagagcccagacctggagcccattctgagacacggcattcagtactttaacaacaacactcaacattcctccctcttcatgcttaatgaagtaaaacgggcccaaagacaggtggtggctggattgaactttcgaattacctactcaattgtgcaaacgaattgttccaaagagaattttctgttcttaactccagactgcaagtccctttggaatggtgataccggtgaatgtacagataatgcatacatcgatattcagctacgaattgcttccttctcacagaactgtgacatttatccagggaaggattttgtacaaccacctaccaagatttgcgtgggctgccccagagatatacccaccaacagcccagagctggaggagacactgactcacaccatcacaaagcttaatgcagagaataacgcaactttctatttcaagattgacaatgtgaaaaaagcaagagtacaggtggtggctggcaagaaatattttattgacttcgtggccagggaaaccacatgttccaaggaaagtaatgaagagttgaccgaaagctgtgagaccaaaaaacttggccaaagcctagattgcaacgctgaagtttatgtggtaccctgggagaaaaaaatttaccctactgtcaactgtcaaccactgggaatgatctcactgatgaaaaggcctccaggtttttcacctttccgatcatcacgaataggggaaataaaagaagaaacaactgtaagtccaccccacacttccatggcacctgcacaagatgaagagcgggattcaggaaaagaacaagggcatactcgtagacatgactggggccatgaaaaacaaagaaaacataatcttggccatggccataaacatgaacgtgaccaagggcatgggcaccaaagaggacatggccttggccatggacacgaacaacagcatggtcttggtcatggacataagttcaaacttgatgatgatcttgaacaccaagggggccatgtccttgaccatggacataagcataagcatggtcatggccacggaaaacataaaaataaaggcaaaaagaatggaaagcacaatggttggaaaacagagcatttggcaagctcttctgaagacagtactacaccttctgcacagacacaagagaagacagaagggccaacacccatcccttccctagccaagccaggtgtaacagttaccttttctgactttcaggactctgatctcattgcaactatgatgcctcctatatcaccagctcccacacagagtgatgacgattggatccctgatatccagatagacccaaatggctgtcctggacgcccctggaagtcagttagtgaaattaatccaaccacacaaatgaaagaatcttattatttcgatctcactgatggcctttcttaatttaagtggctatgggtatttctttcatactttattaaagtatcaatatccctctctccattgtccagatgaaaatatcctgatataatgcaccaaaaaccatgcagcttcggaacagtctaaagagaagtggtgagactcccagtggagacaccatcagtctccacggactgcataaaattgtgtgccacaattctaactcttttctgaatcttcttcccaagttttctaaactagcacagtaaacagacaaactaatgtgccgtatggcctgctgcaattggcttctctgataacaaatatgtaccttacaacatatgtcatgaatttgcatacaaagattcttgtcattcttaataaactgtggcacttggtatttgaatgtgtgtgaaaataagggaagtcaagagattaaatgctgaacttattaatggaatagaaataataaggaggctgaggctggagaattgcttgaacccgggaggcggaggttgcagtgagccgagatcgtgccactgcgctccagcctgggcatcagagcaagattctgtctcagaaaaaaagaaaaaaaaagaaataataagaaaaacttccagatttcaaagtaacaagaaagaagacaggttggccaaagggaggaaaggggggacataaattaattgactttctattcccaaaatgggctagttatatcaaataaatactcccactgccctttctgagtgagagtgtttctcataagtcaaaaatttctgtctactcattaactactctttgcaacaggctttcatatagaagtattctgtttatttttgctgagcctagattgagtaattcttagtttacagaagctccgagcttaatgataaggatgaaaagcagagggagcaatatagaagcaggcttgctaataaaactttttaaataattgacaagggaatattatggaatgtgatgcaaagtttgttccgaaattttatgaggaaattactctctagtctcactttatagtctttttgctatgactttgaagaccattgatttttgagaagcagaataataggattgcctttcattgccctatagtgcaaagaaagtatatgctttataaccaatgttgtacttttgcctagaaaaacaagatatggctttaaatagctacaatcatctttggatgtatatgtcactgctgcttcaagttattggatgcatttgaacctctgagtttgtctttcattttaaatattgtctgttcttttaaataaacaaccacagatgtcaggaaaaagtcttaccttgtcaactggttgctccactttttaaaaatgattgaatgataacatcatattaactgcgttttactatacttacagagtcacctaaggtcctgcgagtacaagggtcgacccccaaaggcaggggcagagccagcatctgagagggaggtctcttgaccaatgggcagaatcttcactccaggcacatagccccaaccacctctgccagcaaccttgagaggaaggacaagaagaaagatgggatagaatttaaatagagaagaatgccattttatcactctgcctctgggtgaaataaagatcagtcttgatgttctaactctaattcacagtggtctcctttcagccctacccattctgcagcaaattccagctggtcagagagtcagtgctgtggctctgccatggaggctcataacccaacactggaacattccctagccaaggcagaagtccttaggcgggacttccttaccaccacgggtgctaaaagaagagttagtaggtcatgcttctaccagtaatctaaggactctctccttctcttcttcctctttctccagatttccaagccttagctaagagtaatttggcttgtttagtattgttttcttatggtccagttaattaccaaaaatatttttaaaatcatctctgttaatagaatgtctaccaacttctcactatcagaaaatactcaacctccaaacaatttgaaattatctttctgatccaggtaaagaagcaaattgaaaatcaataaagtaaaaagtgacggagatttt

SEQ ID NO: 387017 - DNA, 4174 bp, Homo sapiens
tgtaaatatgtttggataacccagcagagccatttaacctttgggaacaaggcaactagcgtctggcagcaggaatccaaccagtgccctgagttctgaggcagagaggaggacagaagaaacaagaggctggagattgtcaaattcagtatcccagttggctcttgattcttggtgaaaccatccctcagctcctagagggagattgttagatcatgaaactaattaccatccttttcctctgctccaggctgctactaagtttaacccaggaatcacagtccgaggaaattgactgcaatgacaaggatttatttaaagctgtggatgctgctctgaagaaatataacagttggctctgacacgttttattccttcaagtacgaaatcaaggagggggattgtcctgttcaaagtggcaaaacctggcaggactgtgagtacaaggatgctgcaaaagcagccactggagaatgcacggcaaccgtggggaagaggagcagtacgaaattctccgtggctacccagacctgccagattactccagccgagggccctgtggtgacagcccagtacgactgcctcggctgtgtgcatcctatatcaacgcagagcccagacctggagcccattctgagacacggcattcagtactttaacaacaacactcaacattcctccctcttcatgcttaatgaagtaaaacgggcccaaagacaggtggtggctggattgaactttcgaattacctactcaattgtgcaaacgaattgttccaaagagaattttctgttcttaactccagactgcaagtccctttggaatggtgataccggtgaatgtacagataatgcatacatcgatattcagctacgaattgcttccttctcacagaactgtgacatttatccagggaaggattttgtacaaccacctaccaagatttgcgtgggctgccccagagatatacccaccaacagcccagagctggaggagacactgactcacaccatcacaaagcttaatgcagagaataacgcaactttctatttcaagattgacaatgtgaaaaaagcaagagtacaggtggtggctggcaagaaatattttattgacttcgtggccagggaaaccacatgttccaaggaaagtaatgaagagttgaccgaaagctgtgagaccaaaaaacttggccaaagcctagattgcaacgctgaagtttatgtggtaccctgggagaaaaaaatttaccctactgtcaactgtcaaccactgggaatgatctcactgatgaaaaggcctccaggtttttcacctttccgatcatcacgaataggggaaataaaagaagaaacaactgtaagtccaccccacacttccatggcacctgcacaagatgaagagcgggattcaggaaaagaacaagggcatactcgtagacatgactggggccatgaaaaacaaagaaaacataatcttggccatggccataaacatgaacgtgaccaagggcatgggcaccaaagaggacatggccttggccatggacacgaacaacagcatggtcttggtcatggacataagttcaaacttgatgatgatcttgaacaccaagggggccatgtccttgaccatggacataagcataagcatggtcatggccacggaaaacataaaaataaaggcaaaaagaatggaaagcacaatggttggaaaacagagcatttggcaagctcttctgaagacagtactacaccttctgcacagacacaagagaagacagaagggccaacacccatcccttccctagccaagccaggtgtaacagttaccttttctgactttcaggactctgatctcattgcaactatgatgcctcctatatcaccagctcccacacagagtgatgacgattggatccctgatatccagatagacccaaatggcctttcatttaacccaatatcagattttccagacacgacctccccaaaatgtcctggacgcccctggaagtcagttagtgaaattaatccaaccacacaaatgaaagaatcttattatttcgatctcactgatggcctttcttaatttaagtggctatgggtatttctttcatactttattaaagtatcaatatccctctctccattgtccagatgaaaatatcctgatataatgcaccaaaaaccatgcagcttcggaacagtctaaagagaagtggtgagactcccagtggagacaccatcagtctccacggactgcataaaattgtgtgccacaattctaactcttttctgaatcttcttcccaagttttctaaactagcacagtaaacagacaaactaatgtgccgtatggcctgctgcaattggcttctctgataacaaatatgtaccttacaacatatgtcatgaatttgcatacaaagattcttgtcattcttaataaactgtggcacttggtatttgaatgtgtgtgaaaataagggaagtcaagagattaaatgctgaacttattaatggaatagaaataataaggaggctgaggctggagaattgcttgaacccgggaggcggaggttgcagtgagccgagatcgtgccactgcgctccagcctgggcatcagagcaagattctgtctcagaaaaaaagaaaaaaaaagaaataataagaaaaacttccagatttcaaagtaacaagaaagaagacaggttggccaaagggaggaaaggggggacataaattaattgactttctattcccaaaatgggctagttatatcaaataaatactcccactgccctttctgagtgagagtgtttctcataagtcaaaaatttctgtctactcattaactactctttgcaacaggctttcatatagaagtattctgtttatttttgctgagcctagattgagtaattcttagtttacagaagctccgagcttaatgataaggatgaaaagcagagggagcaatatagaagcaggcttgctaataaaactttttaaataattgacaagggaatattatggaatgtgatgcaaagtttgttccgaaattttatgaggaaattactctctagtctcactttatagtctttttgctatgactttgaagaccattgatttttgagaagcagaataataggattgcctttcattgccctatagtgcaaagaaagtatatgctttataaccaatgttgtacttttgcctagaaaaacaagatatggctttaaatagctacaatcatctttggatgtatatgtcactgctgcttcaagttattggatgcatttgaacctctgagtttgtctttcattttaaatattgtctgttcttttaaataaacaaccacagatgtcaggaaaaagtcttaccttgtcaactggttgctccactttttaaaaatgattgaatgataacatcatattaactgcgttttactatacttacagagtcacctaaggtcctgcgagtacaagggtcgacccccaaaggcaggggcagagccagcatctgagagggaggtctcttgaccaatgggcagaatcttcactccaggcacatagccccaaccacctctgccagcaaccttgagaggaaggacaagaagaaagatgggatagaatttaaatagagaagaatgccattttatcactctgcctctgggtgaaataaagatcagtcttgatgttctaactctaattcacagtggtctcctttcagccctacccattctgcagcaaattccagctggtcagagagtcagtgctgtggctctgccatggaggctcataacccaacactggaacattccctagccaaggcagaagtccttaggcgggacttccttaccaccacgggtgctaaaagaagagttagtaggtcatgcttctaccagtaatctaaggactctctccttctcttcttcctctttctccagatttccaagccttagctaagagtaatttggcttgtttagtattgttttcttatggtccagttaattaccaaaaatatttttaaaatcatctctgttaatagaatgtctaccaacttctcactatcagaaaatactcaacctccaaacaatttgaaattatctttctgatccaggtaaagaagcaaattgaaaatcaataaagtaaaaagtgacggagatttt

SEQ ID NO: 387018 - DNA, 4159 bp, Homo sapiens
tgtaaatatgtttggataacccagcagagccatttaacctttgggaacaaggcaactagcgtctggcagcaggaatccaaccagtgccctgagttctgaggcagagaggaggacagaagaaacaagaggctggagattgtcaaattcagtatcccagttggctcttgattcttggtgaaaccatccctcagctcctagagggagattgttagatcatgaaactaattaccatccttttcctctgctccaggctgctactaagtttaacccaggaatcacagtccgaggaaattgactgcaatgacaaggatttatttaaagctgtggatgctgctctgaagaaatataacagtcaaaaccaaagtaacaaccagtttgtattgtaccgcataactgaagccactaagacggttggctctgacacgttttattccttcaagtacgaaatcaaggagggggattgtcctgttcaaagtggcaaaacctggcaggactgtgagtacaaggatgctgcaaaagcagccactggagaatgcacggcaaccgtggggaagaggagcagtacgaaattctccgtggctacccagacctgccagattactccagctggagcccattctgagacacggcattcagtactttaacaacaacactcaacattcctccctcttcatgcttaatgaagtaaaacgggcccaaagacaggtggtggctggattgaactttcgaattacctactcaattgtgcaaacgaattgttccaaagagaattttctgttcttaactccagactgcaagtccctttggaatggtgataccggtgaatgtacagataatgcatacatcgatattcagctacgaattgcttccttctcacagaactgtgacatttatccagggaaggattttgtacaaccacctaccaagatttgcgtgggctgccccagagatatacccaccaacagcccagagctggaggagacactgactcacaccatcacaaagcttaatgcagagaataacgcaactttctatttcaagattgacaatgtgaaaaaagcaagagtacaggtggtggctggcaagaaatattttattgacttcgtggccagggaaaccacatgttccaaggaaagtaatgaagagttgaccgaaagctgtgagaccaaaaaacttggccaaagcctagattgcaacgctgaagtttatgtggtaccctgggagaaaaaaatttaccctactgtcaactgtcaaccactgggaatgatctcactgatgaaaaggcctccaggtttttcacctttccgatcatcacgaataggggaaataaaagaagaaacaactgtaagtccaccccacacttccatggcacctgcacaagatgaagagcgggattcaggaaaagaacaagggcatactcgtagacatgactggggccatgaaaaacaaagaaaacataatcttggccatggccataaacatgaacgtgaccaagggcatgggcaccaaagaggacatggccttggccatggacacgaacaacagcatggtcttggtcatggacataagttcaaacttgatgatgatcttgaacaccaagggggccatgtccttgaccatggacataagcataagcatggtcatggccacggaaaacataaaaataaaggcaaaaagaatggaaagcacaatggttggaaaacagagcatttggcaagctcttctgaagacagtactacaccttctgcacagacacaagagaagacagaagggccaacacccatcccttccctagccaagccaggtgtaacagttaccttttctgactttcaggactctgatctcattgcaactatgatgcctcctatatcaccagctcccacacagagtgatgacgattggatccctgatatccagatagacccaaatggcctttcatttaacccaatatcagattttccagacacgacctccccaaaatgtcctggacgcccctggaagtcagttagtgaaattaatccaaccacacaaatgaaagaatcttattatttcgatctcactgatggcctttcttaatttaagtggctatgggtatttctttcatactttattaaagtatcaatatccctctctccattgtccagatgaaaatatcctgatataatgcaccaaaaaccatgcagcttcggaacagtctaaagagaagtggtgagactcccagtggagacaccatcagtctccacggactgcataaaattgtgtgccacaattctaactcttttctgaatcttcttcccaagttttctaaactagcacagtaaacagacaaactaatgtgccgtatggcctgctgcaattggcttctctgataacaaatatgtaccttacaacatatgtcatgaatttgcatacaaagattcttgtcattcttaataaactgtggcacttggtatttgaatgtgtgtgaaaataagggaagtcaagagattaaatgctgaacttattaatggaatagaaataataaggaggctgaggctggagaattgcttgaacccgggaggcggaggttgcagtgagccgagatcgtgccactgcgctccagcctgggcatcagagcaagattctgtctcagaaaaaaagaaaaaaaaagaaataataagaaaaacttccagatttcaaagtaacaagaaagaagacaggttggccaaagggaggaaaggggggacataaattaattgactttctattcccaaaatgggctagttatatcaaataaatactcccactgccctttctgagtgagagtgtttctcataagtcaaaaatttctgtctactcattaactactctttgcaacaggctttcatatagaagtattctgtttatttttgctgagcctagattgagtaattcttagtttacagaagctccgagcttaatgataaggatgaaaagcagagggagcaatatagaagcaggcttgctaataaaactttttaaataattgacaagggaatattatggaatgtgatgcaaagtttgttccgaaattttatgaggaaattactctctagtctcactttatagtctttttgctatgactttgaagaccattgatttttgagaagcagaataataggattgcctttcattgccctatagtgcaaagaaagtatatgctttataaccaatgttgtacttttgcctagaaaaacaagatatggctttaaatagctacaatcatctttggatgtatatgtcactgctgcttcaagttattggatgcatttgaacctctgagtttgtctttcattttaaatattgtctgttcttttaaataaacaaccacagatgtcaggaaaaagtcttaccttgtcaactggttgctccactttttaaaaatgattgaatgataacatcatattaactgcgttttactatacttacagagtcacctaaggtcctgcgagtacaagggtcgacccccaaaggcaggggcagagccagcatctgagagggaggtctcttgaccaatgggcagaatcttcactccaggcacatagccccaaccacctctgccagcaaccttgagaggaaggacaagaagaaagatgggatagaatttaaatagagaagaatgccattttatcactctgcctctgggtgaaataaagatcagtcttgatgttctaactctaattcacagtggtctcctttcagccctacccattctgcagcaaattccagctggtcagagagtcagtgctgtggctctgccatggaggctcataacccaacactggaacattccctagccaaggcagaagtccttaggcgggacttccttaccaccacgggtgctaaaagaagagttagtaggtcatgcttctaccagtaatctaaggactctctccttctcttcttcctctttctccagatttccaagccttagctaagagtaatttggcttgtttagtattgttttcttatggtccagttaattaccaaaaatatttttaaaatcatctctgttaatagaatgtctaccaacttctcactatcagaaaatactcaacctccaaacaatttgaaattatctttctgatccaggtaaagaagcaaattgaaaatcaataaagtaaaaagtgacggagatttt

SEQ ID NO: 387019 - DNA, 4223 bp, Homo sapiens
tgtaaatatgtttggataacccagcagagccatttaacctttgggaacaaggcaactagcgtctggcagcaggaatccaaccagtgccctgagttctgaggcagagaggaggacagaagaaacaagaggctggagattgtcaaattcagtatcccagttggctcttgattcttggtgaaaccatccctcagctcctagagggagattgttagatcatgaaactaattaccatccttttcctctgctccaggctgctactaagtttaacccaggaatcacagtccgaggaaattgactgcaatgacaaggatttatttaaagctgtggatgctgctctgaagaaatataacagtcaaaaccaaagtaacaaccagtttgtattgtaccgcataactgaagccactaagacggttggctctgacacgttttattccttcaagtacgaaatcaaggagggggattgtcctgttcaaagtggcaaaacctggcaggactgtgagtacaaggatgctgcaaaagcaccctcgggaaaggcacaaaacccgggaaaaggagccctacccaaatcctccggctatccagagctgtcacatactttagaccagggcctttgtgacaaaccccaaccaatgggtcttgtgtgcatcctatatcaacgcagagcccagacctggagcccattctgagacacggcattcagtactttaacaacaacactcaacattcctccctcttcatgcttaatgaagtaaaacgggcccaaagacaggtggtggctggattgaactttcgaattacctactcaattgtgcaaacgaattgttccaaagagaattttctgttcttaactccagactgcaagtccctttggaatggtgataccggtgaatgtacagataatgcatacatcgatattcagctacgaattgcttccttctcacagaactgtgacatttatccagggaaggattttgtacaaccacctaccaagatttgcgtgggctgccccagagatatacccaccaacagcccagagctggaggagacactgactcacaccatcacaaagcttaatgcagagaataacgcaactttctatttcaagattgacaatgtgaaaaaagcaagagtacaggtggtggctggcaagaaatattttattgacttcgtggccagggaaaccacatgttccaaggaaagtaatgaagagttgaccgaaagctgtgagaccaaaaaacttggccaaagcctagattgcaacgctgaagtttatgtggtaccctgggagaaaaaaatttaccctactgtcaactgtcaaccactgggaatgatctcactgatgaaaaggcctccaggtttttcacctttccgatcatcacgaataggggaaataaaagaagaaacaactgtaagtccaccccacacttccatggcacctgcacaagatgaagagcgggattcaggaaaagaacaagggcatactcgtagacatgactggggccatgaaaaacaaagaaaacataatcttggccatggccataaacatgaacgtgaccaagggcatgggcaccaaagaggacatggccttggccatggacacgaacaacagcatggtcttggtcatggacataagttcaaacttgatgatgatcttgaacaccaagggggccatgtccttgaccatggacataagcataagcatggtcatggccacggaaaacataaaaataaaggcaaaaagaatggaaagcacaatggttggaaaacagagcatttggcaagctcttctgaagacagtactacaccttctgcacagacacaagagaagacagaagggccaacacccatcccttccctagccaagccaggtgtaacagttaccttttctgactttcaggactctgatctcattgcaactatgatgcctcctatatcaccagctcccacacagagtgatgacgattggatccctgatatccagatagacccaaatggcctttcatttaacccaatatcagattttccagacacgacctccccaaaatgtcctggacgcccctggaagtcagttagtgaaattaatccaaccacacaaatgaaagaatcttattatttcgatctcactgatggcctttcttaatttaagtggctatgggtatttctttcatactttattaaagtatcaatatccctctctccattgtccagatgaaaatatcctgatataatgcaccaaaaaccatgcagcttcggaacagtctaaagagaagtggtgagactcccagtggagacaccatcagtctccacggactgcataaaattgtgtgccacaattctaactcttttctgaatcttcttcccaagttttctaaactagcacagtaaacagacaaactaatgtgccgtatggcctgctgcaattggcttctctgataacaaatatgtaccttacaacatatgtcatgaatttgcatacaaagattcttgtcattcttaataaactgtggcacttggtatttgaatgtgtgtgaaaataagggaagtcaagagattaaatgctgaacttattaatggaatagaaataataaggaggctgaggctggagaattgcttgaacccgggaggcggaggttgcagtgagccgagatcgtgccactgcgctccagcctgggcatcagagcaagattctgtctcagaaaaaaagaaaaaaaaagaaataataagaaaaacttccagatttcaaagtaacaagaaagaagacaggttggccaaagggaggaaaggggggacataaattaattgactttctattcccaaaatgggctagttatatcaaataaatactcccactgccctttctgagtgagagtgtttctcataagtcaaaaatttctgtctactcattaactactctttgcaacaggctttcatatagaagtattctgtttatttttgctgagcctagattgagtaattcttagtttacagaagctccgagcttaatgataaggatgaaaagcagagggagcaatatagaagcaggcttgctaataaaactttttaaataattgacaagggaatattatggaatgtgatgcaaagtttgttccgaaattttatgaggaaattactctctagtctcactttatagtctttttgctatgactttgaagaccattgatttttgagaagcagaataataggattgcctttcattgccctatagtgcaaagaaagtatatgctttataaccaatgttgtacttttgcctagaaaaacaagatatggctttaaatagctacaatcatctttggatgtatatgtcactgctgcttcaagttattggatgcatttgaacctctgagtttgtctttcattttaaatattgtctgttcttttaaataaacaaccacagatgtcaggaaaaagtcttaccttgtcaactggttgctccactttttaaaaatgattgaatgataacatcatattaactgcgttttactatacttacagagtcacctaaggtcctgcgagtacaagggtcgacccccaaaggcaggggcagagccagcatctgagagggaggtctcttgaccaatgggcagaatcttcactccaggcacatagccccaaccacctctgccagcaaccttgagaggaaggacaagaagaaagatgggatagaatttaaatagagaagaatgccattttatcactctgcctctgggtgaaataaagatcagtcttgatgttctaactctaattcacagtggtctcctttcagccctacccattctgcagcaaattccagctggtcagagagtcagtgctgtggctctgccatggaggctcataacccaacactggaacattccctagccaaggcagaagtccttaggcgggacttccttaccaccacgggtgctaaaagaagagttagtaggtcatgcttctaccagtaatctaaggactctctccttctcttcttcctctttctccagatttccaagccttagctaagagtaatttggcttgtttagtattgttttcttatggtccagttaattaccaaaaatatttttaaaatcatctctgttaatagaatgtctaccaacttctcactatcagaaaatactcaacctccaaacaatttgaaattatctttctgatccaggtaaagaagcaaattgaaaatcaataaagtaaaaagtgacggagatttt

SEQ ID NO: 387020 - DNA, 2607 bp, Homo sapiens
tgtaaatatgtttggataacccagcagagccatttaacctttgggaacaaggcaactagcgtctggcagcaggaatccaaccagtgccctgagttctgaggcagagaggaggacagaagaaacaagaggctggagattgtcaaattcagtatcccagttggctcttgattcttggtgaaaccatccctcagctcctagagggagattgttagatcatgaaactaattaccatcccttccctagccaagccaggtgtaacagttaccttttctgactttcaggactctgatctcattgcaactatgatgcctcctatatcaccagctcccacacagagtgatgacgattggatccctgatatccagatagacccaaatggcctttcatttaacccaatatcagattttccagacacgacctccccaaaatgtcctggacgcccctggaagtcagttagtgaaattaatccaaccacacaaatgaaagaatcttattatttcgatctcactgatggcctttcttaatttaagtggctatgggtatttctttcatactttattaaagtatcaatatccctctctccattgtccagatgaaaatatcctgatataatgcaccaaaaaccatgcagcttcggaacagtctaaagagaagtggtgagactcccagtggagacaccatcagtctccacggactgcataaaattgtgtgccacaattctaactcttttctgaatcttcttcccaagttttctaaactagcacagtaaacagacaaactaatgtgccgtatggcctgctgcaattggcttctctgataacaaatatgtaccttacaacatatgtcatgaatttgcatacaaagattcttgtcattcttaataaactgtggcacttggtatttgaatgtgtgtgaaaataagggaagtcaagagattaaatgctgaacttattaatggaatagaaataataaggaggctgaggctggagaattgcttgaacccgggaggcggaggttgcagtgagccgagatcgtgccactgcgctccagcctgggcatcagagcaagattctgtctcagaaaaaaagaaaaaaaaagaaataataagaaaaacttccagatttcaaagtaacaagaaagaagacaggttggccaaagggaggaaaggggggacataaattaattgactttctattcccaaaatgggctagttatatcaaataaatactcccactgccctttctgagtgagagtgtttctcataagtcaaaaatttctgtctactcattaactactctttgcaacaggctttcatatagaagtattctgtttatttttgctgagcctagattgagtaattcttagtttacagaagctccgagcttaatgataaggatgaaaagcagagggagcaatatagaagcaggcttgctaataaaactttttaaataattgacaagggaatattatggaatgtgatgcaaagtttgttccgaaattttatgaggaaattactctctagtctcactttatagtctttttgctatgactttgaagaccattgatttttgagaagcagaataataggattgcctttcattgccctatagtgcaaagaaagtatatgctttataaccaatgttgtacttttgcctagaaaaacaagatatggctttaaatagctacaatcatctttggatgtatatgtcactgctgcttcaagttattggatgcatttgaacctctgagtttgtctttcattttaaatattgtctgttcttttaaataaacaaccacagatgtcaggaaaaagtcttaccttgtcaactggttgctccactttttaaaaatgattgaatgataacatcatattaactgcgttttactatacttacagagtcacctaaggtcctgcgagtacaagggtcgacccccaaaggcaggggcagagccagcatctgagagggaggtctcttgaccaatgggcagaatcttcactccaggcacatagccccaaccacctctgccagcaaccttgagaggaaggacaagaagaaagatgggatagaatttaaatagagaagaatgccattttatcactctgcctctgggtgaaataaagatcagtcttgatgttctaactctaattcacagtggtctcctttcagccctacccattctgcagcaaattccagctggtcagagagtcagtgctgtggctctgccatggaggctcataacccaacactggaacattccctagccaaggcagaagtccttaggcgggacttccttaccaccacgggtgctaaaagaagagttagtaggtcatgcttctaccagtaatctaaggactctctccttctcttcttcctctttctccagatttccaagccttagctaagagtaatttggcttgtttagtattgttttcttatggtccagttaattaccaaaaatatttttaaaatcatctctgttaatagaatgtctaccaacttctcactatcagaaaatactcaacctccaaacaatttgaaattatctttctgatccaggtaaagaagcaaattgaaaatcaataaagtaaaaagtgacggagatttt

SEQ ID NO: 387021 - DNA, 6709 bp, Homo sapiens
agcccacccgcctggctgcgcgtcccgggcccggcggctgaagaggagccgcggcgaggaacaagagtgtggtgagaggacgcggaaacacctgatatcccagcaaaggaagctgcagaggaagggtcctgccccgtgagcgaggacagcctccaggagcacagcggcttctcctaacatccccctggcagtgaattacggatgaccccgtatatgaggaggtgtggatgccgacacacggggagagctcctgagaccagcacacaggaccagtgtcctccccgtgaccttgcagttgtgtagccacaagtgggagccacagagaaggagagcccataaggggactcttttcaagacacggtgttaaatcaaggctctgaagttggggccacagccggtctcagctttctgtgttctgggggcgcggtgatatgacagcatgtgaagtgagtgggtgagcacggactcctgagagcgagggcgcacccaatacctagttatccggtactgcagagagacacctggtcagccagcgttgcaaagagggatagctagtcactcaggctgcagagagagacacctggtcacccaggctgcagaaacaaccgcagtcaactgcagctccagtcattgctggatgttggctgacgcggtcctggcgccagctggagatccattcaccaagactttctgggcagatttaaagtggctggggttcagaagttcagcaagttggacacacccctcctcgctggagaggagagggcaaaggcgaggcgggggagcagcgtgtgagattccccccttcacacacacaacaacaaagcgtggacacacagaagtgaaatctgatcgcgtgccaggaaaagctgtgaggctggaaaccccggagtaaggctcgaccttggccagacctgcaggctgcggaaccgggggcgcgcgggcgcagcgcagcacagcccggccatggagcacgcggtggccccctgcgtcctctacccagggactgagcccggggctgccggggagagcgagagcgagggcgccgcgtccccggcgcagacaccctgcagtctcggcgcgtccctgtgcttcagctccggggaagagtccccgccgcagtccctcgcctcagcggcggaaggcgcggccacctccccgccctccagcggtggcccgcgggtggtggagcggcagtgggaggccggcagcgcgggcgccgcgtccccggaggagctcgcgtcccctgaggagcgcgcgtgcccggaagagcccgcggcgccgtcccccgaaccgcgcgtttggcttgaggaccccgcgtcccccgaggagcccggggagcccgcgcccgtacccccggggttcggggcggtgtacggggagccggacctggtgctggaggtgtcggggcgccggctgcgcgcgcacaaggcggtgctggcggcgcgcagcgactacttccgcgcgcgcgcgtcgcgggacgtgctgcgggtgcagggagtgagcctgacggcgctgcggctgctcctcgccgacgcctacagcgggcgcatggcgggcgtgcggcccgacaacgtggccgaggtggtggccggcgcgcgccgcctgcagctgcccggcgccgcgcagcgcgccaccgacgccgtggggccgcagctgagcctggccaactgctacgaggtcctgagcgcggccaagcggcagcggctgaacgagctgcgcgacgccgcctactgcttcatgagcgaccactatctggaggtgctgcgcgagcccgccgtgttcggccgcctgtcgggcgcagagcgggacctgctgctgcgccgccgcctgcgcgccggccgcgcccacctcttggccgcggcgctcgggccggcgggggagcgcgcgggcagccggcctcagagcccctcgggggacgcggacgcgcgcggggacgcggccgtctactgcttccacgcggcggccggagagtggcgcgagctgacgcggctgcccgagggcgcgccggcgcggggctgcggcctgtgcgtcctctacaactacctcttcgtggcgggcggcgtggcgcccgcgggccccgacggccgcgcgcgcccgtccgaccaggtcttctgctacaacccggccacggacagctggagcgccgtgaggcccctgcgccaggcgcgctcgcagctgcggctgctggccctggacggtcacctctacgccgtgggcggcgagtgcctgctcagcgtggagcgctacgacccgcgcgccgaccgctgggcccccgtggcgccgctgccccggggcgccttcgccgtggcgcatgaggccaccacctgccacggcgagatctacgtgtccgggggctccctcttctatcgcctgctcaagtatgacccgcggcgcgacgagtggcaggagtgcccgtgcagcagcagccgcgagcgctcggccgacatggtggctctcgacggcttcatctaccgcttcgatctgagcggcagccgcggcgaggcgcaggcggcggggccgagcggggtcagcgtgtcccgataccactgcctggccaagcagtggagcccgtgcgtcgcgcccctgcgcctccccggcggccccacgggcctgcagcccttccgctgcgccgccctggacggcgccatctactgcgtgagccgcgcgggcacctggcgcttccagcctgcccgggaaggcgaggccggcggcgacgcaggccagggcggcggcttcgaggcgctgggcgcccccttggacgtccggggtgtgctcatcccgttcgctctcagcctgcctgagaagccgccccgaggggagcagggcgccccgtaggccggcggggtcggcgggcgtctccctcggcaggggtttgcggggcccaggtccctttgggcccgcggaggaggacgtggtggggagtcggggccgctggccacgctggtggtttggacacttcgaaggagccccgaggacgctctcagggccgctttcgctttgctttccttttgcttgtctttgcttctgggggtggatgccttgagacccaggaggtgtgcggatgggtcccttgacagacaggacacagagaaggctgtgggatccaaagggtcagcctcagggtacagtgggggttcctgaggcagcctgcagccggccccggggtgtcccgaaccccgcagagcaccgaggctgtgcgcaggagcctgggaccctcaagtaggtcgccgcgaactatcgggggaagcacgcagagaggggtcacgccttttatttttggcttgagatttaaaattataactgataagtaaagctctttctgatttagttgaaaatttcgtaccatgtgctcgctttggttggctcaactccaaaaagagtaatttaataagcattaaaggtaaaatctttgattaccagtaaggtttcttgttcaatatgcattggaagtatttccttccccacaccattgctactcaaactcacatgcctagagcagctccgtctcactgttggaccgagggggctttcatattttcagttgaaaggatgttaactgatgtagcgatgatttaccattatttaaattttaagtcttcagtggctaaatgtgaccaaacagcacatcataagtaggaaaaacttaccagggtgcttgtctatctaaaaagcaatttttgatagtccactctgtatgcccagccgctttcataatctggaacgagataaaatattcctaaaaagcggggaaaatcattttgctttgacagttctataaaaaaaagtgtaggcacattttaaacccactgtatatgatgttttcaatgtggatcgtgtagttctgatgagggagattaatttttacaatcagtattctaagtgtggccgagtgacagtgggcatagatttataacaaggaagtgacgtgcttatcaccatagatttgcaagtaaactgcatgtatttaattgtattgaattgagttccaaaataccctaatagaattaacacgaggctcactgcattgacagggtatgaggattaaaaacaaatcagttgggtcgtttctcatttaacattttacttttcaagtgtgtatacagaggacttactattatgactttgaggatgagatccatgctcacaaatagaggcgaacatttgaactccgaatccaacccattttcttactgtaagaggaaaagttactggaacgtaactagttgaaatcctgcctactttaatattatttgtttgttaatccagtaatgggaactgccatctctgtagaaatcagtgggtaattgaaaaataggttatgctttttaaagagtctgtggttatgagaggtctcagttaagtgtgtttagaagtgatcagcttgaaccttatgcatgactcgggggctggaatttatgatctgggttacggtatgttctggggacgtgtctgcttgcccatggttactcatgaactgaggggatagcttggcaacttggttaatcatcttgggaaagaaaaacagacttcatatcgcctgacttgattggccttttataggagtatactggagaaatggttgtagaaacagtatttacagcaaaaggaaacaaataatgttcattttaagcaatgtaccattcacactgtcctgccttttcctctagaattttattaatggtagaaatttttatatgaaatgggaccaggaccaggctaatattttcagtccttaaatatcaaactcatatgctgttatcactgtgattttacttgtgaaatcattcctgtaatgtttagtgtttgaaaatgaaatattgaaattaggtttccagagtaacactgtccccggaaaaggatatgagaagtggtggatgttggatgggggtggttgcacagtcctgtgcggttcccatggctttccagcgtttcatttagtgaaggaatgctcacactagatgtagcacagcttcctgtggggcccggcagcaaagccccaggtgctccctgtcacctcacaacaaaatgcactaagaaacgtaaagaataagaggaattaatacccaccattaaaggatgtccggccaacctattgtggaaatttatagaatagtatacaccacagttctgaatagtgatatcacataaaaatacatactagaggacctgccaagccatgagcagtgtttttgctttttgggggccagtccctggggtgtggagccgctagggtttgcacccatgaaacagaaaagccacaccctccaaggtgtggctttcattttgggactgctgcagggagggcagaggcattgctgagactgcctggcaacggctgatgccccaggtaggaccttttccatttcaaagtggtgttctaagtctgcgtccaacactgtgtaggaaaaaggttggtgcaaaaatattcctggtcatccacccattaaaatagttagatgaggctattgccttgatgacagctgtccacactcctcatgaaattaacccgtatgccggggcatttccaaatgtctgactcgtgaaattaacccatacgcaggggcctttccaaatgtctgaaaaggcagtggtgtcttttggggaaaatgttatgcatggaagcctgaccttttgcttagttgacagcaatcccttctgtattgccaatcaaggttcatttgagatgcagaggaatgagcttgagccttcctccttttccttccggttttattcttcctcttgggaacatccctccactccgcactgcttcctgcagctttgtagagctggatttggaacttcgggatttggtttctgagtctgtggaggcaccgacttctcctgtaagaaaatgaatgttgtggaaattctttggctacttaactaaaactcgtgactgtataagtttggctacaaataagtaagaaattaatcatctgctctgtttctgctaatttctggtgtcacttcagtaattctggtagcagccgttgaatctgtcagtctcttaggtaacttcctgtaaacgatttggaaataggatgttttcaacgttcttttgtcttttgctgaagtcaggatagattcaagacataatctcttgtaagatctaaatagagcaaatgtaaacaaaagtgcatttttgtattcttgttaattttagatgctttcctagcttacaaaaagttctatttttgggttaaaaatcaatcaactttctgatatttccccttctgcaatgttattgttcataagaaaacacgagctgaaaatggaaatctgcagttgtttcagttgtcttgaatttctttcagtggccacatcatttccacgttttccacatccgggaggaagcctggactgtgcagccttcgggcacccggcacagacactgtgctggcaggagcttcagacacgccaagtggatggatttggattgaacgcatatgaaacaggagacgggttctcatgtgagatcaaagctcctccaaagcctgttcaagctctaagcgattctcaaatgttaccatttattaaaggtaaactacacctgttgaaggccaagttcagggcagctgttgtgatctgtgtagttaatgtatttattaatgcttgacttttaaaatcctgggcataaatagtgcagagcctcgtatgtttgtcagttcatgccgagatgaaataaatcacgcagaaagtgccagtc

SEQ ID NO: 387022 - DNA, 7192 bp, Homo sapiens
agcccacccgcctggctgcgcgtcccgggcccggcggctgaagaggagccgcggcgaggaacaagagtgtggtgagaggacgcggaaacacctgatatcccagcaaaggaagctgcagaggaagggtcctgccccgtgagcgaggacagcctccaggagcacagcggcttctcctaacatccccctggcagtgaattacggatgaccccgtatatgaggaggtgtggatgccgacacacggggagagctcctgagaccagcacacaggaccagtgtcctccccgtgaccttgcagttgtgtagccacaagtgggagccacagagaaggagagcccataaggggactcttttcaagacacggtgttaaatcaaggctctgaagttggggccacagccggtctcagctttctgtgttctgggggcgcggtgatatgacagcatgtgaagtgagtgggtgagcacggactcctgagagcgagggcgcacccaatacctagttatccggtactgcagagagacacctggtcagccagcgttgcaaagagggatagctagtcactcaggctgcagagagagacacctggtcacccaggctgcagaaacaaccgcagtcaactgcagctccagtcattgctggatgttggctgacgcggtcctggcgccagctggagatccattcaccaagactttctgggcagatttaaagtggctggggttcagaagttcagcaagttggacacacccctcctcgctggagaggagagggcaaaggcgaggcgggggagcagcgtgtgagattccccccttcacacacacaacaacaaagcgtggacacacagaagtgaaatctgatcgcgtgccaggaaaagctgtgaggctggaaaccccggagtaaggctcgaccttggccagacctgcaggctgcggaaccgggggcgcgcgggcgcagcgcagcacagcccggccatggagcacgcggtggccccctgcgtcctctacccagggactgagcccggggctgccggggagagcgagagcgagggcgccgcgtccccggcgcagacaccctgcagtctcggcgcgtccctgtgcttcagctccggggaagagtccccgccgcagtccctcgcctcagcggcggaaggcgcggccacctccccgccctccagcggtggcccgcgggtggtggagcggcagtgggaggccggcagcgcgggcgccgcgtccccggaggagctcgcgtcccctgaggagcgcgcgtgcccggaagagcccgcggcgccgtcccccgaaccgcgcgtttggcttgaggaccccgcgtcccccgaggagcccggggagcccgcgcccgtacccccggggttcggggcggtgtacggggagccggacctggtgctggaggtgtcggggcgccggctgcgcgcgcacaaggcggtgctggcggcgcgcagcgactacttccgcgcgcgcgcgtcgcgggacgtgctgcgggtgcagggagtgagcctgacggcgctgcggctgctcctcgccgacgcctacagcgggcgcatggcgggcgtgcggcccgacaacgtggccgaggtggtggccggcgcgcgccgcctgcagctgcccggcgccgcgcagcgcgccaccgacgccgtggggccgcagctgagcctggccaactgctacgaggtcctgagcgcggccaagcggcagcggctgaacgagctgcgcgacgccgcctactgcttcatgagcgaccactatctggaggtgctgcgcgagcccgccgtgttcggccgcctgtcgggcgcagagcgggacctgctgctgcgccgccgcctgcgcgccggccgcgcccacctcttggccgcggcgctcgggccggcgggggagcgcgcgggcagccggcctcagagcccctcgggggacgcggacgcgcgcggggacgcggccgtctactgcttccacgcggcggccggagagtggcgcgagctgacgcggctgcccgagggcgcgccggcgcggggctgcggcctgtgcgtcctctacaactacctcttcgtggcgggcggcgtggcgcccgcgggccccgacggccgcgcgcgcccgtccgaccaggtcttctgctacaacccggccacggacagctggagcgccgtgaggcccctgcgccaggcgcgctcgcagctgcggctgctggccctggacggtcacctctacgccgtgggcggcgagtgcctgctcagcgtggagcgctacgacccgcgcgccgaccgctgggcccccgtggcgccgctgccccggggcgccttcgccgtggcgcatgaggccaccacctgccacggcgagatctacgtgtccgggggctccctcttctatcgcctgctcaagtatgacccgcggcgcgacgagtggcaggagtgcccgtgcagcagcagccgcgagcgctcggccgacatggtggctctcgacggcttcatctaccgcttcgatctgagcggcagccgcggcgaggcgcaggcggcggggccgagcggggtcagcgtgtcccgataccactgcctggccaagcagtggagcccgtgcgtcgcgcccctgcgcctccccggcggccccacgggcctgcagcccttccgctgcgccgccctggacggcgccatctactgcgtgagccgcgcgggcacctggcgcttccagcctgcccgggaaggcgaggccggcggcgacgcaggccagggcggcggcttcgaggcgctgggcgcccccttggacgtccggggtgtgctcatcccgttcgctctcagcctgcctgagaagccgccccgaggggagcagggcgccccgtaggccggcggggtcggcgggcgtctccctcggcaggggtttgcggggcccaggtccctttgggcccgcggaggaggacgtggtggggagtcggggccgctggccacgctggtggtttggacacttcgaaggagccccgaggacgctctcagggccgctttcgctttgctttccttttgcttgtctttgcttctgggggtggatgccttgagacccaggaggtgtgcggatgggtcccttgacagacaggacacagagaaggctgtgggatccaaagggtcagcctcagggtacagtgggggttcctgaggcagcctgcagccggccccggggtgtcccgaaccccgcagagcaccgaggctgtgcgcaggagcctgggaccctcaagtaggtcgccgcgaactatcgggggaagcacgcagagaggggtcacgccttttatttttggcttgagatttaaaattataactgataagtaaagctctttctgatttagttgaaaatttcgtaccatgtgctcgctttggttggctcaactccaaaaagagtaatttaataagcattaaaggtaaaatctttgattaccagtaaggtttcttgttcaatatgcattggaagtatttccttccccacaccattgctactcaaactcacatgcctagagcagctccgtctcactgttggaccgagggggctttcatattttcagttgaaaggatgttaactgatgtagcgatgatttaccattatttaaattttaagtcttcagtggctaaatgtgaccaaacagcacatcataagtaggaaaaacttaccagggtgcttgtctatctaaaaagcaatttttgatagtccactctgtatgcccagccgctttcataatctggaacgagataaaatattcctaaaaagcggggaaaatcattttgctttgacagttctataaaaaaaagtgtaggcacattttaaacccactgtatatgatgttttcaatgtggatcgtgtagttctgatgagggagattaatttttacaatcagtattctaagtgtggccgagtgacagtgggcatagatttataacaaggaagtgacgtgcttatcaccatagatttgcaagtaaactgcatgtatttaattgtattgaattgagttccaaaataccctaatagaattaacacgaggctcactgcattgacagggtatgaggattaaaaacaaatcagttgggtcgtttctcatttaacattttacttttcaagtgtgtatacagaggacttactattatgactttgaggatgagatccatgctcacaaatagaggcgaacatttgaactccgaatccaacccattttcttactgtaagaggaaaagttactggaacgtaactagttgaaatcctgcctactttaatattatttgtttgttaatccagtaatgggaactgccatctctgtagaaatcagtgggtaattgaaaaataggttatgctttttaaagagtctgtggttatgagaggtctcagttaagtgtgtttagaagtgatcagcttgaaccttatgcatgactcgggggctggaatttatgatctgggttacggtatgttctggggacgtgtctgcttgcccatggttactcatgaactgaggggatagcttggcaacttggttaatcatcttgggaaagaaaaacagacttcatatcgcctgacttgattggccttttataggagtatactggagaaatggttgtagaaacagtatttacagcaaaaggaaacaaataatgttcattttaagcaatgtaccattcacactgtcctgccttttcctctagaattttattaatggtagaaatttttatatgaaatgggaccaggaccaggctaatattttcagtccttaaatatcaaactcatatgctgttatcactgtgattttacttgtgaaatcattcctgtaatgtttagtgtttgaaaatgaaatattgaaattaggtttccagagtaacactgtccccggaaaaggatatgagaagtggtggatgttggatgggggtggttgcacagtcctgtgcggttcccatggctttccagcgtttcatttagtgaaggaatgctcacactagatgtagcacagcttcctgtggggcccggcagcaaagccccaggtgctccctgtcacctcacaacaaaatgcactaagaaacgtaaagaataagaggaattaatacccaccattaaaggatgtccggccaacctattgtggaaatttatagaatagtatacaccacagttctgaatagtgatatcacataaaaatacatactagaggacctgccaagccatgagcagtgtttttgctttttgggggccagtccctggggtgtggagccgctagggtttgcacccatgaaacagaaaagccacaccctccaaggtgtggctttcattttgggactgctgcagggagggcagaggcattgctgagactgcctggcaacggctgatgccccaggtaggaccttttccatttcaaagtggtgttctaagtctgcgtccaacactgtgtaggaaaaaggttggtgcaaaaatattcctggtcatccacccattaaaatagttagatgaggctattgccttgatgacagctgtccacactcctcatgaaattaacccgtatgccggggcatttccaaatgtctgactcgtgaaattaacccatacgcaggggcctttccaaatgtctgaaaaggcagtggtgtcttttggggaaaatgttatgcatggaagcctgaccttttgcttagttgacagcaatcccttctgtattgccaatcaaggttcatttgagatgcagaggaatgagcttgagccttcctccttttccttccggttttattcttcctcttgggaacatccctccactccgcactgcttcctgcagctttgtagagctggatttggaacttcgggatttggtttctgagtctgtggaggcaccgacttctcctgtaagaaaatgaatgttgtggaaattctttggctacttaactaaaactcgtgactgtataagtttggctacaaataagtaagaaattaatcatctgctctgtttctgctaatttctggtgtcacttcagtaattctggtagcagccgttgaatctgtcagtctcttaggtaacttcctgtaaacgatttggaaataggatgttttcaacgttcttttgtcttttgctgaagtcaggatagattcaagacataatctcttgtaagatctaaatagagcaaatgtaaacaaaagtgcatttttgtattcttgttaattttagatgctttcctagcttacaaaaagttctatttttgggttaaaaatcaatcaactttctgatatttccccttctgcaatgttattgttcataagaaaacacgagctgaaaatggaaatctgcagttgtttcagttgtcttgaatttctttcagtggccacatcatttccacgttttccacatccgggaggaagcctggactgtgcagccttcgggcacccggcacagacactgtgctggcaggagcttcagacacgccaagtggatggatttggattgaacgcatatgaaacaggagacgggttctcatgtgagatcaaagctcctccaaagcctgttcaagctctaagcgattctcaaatgttaccatttattaaaggtaaactacacctgttgaaggccaagttcagggcagctgttgtgatctgtgtagttaatgtatttattaatgcttgacttttaaaatcctgggcataaatagtgcagagcctcgtatgtttgtcagttcatgccgagatgaaataaatcacgcagaaagtgccagtcaaaaaaaaaaaaaaaaaaaaaaaaaaaaaaaaaaaaaaggggggggcggaaaaatttcccccgggggggccatttaacctcttaccccagttttttggtacaaagagtgtgccgccctataagaggaagagcgcgtattataaaaaacaggaggcccggggccgcgcgtcggtttaaaccacagcgtgcggtcgagtcgggcaaaaaacgcgcccccagctgggggatatcctggtgggaaagacgaaacctctatctctgtgggggggggcggcactttagctcggcgcacaactctcccctcacagaaaatattagacggcttccagaggggtaatattacaacacattctctccaggttgtcttatcagggggggttcaacaccccagcacgtgcatataatgctcggctgtctggaacaagttgcgtggcttaccgagcgtctactaattttcgcgaacaatttttttcacgcggacga

SEQ ID NO: 387023 - DNA, 2506 bp, Homo sapiens
ccgaggcagccatggcttacatactttctcctgctacactctaagagtactcagaagctcagtattgctctgttatcactgtgattttacttgtgaaatcattcctgtaatgtttagtgtttgaaaatgaaatattgaaattaggtttccagagtaacactgtccccggaaaaggatatgagaagtggtggatgttggatgggggtggttgcacagtcctgtgcggttcccatggctttccagcgtttcatttagtgaaggaatgctcacactagatgtagcacagcttcctgtggggcccggcagcaaagccccaggtgctccctgtcacctcacaacaaaatgcactaagaaacgtaaagaataagaggaattaatacccaccattaaaggatgtccggccaacctattgtggaaatttatagaatagtatacaccacagttctgaatagtgatatcacataaaaatacatactagaggacctgccaagccatgagcagtgtttttgctttttgggggccagtccctggggtgtggagccgctagggtttgcacccatgaaacagaaaagccacaccctccaaggtgtggctttcattttgggactgctgcagggagggcagaggcattgctgagactgcctggcaacggctgatgccccaggtaggaccttttccatttcaaagtggtgttctaagtctgcgtccaacactgtgtaggaaaaaggttggtgcaaaaatattcctggtcatccacccattaaaatagttagatgaggctattgccttgatgacagctgtccacactcctcatgaaattaacccgtatgccggggcatttccaaatgtctgactcgtgaaattaacccatacgcaggggcctttccaaatgtctgaaaaggcagtggtgtcttttggggaaaatgttatgcatggaagcctgaccttttgcttagttgacagcaatcccttctgtattgccaatcaaggttcatttgagatgcagaggaatgagcttgagccttcctccttttccttccggttttattcttcctcttgggaacatccctccactccgcactgcttcctgcagctttgtagagctggatttggaacttcgggatttggtttctgagtctgtggaggcaccgacttctcctgtaagaaaatgaatgttgtggaaattctttggctacttaactaaaactcgtgactgtataagtttggctacaaataagtaagaaattaatcatctgctctgtttctgctaatttctggtgtcacttcagtaattctggtagcagccgttgaatctgtcagtctcttaggtaacttcctgtaaacgatttggaaataggatgttttcaacgttcttttgtcttttgctgaagtcaggatagattcaagacataatctcttgtaagatctaaatagagcaaatgtaaacaaaagtgcatttttgtattcttgttaattttagatgctttcctagcttacaaaaagttctatttttgggttaaaaatcaatcaactttctgatatttccccttctgcaatgttattgttcataagaaaacacgagctgaaaatggaaatctgcagttgtttcagttgtcttgaatttctttcagtggccacatcatttccacgttttccacatccgggaggaagcctggactgtgcagccttcgggcacccggcacagacactgtgctggcaggagcttcagacacgccaagtggatggatttggattgaacgcatatgaaacaggagacgggttctcatgtgagatcaaagctcctccaaagcctgttcaagctctaagcgattctcaaatgttaccatttattaaaggtaaactacacctgttgaaggccaagttcagggcagctgttgtgatctgtgtagttaatgtatttattaatgcttgacttttaaaatcctgggcataaatagtgcagagcctcgtatgtttgtcagttcatgccgagatgaaataaatcacgcagaaagtgccagtcaaaaaaaaaaaaaaaaaaaaaaaaaaaaaaaaaaaaaaggggggggcggaaaaatttcccccgggggggccatttaacctcttaccccagttttttggtacaaagagtgtgccgccctataagaggaagagcgcgtattataaaaaacaggaggcccggggccgcgcgtcggtttaaaccacagcgtgcggtcgagtcgggcaaaaaacgcgcccccagctgggggatatcctggtgggaaagacgaaacctctatctctgtgggggggggcggcactttagctcggcgcacaactctcccctcacagaaaatattagacggcttccagaggggtaatattacaacacattctctccaggttgtcttatcagggggggttcaacaccccagcacgtgcatataatgctcggctgtctggaacaagttgcgtggcttaccgagcgtctactaattttcgcgaacaatttttttcacgcggacga

SEQ ID NO: 387024 - DNA, 2499 bp, Homo sapiens
atccttaattaaattaattcccccccccccctttttcagtccttaaatatcaaactcatatgctgttatcactgtgattttacttgtgaaatcattcctgtaatgtttagtgtttgaaaatgaaatattgaaattaggtttccagagtaacactgtccccggaaaaggatatgagaagtggtggatgttggatgggggtggttgcacagtcctgtgcggttcccatggctttccagcgtttcatttagtgaaggaatgctcacactagatgtagcacagcttcctgtggggcccggcagcaaagccccaggtgctccctgtcacctcacaacaaaatgcactaagaaacgtaaagaataagaggaattaatacccaccattaaaggatgtccggccaacctattgtggaaatttatagaatagtatacaccacagttctgaatagtgatatcacataaaaatacatactagaggacctgccaagccatgagcagtgtttttgctttttgggggccagtccctggggtgtggagccgctagggtttgcacccatgaaacagaaaagccacaccctccaaggtgtggctttcattttgggactgctgcagggagggcagaggcattgctgagactgcctggcaacggctgatgccccaggtaggaccttttccatttcaaagtggtgttctaagtctgcgtccaacactgtgtaggaaaaaggttggtgcaaaaatattcctggtcatccacccattaaaatagttagatgaggctattgccttgatgacagctgtccacactcctcatgaaattaacccgtatgccggggcatttccaaatgtctgactcgtgaaattaacccatacgcaggggcctttccaaatgtctgaaaaggcagtggtgtcttttggggaaaatgttatgcatggaagcctgaccttttgcttagttgacagcaatcccttctgtattgccaatcaaggttcatttgagatgcagaggaatgagcttgagccttcctccttttccttccggttttattcttcctcttgggaacatccctccactccgcactgcttcctgcagctttgtagagctggatttggaacttcgggatttggtttctgagtctgtggaggcaccgacttctcctgtaagaaaatgaatgttgtggaaattctttggctacttaactaaaactcgtgactgtataagtttggctacaaataagtaagaaattaatcatctgctctgtttctgctaatttctggtgtcacttcagtaattctggtagcagccgttgaatctgtcagtctcttaggtaacttcctgtaaacgatttggaaataggatgttttcaacgttcttttgtcttttgctgaagtcaggatagattcaagacataatctcttgtaagatctaaatagagcaaatgtaaacaaaagtgcatttttgtattcttgttaattttagatgctttcctagcttacaaaaagttctatttttgggttaaaaatcaatcaactttctgatatttccccttctgcaatgttattgttcataagaaaacacgagctgaaaatggaaatctgcagttgtttcagttgtcttgaatttctttcagtggccacatcatttccacgttttccacatccgggaggaagcctggactgtgcagccttcgggcacccggcacagacactgtgctggcaggagcttcagacacgccaagtggatggatttggattgaacgcatatgaaacaggagacgggttctcatgtgagatcaaagctcctccaaagcctgttcaagctctaagcgattctcaaatgttaccatttattaaaggtaaactacacctgttgaaggccaagttcagggcagctgttgtgatctgtgtagttaatgtatttattaatgcttgacttttaaaatcctgggcataaatagtgcagagcctcgtatgtttgtcagttcatgccgagatgaaataaatcacgcagaaagtgccagtcaaaaaaaaaaaaaaaaaaaaaaaaaaaaaaaaaaaaaaggggggggcggaaaaatttcccccgggggggccatttaacctcttaccccagttttttggtacaaagagtgtgccgccctataagaggaagagcgcgtattataaaaaacaggaggcccggggccgcgcgtcggtttaaaccacagcgtgcggtcgagtcgggcaaaaaacgcgcccccagctgggggatatcctggtgggaaagacgaaacctctatctctgtgggggggggcggcactttagctcggcgcacaactctcccctcacagaaaatattagacggcttccagaggggtaatattacaacacattctctccaggttgtcttatcagggggggttcaacaccccagcacgtgcatataatgctcggctgtctggaacaagttgcgtggcttaccgagcgtctactaattttcgcgaacaatttttttcacgcggacga

SEQ ID NO: 387025 - DNA, 6238 bp, Homo sapiens
agcccacccgcctggctgcgcgtcccgggcccggcggctgaagaggagccgcggcgaggaacaagagtgtggtgagaggacgcggaaacacctgatatcccagcaaaggaagctgcagaggaagggtcctgccccgtgagcgaggacagcctccaggagcacagcggcttctcctaacatccccctggcagtgaattacggatgaccccgtatatgaggaggtgtggatgccgacacacggggagagctcctgagaccagcacacaggaccagtgtcctccccgtgaccttgcagttgtgtagccacaagtgggagccacagagaaggagagcccataaggggactcttttcaagacacggtgttaaatcaaggctctgaagttggggccacagccggtctcagctttctgtgttctgggggcgcggtgatatgacagcatgtgaagtgagtgggtgagcacggactcctgagagcgagggcgcacccaatacctagttatccggtactgcagagagacacctggtcagccagcgttgcaaagagggatagctagtcactcaggctgcagagagagacacctggtcacccaggctgcagaaacaaccgcagtcaactgcagctccagtcattgctggatgttggctgacgcggtcctggcgccagctggagatccattcaccaagactttctgggcagatttaaagtggctggggttcagaagttcagcaagttggacacacccctcctcgctggagaggagagggcaaaggcgaggcgggggagcagcgtgtgagattccccccttcacacacacaacaacaaagcgtggacacacagaagtgaaatctgatcgcgtgccaggaaaagctgtgaggctggaaaccccggagtaaggctcgaccttggccagacctgcaggctgcggaaccgggggcgcgcgggcgcagcgcagcacagcccggccatggagcacgcggtggccccctgcgtcctctacccagggactgagcccggggctgccggggagagcgagagcgagggcgccgcgtccccggcgcagacaccctgcagtctcggcgcgtccctgtgcttcagctccggggaagagtccccgccgcagtccctcgcctcagcggcggaaggcgcggccacctccccgccctccagcggtggcccgcgggtggtggagcggcagtgggaggccggcagcgcgggcgccgcgtccccggaggagctcgcgtcccctgaggagcgcgcgtgcccggaagagcccgcggcgccgtcccccgaaccgcgcgtttggcttgaggaccccgcgtcccccgaggagcccggggagcccgcgcccgtacccccggggttcggggcggtgtacggggagccggacctggtgctggaggtgtcggggcgccggctgcgcgcgcacaaggcggtgctggcggcgcgcagcgactacttccgcgcgcgcgcgtcgcgggacgtgctgcgggtgcagggagtgagcctgacggcgctgcggctgctcctcgccgacgcctacagcgggcgcatggcgggcgtgcggcccgacaacgtggccgaggtggtggccggcgcgcgccgcctgcagctgcccggcgccgcgcagcgcgccaccgacgccgtggggccgcagctgagcctggccaactgctacgaggtcctgagcgcggccaagcggcagcggctgaacgagctgcgcgacgccgcctactgcttcatgagcgaccactatctggaggtgctgcgcgagcccgccgtgttcggccgcctgtcgggcgcagagcgggacctgctgctgcgccgccgcctgcgcgccggccgcgcccacctcttggccgcggcgctcgggccggcgggggagcgcgcgggcagccggcctcagagcccctcgggggacgcggacgcgcgcggggacgcggccgtctactgcttccacgcggcggccggagagtggcgcgagctgacgcggctgcccgagggcgcgccggcgcggggctgcggcctgtgcgtcctctacaactacctcttcgtggcgggcggcgtggcgcccgcgggccccgacggccgcgcgcgcccgtccgaccaggtcttctgctacaacccggccacggacagctggagcgccgtgaggcccctgcgccaggcgcgctcgcagctgcggctgctggccctggacggtcacctctacgccgtgggcggcgagtgcctgctcagcgtggagcgctacgacccgcgcgccgaccgctgggcccccgtggcgccgctgccccggggcgccttcgccgtggcgcatgaggccaccacctgccacggcgagatctacgtgtccgggggctccctcttctatcgcctgctcaagtatgacccgcggcgcgacgagtggcaggagtgcccgtgcagcagcagccgcgagcgctcggccgacatggtggctctcgacggcttcatctaccgcttcgatctgagcggcagccgcggcgaggcgcaggcggcggggccgagcggggtcagcgtgtcccgataccactgcctggccaagcagtggagcccgtgcgtcgcgcccctgcgcctccccggcggccccacgggcctgcagcccttccgctgcgccgccctggacggcgccatctactgcgtgagccgcgcgggcacctggcgcttccagcctgcccgggaaggcgaggccggcggcgacgcaggccagggcggcggcttcgaggcgctgggcgcccccttggacgtccggggtgtgctcatcccgttcgctctcagcctgcctgagaagccgccccgaggggagcagggcgccccgtaggccggcggggtcggcgggcgtctccctcggcaggggtttgcggggcccaggtccctttgggcccgcggaggaggacgtggtggggagtcggggccgctggccacgctggtggtttggacacttcgaaggagccccgaggacgctctcagggccgctttcgctttgctttccttttgcttgtctttgcttctgggggtggatgccttgagacccaggaggtgtgcggatgggtcccttgacagacaggacacagagaaggctgtgggatccaaagggtcagcctcagggtacagtgggggttcctgaggcagcctgcagccggccccggggtgtcccgaaccccgcagagcaccgaggctgtgcgcaggagcctgggaccctcaagtaggtcgccgcgaactatcgggggaagcacgcagagaggggtcacgccttttatttttggcttgagatttaaaattataactgataagtaaagctctttctgatttagttgaaaatttcgtaccatgtgctcgctttggttggctcaactccaaaaagagtaatttaataagcattaaaggtaaaatctttgattaccagtaaggtttcttgttcaatatgcattggaagtatttccttccccacaccattgctactcaaactcacatgcctagagcagctccgtctcactgttggaccgagggggctttcatattttcagttgaaaggatgttaactgatgtagcgatgatttaccattatttaaattttaagtcttcagtggctaaatgtgaccaaacagcacatcataagtaggaaaaacttaccagggtgcttgtctatctaaaaagcaatttttgatagtccactctgtatgcccagccgctttcataatctggaacgagataaaatattcctaaaaagcggggaaaatcattttgctttgacagttctataaaaaaaagtgtaggcacattttaaacccactgtatatgatgttttcaatgtggatcgtgtagttctgatgagggagattaatttttacaatcagtattctaagtgtggccgagtgacagtgggcatagatttataacaaggaagtgacgtgcttatcaccatagatttgcaagtaaactgcatgtatttaattgtattgaattgagttccaaaataccctaatagaattaacacgaggctcactgcattgacagggtatgaggattaaaaacaaatcagttgggtcgtttctcatttaacattttacttttcaagtgtgtatacagaggacttactattatgactttgaggatgagatccatgctcacaaatagaggcgaacatttgaactccgaatccaacccattttcttactgtaagaggaaaagttactggaacgtaactagttgaaatcctgcctactttaatattatttgtttgttaatccagtaatgggaactgccatctctgtagaaatcagtgggtaattgaaaaataggttatgctttttaaagagtctgtggttatgagaggtctcagttaagtgtgtttagaagtgatcagcttgaaccttatgcatgactcgggggctggaatttatgatctgggttacggtatgttctggggacgtgtctgcttgcccatggttactcatgaactgaggggatagcttggcaacttggttaatcatcttgggaaagaaaaacagacttcatatcgcctgacttgattggccttttataggagtatactggagaaatggttgtagaaacagtatttacagcaaaaggaaacaaataatgttcattttaagcaatgtaccattcacactgtcctgccttttcctctagaattttattaatggtagaaatttttatatgaaatgggaccaggaccaggctaatattttcagtccttaaatatcaaactcatatgctgttatcactgtgattttacttgtgaaatcattcctgtaatgtttagtgtttgaaaatgaaatattgaaattaggtttccagagtaacactgtccccggaaaaggatatgagaagtggtggatgttggatgggggtggttgcacagtcctgtgcggttcccatggctttccagcgtttcatttagtgaaggaatgctcacactagatgtagcacagcttcctgtggggcccggcagcaaagccccaggtgctccctgtcacctcacaacaaaatgcactaagaaacgtaaagaataagaggaattaatacccaccattaaaggatgtccggccaacctattgtggaaatttatagaatagtatacaccacagttctgaatagtgatatcacataaaaatacatactagaggacctgccaagccatgagcagtgtttttgctttttgggggccagtccctggggtgtggagccgctagggtttgcacccatgaaacagaaaagccacaccctccaaggtgtggctttcattttgggactgctgcagggagggcagaggcattgctgagactgcctggcaacggctgatgccccaggtaggaccttttccatttcaaagtggtgttctaagtctgcgtccaacactgtgtaggaaaaaggttggtgcaaaaatattcctggtcatccacccattaaaatagttagatgaggctattgccttgatgacagctgtccacactcctcatgaaattaacccgtatgccggggcatttccaaatgtctgactcgtgaaattaacccatacgcaggggcctttccaaatgtctgaaaaggcagtggtgtcttttggggaaaatgttatgcatggaagcctgaccttttgcttagttgacagcaatcccttctgtattgccaatcaaggttcatttgagatgcagaggaatgagcttgagccttcctccttttccttccggttttattcttcctcttgggaacatccctccactccgcactgcttcctgcagctttgtagagctggatttggaacttcgggatttggtttctgagtctgtggaggcaccgacttctccttggccacatcatttccacgttttccacatccgggaggaagcctggactgtgcagccttcgggcacccggcacagacactgtgctggcaggagcttcagacacgccaagtggatggatttggattgaacgcatatgaaacaggagacgggttctcatgtgagatcaaagctcctccaaagcctgttcaagctctaagcgattctcaaatgttaccatttattaaaggtaaactacacctgttgaaggccaagttcagggcagctgttgtgatctgtgtagttaatgtatttattaatgcttgacttttaaaatcctgggcataaatagtgcagagcctcgtatgtttgtcagttcatgccgagatgaaataaatcacgcagaaagtgccagtc

SEQ ID NO: 387026 - DNA, 1255 bp, Homo sapiens
  misc_feature (19)..(19): n is a, c, g, or t
  misc_feature (35)..(35): n is a, c, g, or t
  misc_feature (45)..(45): n is a, c, g, or t
  misc_feature (57)..(57): n is a, c, g, or t
gagagagagagagagaganagagagagagagaganagagagaganagagagagaganagagagagacagtctcttaggtaacttcctgtaaacgatttggaaataggatgttttcaacgttcttttgtcttttgctgaagtcaggatagattcaagacataatctcttgtaagatctaaatagagcaaatgtaaacaaaagtgcatttttgtattcttgttaattttagatgctttcctagcttacaaaaagttctatttttgggttaaaaatcaatcaactttctgatatttccccttctgcaatgttattgttcataagaaaacacgagctgaaaatggaaatctgcagttgtttcagttgtcttgaatttctttcagtggccacatcatttccacgttttccacatccgggaggaagcctggactgtgcagccttcgggcacccggcacagacactgtgctggcaggagcttcagacacgccaagtggatggatttggattgaacgcatatgaaacaggagacgggttctcatgtgagatcaaagctcctccaaagcctgttcaagctctaagcgattctcaaatgttaccatttattaaaggtaaactacacctgttgaaggccaagttcagggcagctgttgtgatctgtgtagttaatgtatttattaatgcttgacttttaaaatcctgggcataaatagtgcagagcctcgtatgtttgtcagttcatgccgagatgaaataaatcacgcagaaagtgccagtcaaaaaaaaaaaaaaaaaaaaaaaaaaaaaaaaaaaaaaggggggggcggaaaaatttcccccgggggggccatttaacctcttaccccagttttttggtacaaagagtgtgccgccctataagaggaagagcgcgtattataaaaaacaggaggcccggggccgcgcgtcggtttaaaccacagcgtgcggtcgagtcgggcaaaaaacgcgcccccagctgggggatatcctggtgggaaagacgaaacctctatctctgtgggggggggcggcactttagctcggcgcacaactctcccctcacagaaaatattagacggcttccagaggggtaatattacaacacattctctccaggttgtcttatcagggggggttcaacaccccagcacgtgcatataatgctcggctgtctggaacaagttgcgtggcttaccgagcgtctactaattttcgcgaacaatttttttcacgcggacga

SEQ ID NO: 387027 - DNA, 871 bp, Homo sapiens
agcccacccgcctggctgcgcgtcccgggcccggcggctgaagaggagccgcggcgaggaacaagagtgtggtgagaggacgcggaaacacctgatatcccagcaaaggaagctgcagaggaagggtcctgccccgtgagcgaggacagcctccaggagcacagcggcttctcctaacatccccctggcagtgaattacggatgaccccgtatatgaggaggtgtggatgccgacacacggggagagctcctgagaccagcacacaggaccagtgtcctccccgtgaccttgcagttgtgtagccacaagtgggagccacagagaaggagagcccataaggggactcttttcaagacacggtgttaaatcaaggctctgaagttggggccacagccggtctcagctttctgtgttctgggggcgcggtgatatgacagcatgtgaagtgagtgggtgagcacggactcctgagagcgagggcgcacccaatacctagttatccggtactgcagagagacacctggtcagccagcgttgcaaagagggatagctagtcactcaggctgcagagagagacacctggtcacccaggctgcagaaacaaccgcagtcaactgcagctccagtcattgctggatgttggctgacgcggtcctggcgccagctggagatccattcaccaagactttctgggcagatttaaagtggctggggttcagaagttcagcaagttggacacacccctcctcgctggagaggagagggcaaaggcgaggcgggggagcagcgtgtgagattccccccttcacacacacatgtgacgtaataaggtgttacagacctggtcctggccacacatcacgtaaggtc

SEQ ID NO: 387028 - DNA, 406 bp, Homo sapiens
aggagggcttgttccagacaacatggtgcctctttatcaagcacagccatgaatcctggaattcatgtcagagggagccactgcagaacttggaaaagtggcaagaggaaggcgaactgtctggaaaccaaacccgagtgtcggaggaagagcagagtggaagggtgccttctgcccccaacccaacagaagcaagggatctggcctttcccatcccccaggttggcaatggaagccagccttggtggactcattcctgtcctagacccaagcggagtccctcctatagtaacaggtgaacccagacccgccaccaggtggatcagttgggagctttgccaaaagtaagtggcctgcggagactccttccctatcaggcctgagaccccccctccccaacctagag

SEQ ID NO: 387029 - DNA, 430 bp, Homo sapiens
gcttttctactaggctctgcatctagatgatggtccagactcctcagcctgtgaaacaaagcccttcataaaagagcagagctacagctagtcagctcccttcctgcagtccaccccctcctccaccatactgagaattggcaattcctgtagcactctttgtatgagtccattttcacactgctataaagatataaccaagactgggtagtttataaaggaaagaggtttaattgactcacagttctgcatggctgaggaggcctcaggaaacttacaatcatggcagaaggggaagcaaacacatccttcttcataaggcggcaggaaagagaagagcgaggagcagagtgggaacagccccttataaaactgtcagatctcctgagaactccctcactgtcacgagaacagcatggggaaaccactc

SEQ ID NO: 387030 - DNA, 398 bp, Homo sapiens
tgaaacttttatctattgagtaagtcagaaatctataccctttccctactctcagatatcctttttttaactgtgatttggatctttctgtcattctttagtcagtagtttccaataatatctgacaactgggggtgggggtgggttaggatagagataatgaaattttgttcctttttatttcagtcatcaaagataagccctgtggcattagcttggtttattatgcaactgtggaagatctagatggcatcaattgtattcatgcaatataatgatcaaaagtggaaagatataggttatagtttgtttccatctgcattctaataaattttctcttgttcttcaacgatctggagatgtgaaagggtacacatagaaaacagaaacccagaagt

SEQ ID NO: 387031 - DNA, 685 bp, Homo sapiens
gatttgggaccgcgcttggtgttggtaccgggaatcgcggccgcgtcgacggattacaggcatgagccacggcgcccagcctaaataagatcttaagattagattggcaattttcagagtggttcatggatacttggggatccccaggacactttctagggagcacatgaggtcaaaattgttttcataataacactaaaacattacctgtcttgactgtttatatttatactgatggtgcaaaagcaatcattagtaaaacttgatggtaccttagcatgaatcaaaacagaagcaccctactttactagaaagttgttttctttattactgtgtacttgcaattttaaaaaacaccacttttgcttaagaatatcactgataaagcaatattttgttaaatctcaaccaataactacacgtattttaaatatctccatgataaaatgataaaagtgtaaagcactacttgtacatgtgaaattgtaatagtagttttgaggaaaaacaagcacttgtgtgatttgtaagctgaactagctgctttttttcatagaataccaaaactactagcgagaacaactaataaaatctattattcacacttgagtatttggcacacattttctcaaaaatgaacaagcttgtgtcactcaaagaaaaaactgacgtacatgaaacagga

SEQ ID NO: 387032 - DNA, 425 bp, Homo sapiens
agggcaaggcggtgtgggcccagccctgtgggatttagctcagcctcactttccctgccgccttgcagaggtctggctgtccttcgagtccccgttgatctctggaattcaggcattagctcccagagccctttaacattcattattctactctatgagctaggcatgatgggggccgtcatgccccttgaacagatgggaaaaccgaggcttggatcacagagctggtgggacacagagccagtgactgacatagaagagcagtggggtagaattacagttccatctggtgccttttctctgagcaaagctgtatccatcaccaccaacagaaagtcccagggaagcgaaaccccagggcagtgtggtgtgattcatgcccacccatctttgtggccttgaaggcaagaaacagaaatcagaca

SEQ ID NO: 387033 - DNA, 741 bp, Homo sapiens
aggaggctttccgggaagagaggatgaggtgtgcttagaagcagcttattggaaagtgacggtttaaattcctggtaacttactttcctcacctgtaaggtggagattgtattagctaagacacttttggttgcaagtggcagaaacccaactcaatctgacttcaggaatttactagctcacagaacttagcagccaaatgtaggtctggcttgggcctggctgagtcctgacatcaggatatgatctcgtcctctccaactcttgactctactttccttgatgttggcttcattttccggaagcccatcccttgtggtggcaaaaaggctgccaaaacccctaggcagatatcccaccctctcagaaatcccaacagaaaaagaaggtcccaggagtatgtctgattggaccaacttgggccacgtgcctatccccaaaccaaggactatagccagggggatggaattctactttgagtggccaagtccagccacctcgctggatctgagggatgggaccagttcttctgaaggtatatggactgagaatgttttcccaaggaaaatggtgcactgttttcaaaataagggggacttgatgctgaataggcaaaggcaaatatgtccactacagggctgggaactgcacctatctcatgcaggcaatgtctagcacatagcaaatatccaagacctgccagtcattatcatcatcattttgccagaggtgggggtttgg

SEQ ID NO: 387034 - DNA, 433 bp, Homo sapiens
tactaaagtatacagtgtgaagctaggaaggtcagtatatgaagggtcttggacaccggactaaggaacctggggactagctgcagggatggggcagggctgataatgggatcagattcgtaaaccagaagatgactcgctcatggggcctctgggaaggacggagttagtgaaagacactccaggcaggaagatggtaaaacattcccaggatatcccatccttcctcagtggatgctctatgaccaagtgttaaagccattgataaaaatggggccaaaccaagcacaaagaattcctctgccaatctctgaatgacaagatgctttgtagggaaagaaaacatgtacagtttggaagccctacatcagaagtggcaaaatgggtcaaaactggcccttgggcttgttttatttggcctgagcaaaaaaaa

SEQ ID NO: 387035 - DNA, 262 bp, Homo sapiens
gttaagttacatatatagataaatgatagacagacatcaacacacacatgactgtttacaaattacggaggttacaaatctaaaacacgtgatttttatctcaaaataataaagattaaaatgttagcaatgttcatccattggtcaaaactttgcattcttgtcttggattcttgcttatattcatcaattttaatctggatctaaacacttaaataaatgaaaataacatattaaataaatttgtttatgcactgcactt

SEQ ID NO: 387036 - DNA, 311 bp, Homo sapiens
tttaatacttcatacagtggaaaagttacagctgtaataaaatcaacagatacatctctggttaatgttctcaaatgagaaaattgactgcaagaacatttgtccaaatacatgtttttatatattttatgctactttccagaatattaacagttttacatagcgctgttttggaagtcactcattgttttcatctttctgattaagaaatagggccaaagttgtacattgcactagtagtagacttttaaagatgtctttgtctctttttcagtactaagcttcaagttcatagattatccttgatcttt

SEQ ID NO: 387037 - DNA, 501 bp, Homo sapiens
agaggaagcagtggggagagccctgtgggtactctcattcccagggaagccatttctgactttttctcacaggggtccttggggaggactgccagtggaattggggaaagaccacagggagaaggaatcttccagctgaactttgtaacaactttgatggaatgtgaagtttcctggacggaatctggtgaagatggtgaacagggagtgcagatatgatcacagaagatgcggcaggctgggaggtacaaaacctgaaagccctgcttgctttctcagtgaggggggttgtagcctggggcaggttctcagccctgctcaccggctgcctggaaataaacctggagctattgaggggacacggcaagagtgagaccagcctttcaggctgcatgggaactgggtgaggcctgtcactgttccctggcgacctgtgtgacacagcagaggcagccataatccacctgagaacataagtccattggcctgagaaccacaccc

SEQ ID NO: 387038 - DNA, 1421 bp, Homo sapiens
agactggatcttgctatgttgcccaggatggtcttgaactcctggcctcaaataatcttccctccttagccgccgtaagtgccgagattacaggagagagcctccgcgcctggcctacagtatttttattataatccatcatactagcgtatttttaacgttccccaccatggcgggtatttttattacccaccatgctatgctatagtatttcaaaaattaatcctattgtagcatgtaaaaatattccattctataccatactatattcatcattacctctgatactacagtatttttaacatgactcattgtgctattgtattttttcattacccacaataccacaatattactgtatttgttagcactgcctgccattccttattattattatttttgcaatggagtctcgctctgtcacccaggcaggctggagtgcagcagtacaatgtcggctcactgcacctcccgggctcaagcgattcttctgcctcagcctccgaagtagctgggattacaggcacgcgccaccacgcccggctaattcttttgtatttttagtagagacagggtttcgctatgtagaccaggctggtctcgcactcctggcctccagtgattcacccaccttggcctcccagagtgctggaatgacacgtatgagccaccacactgacctttttattatttttatccaccatctcgctgcaatttcagtattgcccatcgacctatattgcctcctggtaatgacccctgaggaatgagccatgccatttccataggtggaggcgacgggtcatggtggtgagaacttcactgacctggaagaggtggagaagatgctgggaagctgctgagggctgcccacctgtgttaggagaaggcagatggggacccatggggacagtaatactattttggatccacacaacgggagtggaaaatgccttgaggcacagcagcgtctgaggcgggtgagaaatccggcctgcagagtcgcggctggccttcagatctgcgggctgcctgtgagatgccgtgttacctaaatccatttgggcactgagttccaggagtgggggcaagaattccgatgacggggctttatccggtgcgcatccagctcagagtggttcctgagaccagccaccatgggcagcccaggatgtgctcatccttgaggctttccgaggcatcaaggagatggttggataaagaatttagcacagagcttgactgatggcaggcgcccacaacatgagacacattaataatgtgtgtggaggccaggtgtagtggttcatgcctgtcaccccagcactttgggaggcagaggtgggaagatttcttgaggccaggaattcaagaccagcctgggcaacacagcgagacctcatctctaccaaaaaaaaaaa

SEQ ID NO: 387039 - DNA, 503 bp, Homo sapiens
tgaatcatgtgatgcttgccaaaaccgctgaggacatgggaaagaagttctacattgtctggaccaagctagacatggacctcagcacaggtgccctcccagaagtgcagctactgcagatcagagaaaatgtcctggaaaatctccagaaggagcggagctctagaaaccaacaagtgtacccaaaccacagccacgtacctcttgcttgctgaaaggatcctgagagaaaagcaagacaaagaaatacagatcagctccgcaagccctagaaatagcaaggcccagctcagctggcctgccatgagaaatacctcaagagtactccagagaattccacaaggcccagaaatattccttccagaagaaaactatacgtaaatctgctcaggatattcaacagctagccagtgcatatgacatatactgggtacttaagaaacgtttgttaaatgaatcatgattataaagaaaaaataaattaaaacttatgtttagttaaa

SEQ ID NO: 387040 - DNA, 1823 bp, Homo sapiens
gcggccgcgggtctcactgcaaagagggtgtggcctaaactctggccgccgccgaaactctggggccgcgcttggccgcgagtacaaagcgggctggtggccgctttgcggcactgccccggccgcgcgcctcccggggggcccacacccctgcgttcctgaaacccttcttttgaaaaatgccctttcgaacgcaaccgtccgccccagagccacgcgggcacggctcgagggaagtttgtttcctttttcaaattgctccggtcaccttaacggtttgagtcttccggagtcacgcccgcagcctcgctgcccccatctggcttgggcagggccgaagctcgtctcccgctttaagagcgcgccagccatttctctgcctgctcttccaggccggctgggcggggggcctcccaacggcttcctctccagttttcaaaggctgcacatttcacttaactatttgaagtatttataggcaaatacaatacgcagggaagcttcccgccccgagacagctcctccacgcaacctaccacagactctgtaattagagtggcctgaagaagccgggagaggctccatgaccccggcaggctctggccaaaccttgctgcgtttcatggagcccctccctgtccgcgcctgggacgcactggccccaacaggttcctcgactcgaattcgctgtttgggttgctctgtggtttcctcgctgactgaaagtggatgagaataagaaggaaactgagagatgatcaggcaggccagccttcgcgatttatgaatgaggagcctcccaccctgtagaactgcttggattagaagtgggcaagttatttaagcttacatgcatgcttataaagcttctgttttcacatgtagtaaggtggaggcttgacgacatttacctaatgagctgttgtttggattaaatgagatggttggtgcatggcagtcatttagcacaagtacctggcaatgtaagagaccaataaaagctgggctttattttccctgttgttaaattactgctgctttcccccaaagtcatctctgtttataaactatttgtctttcttctttgtttccaggacactttgtgcccaccctatagcctgatcttcagtgctgatagcattgatttagaataactcagatgctattaactctgtccccctggaattcatgttaaacccgtaatccccagtgtgatggtattaggaggtggggaactttaggaggtaataaggtcaagacagtggagccctcatgataggattagcactcttattagaagagacaggagagagatgctttcttactgccttgtgaggacacagaaggcagtcttctgtggaccaggaagagggcccttaccaagaatctgataccgtgttggcatcctagtctcagacttccagcctctagtactgtaagaaataaatgtttgttgtttaagccatcctgtttatggtatttttgttatagtggcccaaagtgacaaagatctcagaccagaggaaacatcaaagtcttaacctctgaagcattaagaaatgagaaggcaccttcttagccattctaggtagcaactttctactctagttaggctgaaatgcacggccctgtctatgtctgtttcagttatcctccctctctctgaaatcaagtcacacatcattcatgctacttacttaacactttgccctttgccatctgatgccacctcccgtactattgtctcccattatttaacctgttatttattgtttcatgcattcattttcatcttagagaataaacatcttggaattaaaaaa

SEQ ID NO: 387041 - DNA, 480 bp, Homo sapiens
ctaaaataattgtgcaaactggtgtccttccaatctttttgatacctatataaaagtttatttccatataaatattccacttcagctttctaaaaaacttaatataatatagagatatttctatatcaatacatataaatttaatttagcaatggcaaaaagttagaattcatctaaagatttctcagtaaaggcaagcccaaatacactatgaaatgtccattataggtagctattgagaaaaagataaattgtatagtgtgtgtactaacatgaagagattacaaagacattgttgagtagaaaaggcaggttgcagaactggacacaggacaaggagtaccttcaaaacattatatggccaggcacggtggcttatgcctgtaatcccagcactttgggaggccgaggtgggcagatcacttgaggtcaggagttcaaaaccagcctggccaacatggtgaaaacctctctactaaa

SEQ ID NO: 387042 - DNA, 331 bp, Homo sapiens
gctaagaaacctgtattttactccactagaatggaaactttgccataccacagatattttaatctgttcagagattatgcaaaatgaatacatttatgagcactaaaataatcttatgtagctgagtaagctccaaatagagtatattctcaatttggaggaaccaagataataaaataatgctctaaaacagcagtgaaaagcaatacaaaatggtggctatatgcagaaatagtctattctaagaaggtccataaatgtttactgatgagcaccacatttctctattctccatcatgacatcatgatatatttgagaagacaacaccgg

SEQ ID NO: 387043 - DNA, 440 bp, Homo sapiens
gaagactctttatattttagaactgactgtttatattctgaaactgactccaaagtcaagcgaatacccccttttcacctacagtatatgtaaggtggtaggtaaatagtataagaatttttatttctgtttcttttcatttatctttattttctaatctcactcttctcaaactgtagtgaagaagccatttttatggccaatccatcatggactgataatttccagaaatgtaataaaaatcactagaaaaattaaaaagcaaactacaagccataattttttgttatcagattcaacagatatacaataactgtcagtttgctgtgaaagtttctagatgcttgctatacttctgttgtcactgacgggtaactaccagttcatgggtgagccatggtcgcagaccatgcttggggtagtgttggtttcgaatctgc

SEQ ID NO: 387044 - DNA, 303 bp, Homo sapiens
ggagtagtgacattaagctgagatcttctactaattctagacataagtttccccagtgggtttgctcttttgctgatttaaacaacaatgtattggcactggggttcagagtgggataagctaggaaactaaagggatttcaggggaaagaatcaccccaaatcatttctcccttccatttctcttaacagaacgctctcttctgtgtcataccctaaagttaaccaaaaaataatctggatactccacctctgcataaaacacagatcacaatcattatcatacattcttcttcgcatctca

SEQ ID NO: 387045 - DNA, 821 bp, Homo sapiens
agcggggcatcagacctgaggacagaagggttcgggctgcaaggaatcctattgtgtgagagccatgacacagtgagtgggagttttgatcttgacctcctggagcattttcatggaaaaggcagttccaggattctttgtggcctcttccacaggagaaagtaaaggagctagaggcctctaaaaatttagttattgaagaactgaagttattcacagcaacctggcagaagagaatgtgaaatacgtgggtctcaggtaataggtaatatccctaattccacggtgatgctgagaagcagagggcgccctcagaagtagtttctcttaaggaatttgcagctggcctacaagaacaggaccacagaatcaggtcctgtaaaagggtatgtaaaagttgtattttttgcacatctgtcttgtattctgagtcacactcctctcattgattatccttcacaatagccgttgttttaacagcgttatggagataaagttgagatggcatataattcacccatttaaagtataagattcaatggcttttactatattcacagagttgtacaagtgttaccacaatcaattaaaaaatgttctggttactgtagccttgtagtatagtttgaagtcaggtagcgtgatgcctccagctttgttcttttggcttaggattgacttggcgatgcgggctcttttttggttccatatgaactttaaagtagttttttccaattctgtgaagaaagtcattggtagcttgatggggatggcattgaatctataaattaccttgggcagtatggccattttcaccaaaa

SEQ ID NO: 387046 - DNA, 484 bp, Homo sapiens
tcgaaattcaagttttggtcaaataaaactatagtcacttagagatttttttctaaattattattattatcttcagcaataacatggattcacagaggaatggctaagttaaatggttaaatagaggctgtgaatggaatctcataccccaatagactttgggggaagagtcaataggtttatatacataaaagtcccaagcagtccgcctgcccctgaagggtaaggacgcaccgagcactccctttctcctttcagtggcaacactcagcaagattgattgccaaggagctcactttgaggaggatctcaccatcgcccttcagttttcaccaatgcacatcagcatgtccctccccagcacattccccttaaaatgtgtattttcatagcaaaccaccatggcgcatgtttacctatgtcacagacctgcacatcctgcacatgtaccctagaacttaaaataaaagttgataaaatgtca

SEQ ID NO: 387047 - DNA, 508 bp, Homo sapiens
cgctgagtaaatcctatggggcgacatatttgattagattcggggtcagtgggtgaggggacatactccagtcattacaatctgaggacagcgctgagcactaacagatgtgacaacttataacacaggtacttcctccttcactgcactttatccaaaaatagacatcttcagaggttctttaccttttagccttaaaggatttgagaagctttagaaaacaaattatgatatcaggtctagatttattttgctattaaagtctcacattctgtacaagtattttattattgtttgtctaggtctctgaaattagaagagacagaagaaaacatattatataaatttaaagtatgaattagccaggcgtgttggcacgcacctatagtcccagctactcggggagctgaggtaggaggattgcttgagcccaggaggtcaaggctacagcaagcccagattgttccattgcactccaggctgggtgacagagcaagaccctgtctaa

SEQ ID NO: 387048 - DNA, 411 bp, Homo sapiens
catgttcatggataggaaaacaatattgtcaagatgtccattcttcccacttttatgtatagattcatgtagtctcaatcagaatcccagcaagttatttcatggatatcaacaaactgattctaaagtttatatgcagagacaaaatacccaaaatagtcatcatactattgaaggacaaagtctgaggactgatactacctgacttaaagacttactgtaaactttagtgaccaagacaatgtggcattggtgacaggacaaatagatggatggaacagaatagagaacccagaaatactcacataaatacagtcagttcaacttttaccaaggagcagaggcaatacattggagcaaaaaatagcccttgaggaaatggtgctggaacaaatggacatccactttcag

SEQ ID NO: 387049 - DNA, 570 bp, Homo sapiens
ctcagccctggtctgctggctgaggagcctgtgtcctgctggcagggtggccctttccctgctgtcccctcctgtgccttctgagccaccgtttccctcacacagccttgttcatcaatacactccggccacgcaggccctagcattgttttttagaaacctctcatcttttgcttgttggtttccttactgttatcctttgatcttaagagatttttattccttgattcctccatgttcaaggtgtcttaggagaagaggaagacaaatagtatgccctgtctctatctacaatttgtcccttttttaagatttctactttgggttaattttcctggtattagaacaagtcttgcttttggccaagcccaggtatggggaataatttggtgttcctttcaacagatgtttcaatatttgttcatttgaggagaggtgtctgggaggggtgctggacagcagcagctggtggtggcttgacaggttcttggccatcccaggtgactgtgcctagtccctaactcacaggccccagcccacaaaacaaaagccagttcttagccagcacca

SEQ ID NO: 387050 - DNA, 155 bp, Homo sapiens
cttggtattcttacatccctatactctacaaatgacaaatgaattcagcgatccttttaaactattaagtcagatcataaaactcctctgttgaaaactctccaacgccttcccatctcactcaaggtaaagtccaaagccctttaaaaaggtaa

SEQ ID NO: 387051 - DNA, 824 bp, Homo sapiens
acaattataactaataacaaaatagaacaattataacaatatactgtaagaaaggttatgcaaatgaggtctctctctctcaaaatatcctattataccatactcacccttcttcttgtgatgtgtccatggctggatgtcaggagcagacaatgtcaataactcacaggtaggtagcacatacagtgtggatacactggacaaaggagtgattcatatccccacaggacagagtcggacgatgtgaaatttcttcatgctgctcaaaatggtatgtaatttaaaacttatggattatttctgaaatgtttaatttaatattttcagactatggctgatcatgggtaactgaaaccatggaaagaaaactgctgataaagaaaatactgtattgcaatttgtgggcagcaaaagtccatgtctatatcccccataatagagtgctgagcatacagtaaatgttccacttactaataccacaaatacgtacaggcaacatggcatcatggttactacttagtagcctgtgtttgaatcccaactcagccacttactatttattagtcccgtcaacttgaccaagttacttaacctctctgttcttcaatttccccatctgtacaatggaaataatgtgttaatacatataggcaacccttggcatcctggggattggtcccaggacacccctcataccaaaatctgtgaatgtgcaagtcccttatataaaatggcatagtatttgcatataacctactcatatcctctcatattctttaaagcatctctagattacttacaatacttgatccaatgcttgcaca

SEQ ID NO: 387052 - DNA, 496 bp, Homo sapiens
caatgaagatggcacattttgttcagggaatggtgaattaagtgtggcagaaatgctttgtagagacagtaatttgcttgtatggaattttgcccaagagacctcattacagtttctaattttttgatgttatcatgcatcactgcccttgtcagatagtatcatgatcacaataacatcaagcataatatttcattgattctcacaaaaacaggtgggtgccacagttatccccattatatgcacaaaatgatgaagacttggggttaatgagcgatttgcccaagctcacctgaatattaagactgagtcaaatgttagtctggtctgacttcaatgcttgccttgttcatgagcaccatgcattgcctctcctatgcagttaagcaggtagacaggtgagagaagagcccgtgtgatatcgggggaaattcaccccgatatttcatgtaggttcttttctgttttccctgagtgttggccggtctgagaaata

SEQ ID NO: 387053 - DNA, 240 bp, Homo sapiens
tactactactactaaattcgcggccgcgtcgacgctttatatctcttagctattacagccaccaatgattccagtgccatgcactgttctaattcatgtaatatcaatgatggtgataatgacagttaatacttaaactattgtgcttatgttccaagcactgttttaataactttaaatgaattatgtcattcagtctttaaaatcaccctaaaacatgtcgacgcggccgcgaattta

SEQ ID NO: 387054 - DNA, 449 bp, Homo sapiens
cccctgaatccttccgtttccctgccaaatcatttgatgttgattcaggcccctctcagtgctgcagagccctcctaagagaacttctcccacttctcttagccccagacccagcttcccttggttggaggagaaggaagcgcaaacgcggatactgcctgcatggtcctgcgaggaagccccaccctggccctggggccttctgtttgcctgtcactcgctctcgatgctaccttctctcaccagtgctttgggtccttcccagcacagggcccagcatagcccttctcttccacctagcagattccagcacattctttacttttcttttttttttcttgagacggagtctcagttgttgcccaggctagagtgccgtggcatgatgtcagctcactgcaacctcctcctcctgggttcaagagattgttttgcctcagcctcccgag

SEQ ID NO: 387055 - DNA, 296 bp, Homo sapiens
tgcagtggcatgatcttgactcactgcaacctctgcctcccgggttcaagtgatgcttctgcctcagcctcctgagtagctgggattacaggtgcacgccaccacacttggctaatttttgtatcattggtagagacagggtccttgccctgttgcccagcctggagtaagcaatccttctgccttagcctcctgagtagctaggatactactactaaagtgcatgtcctttctttgttatatcagtaaagaagattgatggattcttattttactcagtggattgcggttcttta

SEQ ID NO: 387056 - DNA, 729 bp, Homo sapiens
atccagttgctgcccagtgtcctagttaaacatgacattttctcaatcattctgcctgaaatttctctgatatctttttataaagaccttgctggctcagtcttcatgcagcctcagtactttgcattataatccattagcttatgatgattacaactaacgcaaaacttagagatgtaaagcaacagccattttctgcatctcacaatactggaggctgcatggatgtttcttctgatctggtctcccatgcatctatggtaagctgtgagacaagctgatggctgcacctgagatggtctctctcatacatctggtagctgtctggctgtcagctgggatgccttggttctcctcagtctggcttcctggctccaataggctagcttgagctctttcatagggcaaacttagggttccaagaacagcaagaggatagcctcaatgcaacagtgctctctaagcctctgcttcaggcattttgctgaagccctgctgaccaaagcaagtcacatggccaactcagttttatgggataccttgatggaggtgatttgcactgccacatagcacaacagagtgtgctgcagacatgaaaagatttttatggccaattttgcaatgtctcacaattaaatttgctatttttgttttatttgctagttcacacattctggaaataatgaaggtatggcactccttctatgtgaacaagtcttctgcagaaat

SEQ ID NO: 387057 - DNA, 288 bp, Homo sapiens
caaaaacagacccacagagacggagttggcagacagctttgcagttctttgaatctggccaaagtgaacccagctgttgatcataactgcacaaaattatttcagagggcctactaagtgcaaaagcactgtgctaaacactaaagaagacaaaagtaggaatacaattgactccataccctctaaggatgtattaaaaagttgtgttgggcctatgagtgaactatctgctactttatcattctttaaaatgatgaacttgctgggaatttaaaatagacctttctg

SEQ ID NO: 387058 - DNA, 1018 bp, Homo sapiens
tgcgtagcgaagcccccggcgagccgaggctgggagcgcggtgatggccggtccccgtgagcagagggcagcggcggcgggaccggggactctgggccaatgggtaaagccaggaggaagcccgtgcctggcccgttgggctccctcctcctcagagccgaagcagtccacactcggaacccagcttcacccggattaccgaggggttccacgcctggaggcagagctgcagcgtgggcccgctcgcggctttgcagaaaacaaataatgacacacttctctggaagcccggggcctgggcccagagccgtggcttctgccaaactttctggtcccggacaccaactccccgcctctcagcccgaggccacagcggcccagcaccctgcaccttttaaagtggctccaaaaaggagaaagccaaatagatcagggtggtaggcgcgagtgcagggagctgcgaagttggaagattactgcttttcaaactgccaaagagcaaaatactaagcgagaaactccgtccaaagcaactggaactcgaggttctttactaatgagagttccagttaccatcttcagagaaaggagctcaaaagagggagtttattttttgcggaatgtcttccttgttaaggtttgctattctaaggccgagaatgccagatggggagaacgccatgagcttttgagcttgtgtattttgcgagaggctcgagtgtgaacagtagactacaggccttgagactgagaaggaagctataaaatgtgggccaagggaatgtctgcaggaccgggtttcagagcaccctatcgtggcggataaagagccactaacagcttttttctttatttagtagccaaattcttggttggcgctttgagaaaggagtaagcattaagcgaatttaaccaagtaaaatgtatcgtcctgccctttgtagtcccatagttcactatcctagagatacctatttttcactattttattaaagtgtattgaaaacctaaaaaaaaa

SEQ ID NO: 387059 - DNA, 1084 bp, Homo sapiens
tgcgtagcgaagcccccggcgagccgaggctgggagcgcggtgatggccggtccccgtgagcagagggcagcggcggcgggaccggggactctgggccaatgggtaaagccaggaggaagcccgtgcctggcccgttgggctccctcctcctcagagccgaagcagtccacactcggaacccagcttcacccggattaccgaggggttccacgcctggaggcagagctgcagcgtgggcccgctcgcggctttgcagaaaacaaataatgacacacttctctggaagcccggggcctgggcccagagccgtggcttctgccaaactttctggtcccggacaccaactccccgcctctcagcccgaggccacagcggcccagcaccctgcaccttttaaagtggctccaaaaaggagaaagccaaatagatcagggtggtaggcgcgagtgcagggagctgcgaagttggaagattactgcttttcaaactgccaaagagcaaaatactaagcgagaaactccgtccaaagcaactggaactcgaggttctttactaatgagagttccagttaccatcttcagagaaaggagctcaaaagagggagtttattttttgcggaatgtcttccttgttaagaagaaaattaaagattaaaaaagaaaatgaagggtctggcaactatgaacctaatggtgccctaacgtttgctattctaaggccgagaatgccagatggggagaacgccatgagcttttgagcttgtgtattttgcgagaggctcgagtgtgaacagtagactacaggccttgagactgagaaggaagctataaaatgtgggccaagggaatgtctgcaggaccgggtttcagagcaccctatcgtggcggataaagagccactaacagcttttttctttatttagtagccaaattcttggttggcgctttgagaaaggagtaagcattaagcgaatttaaccaagtaaaatgtatcgtcctgccctttgtagtcccatagttcactatcctagagatacctatttttcactattttattaaagtgtattgaaaacctaaaaaaaaa

SEQ ID NO: 387060 - DNA, 362 bp, Homo sapiens
gtctgcacagaatgtaggcacactctgcctagcctgtaccaaaatgtcagactaccagcaggagaacaggtgttctgcataaagcatattgtttgtattaacagttcaggcatagtgagccactgttatcagaaacctaggtttctagaggccacccaagagtcaaccttacaggaaggcctttctaagcataaacatttatgcttgccatgtttaactcttctgcacagcaggggacctacccaaaatagccaaaacaatcttggaaaaaagaacaaatttggaagactcatacttcctgatttcagaacttctacaaaggtataataatcaaaactatgttacactggcacaaggataaa

SEQ ID NO: 387061 - DNA, 318 bp, Homo sapiens
ttcatgctcctcaccggggcccctctcctatcacccaacttgcctcctcccagagatcttcctcagtgctggaagctgtgccttctatcaccattccctatttctctttgccgggctcagccggggccaccttacagtaatttttttttctctgaattcctgtaaaatttgaagtctatgttcgctaatgtaataatggattaaaatgtgcttggggtttttttttttttttttttttttttttttttttttttttttttttttttttttttttttttttttttttttttttttttacccggggcacaaaataataaa

SEQ ID NO: 387062 - DNA, 1991 bp, Homo sapiens
cttcgggccccacagtccctgcacccaggtttccattgcgcggctctcctcagctccttcccgccgcccagtctggatcctgggggaggcgctgaagtcggggcccgccctgtggccccgcccggcccgcgcttgctagcgcccaaagccagcgaagcacgggcccaaccgggccatgtcgggggagcctgagctcattgagctgcgggagctggcacccgctgggcgcgctgggaagggccgcacccggctggagcgtgccaacgcgctgcgcatcgcgcggggcaccgcgtgcaaccccacacggcagctggtccctggccgtggccaccgcttccagcccgcggggcccgccacgcacacgtggtgcgacctctgtggcgacttcatctggggcgtcgtgcgcaaaggcctgcagtgcgcgcattgcaagttcacctgccactaccgctgccgcgcgctcgtctgcctggactgttgcgggccccgggacctgggctgggaacccgcggtggagcgggacacgaacgtggacgagcctgtggagtgggagacacctgacctttctcaagctgagattgagcagaagatcaaggagtacaatgcccagatcaacagcaacctcttcatgagcttgaacaaggacggttcttacacaggcttcatcaaggttcagctgaagctggtgcgccctgtctctgtgccctccagcaagaagccaccctccttgcaggatgcccggcggggcccaggacggggcacaagtgtcaggcgccgcacttccttttacctgcccaaggatgctgtcaagcacctgcatgtgctgtcacgcacaagggcacgtgaagtcattgaggccctgctgcgaaagttcttggtggtggatgacccccgcaagtttgcactctttgagcgcgctgagcgtcacggccaagtgtacttgcggaagctgttggatgatgagcagcccctgcggctgcggctcctggcagggcccagtgacaaggccctgagctttgtcctgaaggaaaatgactctggggaggtgaactgggacgccttcagcatgcctgaactacataacttcctacgtatcctgcagcgggaggaggaggagcacctccgccagatcctgcagaagtactcctattgccgccagaagatccaagaggccctgcacgcctgcccccttgggtgacctcttgtacccccaggtggaaggcagacagcaggcagcgccaagtgcgtgccgtgtgagtgtgacagggccagtggggcctgtggaatgagtgtgcatggaggccctcctgtgctgggggaatgagcccagagaacagcgaagtagcttgctccctgtgtccacctgtgggtgtagccaggtatggctctgcacccctctgccctcattactgggccttagtgggccagggctgccctgagaagctgctccaggcctgcagcaggagtggtgcagacagaagtctcctcaatttttgtctcagaagtgaaaatcttggagaccctgcaaacagaacagggtcatgtttgcaggggtgacggccctcatctatgaggaaaggttttggatcttgaatgtggtctcaggatatccttatcagagctaagggtgggtgctcagaataaggcaggcattgaggaagagtcttggtttctctctacagtgccaactcctcacacaccctgaggtcagggagtgctggctcacagtacagcatgtgccttaatgcttcatatgaggaggatgtccctgggccagggtctgtgtgaatgtgggcactggcccaggttcataccttatttgctaatcaaagccagggtctctccctcaggtgttttttatgaagtgcgtgaatgtatgtaatgtgtggtggcctcagctgaatgcctcctgtggggaaaggggttggggtgacagtcatcatcagggcctggggcctgagagaattggctcaataaagatttcaagatcc

SEQ ID NO: 387063 - DNA, 1884 bp, Homo sapiens
cttcgggccccacagtccctgcacccaggtttccattgcgcggctctcctcagctccttcccgccgcccagtctggatcctgggggaggcgctgaagtcggggcccgccctgtggccccgcccggcccgcgcttgctagcgcccaaagccagcgaagcacgggcccaaccgggccatgtcgggggagcctgagctcattgagctgcgggagctggcacccgctgggcgcgctgggaagggccgcacccggctggagcgtgccaacgcgctgcgcatcgcgcggggcaccgcgtgcaaccccacacggcagctggtccctggccgtggccaccgcttccagcccgcggggcccgccacgcacacgtggtgcgacctctgtggcgacttcatctggggcgtcgtgcgcaaaggcctgcagtgcgcgcgacgagcctgtggagtgggagacacctgacctttctcaagctgagattgagcagaagatcaaggagtacaatgcccagatcaacagcaacctcttcatgagcttgaacaaggacggttcttacacaggcttcatcaaggttcagctgaagctggtgcgccctgtctctgtgccctccagcaagaagccaccctccttgcaggatgcccggcggggcccaggacggggcacaagtgtcaggcgccgcacttccttttacctgcccaaggatgctgtcaagcacctgcatgtgctgtcacgcacaagggcacgtgaagtcattgaggccctgctgcgaaagttcttggtggtggatgacccccgcaagtttgcactctttgagcgcgctgagcgtcacggccaagtgtacttgcggaagctgttggatgatgagcagcccctgcggctgcggctcctggcagggcccagtgacaaggccctgagctttgtcctgaaggaaaatgactctggggaggtgaactgggacgccttcagcatgcctgaactacataacttcctacgtatcctgcagcgggaggaggaggagcacctccgccagatcctgcagaagtactcctattgccgccagaagatccaagaggccctgcacgcctgcccccttgggtgacctcttgtacccccaggtggaaggcagacagcaggcagcgccaagtgcgtgccgtgtgagtgtgacagggccagtggggcctgtggaatgagtgtgcatggaggccctcctgtgctgggggaatgagcccagagaacagcgaagtagcttgctccctgtgtccacctgtgggtgtagccaggtatggctctgcacccctctgccctcattactgggccttagtgggccagggctgccctgagaagctgctccaggcctgcagcaggagtggtgcagacagaagtctcctcaatttttgtctcagaagtgaaaatcttggagaccctgcaaacagaacagggtcatgtttgcaggggtgacggccctcatctatgaggaaaggttttggatcttgaatgtggtctcaggatatccttatcagagctaagggtgggtgctcagaataaggcaggcattgaggaagagtcttggtttctctctacagtgccaactcctcacacaccctgaggtcagggagtgctggctcacagtacagcatgtgccttaatgcttcatatgaggaggatgtccctgggccagggtctgtgtgaatgtgggcactggcccaggttcataccttatttgctaatcaaagccagggtctctccctcaggtgttttttatgaagtgcgtgaatgtatgtaatgtgtggtggcctcagctgaatgcctcctgtggggaaaggggttggggtgacagtcatcatcagggcctggggcctgagagaattggctcaataaagatttcaagatcc

SEQ ID NO: 387064 - DNA, 1779 bp, Homo sapiens
cttcgggccccacagtccctgcacccaggtttccattgcgcggctctcctcagctccttcccgccgcccagtctggatcctgggggaggcgctgaagtcggggcccgccctgtggccccgcccggcccgcgcttgctagcgcccaaagccagcgaagcacgggcccaaccgggccatgtcgggggagcctgagctcattgagctgcgggagctggcacccgctgggcgcgctgggaagggccgcacccggctggagcgtgccaacgcgctgcgcatcgcgcggggcaccgcgtgcaaccccacacggcagctggtccctggccgtggccaccgcttccagcccgcggggcccgccacgcacacgtggtgcgacctctgtggcgacttcatctggggcgtcgtgcgcaaaggcctgcagtgcgcgcaacaaggacggttcttacacaggcttcatcaaggttcagctgaagctggtgcgccctgtctctgtgccctccagcaagaagccaccctccttgcaggatgcccggcggggcccaggacggggcacaagtgtcaggcgccgcacttccttttacctgcccaaggatgctgtcaagcacctgcatgtgctgtcacgcacaagggcacgtgaagtcattgaggccctgctgcgaaagttcttggtggtggatgacccccgcaagtttgcactctttgagcgcgctgagcgtcacggccaagtgtacttgcggaagctgttggatgatgagcagcccctgcggctgcggctcctggcagggcccagtgacaaggccctgagctttgtcctgaaggaaaatgactctggggaggtgaactgggacgccttcagcatgcctgaactacataacttcctacgtatcctgcagcgggaggaggaggagcacctccgccagatcctgcagaagtactcctattgccgccagaagatccaagaggccctgcacgcctgcccccttgggtgacctcttgtacccccaggtggaaggcagacagcaggcagcgccaagtgcgtgccgtgtgagtgtgacagggccagtggggcctgtggaatgagtgtgcatggaggccctcctgtgctgggggaatgagcccagagaacagcgaagtagcttgctccctgtgtccacctgtgggtgtagccaggtatggctctgcacccctctgccctcattactgggccttagtgggccagggctgccctgagaagctgctccaggcctgcagcaggagtggtgcagacagaagtctcctcaatttttgtctcagaagtgaaaatcttggagaccctgcaaacagaacagggtcatgtttgcaggggtgacggccctcatctatgaggaaaggttttggatcttgaatgtggtctcaggatatccttatcagagctaagggtgggtgctcagaataaggcaggcattgaggaagagtcttggtttctctctacagtgccaactcctcacacaccctgaggtcagggagtgctggctcacagtacagcatgtgccttaatgcttcatatgaggaggatgtccctgggccagggtctgtgtgaatgtgggcactggcccaggttcataccttatttgctaatcaaagccagggtctctccctcaggtgttttttatgaagtgcgtgaatgtatgtaatgtgtggtggcctcagctgaatgcctcctgtggggaaaggggttggggtgacagtcatcatcagggcctggggcctgagagaattggctcaataaagatttcaagatcc

SEQ ID NO: 387065 - DNA, 484 bp, Homo sapiens
tttgttgttgtttttttaattgccaatgaggaaaggggaagttctgtgctaggcgatagagatccaactgttgagcaggcctctctgcctgtggccttccggccggtttccagacgcccaggtggccaacattagagtccgcgtagcagtgtgaggtaacccactgagataggtcgggcctgcggagcctggcgagcagcggccctctccctggggcttcccttcaatctccgggacatttccccgacctggagctcctccgcctcaccgccaggcctctctgcagattgcaagttcacctgccactaccgctgccgcgcgctcgtctgcctggactgttgcgggccccgggacctgggctgggaacccgcggtggagcgggacacgaacgtggtgagcgcggggccgagggcgtatgggaagggcgaggatgggcaggccacagtgcaggcattctcgagggctgcctgggtgccgcgcgcaa

SEQ ID NO: 387066 - DNA, 2175 bp, Homo sapiens
gctagatcccggcgatctacgtttcagtcttaacggttgcggcgcggctctggcccgggcgcacgcgcacactgacacgcgtacacgcacgcacgcgaccggggcggtggttggcggctacggacgcgcaggactgggggacgggcgggtacggctatgggcgaggcggaggcgccttctttcgaaatgacctggagcagcacgacgagcagtggctactgcagccaagaggactcggactcggagctcgagcagtacttcaccgcgcgaacctcgctagctcgcaggccgcgccgggaccaggtgggagccagggggtgccggcgggcgggaggggaagcggtcgctggagctccgccctccccggtccgttgccgcgtcctgggtcggtgggcagccccaccctcctggctacgtggctccccgcgggtcctggccggggacctgcccgcggaaccgtgcgtaagaccccgattccaccgcctagatgctgggtgccggggcccccttggtttctgtcacagacaggttgaacacggaaaaagcagctgtatggcttgtggtagacctgagccgggcattatccagctatgactaaagccgaccgagcagtttggactagcacctcgatttccgcgttcgaatgctcctgctccctccttggggagactaggggaggatgtggagagggaagagtcctcgccaggaattgagaagacgagcctgtggagtgggagacacctgacctttctcaagctgagattgagcagaagatcaaggagtacaatgcccagatcaacagcaacctcttcatgagcttgaacaaggacggttcttacacaggcttcatcaaggttcagctgaagctggtgcgccctgtctctgtgccctccagcaagaagccaccctccttgcaggatgcccggcggggcccaggacggggcacaagtgtcaggcgccgcacttccttttacctgcccaaggatgctgtcaagcacctgcatgtgctgtcacgcacaagggcacgtgaagtcattgaggccctgctgcgaaagttcttggtggtggatgacccccgcaagtttgcactctttgagcgcgctgagcgtcacggccaagtgtacttgcggaagctgttggatgatgagcagcccctgcggctgcggctcctggcagggcccagtgacaaggccctgagctttgtcctgaaggaaaatgactctggggaggtgaactgggacgccttcagcatgcctgaactacataacttcctacgtatcctgcagcgggaggaggaggagcacctccgccagatcctgcagaagtactcctattgccgccagaagatccaagaggccctgcacgcctgcccccttgggtgacctcttgtacccccaggtggaaggcagacagcaggcagcgccaagtgcgtgccgtgtgagtgtgacagggccagtggggcctgtggaatgagtgtgcatggaggccctcctgtgctgggggaatgagcccagagaacagcgaagtagcttgctccctgtgtccacctgtgggtgtagccaggtatggctctgcacccctctgccctcattactgggccttagtgggccagggctgccctgagaagctgctccaggcctgcagcaggagtggtgcagacagaagtctcctcaatttttgtctcagaagtgaaaatcttggagaccctgcaaacagaacagggtcatgtttgcaggggtgacggccctcatctatgaggaaaggttttggatcttgaatgtggtctcaggatatccttatcagagctaagggtgggtgctcagaataaggcaggcattgaggaagagtcttggtttctctctacagtgccaactcctcacacaccctgaggtcagggagtgctggctcacagtacagcatgtgccttaatgcttcatatgaggaggatgtccctgggccagggtctgtgtgaatgtgggcactggcccaggttcataccttatttgctaatcaaagccagggtctctccctcaggtgttttttatgaagtgcgtgaatgtatgtaatgtgtggtggcctcagctgaatgcctcctgtggggaaaggggttggggtgacagtcatcatcagggcctggggcctgagagaattggctcaataaagatttcaagatcc

SEQ ID NO: 387067 - DNA, 1787 bp, Homo sapiens
ccctcttcagagtccctcagctgttcctggcccctggccatgtgccttcagttgcccctgcttctgtggtatccttaaggctacattcagtgctgaggccctaggcaggcagcagagagaagccaaatgattctgtctttcccttatccacccagagcatgcaaaaccaggagcagtggtgggttcagggtgggcaccagctatgtatatgtacatcagggacagggggccaaaggcagtcagtttccaaagactgccccagaggccatttttcagagaagccctgggttcctcaagggccctgtgtccatgctggcccatcttgcaggacgagcctgtggagtgggagacacctgacctttctcaagctgagattgagcagaagatcaaggagtacaatgcccagatcaacagcaacctcttcatgagcttgaacaaggacggttcttacacaggcttcatcaaggttcagctgaagctggtgcgccctgtctctgtgccctccagcaagaagccaccctccttgcaggatgcccggcggggcccaggacggggcacaagtgtcaggcgccgcacttccttttacctgcccaaggatgctgtcaagcacctgcatgtgctgtcacgcacaagggcacgtgaagtcattgaggccctgctgcgaaagttcttggtggtggatgacccccgcaagtttgcactctttgagcgcgctgagcgtcacggccaagtgtacttgcggaagctgttggatgatgagcagcccctgcggctgcggctcctggcagggcccagtgacaaggccctgagctttgtcctgaaggaaaatgactctggggaggtgaactgggacgccttcagcatgcctgaactacataacttcctacgtatcctgcagcgggaggaggaggagcacctccgccagatcctgcagaagtactcctattgccgccagaagatccaagaggccctgcacgcctgcccccttgggtgacctcttgtacccccaggtggaaggcagacagcaggcagcgccaagtgcgtgccgtgtgagtgtgacagggccagtggggcctgtggaatgagtgtgcatggaggccctcctgtgctgggggaatgagcccagagaacagcgaagtagcttgctccctgtgtccacctgtgggtgtagccaggtatggctctgcacccctctgccctcattactgggccttagtgggccagggctgccctgagaagctgctccaggcctgcagcaggagtggtgcagacagaagtctcctcaatttttgtctcagaagtgaaaatcttggagaccctgcaaacagaacagggtcatgtttgcaggggtgacggccctcatctatgaggaaaggttttggatcttgaatgtggtctcaggatatccttatcagagctaagggtgggtgctcagaataaggcaggcattgaggaagagtcttggtttctctctacagtgccaactcctcacacaccctgaggtcagggagtgctggctcacagtacagcatgtgccttaatgcttcatatgaggaggatgtccctgggccagggtctgtgtgaatgtgggcactggcccaggttcataccttatttgctaatcaaagccagggtctctccctcaggtgttttttatgaagtgcgtgaatgtatgtaatgtgtggtggcctcagctgaatgcctcctgtggggaaaggggttggggtgacagtcatcatcagggcctggggcctgagagaattggctcaataaagatttcaagatcc

SEQ ID NO: 387068 - DNA, 960 bp, Homo sapiens
gctagatcccggcgatctacgtttcagtcttaacggttgcggcgcggctctggcccgggcgcacgcgcacactgacacgcgtacacgcacgcacgcgaccggggcggtggttggcggctacggacgcgcaggactgggggacgggcgggtacggctatgggcgaggcggaggcgccttctttcgaaatgacctggagcagcacgacgagcagtggctactgcagccaagaggactcggactcggagctcgagcagtacttcaccgcgcgaacctcgctagctcgcaggccgcgccgggaccaggtgggagccagggggtgccggcgggcgggaggggaagcggtcgctggagctccgccctccccggtccgttgccgcgtcctgggtcggtgggcagccccaccctcctggctacgtggctccccgcgggtcctggccggggacctgcccgcggaaccgtgcgtaagaccccgattccaccgcctagatgctgggtgccggggcccccttggtttctgtcacagacaggttgaacacggaaaaagcagctgtatggcttgtggtagacctgagccgggcattatccagctatgactaaagccgaccgagcagtttggactagcacctcgatttccgcgttcgaatgctcctgctccctccttggggagactaggggaggatgtggagagggaagagtcctcgccaggaattgagaagtatgtttaggaaaacttgagaggcagagagagatcctgctcctccatctgcactcctgtatggagccagctgagccctcacctcttccctgttctggcctgtcaccagctgctggaatgtggaagattctgttcccttcctctagggtggatctggagaaagatttgggaatagataggaaagaagtcttgttttggaccataagcattcaggagcactttacccacaggaagggcggagaag

SEQ ID NO: 387069 - DNA, 1762 bp, Homo sapiens
gctagatcccggcgatctacgtttcagtcttaacggttgcggcgcggctctggcccgggcgcacgcgcacactgacacgcgtacacgcacgcacgcgaccggggcggtggttggcggctacggacgcgcaggactgggggacgggcgggtacggctatgggcgaggcggaggcgccttctttcgaaatgacctggagcagcacgacgagcagtggctactgcagccaagaggactcggactcggagctcgagcagtacttcaccgcgcgaacctcgctagctcgcaggccgcgccgggaccaggacgagcctgtggagtgggagacacctgacctttctcaagctgagattgagcagaagatcaaggagtacaatgcccagatcaacagcaacctcttcatgagcttgaacaaggacggttcttacacaggcttcatcaaggttcagctgaagctggtgcgccctgtctctgtgccctccagcaagaagccaccctccttgcaggatgcccggcggggcccaggacggggcacaagtgtcaggcgccgcacttccttttacctgcccaaggatgctgtcaagcacctgcatgtgctgtcacgcacaagggcacgtgaagtcattgaggccctgctgcgaaagttcttggtggtggatgacccccgcaagtttgcactctttgagcgcgctgagcgtcacggccaagtgtacttgcggaagctgttggatgatgagcagcccctgcggctgcggctcctggcagggcccagtgacaaggccctgagctttgtcctgaaggaaaatgactctggggaggtgaactgggacgccttcagcatgcctgaactacataacttcctacgtatcctgcagcgggaggaggaggagcacctccgccagatcctgcagaagtactcctattgccgccagaagatccaagaggccctgcacgcctgcccccttgggtgacctcttgtacccccaggtggaaggcagacagcaggcagcgccaagtgcgtgccgtgtgagtgtgacagggccagtggggcctgtggaatgagtgtgcatggaggccctcctgtgctgggggaatgagcccagagaacagcgaagtagcttgctccctgtgtccacctgtgggtgtagccaggtatggctctgcacccctctgccctcattactgggccttagtgggccagggctgccctgagaagctgctccaggcctgcagcaggagtggtgcagacagaagtctcctcaatttttgtctcagaagtgaaaatcttggagaccctgcaaacagaacagggtcatgtttgcaggggtgacggccctcatctatgaggaaaggttttggatcttgaatgtggtctcaggatatccttatcagagctaagggtgggtgctcagaataaggcaggcattgaggaagagtcttggtttctctctacagtgccaactcctcacacaccctgaggtcagggagtgctggctcacagtacagcatgtgccttaatgcttcatatgaggaggatgtccctgggccagggtctgtgtgaatgtgggcactggcccaggttcataccttatttgctaatcaaagccagggtctctccctcaggtgttttttatgaagtgcgtgaatgtatgtaatgtgtggtggcctcagctgaatgcctcctgtggggaaaggggttggggtgacagtcatcatcagggcctggggcctgagagaattggctcaataaagatttcaagatcc

SEQ ID NO: 387070 - DNA, 1721 bp, Homo sapiens
tttgttgttgtttttttaattgccaatgaggaaaggggaagttctgtgctaggcgatagagatccaactgttgagcaggcctctctgcctgtggccttccggccggtttccagacgcccaggtggccaacattagagtccgcgtagcagtgtgagattgcaagttcacctgccactaccgctgccgcgcgctcgtctgcctggactgttgcgggccccgggacctgggctgggaacccgcggtggagcgggacacgaacgtggacgagcctgtggagtgggagacacctgacctttctcaagctgagattgagcagaagatcaaggagtacaatgcccagatcaacagcaacctcttcatgagcttgaacaaggacggttcttacacaggcttcatcaaggttcagctgaagctggtgcgccctgtctctgtgccctccagcaagaagccaccctccttgcaggatgcccggcggggcccaggacggggcacaagtgtcaggcgccgcacttccttttacctgcccaaggatgctgtcaagcacctgcatgtgctgtcacgcacaagggcacgtgaagtcattgaggccctgctgcgaaagttcttggtggtggatgacccccgcaagtttgcactctttgagcgcgctgagcgtcacggccaagtgtacttgcggaagctgttggatgatgagcagcccctgcggctgcggctcctggcagggcccagtgacaaggccctgagctttgtcctgaaggaaaatgactctggggaggtgaactgggacgccttcagcatgcctgaactacataacttcctacgtatcctgcagcgggaggaggaggagcacctccgccagatcctgcagaagtactcctattgccgccagaagatccaagaggccctgcacgcctgcccccttgggtgacctcttgtacccccaggtggaaggcagacagcaggcagcgccaagtgcgtgccgtgtgagtgtgacagggccagtggggcctgtggaatgagtgtgcatggaggccctcctgtgctgggggaatgagcccagagaacagcgaagtagcttgctccctgtgtccacctgtgggtgtagccaggtatggctctgcacccctctgccctcattactgggccttagtgggccagggctgccctgagaagctgctccaggcctgcagcaggagtggtgcagacagaagtctcctcaatttttgtctcagaagtgaaaatcttggagaccctgcaaacagaacagggtcatgtttgcaggggtgacggccctcatctatgaggaaaggttttggatcttgaatgtggtctcaggatatccttatcagagctaagggtgggtgctcagaataaggcaggcattgaggaagagtcttggtttctctctacagtgccaactcctcacacaccctgaggtcagggagtgctggctcacagtacagcatgtgccttaatgcttcatatgaggaggatgtccctgggccagggtctgtgtgaatgtgggcactggcccaggttcataccttatttgctaatcaaagccagggtctctccctcaggtgttttttatgaagtgcgtgaatgtatgtaatgtgtggtggcctcagctgaatgcctcctgtggggaaaggggttggggtgacagtcatcatcagggcctggggcctgagagaattggctcaataaagatttcaagatcc

SEQ ID NO: 387071 - DNA, 1783 bp, Homo sapiens
gctagatcccggcgatctacgtttcagtcttaacggttgcggcgcggctctggcccgggcgcacgcgcacactgacacgcgtacacgcacgcacgcgaccggggcggtggttggcggctacggacgcgcaggactgggggacgggcgggtacggctatgggcgaggcggaggcgccttctttcgaaatgacctggagcagcacgacgagcagtggctactgcagccaagaggactcggactcggagctcgagcagtacttcaccgcgcgaacctcgctagctcgcaggccgcgccgggaccaggacgagcctgtggagtgggagacacctgacctttctcaagctgagattgagcagaagatcaaggagtacaatgcccagatcaacagcaacctcttcatgagcttgaacaaggacggttcttacacaggcttcatcaaggttcagctgaagctggtgcgccctgtctctgtgccctccagcaagaagccaccctccttgcaggatgcccggcggggcccaggacggggcacaagtgtcaggcgccgcacttccttttacctgcccaaggatgctgtcaagcacctgcatgtgctgtcacgcacaagggcacgtgaagtcattgaggccctgctgcgaaagttcttggtggtggatgacccccgcaagtttgcactctttgagcgcgctgagcgtcacggccaagtgtacttgcggaagctgttggatgatgagcagcccctgcggctgcggctcctggcagggcccagtgacaaggccctgagctttgtcctgaaggaaaatgactctggggaggtgaactgggacgccttcagcatgcctgaactacataacttcctacgtatcctgcagcgggaggaggaggagcacctccgccagatcctgcagaagtactcctattgccgccagaagatccaagaggccctgcacgcctgcccccttgggtgacctcttgtacccccaggtggaaggcagacagcaggcagcgccaagtgcgtgccgtgtgagtgtgacagggccagtggggcctgtggaatgagtgtgcatggaggccctcctgtgctgggggaatgagcccagagaacagcgaagtagcttgctccctgtgtccacctgtgggtgtagccaggtatggctctgcacccctctgccctcattactgggccttagtgggccagggctgccctgagaagctgctccaggcctgcagcaggagtggtgcagacagaagtctcctcaatttttgtctcagaagtgaaaatcttggagaccctgcaaacagaacagggtcatgtttgcaggggtgacggccctcatctatgaggaaaggttttggatcttgaatgtggtctcaggatatccttatcagagctaagggtgggtgctcagaataaggcaggcattgaggaagagtcttggtttctctctacagtgccaactcctcacacaccctgaggtcagggagtgctggctcacagtacagcatgtgccttaatgcttcatatgaggaggatgtccctgggccagggtctgtgtgaatgtgggcactggcccaggttcataccttatttgctaatcaaagccagggtctctccctcaggtgttttttatgaagtgcgtgaatgtatgtaatgtgtggtggcctcagctgaatgcctcctgtggggaaaggggttggggtgacagtcatcatcagggcctggggcctgagagaattggctcaataaagatttcaagatccaaaaaaaaaaaatgaaaacaa

SEQ ID NO: 387072 - DNA, 1852 bp, Homo sapiens
tttgttgttgtttttttaattgccaatgaggaaaggggaagttctgtgctaggcgatagagatccaactgttgagcaggcctctctgcctgtggccttccggccggtttccagacgcccaggtggccaacattagagtccgcgtagcagtgtgaggtaacccactgagataggtcgggcctgcggagcctggcgagcagcggccctctccctggggcttcccttcaatctccgggacatttccccgacctggagctcctccgcctcaccgccaggcctctctgcagattgcaagttcacctgccactaccgctgccgcgcgctcgtctgcctggactgttgcgggccccgggacctgggctgggaacccgcggtggagcgggacacgaacgtggacgagcctgtggagtgggagacacctgacctttctcaagctgagattgagcagaagatcaaggagtacaatgcccagatcaacagcaacctcttcatgagcttgaacaaggacggttcttacacaggcttcatcaaggttcagctgaagctggtgcgccctgtctctgtgccctccagcaagaagccaccctccttgcaggatgcccggcggggcccaggacggggcacaagtgtcaggcgccgcacttccttttacctgcccaaggatgctgtcaagcacctgcatgtgctgtcacgcacaagggcacgtgaagtcattgaggccctgctgcgaaagttcttggtggtggatgacccccgcaagtttgcactctttgagcgcgctgagcgtcacggccaagtgtacttgcggaagctgttggatgatgagcagcccctgcggctgcggctcctggcagggcccagtgacaaggccctgagctttgtcctgaaggaaaatgactctggggaggtgaactgggacgccttcagcatgcctgaactacataacttcctacgtatcctgcagcgggaggaggaggagcacctccgccagatcctgcagaagtactcctattgccgccagaagatccaagaggccctgcacgcctgcccccttgggtgacctcttgtacccccaggtggaaggcagacagcaggcagcgccaagtgcgtgccgtgtgagtgtgacagggccagtggggcctgtggaatgagtgtgcatggaggccctcctgtgctgggggaatgagcccagagaacagcgaagtagcttgctccctgtgtccacctgtgggtgtagccaggtatggctctgcacccctctgccctcattactgggccttagtgggccagggctgccctgagaagctgctccaggcctgcagcaggagtggtgcagacagaagtctcctcaatttttgtctcagaagtgaaaatcttggagaccctgcaaacagaacagggtcatgtttgcaggggtgacggccctcatctatgaggaaaggttttggatcttgaatgtggtctcaggatatccttatcagagctaagggtgggtgctcagaataaggcaggcattgaggaagagtcttggtttctctctacagtgccaactcctcacacaccctgaggtcagggagtgctggctcacagtacagcatgtgccttaatgcttcatatgaggaggatgtccctgggccagggtctgtgtgaatgtgggcactggcccaggttcataccttatttgctaatcaaagccagggtctctccctcaggtgttttttatgaagtgcgtgaatgtatgtaatgtgtggtggcctcagctgaatgcctcctgtggggaaaggggttggggtgacagtcatcatcagggcctggggcctgagagaattggctcaataaagatttcaagatcc

SEQ ID NO: 387073 - DNA, 1369 bp, Homo sapiens
ctccttgcaggatgcccggcgggtggcttcttgctggagggcacagagacagggcgcaccagcttcagctgaaccttgatgaagcctgtgtaagaaccgtcctccttgcaggatgcccggcggggcccaggacggggcacaagtgtcaggcgccgcacttccttttacctgcccaaggatgctgtcaagcacctgcatgtgctgtcacgcacaagggcacgtgaagtcattgaggccctgctgcgaaagttcttggtggtggatgacccccgcaagtttgcactctttgagcgcgctgagcgtcacggccaagtgtacttgcggaagctgttggatgatgagcagcccctgcggctgcggctcctggcagggcccagtgacaaggccctgagctttgtcctgaaggaaaatgactctggggaggtgaactgggacgccttcagcatgcctgaactacataacttcctacgtatcctgcagcgggaggaggaggagcacctccgccagatcctgcagaagtactcctattgccgccagaagatccaagaggccctgcacgcctgcccccttgggtgacctcttgtacccccaggtggaaggcagacagcaggcagcgccaagtgcgtgccgtgtgagtgtgacagggccagtggggcctgtggaatgagtgtgcatggaggccctcctgtgctgggggaatgagcccagagaacagcgaagtagcttgctccctgtgtccacctgtgggtgtagccaggtatggctctgcacccctctgccctcattactgggccttagtgggccagggctgccctgagaagctgctccaggcctgcagcaggagtggtgcagacagaagtctcctcaatttttgtctcagaagtgaaaatcttggagaccctgcaaacagaacagggtcatgtttgcaggggtgacggccctcatctatgaggaaaggttttggatcttgaatgtggtctcaggatatccttatcagagctaagggtgggtgctcagaataaggcaggcattgaggaagagtcttggtttctctctacagtgccaactcctcacacaccctgaggtcagggagtgctggctcacagtacagcatgtgccttaatgcttcatatgaggaggatgtccctgggccagggtctgtgtgaatgtgggcactggcccaggttcataccttatttgctaatcaaagccagggtctctccctcaggtgttttttatgaagtgcgtgaatgtatgtaatgtgtggtggcctcagctgaatgcctcctgtggggaaaggggttggggtgacagtcatcatcagggcctggggcctgagagaattggctcaataaagatttcaagatcc

SEQ ID NO: 387074 - DNA, 592 bp, Homo sapiens
ttaatataaggagtatctcatcattatagagtacgtggcaggttacaaagacctttacataatgatgtcatttttatgacaatccagtgacatcaataaggcagggattattgactcccatttttgagataaagaaatggaggttcactgctgctaggtgacttgctccagaagagatgactgaactctccagggagcctatggactcaccgcttaggggtagagaggaggaacctccttggtcacgtccctgggggtgggcagtgaaagctgatccatcaagagagaagcaagagtcacctccaaatgggctgagagggacggacagccacgggccacctggtactgagttctgttgctggactagggactttatgaggacaaacactgttttcagtcatctctttgttctcatgctctagaacatgcttggtatatagtggacacctgaggaatatttgttgaaggaattgagacttttcaaaatatgacaaatatccactgttggaatgagcttccctgaagagttgtgtgagttctagcactgtcagagtttaagaaaaaatgataaatatctgttgactaataaaaa

SEQ ID NO: 387075 - DNA, 1097 bp, Homo sapiens
ctttttcaagattctttttaaagaaaatatatggtagctgttgtttaacatttatctacttacagagcgttcagaggatgttatatgtttattaagtgctcaatactgtattttaacctaatctgaattttaatcataatcctgcacaatgcatggattctggttgctttgaaatggttctgttcaaaggacttatcaatgtctcttgctttgagatgtattgcttggtgtgtagtagcacaaacgtaccaccaataatgtacctaattcaactgaagtgacagtcatatacgcagatatgaccaagttcacatgtgagcaagtaacaactccatgactgttgctgcctggctaatagctactatactatcatttgtaaggcacattctgttttctggggtgtcgaaatgtggataaaaaaagatgaattaggaatgattctaacctaagtatgtgttttaataaaaggatctaggcaaaaaaaaaaaaagtaagtcactcctaaatttaatccctgaataatgcagtgtacatgatgatagaggagaagtgtgtttttgataagaagtgactaaattttgtgacaatcttaattttttaggcttttcatttagtcttccaataaagataatttttttctgagttttatcagcagtagaaaaataagacctacatggataagtttgaaattaaacattttgtctcattttataatttttatttttatgaaatcatggcgcttacatcatatactcaggtgtgtaaaagcctgctatttgtaactataatccataaacttattgatgatttaataactatcaacaagggcatgggaaaaattcaacatttgataataatcttttaccttaggcatttattctctaagcaaagcagaaataaaggatatgtatcagtgtatactgattgaaataaagctttaaaaatccaagtgatactctgaaattgtcaaaagtttaatggcatgaatccaggattaattcccataacctgtgatgatctagtcatcttctgtagctacatagtactcctaatgttaagattaccaaattcagcaataaagccaaaatcaaaactgc

SEQ ID NO: 387076 - DNA, 711 bp, Homo sapiens
ctttttcaagattctttttaaagaaaatatatggtagctgttgtttaacatttatctacttacagagcgttcagaggatgttatatgtttattaagtgctcaatactgtattttaacctaatctgaattttaatcataatcctgcacaatgcatggattctggttgctttgaaatggttctgttcaaaggacttatcaatgtctcttgctttgagatgtattgcttggtgtgtagtagcacaaacgtaccaccaataatgtacctaattcaactgaagtgacagtcatatacgcagatatgaccaagttcacatgtgagcaagtaacaactccatgactgttgctgcctggctaatagctactatactatcatttgtaaggcacattctgttttctggggtgtcgaaatgtggataaaaaaagatgaattaggaatgattctaacctaagtatgtgttttaataaaaggatctaggcaaaaaaaaaaaaagtaagtcactcctaaatttaatccctgaataatgcagtgtacatgatgatagaggagaagtgtgtttttgataagaagtgactaaattttgtgacaatcttaattttttaggcttttcatttagtcttccaataaagataatttttttctgagttttatcagcagtagaaaaataagacctacatggataagtttgaaattaaacattttgtctcatttta

SEQ ID NO: 387077 - DNA, 220 bp, Homo sapiens
ggaggatcactgagcccaggagtttgagaccagcctgggcaacatagcgaggcctcaactctatttaaaaaaagaaaagaaaagaatccatcacaagtacttgtctgtgtgcccggcacatggtaagtacacaaagatggtagcaattagtgttatcatcatctgcatccgtgtcagtagcccactgggaaggcctgggtctcatgttcttttgtcactg

SEQ ID NO: 387078 - DNA, 364 bp, Homo sapiens
gagtccccccacaacccgccctcccactagctgcagaaaagcagctaggcttgagccgttcaattcagtagccattaggattatgtggttcttcagcacccagtgtagccaaggaattgaattttttaagtttaataaacttaaactttaaaactgaacagtaacatatttgtccatgaagacaactttattgttttgtagaactacttactgtattcatttccaattgctactgtgatgaattaccagaaaccttgtcacttaaaacaacaggctcggtacagtggctcaggcctgtaatcccagcacttcgggaggctgtggtgggcggatcacttgagtccaggagttcaagacccaactg

SEQ ID NO: 387079 - DNA, 543 bp, Homo sapiens
cacttgtatatgatgatattcatgccagactgttttttttaaagcaaaagttagaactgtaaagaaaatgctttttatttttcttagaatatagtaacacaaaacattttagttccactgttttaagtctttaaatgaaaattatgtcctcctaacttgatatttgtttcatgtaagctaaatttttgctttctgggatcttttatgatccccttgcccctgaactgtctggtgaacactctgcattcttggtgattatgcccttgggggagaatcaacaaagctggaaatgaccacaaagaccactatagaatctgtctaggacactgtaacacgtgtttgaaccatgactaaactctgtggttattaagagaaatgccttgaaaataagattggaacctctgggtggagggtagctctgaatctactagcaagcaagatgtaaaacacagtaatgcttttagacatgtaaggcccaaataaagagggtcactacatagagaattcttgtttacaagaaatatactgagtacaacattgtaa

SEQ ID NO: 387080 - DNA, 178 bp, Homo sapiens
acagatcggacacttgatcagttgtaggcgattgtcttataccatgtcttaacatatctgcttgccttcaaagtcccgccactccacccccacctcgctgaagtcacgacactgagctgagcatgtgaaagcccctgtcctcagtgactctgggccaggtccctccttacacgtggat

SEQ ID NO: 387081 - DNA, 405 bp, Homo sapiens
ctctcttacaaaaacagctcacaaaattctgaaataaattgtgtatgaaaatattctctacttcaagattgctctaaaggtttagtaattaagacagtgccatttcccaaggataaaatagaacaatggaacacaatagagtccagaaacagatcactgtataatatggacacctgatttatggctgtgatgccaccacaattgagtatgagaacaatcattttatcaataaacagtggtgaatcacgtggatacctttatgggaaaagaaatgaacttgactccatatacaagttaatttgattgttgagcatggtggcacacacctgtagtcccaactacttgggaggctgaggtgggaggattgattgagcctaggagtttgagaccagcctgggcaaaatg

SEQ ID NO: 387082 - DNA, 539 bp, Homo sapiens
aatctaaagcccagagtaaaagagagagttaaagagatttgggagttgttaccacacatagatggtaagtgaaaccatgtgaatggatataatcattataggtaggaaagattgttttctgcttcacaatcgctgtgtctaatatgcatgtgcataaaatcgtaattctttcctaccgttttacaacttatacaataggttgttagcatactgttataaatattaaaaaaaatttatttgaaaatgactgccttatctgttacagagaaacttttttgaaaatttgatgttagacagtattttctatcagtttcctgaaattgtccattctacatgatgaagaaaaatgaaaattaaaaagtaaataaatgggccaggcttgttggctcacacctgtaatcccagcactttgcgaggccaaggcaggtggatcacctcaggtcaggagtttcagaccagccctgccaagatggggaaacacatgtctactaaaaatacaaaaattagttgggtatgatagcgtgcacctgtagtcccac

SEQ ID NO: 387083 - DNA, 219 bp, Homo sapiens
tttccggtcttgctgaggcgctcctttccccgccccacctccgccctcttttcagggaatttcgaaggggcgtggcgtctggcaagcgcgtccccaggggtgtgtatacgcgcgttcacgggaggttaaagagggaggagcctaacccttgggtgtgtaaggcagagagaagaccgcgaggaacggaaagcgcatgcgtcctagtggtgctgcagcgcc

SEQ ID NO: 387084 - DNA, 1072 bp, Homo sapiens
gtttctttagctgaaataatataggctttttttccaggtatcttttcattattgatttctagcaagtttatattttgattagaataaaaacttcatgctactttaatcccttgaaattgactgagacttgctctatgaccccaatatgagattttttttctgtgactcttccatgtgttttttaaagcattatgtattctgtcattgtaggatatagttctttatttatcatttaagtaagtttattcattgtgtggttcaaattttcagtattcttcctaagttttaaactgcttgtgcaaccaattgctaaaagaattgttaaaatatcccacttcagttctggattccttgatttttccctttagttctgtcaattttcctttgtatatttggaagccatgttattagaggcatgtagtttaaagttgttttatatttcttgtggattaaatctcttattatgatatgattgatcttttatatctgtaaagtatttgtgcctaaagtccattttgtctgctattaatatattgatactagccttcttttgcttagtgtttgcatagtatatcttcctcagttctcaaaaaatttaattgattagccagacatggtggcacatgcctatacttccagctacctgagaggctgaggcaggaggatcacttgagcccagaggtcaaggctgcagagagtcatatcccgccactatattgtagcctgggtgatagagtgagaccctgtctcaaaagagcaaagaaagaaagaagaaagggatggagggagggaaggaggaaggaagaaacgaaagaaataaagatataaaaaagaaagaaaaaattaattgaaatataattcatatataaattctctcttttagtgtacagctcagtagttttattcaagagttgtacaatcattatcactaattctagaacattttcatcactcaaaaaactgtacagttagcagtcactccctatttccccctctacaaatcccctgggtaccacaaagctactttttgaatctacagatttgcctattctggacatttcatataaatgag

SEQ ID NO: 387085 - DNA, 1018 bp, Homo sapiens
gtttctttagctgaaataatataggctttttttccaggtatcttttcattattgatttctagcaagtttatattttgattagaataaaaacttcatgctactttaatcccttgaaattgactgagacttgctctatgaccccaatatgagattttttttctgtgactcttccatgtgttttttaaagcattatgtattctgtcattgtaggatatagttctttatttatcatttaagtaagtttattcattgtgtggttcaaattttcagtattcttcctaagttttaaactgcttgtgcaaccaattgctaaaagaattgttttttcctttgtatatttggaagccatgttattagaggcatgtagtttaaagttgttttatatttcttgtggattaaatctcttattatgatatgattgatcttttatatctgtaaagtatttgtgcctaaagtccattttgtctgctattaatatattgatactagccttcttttgcttagtgtttgcatagtatatcttcctcagttctcaaaaaatttaattgattagccagacatggtggcacatgcctatacttccagctacctgagaggctgaggcaggaggatcacttgagcccagaggtcaaggctgcagagagtcatatcccgccactatattgtagcctgggtgatagagtgagaccctgtctcaaaagagcaaagaaagaaagaagaaagggatggagggagggaaggaggaaggaagaaacgaaagaaataaagatataaaaaagaaagaaaaaattaattgaaatataattcatatataaattctctcttttagtgtacagctcagtagttttattcaagagttgtacaatcattatcactaattctagaacattttcatcactcaaaaaactgtacagttagcagtcactccctatttccccctctacaaatcccctgggtaccacaaagctactttttgaatctacagatttgcctattctggacatttcatataaatgag

SEQ ID NO: 387086 - DNA, 747 bp, Homo sapiens
ccgtgacgagacctgttcactcgtggcactcgggatgtagtgggagaaagcagagaggtggggacaagaggtgccatgaggaaccccacaaccatagcagggcctctgcatgccaggataagtaggcactccgtttttaagggtctcgtcacagaacatcagcatgatcctggcagcccatagaccagacgtccttgaggtcttagcgccaccgcctccctgtcttcctcatgtaggctgctttcatgggaaactgatggtacatagggcggatgcagctcttggaacgattttgttttccagggccaggtttcagaatatggctgtatgtttaaaattatgtctagctgccattaattcctgttgtccccgcatgtctgaagaacttagccactcttattccacctgtaccctcacccactcctcccacgccacccctcccatgccaccagctcttttgaagagaatcctcgatgcgtgccacctatccgtatttcagtatgcctccctggaagagaagggcagggtgcaacagcagcaacccccgaggagtgtcccactgaggctgctgcctcttcagccatagggctctgggcacttggggcttcttcgccagcgcagctatggtcgagtgtgtttcagcggcatgtctttgttgcctttctcaggtcgagtgttatctgttcaaaccccaccttttaaatggtcccatgagagatgagatttttttcctattagttggtacct

SEQ ID NO: 387087 - DNA, 768 bp, Homo sapiens
tgagggacaggtgttaaaaaaggaaaccaagtaccgtttgtctccatcaacaccaggcacttcagaaggtgactttcacagagcccagtgtgctgagctcttctacagcggatgcctaatgataaactttaaactggagaaaatgccctggtactttctgcagcctcaggaataggctccagtgtgtggcgagtgttcatttataggcagcgctcggcatggggagtctggacaccatatatccgcccgggagtgtattaacgtggaaaccaagcccacccccaactccgaaaagtgcagcagcttttccagttctttgtgcaaatatgtaggctctgtacgtgtggggttactggtttccaagcacaaggcaaaggcacggggcagtaaggagggtgccttgggagtaatctgctggcttccactacttcccttcctgaggcacggcttgctgctgtggacatccctgggcctaccccaagctggcccagtatctgtggttaaaacaaccgcccccccccccccgcccccacacacgtggctccttatgtgtatgtaggcatttctacttttcaaaattctgctctgtctgtattccctttggtcttcacagtaccctatgtgggatgtgaggatcaaatgtgtttcagtaataagcacgcatttgcctagtccctgtggttcctgagagtgttgctggtatgctgtcagggcatcctccggccgtccatgtgacagggtggctgtctttctgtagtgtgcagaaca

SEQ ID NO: 387088 - DNA, 727 bp, Homo sapiens
ataatcccagcactttagggggccaaggcaggaggatcgctagagcctgggagttcgagaccaacttgagaaacacagcaagaccctgtctctattattattattattatttcgagatggagtctcgcactgtcacccaggctgaagtgtagtggtgccatcttggctcactgcaacctccacctcaggggttcaagcagttctcctgccttagccttctgaggagctgagactacagtcgtgcgccaccaagcctggctaatttttgtattttgctttcgccatgttagccaggctaatctcgaactcctgacctcaggtgatccacccgcctccgcctcccaaagtgctgggattacaggcgtgagccacagtttctggctccctgtctcaatttaaaaaaaaatttatatatatatattaaggttgttgtacagtagtgtctggcacacagaaagtactttttcctctgattctgggctcttccagcaacatttactggggcacctggctctgctggggagttgggcagtggaaaaggagaaccaggctatgcctctggaaagtcagagagaagagtcctctaccatgggctgctgatcttgtgcaagccactccttctggccaatcagtcctcagtttggccacctgtatggtggcagagcactatctgtcccccagggctctcccgagggctagaggtttagagattcagttcctagggttc

SEQ ID NO: 387089 - DNA, 265 bp, Homo sapiens
gagtatttgactcacccttgagattgatggagcccaggctctctgaggatccaggtgaatctagaacttgtactccaagtgtggactctcctgcagttgctcaatgaagtcgctgatgatgggactgagtacctactccaacgtagcagggatgctggtgctgggttcaaaatggccaatgtgtttaattactttgtctgtgtttaagtattttctgtattaaacattttatgttttaattatgttttttatgtatgaagtattt

SEQ ID NO: 387090 - DNA, 659 bp, Homo sapiens
ctgcaacctcagcctcccaggttcaagggattctcctgcctcagcctcctgagtagctgggaccatgggcatgtgccaccatgcccggctaatttttgtatttttagtggagacggggtttcgccgtgtttccaggctggtctctaactgctgacctcaggtgatccgcccgccttggcctcccaaagtgctgggattacaggcatgagccactgcacttggcccaaaacttctatctcaaagcacagagaccttgggggaagcaaagttggaggcagagtgctgggtggcagggcctgaggaggctgatgcagggtggggtgcattcgccagggccaaggtcctgtagagcagtgagcggcacctccacggggagaacccataaaagggccccacagggaaacagtcggtatcagtcaccagacccagagagggagacacgcagacctgcccaatgcctcttctttgtcctccctcctgtgctctcccatctccctactcctcagacttgggcaggttctgacatctcagttagcaatgacagaatggagaactgctaggccaggaaagagagaaaacaccatggcactgtcttccgatggcagtgatgtccaaagcaggtcctagctgtggggaggggagatgtaactttcatcaca

SEQ ID NO: 387091 - DNA, 177 bp, Homo sapiens
tcaaatagtagtcttagcaaaatcacacaactcttaattctctggagaaatagcaaaatcacagcttgtgactactttttaaagagtagtactttagtacaaattttataagaaaataatcactcttgggtctacagactggtgtctattaatcgttgcaaactggttttcatgatg

SEQ ID NO: 387092 - DNA, 417 bp, Homo sapiens
gtaatgggactaagaggagaattctgtatgtggttctgagaagggagcagagtccagctctttggatgttgtattaggaaatttactagagaccatgtcactgctccactcggaatcctcgggtggcttcccagtgcccttgacatggaatcaaactcctcgcttggccatgcaatccgggcctggtatcctggccccctccccagtccactgtggttggctgtgctggcctcgtggatcccaggccctccaccctcatgccccactgagcacttgcacctgtgtcccacctccagccctcaccagctgtcctccagctctcatctgtgatgcatccgtcagacctctgctcccagcctgccctctctaatctataatctcattttattctctgtgtgagcattcagactgatgctg

SEQ ID NO: 387093 - DNA, 677 bp, Homo sapiens
ccagccctgatttgaaggcagcaggtatctcttgcagctgcagcactccaacttcctctaatggcacggtcaggtcgcaggaaaccacagcggcagcgcggtgcagcttcccacgcccgcccttcgagcttgttccccagcggcgcagctcagcctcctccaagtctcagcctcataccggcggggagacaaagctggcgctgggagtgggaaaagggcccgcgaaatggcctcaagatcgtgcctttgttagaagaaacatgggtacgctccgatgcgacgcaggcttccaaccccagcggttcggtggtggtgcagtcgttgaattgcgctggccctaataattcagcctggcagggttcgcgtttattgcggagagagactcttaagcattctgtcaacacatatggcaaatagaaagcctcaaccataacattgcacagtttttgcagttcttgctttaaatatgttcacagaaaagacggccttgttttacccagagaaggagcgtaatgcggagcgaaccattcgtcacccccattctctgctgcacttaactgtgtacagtgatgataattagcctctgggtccctgaagtccctggttcagttcttccgtctgtattctagagataattatttattaccaagtttgaataaagagctatatcccctaca

SEQ ID NO: 387094 - DNA, 430 bp, Homo sapiens
ccctgcttctgcttgctctctgtgggttgcatccactgcctaaccagttccgtgagatgaactggtacctcatttggaaatacagaaatcacctgccttctgcattggtctcgctgggagctgcagaccagagctgttcccattcggctatcttggcccttacccaaatggagaattttttaaactagtgatgccaaggccccactccagactgattaaatcagcaggtctgtcctatgcatgctgatgtatttggctgaggtcataatgtctgcatcttattttccaaagcattttgtgtgtatttatatttctctatctatctatctaaatgttactatgtatatatatatgtgtattgtactgttattccacattttctgtatgtttgacatttttcaaaataaagattgagaaaaaatgatgagta

SEQ ID NO: 387095 - DNA, 740 bp, Homo sapiens
ttttctgcagcctcatgtttgactgttggagatttatcctgtgcaagagacctggaagcaacagttattcttccccacaacggcccaatgaggccaaaaaggaggaaacggatcaccaaattgatgtgtctgacgtcatcaggcttgttcaagacacaccggaggcgacggccatggccacagcccctcggcgatctcagtcccctggcttgtgacccacctgagtgtgatgattcctagtccacagctccagtccggacccctcccccgggcactgcaccgccctgcctccgcagagcctccacccgcatcctacaggtctcccagagccgcgtcatccactgcagctccatccaccatagttcactgcacctctccgtccagttcctttggccagaaaccccatcgtcctcatctgtgttttcactcatgcccgtatccgacctcccgggaaatcctgttggctgtgcctccagaacagatccagaatccagccaggctaccgccctgtctcccactttgaggtcgcgctgcctctgcgcctgtccctccccaccgccgtctcgcagaacagcaagcggtgacctctcgaaggaggcgtgattaacaaagagccaaaatggcaaactgtgtggaggccgtggcgtgggctgttcctcgagagccgtgcttgtagggctggcctgggagggcatccctggtccgcagaggccggtctgtgccgcaaagcctgggcgcag

SEQ ID NO: 387096 - DNA, 426 bp, Homo sapiens
actgcactccagcttgggtgacaaagcgagactctgtctccaaaaaaaaaattcaaagtctttaccccttgaagttactagaaaaatccaacctatgttatttcactttaaaaatatcaacttgctatgactttttcctttcaaaagctctcttcggcaattctacctttggactataagcttcttacaaaataattcatttttcccattcccgagtgtgtgcgggtctgaattttatgaatgtctttggcaagtctgagataattcagccagggttccatccatctgcttcatagacagttccactcacttggcctctgaaagcactccatgcgctccccacccacggtcagcccttacccaggtccctctctggctcccactctgtggcacccccacccccgccatggccccagcacagctgtg

SEQ ID NO: 387097 - DNA, 441 bp, Homo sapiens
actgaaaccgtgtctctacaaaaaatacaaaaattaaccaggcgcggtggcgtgtgcttgtagtctcagctgctcaggaggctgaagtgggaggatcgattgaacccaggaggtcaaggctgcagtgagccatgatcatgccactgtactccagcctgggcaacagagcaagaccctgtctccaaaaagaaggtgttggagacacagggaatttttagggaagtgaaactattctgtgtgatactctaagggtggatacatgttatatattgatcaaaacctataaaagggcttcacgtatattaacacatttcacaacaatcctgtgctgatgaagtagcagtagtactaatatctcttactgagtgcttattctgcactaagctcagagaatagatggttacatctaataaataattttgtagataatcaaacaggctc

SEQ ID NO: 387098 - DNA, 218 bp, Homo sapiens
aacttgcaacataaatactagaaaaagagaaaatatcatcaaaatacaaataactgttagaaatgattgctcaaaagaaaaacctggcaatgcatgattaagaaatgcaaaagaagatacagttgctctctgtatatgcgctttccacatccacagattcaaacaactgtggataaaaaaggatttttcaaaaccattaaaaaacaatgcaacagtaa

SEQ ID NO: 387099 - DNA, 406 bp, Homo sapiens
caaaagaacaaaaatgtagtttttgattgaatactaagatcagactcatccacctgctgagcaggtctgaataccactgcacatgcaactgggcaagcatagtcaaaggaggcttgattaagcaaaacgaagctgagacagctccagcctctcccttgccccaccctgtccatgcgtgcagctccccctccaggagatttgaaagggacagggtggggtggtgggggaatggatagacacaggatgagcaggtgaccaaggaggcttattctcaatgatgcctgatgagaagaaacacccagacttgtagctctgaccacacaatacgtcctcttaggatacattctttctcatttattccccgtgtcctcacgtccacacctgttctctcacttttgcatccttc

SEQ ID NO: 387100 - DNA, 763 bp, Homo sapiens
actttctcaaaataaatttatggtagattttctatctggtcacaagtgaggaggtgaaagctgctttttggggccaactctttgcttttaaagcaagctaaacgcaataccagaaaggtttccattctgtacttaacctgcttgtccttctcactcttccttatcctcccgcacacgctctgagcattgactgagcactctgaggaggaggctgactcaggctgacccttcccggccctgcaaggctctaaggtagaaccagtgttatcacaggaaaggcccaagccaaagctcagagcagctgttcctgagaaagtgggagatgaggatgagtaggaggtagagatgcttataactgctctgcccagagaaaactcagaaggtgcagaagagttttcaaaataaagtgcaggccccatcaagtaaaaaatgaaacattgtatttcattaaaatggtgatcagttttctcttttcataaaagacattcaaatggtgagattgtaaaaaaaaaaaaaggaaaaagaaaactttctaattctcaaaaatagaacagcttgaataataactcatgggttttgaaatgggtcatcttttaaaaggggtcactttggctagaatcattgcacttggtgactttcacattgtaaagggtccagttctttctgaggcccaattgcactagaatctgcatttcagaacacaggaggtatcaggaagaaactgggagaaattcagagggaaattgtctcttctcagagtaac

SEQ ID NO: 387101 - DNA, 574 bp, Homo sapiens
aggtctctctgcaaacaatcccatcacccctaccaatgagctttgcctctactcacccatctgagctccagccttcgcgtgtgactccgaacggtggagttttctcctaaatccattcatcttgccaaaacactgttcacaatagcaaagacatggaatctactaaatgcccatcaatggtagactggataaagaaaatgtggtacatacacaccacggacaaccatgcagccataaaaaagaatgagatcatgtcttttgcagagacatggatggagctggaggccatcatccttagcaaactagcacaggaagagaaaattaaatactgcatgttctcgcttataagtgggagctaaatgatgggaacatatgggcacatagaggggaacaacatacactggttcctatcagaggatggaaggtggaaggagggagaggatcaggagaaataactaatgggtactaggcttaatacctgggtgatgaaatcatctgtacagcaaaccccatgacacaagtttacctatgtaacaaacctgcacatgtacccctgaactgaaagtaaaagtta

SEQ ID NO: 387102 - DNA, 578 bp, Homo sapiens
ggctggaggtgaggaggcagcacgtccctttactgtcctgttctgctgaggtaggaaatggtgcttcccaaccacaaatcccggcaggatgagggcagggagagatcagggtgctggcactcagattcaatgggtttttgctaaatgtgctgtccgccacccactcttgcctttcttctagtgccctggctggtgctcagcgagatctttcctggtgggatcagaggacgagccatggctttaacttctagcatgaactggggcatcaatctcctcatctcgctgacatttttgactgtaactggtaagaagtctttgttttcctctaatgtctttggtcctcgtaggacaaatgttagggaatcacacccacctaaagaccattttttcatggaaattttcaaacacacttagaaggagaacggccatgaccctgaaatacccatgacccaatttacagttttgaatgtaaatctatttataaccccacctgctcttcccctacccaattattttgagtcacatcccatatgcaatgttgttttttctgaaaaatttcagcatagacctttgacatt

SEQ ID NO: 387103 - DNA, 467 bp, Homo sapiens
ctggcactcagattcaatgggtttttgctaaatgtgctgtccgccacccactcttgcctttcttctagtgccctggctggtgctcagcgagatctttcctggtgggatcagaggacgagccatggctttaacttctagcatgaactggggcatcaatctcctcatctcgctgacatttttgactgtaactggtaagaagtctttgttttcctctaatgtctttggtcctcgtaggacaaatgttagggaatcacacccacctaaagaccattttttcatggaaattttcaaacacacttagaaggagaacggccatgaccctgaaatacccatgacccaatttacagttttgaatgtaaatctatttataaccccacctgctcttcccctacccaattattttgagtcacatcccatatgcaatgttgttttttctgaaaaatttcagcatagacctttgacattca

SEQ ID NO: 387104 - DNA, 2654 bp, Homo sapiens
cacggttcttatagtgggacgcattgccataggggtctccatctccctctcttccattgccacttgtgtttacatcgcagagattgctcctcaacacagaagaggccttcttgtgtcactgaatgagctgatgattgtcatcggcattctttctgcctatatttcaaattacgcatttgccaatgttttccatggctggaagtacatgtttggtcttgtgattcccttgggagttttgcaagcaattgcaatgtattttcttcctccaagccctcggtttctggtgatgaaaggacaagagggagctgctagcaaggttcttggaaggttaagagcactctcagatacaactgaggaactcactgtgatcaaatcctccctgaaagatgaatatcagtacagtttttgggatctgtttcgttcaaaagacaacatgcggacccgaataatgataggactaacactagtatttttttgtacaaatcactggccaaccaaacatattgttctatgcatcaactgttttgaagtcagttggatttcaaagcaatgaggcagctagcctcgcctccactggggttggagtcgtcaaggtcattagcaccatccctgccactcttcttgtagaccatgtcggcagcaaaacattcctctgcattggctcctctgtgatggcagcttcgttggtgaccatgggcatcgtaaatctcaacatccacatgaacttcacccatatctgcagaagccacaattctatcaaccagtccttggatgagtctgtgatttatggaccaggaaacctgtcaaccaacaacaatactctcagagaccacttcaaagggatttcttcccatagcagaagctcactcatgcccctgagaaatgatgtggataagagaggggagacgacctcagcatccttgctaaatgctggattaagccacactgaataccagatagtcacagaccctggggacgtcccagcttttttgaaatggctgtccttagccagcttgcttgtttatgttgctgctttttcaattggtctaggaccaatgccctggctggtgctcagcgagatctttcctggtgggatcagaggacgagccatggctttaacttctagcatgaactggggcatcaatctcctcatctcgctgacatttttgactgtaactgatcttattggcctgccatgggtgtgctttatatatacaatcatgagtctagcatccctgctttttgttgttatgtttatacctgagacaaagggatgctctttggaacaaatatcaatggagctagcaaaagtgaactatgtgaaaaacaacatttgttttatgagtcatcaccaagaagaattagtgccaaaacagcctcaaaaaagaaaaccccaggagcagctcttggagtgtaacaagctgtgtggtaggggccaatccaggcagctttctccagagacctaatggcctcaacaccttctgaacgtggatagtgccagaacacttaggagggtgtctttggaccaatgcatagttgcgactcctgtgctctcttttcagtgtcatggaactggttttgaagagacactctgaaatgataaagacagcctttaatccccctcctccccagaaggaacctcaaaaggtagatgaggtacaaggtcctaagtgatctctttttctgagcaggatatcaggttaaaaaaaaaaagttactggctggtttaatactttctaccttcttcacagagcagcctttgaatagactatgtcctagtgaagacatcaacctccgccttaagctatgtatgtatggaggccagtcgcagctttattatgcagacacacaagtggtctggacatgagggtacagtttctgcctaccaagacactacttgcactggatcttacgcaaaaaagaaccagaacacacagtgtggacaactgcccatatattctatctagattaggagagggtcctggctaggattttagtggtaattcctagttacattcaacaagtataaagattatagagcttattttatgaactataaactataatttaatgcaaaatatccttttatgaatttcatgttaatattgtgaaatattaaaataattccgcaatagttgagaaaaatgagcatttttttccatttttaaaaaatgcatagaaaagacaattttaaaatcctgggaccatatttatttagaagtagctgttagtaaaacattagaaaaggagtcaggccattaggttatttatccaaatctctaagcaattaggttgaagttattaagtcaagcctagaaaagctgcctccttgtaaggctttcatgacaatgtatagtaatccacagtgtccaattcttcacactcctcaggaatatcactacctcaggttacggtacacaggctataattgatgatgatgttcagataactgaagacacaataaatgacattcagacatcaggacaattccctcatgttcttttctatgatggccacctgtaccagcaacgtgggtttcacccacacaacgatgaactgttctcttacttctccagttgattttaaagacttgttaagaggtcttactaataaaatttgggtatgatagaaaatccacaatcaaatcttgaacc

SEQ ID NO: 387105 - DNA, 310 bp, Homo sapiens
gacttttataaaaataacaaataaaacatttccctcctataaattttatggtgctattgcattgctggtaccctaagtgcatgtttagtgtgtctattgggtacattggccatgggaataagaaatcaaaaatgacaccaatgttttgcatctaattgaccagaaaacatgattatatagttgccagccaaagactggttttagagagaagcagataagtttagttgaggttgaattaatgttgaggtgctggcagactctccagatgaaagagtaaagagctccagaaagatgatttgggaattcatct

SEQ ID NO: 387106 - DNA, 521 bp, Homo sapiens
ctcgcgaacgtgttatccctctgtcttcccaattagaggccagcttgagaactttggaagacagagggataagaaaaataagtggaacaggaaaagcattagcaaaaacagaaaaatatgaacacaaaagtgaagtgaagacttacgatccttctggtgactccacacttccaacctgttctaaaaaacgcaaaatagaacaggtagataaagaggatgaaattactgaaaagaaagccaaaaaagccaagattaaagttaaagttgaagaagaggaagaagaaaaagtggcagaagaagaagaaacatctgtgaagaagaagaagaaaaggggtaaaaagaaacacattaaggaagaaccactttctgaggaagaaccatgtaccagcacagcaattgctagtccagagaaaaagaagaaaaagaaaaaaaagagagagaacgaggattaacagaaaggaattacgattatatcacccggacacacttcgcgagggtaccggctcgattcgtatctgtct

SEQ ID NO: 387107 - DNA, 935 bp, Homo sapiens
ggtaatttaccacacaaagtgaaagcacaggtaggggactattaatagatacttgtaggaatatctcttcctaataaatgtgtttatttgtaggctttttcatatctaaagcaatagaatatttgatacaatctcagaaagcagggaccagattagtgttcgtgtgtgtgacatttatgtcactcctgtagtatactaatggaatttagaatagtactgccatctctcaggtgaatagaaacattgaacttaataagcttagccttcagtttgtcctaggcattcattgcaaacctgcttgtgctaatgaaggaattacaaatgaaacatcaagatttttagggaattctggattatagaattctatattatatgtgatttttatttattatggtggctgtaataattctataggtcttttgtttcagtacgtggaacattcatatatttggaggtgcattctttgtaacttttttcttttgtaggttctcttttaaatttggccaagcatgcagcttctaccgttcagattcttggagctgaaaaggcacttttcagagccctcaaatctagacgggatacccctaagtatggtctcatttatcatgcttcactcgtgggccagacaagtcccaaacacaaaggaaaggtgtgttatagggttttgctttgtttttgaggttagactttttcattttttacaacccatttttcttctactctgtagtacacattaaatcttctattgtctctttcttgttaaatagggaatggtgagttatttaaataaaaagtgctttgtgtacactgaaggataaggttagaagaaactgttattggttggattaaagccagtttcttccattgtgttagtatttttttcccccctagaatctccctgtggttggcacactgaaaatactatctctggcagc

SEQ ID NO: 387108 - DNA, 267 bp, Homo sapiens
tctctggactagcaattgctgtgctggtacatggttcttcctcagaaaggaattacgattatatcacccggacacacatcatgcttaagattcaactgggagcataccagggatgctctctaacgtaatcaagggaaggttcagtaagacaaagtgatttatcatctataacttcaaacctatttgtcttgacatcaactctgttaaccttatgtcatcatttcttagagtctttgatatacaaataaaattttctttgtattttaa

SEQ ID NO: 387109 - DNA, 298 bp, Homo sapiens
acacacctgattgctcatttctaatttggtgccaggcgcccaaacaaagagcctcagggaaacgtggcagaagaagaagaaacatctgtgaagaagaagaagaaaaggggtaaaaagaaacacattaaggaagaaccactttctgaggaagaaccatgtaccagcacagcaattgctagtccagagaagaagaacgaacagaacgcaaacgacaacgagagagcacgacggaatcaccatgcaaggaattaccgatagtatccccccggatacacgctcgcgagggtaccgagctgag

SEQ ID NO: 387110 - DNA, 180 bp, Homo sapiens
gcagccgttgcgttcttctcagtttgaagtgaagacttacgatccttctggtgactccacacttccaacctgttctaaaaaacgcaaaatagaacaggtagataaagaggatgaaattactgaaaagaaagccaaaaaagccaagattaaagttaaagttgaagaagaaacgcaaacctg

SEQ ID NO: 387111 - DNA, 2043 bp, Homo sapiens
ccagtagggccgggtgtgaaatcggacgagggtagcgcgttcgtgcgtcctagttccagtacagcgtggagggtttaggcagcgtgttctgattctttgcgggacggcgagcgcatttgtgctttgcccgccgcggcctaggaggccttttgaggccgcgtagtcggtgtttttgaactgactctacagcttctggcaggccgtgcggcgccctgacccggcctcaccatgttggtgctgtttgaaacgtctgtgggttacgccatctttaaggttctaaatgagaagaaacttcaagaggttgatagtttatggaaagaatttgaaactccagagaaagcaaacaaaatagtaaagctaaaacattttgagaaatttcaggatacagcagaagcattagcagcattcacagctctgatggagggcaaaatcaataagcagctgaaaaaagttctgaagaaaatagtaaaagaagcccatgaaccgctggcagtagctgatgctaaactaggaggggtcataaaggaaaagctgaatctcagttgtatccatagtcctgttgttaatgaacttatgagaggaattcgttcacaaatggatggattaatccctggggtagaaccacgtgaaatggcagctatgtgtcttggattggctcacagcctgtctcgatatagattgaagtttagcgctgataaagtagacacaatgattgttcaggcaatttccttgttagatgacttggataaagaactaaacaactacattatgcgatgtagagaatggtatggctggcatttccctgaattaggaaaaattatttcagataatttaacatactgcaagtgtttacagaaagttggcgataggaagaactatgcctctgccaagctttctgagttgctgccagaagaagttgaagcagaagtgaaagcagctgcagagatatcaatgggaacagaggtttcagaagaagatatttgcaatattctgcatctttgcacccaggtgattgaaatctctgaatatcgaacccagctctatgaatatctacaaaatcgaatgatggccattgcacccaatgttacagtcatggttggggaattagttggagcacggcttattgctcatgcaggttctcttttaaatttggccaagcatgcagcttctaccgttcagattcttggagctgaaaaggcacttttcagagccctcaaatctagacgggatacccctaagtatggtctcatttatcatgcttcactcgtgggccagacaagtcccaaacacaaaggaaagatttctcgaatgctggcagccaaaaccgttttggctatccgttatgatgcttttggtgaggattcaagttctgcaatgggagttgagaacagagccaaattagaggccaggttgagaactttggaagacagagggataagaaaaataagtggaacaggaaaagcattagcaaaaacagaaaaatatgaacacaaaagtgaagtgaagacttacgatccttctggtgactccacacttccaacctgttctaaaaaacgcaaaatagaacaggtagataaagaggatgaaattactgaaaagaaagccaaaaaagccaagattaaagttaaagttgaagaagaggaagaagaaaaagtggcagaagaagaagaaacatctgtgaagaagaagaagaaaaggggtaaaaagaaacacattaaggaagaaccactttctgaggaagaaccatgtaccagcacagcaattgctagtccagagaaaaagaagaaaaagaaaaaaaagagagagaacgaggattaacagaaaggaattacgattatatcacccggacacacatcatgcttaagattcaactgggagcataccagggatgctctctaacgtaatcaagggaaggttcagtaagacaaagtgatttatcatctataacttcaaacctatttgtcttgacatcaactctgttaaccttatgtcatcatttcttagagtctttgatatacaaataaaattttctttgtattttaa

SEQ ID NO: 387112 - DNA, 2058 bp, Homo sapiens
agaatcctgagagaaggagtagcgcgttcgtgcgtcctagttccagtacagcgtggagggtttaggcagcgtgttctgattctttgcgggacggcgagcgcatttgtgctttgcccgccgcggcctaggaggccttttgaggccgcgtagtcggtgtttttgaactgactctacagcttctggcaggccgtgcggcgccctgacccggcctcaccatgttggtgctgtttgaaacgtctgtgggttacgccatctttaaggttctaaatgagaagaaacttcaagaggttgatagtttatggaaagaatttgaaactccagagaaagcaaacaaaatagtaaagctaaaacattttgagaaatttcaggatacagcagaagcattagcagcattcacagctctgatggagggcaaaatcaataagcagctgaaaaaagttctgaagaaaatagtaaaagaagcccatgaaccgctggcagtagctgatgctaaactaggaggggtcataaaggaaaagctgaatctcagttgtatccatagtcctgttgttaatgaacttatgagaggaattcgttcacaaatggatggattaatccctggggtagaaccacgtgaaatggcagctatgtgtcttggattggctcacagcctgtctcgatatagattgaagtttagcgctgataaagtagacacaatgattgttcaggcaatttccttgttagatgacttggataaagaactaaacaactacattatgcgatgtagagaatggtatggctggcatttccctgaattaggaaaaattatttcagataatttaacatactgcaagtgtttacagaaagttggcgataggaagaactatgcctctgccaagctttctgagttgctgccagaagaagttgaagcagaagtgaaagcagctgcagagatatcaatgggaacagaggtttcagaagaagatatttgcaatattctgcatctttgcacccaggtgattgaaatctctgaatatcgaacccagctctatgaatatctacaaaatcgaatgatggccattgcacccaatgttacagtcatggttggggaattagttggagcacggcttattgctcatgcaggttctcttttaaatttggccaagcatgcagcttctaccgttcagattcttggagctgaaaaggcacttttcagagccctcaaatctagacgggatacccctaagtatggtctcatttatcatgcttcactcgtgggccagacaagtcccaaacacaaaggaaagatttctcgaatgctggcagccaaaaccgttttggctatccgttatgatgcttttggtgaggattcaagttctgcaatgggagttgagaacagagccaaattagaggccaggttgagaactttggaagacagagggataagaaaaataagtggaacaggaaaagcattagcaaaaacagaaaaatatgaacacaaaagtgaagtgaagacttacgatccttctggtgactccacacttccaacctgttctaaaaaacgcaaaatagaacaggtagataaagaggatgaaattactgaaaagaaagccaaaaaagccaagattaaagttaaagttgaagaagaggaagaagaaaaagtggcagaagaagaagaaacatctgtgaagaagaagaagaaaaggggtaaaaagaaacacattaaggaagaaccactttctgaggaagaaccatgtaccagcacagcaattgctagtccagagaaaaagaagaaaaagaaaaaaaagagagagaacgaggattaacagaaaggaattacgattatatcacccggacacacatcatgcttaagattcaactgggagcataccagggatgctctctaacgtaatcaagggaaggttcagtaagacaaagtgatttatcatctataacttcaaacctatttgtcttgacatcaactctgttaaccttatgtcatcatttcttagagtctttgatatacaaataaaattttctttgtattttaagtgaaaaaaaacatccgaaataaaaaaa

SEQ ID NO: 387113 - DNA, 1779 bp, Homo sapiens
agaatcctgagagaaggagtagcgcgttcgtgcgtcctagttccagtacagcgtggagggtttaggcagcgtgttctgattctttgcgggacggcgagcgcatttgtgctttgcccgccgcggcctaggaggccttttgaggccgcgtagtcggtgtttttgaactgactctacagcttctggcaggccgtgcggcgccctgacccggcctcaccatgttggtgctgtttgaaacgtctgtgggttacgccatctttaaggttctaaatgagaagaaacttcaagaggttgatagtttatggaaagaatttgaaactccagagaaagcaaacaaaatagtaaagctaaaacattttgagaaatttcaggatacagcagaagcattagcagcattcacagctctgatggagggcaaaatcaataagcagctgaaaaaagttctgaagaaaatagtaaaagaagcccatgaaccgctggcagtagctgatgctaaactaggaggggtcataaaggaaaagctgaatctcagttgtatccatagtcctgttgttaatgaacttatgagaggaattcgttcacaaatggatggattaatccctggggtagaaccacgtgaaatggcagctatgtgtcttggattggctcacagcctgtctcgatatagattgaagtttagcgctgataaagtagacacaatgattgttcaggcaatttccttgttagatgacttggataaagaactaaacaactacattatgcgatgtagagaatggtatggctggcatttccctgaattaggaaaaattatttcagataatttaacatactgcaagtgtttacagaaagttggcgataggaagaactatgcctctgccaagctttctgagttgctgccagaagaagttgaagcagaagtgaaagcagctgcagagatatcaatgggaacagaggtttcagaagaagatatttgcaatattctgcatctttgcacccaggtgattgaaatctctgaatatcgaacccagctctatgaatatctacaaaatcgaatgatggccattgcacccaatgttacagtcatggttggggaattagttggagcacggcttattgctcatgcaggttctcttttaaatttggccaagcatgcagcttctaccgttcagattcttggagctgaaaaggcacttttcagagccctcaaatctagacgggatacccctaagtatggtctcatttatcatgcttcactcgtgggccagacaagtcccaaacacaaaggaaagatttctcgaatgctggcagccaaaaccgttttggctatccgttatgatgcttttggtgaggattcaagttctgcaatgggagttgagaacagagccaaattagaggccaggttgagaactttggaagacagagggataagaaaaataagtggaacaggaaaagcattagcaaaaacagaaaaatatgaacacaaaagtgaagtgaagacttacgatccttctggtgactccacacttccaacctgttctaaaaaacgcaaaatagaacaggtagataaagaggatgaaattactgaaaagaaagccaaaaaagccaagattaaagttaaagttgaagaagaggaagaagaaaaagtggcagaagaagaagaaacatctgtgaagaagaagaagaaaaggggtaaaaagaaacacattaaggaagaaccactttctgaggaagaaccatgtaccagcacagcaattgctgtatgtttgtttttaattatcggtt

SEQ ID NO: 387114 - DNA, 2161 bp, Homo sapiens
ccagtagggccgggtgtgaaatcggacgagggtagcgcgttcgtgcgtcctagttccagtacagcgtggagggtttaggcagcgtgttctgattctttgcgggacggcgagcgcatttgtgctttgcccgccgcggcctaggaggccttttgaggccgcgtagtcggtgtttttgaactgactctacagcttctggcaggccgtgcggcgccctgacccggcctcaccatgttggtgctgtttgaaacgtctgtgggttacgccatctttaaggttctaaatgagaagaaacttcaagaggttgatagtttatggaaagaatttgaaactccagagaaagcaaacaaaatagtaaagctaaaacattttgagaaatttcaggatacagcagaagcattagcagggctggttttccccatgtgtgaggagaggtgagaagtggttaagttgatctccctgtggaaaccagcaacataatgctgaagcacaattcagtaaaaggtgttctacaagggaccaagcattcacagctctgatggagggcaaaatcaataagcagctgaaaaaagttctgaagaaaatagtaaaagaagcccatgaaccgctggcagtagctgatgctaaactaggaggggtcataaaggaaaagctgaatctcagttgtatccatagtcctgttgttaatgaacttatgagaggaattcgttcacaaatggatggattaatccctggggtagaaccacgtgaaatggcagctatgtgtcttggattggctcacagcctgtctcgatatagattgaagtttagcgctgataaagtagacacaatgattgttcaggcaatttccttgttagatgacttggataaagaactaaacaactacattatgcgatgtagagaatggtatggctggcatttccctgaattaggaaaaattatttcagataatttaacatactgcaagtgtttacagaaagttggcgataggaagaactatgcctctgccaagctttctgagttgctgccagaagaagttgaagcagaagtgaaagcagctgcagagatatcaatgggaacagaggtttcagaagaagatatttgcaatattctgcatctttgcacccaggtgattgaaatctctgaatatcgaacccagctctatgaatatctacaaaatcgaatgatggccattgcacccaatgttacagtcatggttggggaattagttggagcacggcttattgctcatgcaggttctcttttaaatttggccaagcatgcagcttctaccgttcagattcttggagctgaaaaggcacttttcagagccctcaaatctagacgggatacccctaagtatggtctcatttatcatgcttcactcgtgggccagacaagtcccaaacacaaaggaaagatttctcgaatgctggcagccaaaaccgttttggctatccgttatgatgcttttggtgaggattcaagttctgcaatgggagttgagaacagagccaaattagaggccaggttgagaactttggaagacagagggataagaaaaataagtggaacaggaaaagcattagcaaaaacagaaaaatatgaacacaaaagtgaagtgaagacttacgatccttctggtgactccacacttccaacctgttctaaaaaacgcaaaatagaacaggtagataaagaggatgaaattactgaaaagaaagccaaaaaagccaagattaaagttaaagttgaagaagaggaagaagaaaaagtggcagaagaagaagaaacatctgtgaagaagaagaagaaaaggggtaaaaagaaacacattaaggaagaaccactttctgaggaagaaccatgtaccagcacagcaattgctagtccagagaaaaagaagaaaaagaaaaaaaagagagagaacgaggattaacagaaaggaattacgattatatcacccggacacacatcatgcttaagattcaactgggagcataccagggatgctctctaacgtaatcaagggaaggttcagtaagacaaagtgatttatcatctataacttcaaacctatttgtcttgacatcaactctgttaaccttatgtcatcatttcttagagtctttgatatacaaataaaattttctttgtattttaa

SEQ ID NO: 387115 - DNA, 2084 bp, Homo sapiens
ccagtagggccgggtgtgaaatcggacgagggtagcgcgttcgtgcgtcctagttccagtacagcgtggagggtttaggcagcgtgttctgattctttgcgggacggcgagcgcatttgtgctttgcccgccgcggcctaggaggccttttgaggccgcgtagtcggtgtttttgaactgactctacagcttctggcaggccgtgcggcgccctgacccggcctcaccatgttggtgctgtttgaaacgtctgtgggttacgccatctttaagagtaaagctaaaacattttgagaaatttcaggatacagcagaagcattagcagggctggttttccccatgtgtgaggagaggtgagaagtggttaagttgatctccctgtggaaaccagcaacataatgctgaagcacaattcagtaaaaggtgttctacaagggaccaagcattcacagctctgatggagggcaaaatcaataagcagctgaaaaaagttctgaagaaaatagtaaaagaagcccatgaaccgctggcagtagctgatgctaaactaggaggggtcataaaggaaaagctgaatctcagttgtatccatagtcctgttgttaatgaacttatgagaggaattcgttcacaaatggatggattaatccctggggtagaaccacgtgaaatggcagctatgtgtcttggattggctcacagcctgtctcgatatagattgaagtttagcgctgataaagtagacacaatgattgttcaggcaatttccttgttagatgacttggataaagaactaaacaactacattatgcgatgtagagaatggtatggctggcatttccctgaattaggaaaaattatttcagataatttaacatactgcaagtgtttacagaaagttggcgataggaagaactatgcctctgccaagctttctgagttgctgccagaagaagttgaagcagaagtgaaagcagctgcagagatatcaatgggaacagaggtttcagaagaagatatttgcaatattctgcatctttgcacccaggtgattgaaatctctgaatatcgaacccagctctatgaatatctacaaaatcgaatgatggccattgcacccaatgttacagtcatggttggggaattagttggagcacggcttattgctcatgcaggttctcttttaaatttggccaagcatgcagcttctaccgttcagattcttggagctgaaaaggcacttttcagagccctcaaatctagacgggatacccctaagtatggtctcatttatcatgcttcactcgtgggccagacaagtcccaaacacaaaggaaagatttctcgaatgctggcagccaaaaccgttttggctatccgttatgatgcttttggtgaggattcaagttctgcaatgggagttgagaacagagccaaattagaggccaggttgagaactttggaagacagagggataagaaaaataagtggaacaggaaaagcattagcaaaaacagaaaaatatgaacacaaaagtgaagtgaagacttacgatccttctggtgactccacacttccaacctgttctaaaaaacgcaaaatagaacaggtagataaagaggatgaaattactgaaaagaaagccaaaaaagccaagattaaagttaaagttgaagaagaggaagaagaaaaagtggcagaagaagaagaaacatctgtgaagaagaagaagaaaaggggtaaaaagaaacacattaaggaagaaccactttctgaggaagaaccatgtaccagcacagcaattgctagtccagagaaaaagaagaaaaagaaaaaaaagagagagaacgaggattaacagaaaggaattacgattatatcacccggacacacatcatgcttaagattcaactgggagcataccagggatgctctctaacgtaatcaagggaaggttcagtaagacaaagtgatttatcatctataacttcaaacctatttgtcttgacatcaactctgttaaccttatgtcatcatttcttagagtctttgatatacaaataaaattttctttgtattttaa

SEQ ID NO: 387116 - DNA, 1695 bp, Homo sapiens
agaatcctgagagaaggagtagcgcgttcgtgcgtcctagttccagtacagcgtggagggtttaggcagcgtgttctgattctttgcgggacggcgagcgcatttgtgctttgcccgccgcggcctaggaggccttttgaggccgcgtagtcggtgtttttgaactgactctacagcttctggcaggccgtgcggcgccctgacccggcctcaccatgttggtgctgtttgaaacgtctgtgggttacgccatctttaaggttctaaatgagaagaaacttcaagaggttgatagtttatggaaagaatttgaaactccagagaaagcaaacaaaatagtaaagctaaaacattttgagaaatttcaggatacagcagaagcattagcagcattcacagctctgatggagggcaaaatcaataagcagctgaaaaaagttctgaagaaaatagtaaaagaagcccatgaaccgctggcagtagctgatgctaaactaggaggggtcataaaggaaaagctgaatctcagttgtatccatagtcctgttgttaatgaacttatgagaggaattcgttcacaaatggatggattaatccctggggtagaaccacgtgaaatggcagctatgtgtcttggattggctcacagcctgtctcgatatagattgaagtttagcgctgataaagtagacacaatgattgttcaggcaatttccttgttagatgacttggataaagaactaaacaactacattatgcgatgtagagaatggtatggctggcatttccctgaattaggaaaaattatttcagataatttaacatactgcaagtgtttacagaaagttggcgataggaagaactatgcctctgccaagctttctgagttgctgccagaagaagttgaagcagaagtgaaagcagctgcagagatatcaatgggaacagaggtttcagaagaagatatttgcaatattctgcatctttgcacccaggtgattgaaatctctgaatatcgaacccagctctatgaatatctacaaaatcgaatgatggccattgcacccaatgttacagtcatggttggggaattagttggagcacggcttattgctcatgcaggtgatggttttaatgtaatttgtaaatatgagtgtttgaagtattttctggttaggattttgtttacatctttaaactacagctgttaaagaaattttagctgataacacaaaagtagatgatatgtgggagatcactaagggccaagtgttcaatgatgatttctatttgtttgcctgatttccttttggataatgaaggcatctttagtcactacctcttctgagacacttgtggtccattgttagaagtttgttagggttaattagaacaatcggatgaatgcaggaggataaaacagttaacattttcataataaaaactcactagacctagatttgaatacagttttaagaaatcactgtagagaaagaaaaaaaaaaaaaaaaaaaaaatgcaagcataactatttttgtgcattggttacttgaatataagcactgcagtactgcacaacggagagggctacgaaagtgactaatgggtagatagagatgattcatgtcctggggggagctgagtgggatagcaagagatttaaaacttaggaactatttatttctggaatttcct

SEQ ID NO: 387117 - DNA, 1872 bp, Homo sapiens
ttctaaatgatgtcagagttcaccgtgggatcgagtgataggccagttgtgcacaactcggtagtattttcccgcattgctgtgcccaggttcaatattattgccactgtagtgatggacaccagttttagcctacatagcatagtactctatgttcagatttcctcaaagctgggcagttgttagcgagaatgaccgatttcgctttgccttgtctgatcatcgttcagagtctgcttgtaccccaggacgtacttcccactgtttcatgaacgagttggagcctagagttgatcgactccagcgactttttcgtcttctttgcggccaccatcttcctgccttaggagcgggacggcccccaaccaacagcagccgctaagatggccggttaatgaacttatgagaggaattcgttcacaaatggatggattaatccctggggtagaaccacgtgaaatggcagctatgtgtcttggattggctcacagcctgtctcgatatagattgaagtttagcgctgataaagtagacacaatgattgttcaggcaatttccttgttagatgacttggataaagaactaaacaactacattatgcgatgtagagaatggtatggctggcatttccctgaattaggaaaaattatttcagataatttaacatactgcaagtgtttacagaaagttggcgataggaagaactatgcctctgccaagctttctgagttgctgccagaagaagttgaagcagaagtgaaagcagctgcagagatatcaatgggaacagaggtttcagaagaagatatttgcaatattctgcatctttgcacccaggtgattgaaatctctgaatatcgaacccagctctatgaatatctacaaaatcgaatgatggccattgcacccaatgttacagtcatggttggggaattagttggagcacggcttattgctcatgcaggttctcttttaaatttggccaagcatgcagcttctaccgttcagattcttggagctgaaaaggcacttttcagagccctcaaatctagacgggatacccctaagtatggtctcatttatcatgcttcactcgtgggccagacaagtcccaaacacaaaggaaagatttctcgaatgctggcagccaaaaccgttttggctatccgttatgatgcttttggtgaggattcaagttctgcaatgggagttgagaacagagccaaattagaggccaggttgagaactttggaagacagagggataagaaaaataagtggaacaggaaaagcattagcaaaaacagaaaaatatgaacacaaaagtgaagtgaagacttacgatccttctggtgactccacacttccaacctgttctaaaaaacgcaaaatagaacaggtagataaagaggatgaaattactgaaaagaaagccaaaaaagccaagattaaagttaaagttgaagaagaggaagaagaaaaagtggcagaagaagaagaaacatctgtgaagaagaagaagaaaaggggtaaaaagaaacacattaaggaagaaccactttctgaggaagaaccatgtaccagcacagcaattgctagtccagagaaaaagaagaaaaagaaaaaaaagagagagaacgaggattaacagaaaggaattacgattatatcacccggacacacatcatgcttaagattcaactgggagcataccagggatgctctctaacgtaatcaagggaaggttcagtaagacaaagtgatttatcatctataacttcaaacctatttgtcttgacatcaactctgttaaccttatgtcatcatttcttagagtctttgatatacaaataaaattttctttgtattttaa

SEQ ID NO: 387118 - DNA, 1581 bp, Homo sapiens
ggctgcagtgaattcggcacgagcggcacgagagctgatgctaaactaggaggggtcataaaggaaaagctgaatctcagttgtatccatagtcctgttgttaatgaacttatgagaggaattcgttcacaaatggatggattaatccctggggtagaaccacgtgaaatggcagctatgtgtcttggattggctcacagcctgtctcgatatagattgaagtttagcgctgataaagtagacacaatgattgttcaggcaatttccttgttagatgacttggataaagaactaaacaactacattatgcgatgtagagaatggtatggctggcatttccctgaattaggaaaaattatttcagataatttaacatactgcaagtgtttacagaaagttggcgataggaagaactatgcctctgccaagctttctgagttgctgccagaagaagttgaagcagaagtgaaagcagctgcagagatatcaatgggaacagaggtttcagaagaagatatttgcaatattctgcatctttgcacccaggtgattgaaatctctgaatatcgaacccagctctatgaatatctacaaaatcgaatgatggccattgcacccaatgttacagtcatggttggggaattagttggagcacggcttattgctcatgcaggttctcttttaaatttggccaagcatgcagcttctaccgttcagattcttggagctgaaaaggcacttttcagagccctcaaatctagacgggatacccctaagtatggtctcatttatcatgcttcactcgtgggccagacaagtcccaaacacaaaggaaagatttctcgaatgctggcagccaaaaccgttttggctatccgttatgatgcttttggtgaggattcaagttctgcaatgggagttgagaacagagccaaattagaggccaggttgagaactttggaagacagagggataagaaaaataagtggaacaggaaaagcattagcaaaaacagaaaaatatgaacacaaaagtgaagtgaagacttacgatccttctggtgactccacacttccaacctgttctaaaaaacgcaaaatagaacaggtagataaagaggatgaaattactgaaaagaaagccaaaaaagccaagattaaagttaaagttgaagaagaggaagaagaaaaagtggcagaagaagaagaaacatctgtgaagaagaagaagaaaaggggtaaaaagaaacacattaaggaagaaccactttctgaggaagaaccatgtaccagcacagcaattgctagtccagagaaaaagaagaaaaagaaaaaaaagagagagaacgaggattaacagaaaggaattacgattatatcacccggacacacatcatgcttaagattcaactgggagcataccagggatgctctctaacgtaatcaagggaaggttcagtaagacaaagtgatttatcatctataacttcaaacctatttgtcttgacatcaactctgttaaccttatgtcatcatttcttagagtctttgatatacaaataaaattttctttgtattttaa

SEQ ID NO: 387119 - DNA, 1081 bp, Homo sapiens
  misc_feature (22)..(22): n is a, c, g, or t
cccgggaacgaggcagagaagntgcatattctgctctttgcacccagtgattgaaatctctgaatatcgaacccagctctatgaatatctacaaaatcgaatgatggccattgcacccaatgttacagtcatggttggggaattagttggagcacggcttattgctcatgcaggttctcttttaaatttggccaagcatgcagcttctaccgttcagattcttggagctgaaaaggcacttttcagagccctcaaatctagacgggatacccctaagtatggtctcatttatcatgcttcactcgtgggccagacaagtcccaaacacaaaggaaagatttctcgaatgctggcagccaaaaccgttttggctatccgttatgatgcttttggtgaggattcaagttctgcaatgggagttgagaacagagccaaattagaggccaggttgagaactttggaagacagagggataagaaaaataagtggaacaggaaaagcattagcaaaaacagaaaaatatgaacacaaaagtgaagtgaagacttacgatccttctggtgactccacacttccaacctgttctaaaaaacgcaaaatagaacaggtagataaagaggatgaaattactgaaaagaaagccaaaaaagccaagattaaagttaaagttgaagaagaggaagaagaaaaagtggcagaagaagaagaaacatctgtgaagaagaagaagaaaaggggtaaaaagaaacacattaaggaagaaccactttctgaggaagaaccatgtaccagcacagcaattgctagtccagagaaaaagaagaaaaagaaaaaaaagagagagaacgaggattaacagaaaggaattacgattatatcacccggacacacatcatgcttaagattcaactgggagcataccagggatgctctctaacgtaatcaagggaaggttcagtaagacaaagtgatttatcatctataacttcaaacctatttgtcttgacatcaactctgttaaccttatgtcatcatttcttagagtctttgatatacaaataaaattttctttgtattttaa

SEQ ID NO: 387120 - DNA, 749 bp, Homo sapiens
  misc_feature (31)..(31): n is a, c, g, or t
caggaggaggctgggttaatcggacgaggancgttttggctatccgttatgatgcttttggtgaggattcaagttctgcaatgggagttgagaacagagccaaattagaggccaggttgagaactttggaagacagagggataagaaaaataagtggaacaggaaaagcattagcaaaaacagaaaaatatgaacacaaaagtgaagtgaagacttacgatccttctggtgactccacacttccaacctgttctaaaaaacgcaaaatagaacaggtagataaagaggatgaaattactgaaaagaaagccaaaaaagccaagattaaagttaaagttgaagaagaggaagaagaaaaagtggcagaagaagaagaaacatctgtgaagaagaagaagaaaaggggtaaaaagaaacacattaaggaagaaccactttctgaggaagaaccatgtaccagcacagcaattgctagtccagagaaaaagaagaaaaagaaaaaaaagagagagaacgaggattaacagaaaggaattacgattatatcacccggacacacatcatgcttaagattcaactgggagcataccagggatgctctctaacgtaatcaagggaaggttcagtaagacaaagtgatttatcatctataacttcaaacctatttgtcttgacatcaactctgttaaccttatgtcatcatttcttagagtctttgatatacaaataaaattttctttgtattttaa

SEQ ID NO: 387121 - DNA, 1579 bp, Homo sapiens
tgtttggagacagagtctccctctgtcgcccaggctgaagtgcagtggcgtgatcttggctgactgcagcctccgcctccggggctcaagcaattctcgtgcttcagcctcctgaatgctgggattacaggcgtgagccacagcacccggcctccttcaagaattttaatagtaaaatcttataagtggatgaggagagtaattaatatatagaacattaccaattataaatacatatttaagtataatttagtgttttctggaaagaaatcaaatgtgtttctgtgggcattcacattttcttttttgtgaattttccaagctttctacaatagccatacattctgcaatatttatagtctataacttattatctctagttgacaaacatggttctttgtttcttaaattataaatgtctttaacctaaaaaaattaaatagtcattcagcttacaggtctgcttaaaaaacagaacattttttagcttgttttgaaccaatttttttaatgttcctgtgcaattagtactttttactttaaacatatgcacttaaagcatccattcacattttaggcactcatttcagtattttctttctgcttacattagaacaaaagcaaatgttgggttctatggaatcttttccatgtgcatgtatttgtatcctttcttgttcttgtgatcttgtgatgaagacttctatactaagcttggtttagattttttgttctgcttttttttttttttttttcccccattgagcagtgttctgaaagttggatggttcagttttcactttctagttaggtgtgaagacgttttctcctttcatttcccccatgctgattgagtgttttcctgtaccatagtaactacattgattactaaatcagaattcatttagctcaccacatctcttgaatgtgattgacctacttgaaaaatattaatacctttaacttttggaaactattagtcttcataaactaccccaaagccactaaaatgaaacaacattgtgtgcttattgaagtgaagacttacgatccttctggtgactccacacttccaacctgttctaaaaaacgcaaaatagaacaggtagataaagaggatgaaattactgaaaagaaagccaaaaaagccaagattaaagttaaagttgaagaagaggaagaagaaaaagtggcagaagaagaagaaacatctgtgaagaagaagaagaaaaggggtaaaaagaaacacattaaggaagaaccactttctgaggaagaaccatgtaccagcacagcaattgctagtccagagaaaaagaagaaaaagaaaaaaaagagagagaacgaggattaacagaaaggaattacgattatatcacccggacacacatcatgcttaagattcaactgggagcataccagggatgctctctaacgtaatcaagggaaggttcagtaagacaaagtgatttatcatctataacttcaaacctatttgtcttgacatcaactctgttaaccttatgtcatcatttcttagagtctttgatatacaaataaaattttctttgtattttaa

SEQ ID NO: 387122 - DNA, 1675 bp, Homo sapiens
tgtttggagacagagtctccctctgtcgcccaggctgaagtgcagtggcgtgatcttggctgactgcagcctccgcctccggggctcaagcaattctcgtgcttcagcctcctgaatgctgggattacaggcgtgagccacagcacccggcctccttcaagaattttaatagtaaaatcttataagtggatgaggagagtaattaatatatagaacattaccaattataaatacatatttaagtataatttagtgttttctggaaagaaatcaaatgtgtttctgtgggcattcacattttcttttttgtgaattttccaagctttctacaatagccatacattctgcaatatttatagtctataacttattatctctagttgacaaacatggttctttgtttcttaaattataaatgtctttaacctaaaaaaattaaatagtcattcagcttacaggtctgcttaaaaaacagaacattttttagcttgttttgaaccaatttttttaatgttcctgtgcaattagtactttttactttaaacatatgcacttaaagcatccattcacattttaggcactcatttcagtattttctttctgcttacattagaacaaaagcaaatgttgggttctatggaatcttttccatgtgcatgtatttgtatcctttcttgttcttgtgatcttgtgatgaagacttctatactaagcttggtttagattttttgttctgcttttttttttttttttttcccccattgagcagtgttctgaaagttggatggttcagttttcactttctagttaggtgtgaagacgttttctcctttcatttcccccatgctgattgagtgttttcctgtaccatagtaactacattgattactaaatcagaattcatttagctcaccacatctcttgaatgtgattgacctacttgaaaaatattaatacctttaacttttggaaactattagtcttcataaactaccccaaagccactaaaatgaaacaacattgtgtgcttatgtaagtattatctaatggcattttctttatctcttgagaattatttcaattccagatacttgttagagattttctaaaactttttgggtctttcagtgaagtgaagacttacgatccttctggtgactccacacttccaacctgttctaaaaaacgcaaaatagaacaggtagataaagaggatgaaattactgaaaagaaagccaaaaaagccaagattaaagttaaagttgaagaagaggaagaagaaaaagtggcagaagaagaagaaacatctgtgaagaagaagaagaaaaggggtaaaaagaaacacattaaggaagaaccactttctgaggaagaaccatgtaccagcacagcaattgctagtccagagaaaaagaagaaaaagaaaaaaaagagagagaacgaggattaacagaaaggaattacgattatatcacccggacacacatcatgcttaagattcaactgggagcataccagggatgctctctaacgtaatcaagggaaggttcagtaagacaaagtgatttatcatctataacttcaaacctatttgtcttgacatcaactctgttaaccttatgtcatcatttcttagagtctttgatatacaaataaaattttctttgtattttaa

SEQ ID NO: 387123 - DNA, 810 bp, Homo sapiens
agaatcctgagagaaggagtagcgcgttcgtgcgtcctagttccagtacagcgtggagggtttaggcagcgtgttctgattctttgcgggacggcgagcgcatttgtgctttgcccgccgcggcctaggaggccttttgaggccgcgtagtcggtgtttttgaactgactctacagcttctggcaggccgtgcggcgccctgacccggcctcaccatgttggtgctgtttgaaacgtctgtgggttacgccatctttaaggttctaaatgagaagaaacttcaagaggttgatagtttatggaaagaatttgaaactccagagaaagcaaacaaaatagtaaagctaaaacattttgagaaatttcaggatacagcagaagcattagcagcattcacagctctgatggagggcaaaatcaataagcagctgaaaaaagttctgaagaaaatagtaaaagaagcccatgaaccgctggcagtagctgatgctaaactaggaggggtcataaaggaaaagctgaatctcagttgtatccatagtcctgttgttaatgaacttatgagaggaattcgttcacaaatggatggattaatccctggggtagaaccacgtgaaatggcagctatgtgtcttggattggctcacaggtgagaattactggaaaataaagtcaacttacttttatttgataagcgcttaacatagatctgttctaagaatgttacaaatgctcatttgaaccacatcagaaccttatgaagaagatgatagtaatatcctcatttacagatgaaactgaagcccaagg

SEQ ID NO: 387124 - DNA, 583 bp, Homo sapiens
ctaaattcgcggccgcgtcgactatgaacacaaaagtgaagtgaagacttacgatccttctggtgactccacacttccaacctgttctaaaaaacgcaaaatagaacaggtagataaagaggatgaaattactgaaaagaaagccaaaaaagccaagattaaagttaaagttgaagaagaggaagaagaaaaagtggcagaagaagaagaaacatctgtgaagaagaagaagaaaaggggtaaaaagaaacacattaaggaagaaccactttctgaggaagaaccatgtaccagcacagcaattgctagtccagagaaaaagaagaaaaagaaaaaaaagagagagaacgaggattaacagaaaggaattacgattatatcacccggacacacatcatgcttaagattcaactgggagcataccagggatgctctctaacgtaatcaagggaaggttcagtaagacaaagtgatttatcatctataacttcaaacctatttgtcttgacatcaactctgttaaccttatgtcatcatttcttagagtctttgatatacaaataaaattttctttgtattttaa

SEQ ID NO: 387125 - DNA, 1351 bp, Homo sapiens
tgtttggagacagagtctccctctgtcgcccaggctgaagtgcagtggcgtgatcttggctgactgcagcctccgcctccggggctcaagcaattctcgtgcttcagcctcctgaatgctgggattacaggcgtgagccacagcacccggcctccttcaagaattttaatagtaaaatcttataagtggatgaggagagtaattaatatatagaacattaccaattataaatacatatttaagtataatttagtgttttctggaaagaaatcaaatgtgtttctgtgggcattcacattttcttttttgtgaattttccaagctttctacaatagccatacattctgcaatatttatagtctataacttattatctctagttgacaaacatggttctttgtttcttaaattataaatgtctttaacctaaaaaaattaaatagtcattcagcttacaggtctgcttaaaaaacagaacattttttagcttgttttgaaccaatttttttaatgttcctgtgcaattagtactttttactttaaacatatgcacttaaagcatccattcacattttaggcactcatttcagtattttctttctgcttacattagaacaaaagcaaatgttgggttctatggaatcttttccatgtgcatgtatttgtatcctttcttgttcttgtgatcttgtgatgaagacttctatactaagcttggtttagattttttgttctgcttttttttttttttttttcccccattgagcagtgttctgaaagttggatggttcagttttcactttctagttaggtgtgaagacgttttctcctttcatttcccccatgctgattgagtgttttcctgtaccatagtaactacattgattactaaatcagaattcatttagctcaccacatctcttgaatgtgattgacctacttgaaaaatattaatacctttaacttttggaaactattagtcttcataaactaccccaaagccactaaaatgaaacaacattgtgtgcttattgaagtgaagacttacgatccttctggtgactccacacttccaacctgttctaaaaaacgcaaaatagaacaggtagataaagaggatgaaattactgaaaagaaagccaaaaaagccaagattaaagttaaagttgaagaagaggaagaagaaaaagtggcagaagaagaagaaacatctgtgaagaagaagaagaaaaggggtaaaaagaaacacattaaggaagaaccactttctgaggaagaaccatgtaccagcacagcaattgctagtccagagaaaaagaagaaaaagaaaaaaaagagagagaacgaggat

SEQ ID NO: 387126 - DNA, 692 bp, Homo sapiens
gatatttgaaatccgatacacgggactttcagaatcccccaacagataccacataaaaaggtcttcatagcacattatagatccaattgtctaaaatccaagaccaagaaaaaatttttaaaaccaaaagaggaaaatgtttgggcacctaaaatttaaaaaaaaaaaaaaaccatcagactaacaatgagtttctttgcagaaaccttactgaacaggtagataaagaggatgaaattactgaaaagaaagccaaaaaagccaagattaaagttaaagttgaagaagaggaagaagaaaaagtggcagaagaagaagaaacatctgtgaagaagaagaagaaaaggggtaaaaagaaacacattaaggaagaaccactttctgaggaagaaccatgtaccagcacagcaattgctagtccagagaaaaagaagaaaaagaaaaaaaagagagagaacgaggattaacagaaaggaattacgattatatcacccggacacacatcatgcttaagattcaactgggagcataccagggatgctctctaacgtaatcaagggaaggttcagtaagacaaagtgatttatcatctataacttcaaacctatttgtcttgacatcaactctgttaaccttatgtcatcatttcttagagtctttgatatacaaataaaattttctttgtattttaa

SEQ ID NO: 387127 - DNA, 1369 bp, Homo sapiens
tgtttggagacagagtctccctctgtcgcccaggctgaagtgcagtggcgtgatcttggctgactgcagcctccgcctccggggctcaagcaattctcgtgcttcagcctcctgaatgctgggattacaggcgtgagccacagcacccggcctccttcaagaattttaatagtaaaatcttataagtggatgaggagagtaattaatatatagaacattaccaattataaatacatatttaagtataatttagtgttttctggaaagaaatcaaatgtgtttctgtgggcattcacattttcttttttgtgaattttccaagctttctacaatagccatacattctgcaatatttatagtctataacttattatctctagttgacaaacatggttctttgtttcttaaattataaatgtctttaacctaaaaaaattaaatagtcattcagcttacaggtctgcttaaaaaacagaacattttttagcttgttttgaaccaatttttttaatgttcctgtgcaattagtactttttactttaaacatatgcacttaaagcatccattcacattttaggcactcatttcagtattttctttctgcttacattagaacaaaagcaaatgttgggttctatggaatcttttccatgtgcatgtatttgtatcctttcttgttcttgtgatcttgtgatgaagacttctatactaagcttggtttagattttttgttctgcttttttttttttttttttcccccattgagcagtgttctgaaagttggatggttcagttttcactttctagttaggtgtgaagacgttttctcctttcatttcccccatgctgattgagtgttttcctgtaccatagtaactacattgattactaaatcagaattcatttagctcaccacatctcttgaatgtgattgacctacttgaaaaatattaatacctttaacttttggaaactattagtcttcataaactaccccaaagccactaaaatgaaacaacattgtgtgcttatgtaagtattatctaatggcattttctttatctcttgagaattatttcaattccagatacttgttagagattttctaaaactttttgggtctttcagtgaagtgaagacttacgatccttctggtgactccacacttccaacctgttctaaaaaacgcaaaatagaacaggtagataaagaggatgaaattactgaaaagaaagccaaaaaagccaagattaaagttaaaggttagtttgaattttttttttaacacaacttatactcacttctttagaactgtggattttgtgagtcttaaaagtacatgccatcccactttattataaaactgctc

SEQ ID NO: 387128 - DNA, 789 bp, Homo sapiens
agggtaaatacaatttttcagggttgcagcaggtagattaaacccaggccgtctgacttcagagtgcaagctcttaaccatttctaatataattgactttcttcccaataatgattggagatcagatgacctttgttttaatcctgatttttatacatgacttcatgatcgtgagaagattgctctgagctctatctatatcattcgttaaagttagtggtaggccttggagaaccttcccaattataaaataaacaaaacaaacattgggtagttgatgagaatgacagaaaaaaactaggactcaaacgtttttggaaggaatgagatctgatacagtgttaatttgttgtgcctttacacttaccctattcagttgaagaagaggaagaagaaaaagtggcagaagaagaagaaacatctgtgaagaagaagaagaaaaggggtaaaaagaaacacattaaggaagaaccactttctgaggaagaaccatgtaccagcacagcaattgctagtccagagaaaaagaagaaaaagaaaaaaaagagagagaacgaggattaacagaaaggaattacgattatatcacccggacacacatcatgcttaagattcaactgggagcataccagggatgctctctaacgtaatcaagggaaggttcagtaagacaaagtgatttatcatctataacttcaaacctatttgtcttgacatcaactctgttaaccttatgtcatcatttcttagagtctttgatatacaaataaaattttctttgtattttaa

SEQ ID NO: 387129 - DNA, 1463 bp, Homo sapiens
tgtttggagacagagtctccctctgtcgcccaggctgaagtgcagtggcgtgatcttggctgactgcagcctccgcctccggggctcaagcaattctcgtgcttcagcctcctgaatgctgggattacaggcgtgagccacagcacccggcctccttcaagaattttaatagtaaaatcttataagtggatgaggagagtaattaatatatagaacattaccaattataaatacatatttaagtataatttagtgttttctggaaagaaatcaaatgtgtttctgtgggcattcacattttcttttttgtgaattttccaagctttctacaatagccatacattctgcaatatttatagtctataacttattatctctagttgacaaacatggttctttgtttcttaaattataaatgtctttaacctaaaaaaattaaatagtcattcagcttacaggtctgcttaaaaaacagaacattttttagcttgttttgaaccaatttttttaatgttcctgtgcaattagtactttttactttaaacatatgcacttaaagcatccattcacattttaggcactcatttcagtattttctttctgcttacattagaacaaaagcaaatgttgggttctatggaatcttttccatgtgcatgtatttgtatcctttcttgttcttgtgatcttgtgatgaagacttctatactaagcttggtttagattttttgttctgcttttttttttttttttttcccccattgagcagtgttctgaaagttggatggttcagttttcactttctagttaggtgtgaagacgttttctcctttcatttcccccatgctgattgagtgttttcctgtaccatagtaactacattgattactaaatcagaattcatttagctcaccacatctcttgaatgtgattgacctacttgaaaaatattaatacctttaacttttggaaactattagtcttcataaactaccccaaagccactaaaatgaaacaacattgtgtgcttattgaagtgaagacttacgatccttctggtgactccacacttccaacctgttctaaaaaacgcaaaatagaacaggtagataaagaggatgaaattactgaaaagaaagccaaaaaagccaagattaaagttaaagttgaagaagaggaaggaaggaagacagactcaagaaaacaaagactccaaacaagagagaagtaaaggatgacagctgtgcacagtaagttcaaagagcaatcagtagggactacagcaggaggtcagaggcttttagaaggaatgttttcacaggaaaaaaaggaaactaaaaatgcttctgatttgaatagaaaatagtatctggagagttttacaactatgttggagacactaggaagtatctgtaatagtatcataattatataaccagaacaccgtcgaaggggatcctcta

SEQ ID NO: 387130 - DNA, 421 bp, Homo sapiens
gtggctgtctagaggtcccctctggatgcaagtggcagaagaagaagaaacatctgtgaagaagaagaagaaaaggggtaaaaagaaacacattaaggaagaaccactttctgaggaagaaccatgtaccagcacagcaattgctagtccagagaaaaagaagaaaaagaaaaaaaagagagagaacgaggattaacagaaaggaattacgattatatcacccggacacacatcatgcttaagattcaactgggagcataccagggatgctctctaacgtaatcaagggaaggttcagtaagacaaagtgatttatcatctataacttcaaacctatttgtcttgacatcaactctgttaaccttatgtcatcatttcttagagtctttgatatacaaataaaattttctttgtattttaa

SEQ ID NO: 387131 - DNA, 343 bp, Homo sapiens
ttcgaactagtaatttgaccaaaattacatgcagggtaagaaaactagttcattatcttagtgaaagaaatagcttctacaccttcattttacatgtaaaattgtatttgaagaatgcagctgtatatgcctcacctgtaccatttaaataaaactatttaaacattttattacaggttctaaatgagaagaaacttcaagaggttgatagtttatggaaagaatttgaaactccagagaaagcaaacaaaatgtaagtactcttgaaatcaataatttagcagttaacatttagggcttgttttattttttacatttttccctgatttatataatgttacat

SEQ ID NO: 387132 - DNA, 543 bp, Homo sapiens
gtttttactcatatgatatttgtgacttaactttattccttatactaggtgattgaaatctctgaatatcgaacccagctctatgaatatctacaaaatcgaatgatggccattgcacccaatgttacagtcatggttggggaattagttggagcacggcttattgctcatgcaggtgatggttttaatgtaatttgtaaatatgagtgtttgaagtattttctggttaggattttgtttacatctttaaactacagctgttaaagaaattttagctgataacacaaaagtagatgatatgtgggagatcactaagggccaagtgttcaatgatgatttctatttgtttgcctgatttccttttggataatgaaggcatctttagtcactacctcttctgagacacttgtggtccattgttagaagtttgttagggttaattagaacaatcggatgaatgcaggaggataaaacagttaacattttcataataaaaactcactagacctagatttgaatacagttttaagaaatcactgtaga

SEQ ID NO: 387133 - DNA, 716 bp, Homo sapiens
ccaaagcctatgactaggtacgggctgggtttgagtgcgtggagggtttaggcagcgtgttctgattctttgcgggacggcgagcgcatttgtgctttgcccgccgcggcctaggaggccttttgaggccgcgtagtcggtgtttttgaactgactctacagcttctggcaggccgtgcggcgccctgacccggcctcaccatgttggtgctgtttgaaacgtctgtgggttacgccatctttaaggttctaaatgagaagaaacttcaagaggttgatagtttatggaaagaatttgaaactccagagaaagcaaacaaaatagtaaagctaaaacattttgagaaatttcaggatacagcagaagcattagcagcattcacagctctgatggagggcaaaatcaataagcagctgaaaaaagttctgaagaaaatagtaaaagaagcccatgaaccgctggcagtagctgatgctaaactaggaggggtcataaaggaaaagctgaatctcagttgtatccatagtcctgttgttaatgaacttatgagaggaattcgttcacaaatggatggattaatccctggggtagaaccacgtgaaatggcagctatgtgtcttggattggctcacagcctggctcgaattagattgaagtaagcgctgataagtcaccatgatggccgcaatcctggtaatgactggataaaactaaa

SEQ ID NO: 387134 - DNA, 2030 bp, Homo sapiens
agaatcctgagagaaggagtagcgcgttcgtgcgtcctagttccagtacagcgtggagggtttaggcagcgtgttctgattctttgcgggacggcgagcgcatttgtgctttgcccgccgcggcctaggaggccttttgaggccgcgtagtcggtgtttttgaactgactctacagcttctggcaggccgtgcggcgccctgacccggcctcaccatgttggtgctgtttgaaacgtctgtgggttacgccatctttaaggttctaaatgagaagaaacttcaagaggttgatagtttatggaaagaatttgaaactccagagaaagcaaacaaaatagtaaagctaaaacattttgagaaatttcaggatacagcagaagcattagcagcattcacagctctgatggagggcaaaatcaataagcagctgaaaaaagttctgaagaaaatagtaaaagaagcccatgaaccgctggcagtagctgatgctaaactaggaggggtcataaaggaaaagctgaatctcagttgtatccatagtcctgttgttaatgaacttatgagaggaattcgttcacaaatggatggattaatccctggggtagaaccacgtgaaatggcagctatgtgtcttggattggctcacagcctgtctcgatatagattgaagtttagcgctgataaagtagacacaatgattgttcaggcaatttccttgttagatgacttggataaagaactaaacaactacattatgcgatgtagagaatggtatggctggcatttccctgaattaggaaaaattatttcagataatttaacatactgcaagtgtttacagaaagttggcgataggaagaactatgcctctgccaagctttctgagttgctgccagaagaagttgaagcagaagtgaaagcagctgcagagatatcaatgggaacagaggtttcagaagaagatatttgcaatattctgcatctttgcacccaggtgattgaaatctctgaatatcgaacccagctctatgaatatctacaaaatcgaatgatggccattgcacccaatgttacagtcatggttggggaattagttggagcacggcttattgctcatgcaggttctcttttaaatttggccaagcatgcagcttctaccgttcagattcttggagctgaaaaggcacttttcagagccctcaaatctagacgggatacccctaagtatggtctcatttatcatgcttcactcgtgggccagacaagtcccaaacacaaaggaaagatttctcgaatgctggcagccaaaaccgttttggctatccgttatgatgcttttggtgaggattcaagttctgcaatgggagttgagaacagagccaaattagaggccaggttgagaactttggaagacagagggataagaaaaataagtggaacaggaaaagcattagcaaaaacagaaaaatatgaacacaaaagtgaagtgaagacttacgatccttctggtgactccacacttccaacctgttctaaaaaacgcaaaatagaacaggtagataaagaggatgaaattactgaaaagaaagccaaaaaagccaagattaaagttaaagttgaagaagaggaagaagaaaaagtggcagaagaagaagaaacatctgtgaagaagaagaagaaaaggggtaaaaagaaacacattaaggaagaaccactttctgaggaagaaccatgtaccagcacagcaattgctagtccagagaaaaagaagaaaaagaaaaaaaagagagagaacgaggattaacagaaaggaattacgattatatcacccggacacacatcatgcttaagattcaactgggagcataccagggatgctctctaacgtaatcaagggaaggttcagtaagacaaagtgatttatcatctataacttcaaacctatttgtcttgacatcaactctgttaaccttatgtcatcatttcttagagtctttgatatacaaataaaattttctttgtattttaa

SEQ ID NO: 387135 - DNA, 2278 bp, Homo sapiens
agaatcctgagagaaggagtagcgcgttcgtgcgtcctagttccagtacagcgtggagggtttaggcagcgtgttctgattctttgcgggacggcgagcgcatttgtgctttgcccgccgcggcctaggaggccttttgaggccgcgtagtcggtgtttttgaactgactctacagcttctggcaggccgtgcggcgccctgacccggcctcaccatgttggtgctgtttgaaacgtctgtgggttacgccatctttaaggttctaaatgagaagaaacttcaagaggttgatagtttatggaaagaatttgaaactccagagaaagcaaacaaaatagtaaagctaaaacattttgagaaatttcaggatacagcagaagcattagcagcattcacagctctgatggagggcaaaatcaataagcagctgaaaaaagttctgaagaaaatagtaaaagaagcccatgaaccgctggcagtagctgatgctaaactaggaggggtcataaaggaaaagctgaatctcagttgtatccatagtcctgttgttaatgaacttatgagaggaattcgttcacaaatggatggattaatccctggggtagaaccacgtgaaatggcagctatgtgtcttggattggctcacagcctgtctcgatatagattgaagtttagcgctgataaagtagacacaatgattgttcaggcaatttccttgttagatgacttggataaagaactaaacaactacattatgcgatgtagagaatggtatggctggcatttccctgaattaggaaaaattatttcagataatttaacatactgcaagtgtttacagaaagttggcgataggaagaactatgcctctgccaagctttctgagttgctgccagaagaagttgaagcagaagtgaaagcagctgcagagatatcaatgggaacagaggtttcagaagaagatatttgcaatattctgcatctttgcacccaggtgattgaaatctctgaatatcgaacccagctctatgaatatctacaaaatcgaatgatggccattgcacccaatgttacagtcatggttggggaattagttggagcacggcttattgctcatgcaggttctcttttaaatttggccaagcatgcagcttctaccgttcagattcttggagctgaaaaggcacttttcagagccctcaaatctagacgggatacccctaagtatggtctcatttatcatgcttcactcgtgggccagacaagtcccaaacacaaaggaaagatttctcgaatgctggcagccaaaaccgttttggctatccgttatgatgcttttggtgaggattcaagttctgcaatgggagttgagaacagagccaaattagaggccaggttgagaactttggaagacagagggataagaaaaataagtggaacaggaaaagcattagcaaaaacagaaaaatatgaacacaaaagtgaagtgaagacttacgatccttctggtgactccacacttccaacctgttctaaaaaacgcaaaatagaacaggtagataaagaggatgaaattactgaaaagaaagccaaaaaagccaagattaaagttaaagttgaagaagaggaagaagaaaaagtggcagaagaagaagaaacatctgtgaagaagaagaagaaaaggggtaaaaagaaacacattaaggaagaaccactttctgaggaagaaccatgtaccagcacagcaattgctagtccagagaaaaagaagaaaaagaaaaaaaagagagagaacgaggattaacagaaaggaattacgattatatcacccggacacacatcatgcttaagattcaactgggagcataccagggatgctctctaacgtaatcaagggaaggttcagtaagacaaagtgatttatcatctataacttcaaacctatttgtcttgacatcaactctgttaaccttatgtcatcatttcttagagtctttgatatacaaataaaattttctttgtattttaaaaacaacaaacacaaaaacagaaacgaaaaaaacaaaaagaaagaaagacaaaacagaaggaaccagaaccggcagaacaaagaagaaaagagacagaggcaaaccaaaagacaccaacaacgaacaacaacgcacgacccaaccaccagaaggcaggaagcccgacaacaagcgacgagaacaaaacagcacgacaaaaaaccagggacagagaaggaaaaaaaaaaggaggaaacaacgagcaaaa

SEQ ID NO: 387136 - DNA, 2016 bp, Homo sapiens
tccgctggtcgaggccggtgttaaatcggccgaggcgcgtggagggtttaggcagcgtgttctgattctttgcgggacggcgagcgcatttgtgctttgcccgccgcggcctaggaggccttttgaggccgcgtagtcggtgtttttgaactgactctacagcttctggcaggccgtgcggcgccctgacccggcctcaccatgttggtgctgtttgaaacgtctgtgggttacgccatctttaaggttctaaatgagaagaaacttcaagaggttgatagtttatggaaagaatttgaaactccagagaaagcaaacaaaatagtaaagctaaaacattttgagaaatttcaggatacagcagaagcattagcagcattcacagctctgatggagggcaaaatcaataagcagctgaaaaaagttctgaagaaaatagtaaaagaagcccatgaaccgctggcagtagctgatgctaaactaggaggggtcataaaggaaaagctgaatctcagttgtatccatagtcctgttgttaatgaacttatgagaggaattcgttcacaaatggatggattaatccctggggtagaaccacgtgaaatggcagctatgtgtcttggattggctcacagcctgtctcgatatagattgaagtttagcgctgataaagtagacacaatgattgttcaggcaatttccttgttagatgacttggataaagaactaaacaactacattatgcgatgtagagaatggtatggctggcatttccctgaattaggaaaaattatttcagataatttaacatactgcaagtgtttacagaaagttggcgataggaagaactatgcctctgccaagctttctgagttgctgccagaagaagttgaagcagaagtgaaagcagctgcagagatatcaatgggaacagaggtttcagaagaagatatttgcaatattctgcatctttgcacccaggtgattgaaatctctgaatatcgaacccagctctatgaatatctacaaaatcgaatgatggccattgcacccaatgttacagtcatggttggggaattagttggagcacggcttattgctcatgcaggttctcttttaaatttggccaagcatgcagcttctaccgttcagattcttggagctgaaaaggcacttttcagagccctcaaatctagacgggatacccctaagtatggtctcatttatcatgcttcactcgtgggccagacaagtcccaaacacaaaggaaagatttctcgaatgctggcagccaaaaccgttttggctatccgttatgatgcttttggtgaggattcaagttctgcaatgggagttgagaacagagccaaattagaggccaggttgagaactttggaagacagagggataagaaaaataagtggaacaggaaaagcattagcaaaaacagaaaaatatgaacacaaaagtgaagtgaagacttacgatccttctggtgactccacacttccaacctgttctaaaaaacgcaaaatagaacaggtagataaagaggatgaaattactgaaaagaaagccaaaaaagccaagattaaagttaaagttgaagaagaggaagaagaaaaagtggcagaagaagaagaaacatctgtgaagaagaagaagaaaaggggtaaaaagaaacacattaaggaagaaccactttctgaggaagaaccatgtaccagcacagcaattgctagtccagagaaaaagaagaaaaagaaaaaaaagagagagaacgaggattaacagaaaggaattacgattatatcacccggacacacatcatgcttaagattcaactgggagcataccagggatgctctctaacgtaatcaagggaaggttcagtaagacaaagtgatttatcatctataacttcaaacctatttgtcttgacatcaactctgttaaccttatgtcatcatttcttagagtctttgatatacaaataaaattttctttgtattttaa

SEQ ID NO: 387137 - DNA, 1990 bp, Homo sapiens
ccagtagggccgggtgtgaaatcggacgagggtagcgcgttcgtgcgtcctagttccagtacagcgtggagggtttaggcagcgtgttctgattctttgcgggacggcgagcgcatttgtgctttgcccgccgcggcctaggaggccttttgaggccgcgtagtcggtgtttttgaactgactctacagcttctggcaggccgtgcggcgccctgacccggcctcaccatgttggtgctgtttgaaacgtctgtgggttacgccatctttaaggttctaaatgagaagaaacttcaagaggttgatagtttatggaaagaatttgaaactccagagaaagcaaacaaaatcattcacagctctgatggagggcaaaatcaataagcagctgaaaaaagttctgaagaaaatagtaaaagaagcccatgaaccgctggcagtagctgatgctaaactaggaggggtcataaaggaaaagctgaatctcagttgtatccatagtcctgttgttaatgaacttatgagaggaattcgttcacaaatggatggattaatccctggggtagaaccacgtgaaatggcagctatgtgtcttggattggctcacagcctgtctcgatatagattgaagtttagcgctgataaagtagacacaatgattgttcaggcaatttccttgttagatgacttggataaagaactaaacaactacattatgcgatgtagagaatggtatggctggcatttccctgaattaggaaaaattatttcagataatttaacatactgcaagtgtttacagaaagttggcgataggaagaactatgcctctgccaagctttctgagttgctgccagaagaagttgaagcagaagtgaaagcagctgcagagatatcaatgggaacagaggtttcagaagaagatatttgcaatattctgcatctttgcacccaggtgattgaaatctctgaatatcgaacccagctctatgaatatctacaaaatcgaatgatggccattgcacccaatgttacagtcatggttggggaattagttggagcacggcttattgctcatgcaggttctcttttaaatttggccaagcatgcagcttctaccgttcagattcttggagctgaaaaggcacttttcagagccctcaaatctagacgggatacccctaagtatggtctcatttatcatgcttcactcgtgggccagacaagtcccaaacacaaaggaaagatttctcgaatgctggcagccaaaaccgttttggctatccgttatgatgcttttggtgaggattcaagttctgcaatgggagttgagaacagagccaaattagaggccaggttgagaactttggaagacagagggataagaaaaataagtggaacaggaaaagcattagcaaaaacagaaaaatatgaacacaaaagtgaagtgaagacttacgatccttctggtgactccacacttccaacctgttctaaaaaacgcaaaatagaacaggtagataaagaggatgaaattactgaaaagaaagccaaaaaagccaagattaaagttaaagttgaagaagaggaagaagaaaaagtggcagaagaagaagaaacatctgtgaagaagaagaagaaaaggggtaaaaagaaacacattaaggaagaaccactttctgaggaagaaccatgtaccagcacagcaattgctagtccagagaaaaagaagaaaaagaaaaaaaagagagagaacgaggattaacagaaaggaattacgattatatcacccggacacacatcatgcttaagattcaactgggagcataccagggatgctctctaacgtaatcaagggaaggttcagtaagacaaagtgatttatcatctataacttcaaacctatttgtcttgacatcaactctgttaaccttatgtcatcatttcttagagtctttgatatacaaataaaattttctttgtattttaa

SEQ ID NO: 387138 - DNA, 1572 bp, Homo sapiens
agaatcctgagagaaggagtagcgcgttcgtgcgtcctagttccagtacagcgtggagggtttaggcagcgtgttctgattctttgcgggacggcgagcgcatttgtgctttgcccgccgcggcctaggaggccttttgaggccgcgtagtcggtgtttttgaactgactctacagcttctggcaggccgtgcggcgccctgacccggcctcaccatgttggtgctgtttgaaacgtctgtgggttacgccatctttaaggttctaaatgagaagaaacttcaagaggttgatagtttatggaaagaatttgaaactccagagaaagcaaacaaaatagtaaagctaaaacattttgagaaatttcaggatacagcagaagcattagcagcattcacagctctgatggagggcaaaatcaataagcagctgaaaaaagttctgaagaaaatagtaaaagaagcccatgaaccgctggcagtagctgatgctaaactaggaggggtcataaaggaaaagctgaatctcagttgtatccatagtcctgttgttaatgaacttatgagaggaattcgttcacaaatggatggattaatccctggggtagaaccacgtgaaatggcagctatgtgtcttggattggctcacagcctgtctcgatatagattgaagtttagcgctgataaagtagacacaatgattgttcaggcaatttccttgttagatgacttggataaagaactaaacaactacattatgcgatgtagagaatggtatggctggcatttccctgaattaggaaaaattatttcagataatttaacatactgcaagtgtttacagaaagttggcgataggaagaactatgcctctgccaagctttctgagttgctgccagaagaagttgaagcagaagtgaaagcagctgcagagatatcaatgggaacagaggtttcagaagaagatatttgcaatattctgcatctttgcacccaggtgattgaaatctctgaatatcgaacccagctctatgaatatctacaaaatcgaatgatggccattgcacccaatgttacagtcatggttggggaattagttggagcacggcttattgctcatgcaggttctcttttaaatttggccaagcatgcagcttctaccgttcagattcttggagctgaaaaggcacttttcagagccctcaaatctagacgggatacccctaagtatggtctcatttatcatgcttcactcgtgggccagacaagtcccaaacacaaaggaaaggtgtgttatagggttttgctttgtttttgaggttagactttttcattttttacaacccatttttcttctactctgtagtacacattaaatcttctattgtctctttcttgttaaatagggaatggtgagttatttaaataaaaagtgctttgtgtacactgaaggataaggttagaagaaactgttattggttggattaaagccagtttcttccattgtgttagtatttttttcccccctagaatctccctgtggttggcacactgaaaatactatctctggcagc

SEQ ID NO: 387139 - DNA, 1731 bp, Homo sapiens
cccacctcggcctcccaaagtgctaggattacaagcgtgagccaccacgcccagtccaatatgacttttgtattacacagcttatcctatttgtcattcatacataaactcattcatgttacagaaataaaggtcgtagcagcacatatagtttttttttttaatgtgtattttctgttctcgtatggtgcatttctacttagctgatttttcttcttagaaaaaccaattacagctctgactacaggctgatttgagtaaaaacaaaaacaaaaaaaaactttaaggtgttaatttaaatgcttttcctagatgctatcttgctaatttattttcccctttcttcccagcctgtctcgatatagattgaagtttagcgctgataaagtagacacaatgattgttcaggcaatttccttgttagatgacttggataaagaactaaacaactacattatgcgatgtagagaatggtatggctggcatttccctgaattaggaaaaattatttcagataatttaacatactgcaagtgtttacagaaagttggcgataggaagaactatgcctctgccaagctttctgagttgctgccagaagaagttgaagcagaagtgaaagcagctgcagagatatcaatgggaacagaggtttcagaagaagatatttgcaatattctgcatctttgcacccaggtgattgaaatctctgaatatcgaacccagctctatgaatatctacaaaatcgaatgatggccattgcacccaatgttacagtcatggttggggaattagttggagcacggcttattgctcatgcaggttctcttttaaatttggccaagcatgcagcttctaccgttcagattcttggagctgaaaaggcacttttcagagccctcaaatctagacgggatacccctaagtatggtctcatttatcatgcttcactcgtgggccagacaagtcccaaacacaaaggaaagatttctcgaatgctggcagccaaaaccgttttggctatccgttatgatgcttttggtgaggattcaagttctgcaatgggagttgagaacagagccaaattagaggccaggttgagaactttggaagacagagggataagaaaaataagtggaacaggaaaagcattagcaaaaacagaaaaatatgaacacaaaagtgaagtgaagacttacgatccttctggtgactccacacttccaacctgttctaaaaaacgcaaaatagaacaggtagataaagaggatgaaattactgaaaagaaagccaaaaaagccaagattaaagttaaagttgaagaagaggaagaagaaaaagtggcagaagaagaagaaacatctgtgaagaagaagaagaaaaggggtaaaaagaaacacattaaggaagaaccactttctgaggaagaaccatgtaccagcacagcaattgctagtccagagaaaaagaagaaaaagaaaaaaaagagagagaacgaggattaacagaaaggaattacgattatatcacccggacacacatcatgcttaagattcaactgggagcataccagggatgctctctaacgtaatcaagggaaggttcagtaagacaaagtgatttatcatctataacttcaaacctatttgtcttgacatcaactctgttaaccttatgtcatcatttcttagagtctttgatatacaaataaaattttctttgtattttaa

SEQ ID NO: 387140 - DNA, 1120 bp, Homo sapiens
gattacaggcgtgagccaccgcgctcggccagaacccgcacatatttaagattgttacgaggaaaaagatgcacttcttttcagtgacctcatagcacagaactaatgtcactgagtagaaactaaagtttaaaaatattttttaaaaaaacctagtttgagctaatatttgacatgaattgctgtaaaatcttttcagccacagaagtgttggtggtgatatatggccattagattgtggcaaaggttgaaatacgatggatgatttgaattgtatgattcataatagttttataactcctgattttaaaacatccaagttattgaggattttacatctgaacatggaatatagttcttcatgtttttctattagatttctcgaatgctggcagccaaaaccgttttggctatccgttatgatgcttttggtgaggattcaagttctgcaatgggagttgagaacagagccaaattagaggccaggttgagaactttggaagacagagggataagaaaaataagtggaacaggaaaagcattagcaaaaacagaaaaatatgaacacaaaagtgaagtgaagacttacgatccttctggtgactccacacttccaacctgttctaaaaaacgcaaaatagaacaggtagataaagaggatgaaattactgaaaagaaagccaaaaaagccaagattaaagttaaagttgaagaagaggaagaagaaaaagtggcagaagaagaagaaacatctgtgaagaagaagaagaaaaggggtaaaaagaaacacattaaggaagaaccactttctgaggaagaaccatgtaccagcacagcaattgctagtccagagaaaaagaagaaaaagaaaaaaaagagagagaacgaggattaacagaaaggaattacgattatatcacccggacacacatcatgcttaagattcaactgggagcataccagggatgctctctaacgtaatcaagggaaggttcagtaagacaaagtgatttatcatctataacttcaaacctatttgtcttgacatcaactctgttaaccttatgtcatcatttcttagagtctttgatatacaaataaaattttctttgtattttaa

SEQ ID NO: 387141 - DNA, 716 bp, Homo sapiens
gcggactactactactaaattcgcggccggtcgattcaagttctgcaatgggagttgagaacagagccaaattagaggccaggttgagaactttggaagacagagggataagaaaaataagtggaacaggaaaagcattagcaaaaacagaaaaatatgaacacaaaagtgaagtgaagacttacgatccttctggtgactccacacttccaacctgttctaaaaaacgcaaaatagaacaggtagataaagaggatgaaattactgaaaagaaagccaaaaaagccaagattaaagttaaagttgaagaagaggaagaagaaaaagtggcagaagaagaagaaacatctgtgaagaagaagaagaaaaggggtaaaaagaaacacattaaggaagaaccactttctgaggaagaaccatgtaccagcacagcaattgctagtccagagaaaaagaagaaaaagaaaaaaaagagagagaacgaggattaacagaaaggaattacgattatatcacccggacacacatcatgcttaagattcaactgggagcataccagggatgctctctaacgtaatcaagggaaggttcagtaagacaaagtgatttatcatctataacttcaaacctatttgtcttgacatcaactctgttaaccttatgtcatcatttcttagagtctttgatatacaaataaaattttctttgtattttaa

SEQ ID NO: 387142 - DNA, 683 bp, Homo sapiens
cacaaggcagcttgcttcatcagagctagcaaaaaagagaggttgctagcaagatgaagtcacaatcttttgtaatcgaatcaaaaaagtgatatctcatcactttggccatattctatttgttagaagtaaaccacaggtcccaccagctccatgggagtgaccacctcagtccagggaaaacagctgaagaccaagatggtgagctctgattgcttcagttggtcatcaactattttcccttgactgctgtcctgggatggcctgctatcttgatgatagattgtgaatatcaggaggcagggatcactgtggaccatcttagcagttgacctaacacatcttcttttcaatatctaagaacttttgccactgtgactaatggtcctaatattaagctgttgtttatatttatcatatatctatggctacatggttatattatgctgtggttgcgttcggttttatttacagttgcttttacaaatatttgctgtaacatttgacttctaaggtttagatgccatttaagaactgagatggatagcttttaaagcatcttttacttcttaccattttttaaaagtatgcagctaaattcgaagcttttggtctatattgttaattgccattgctgtaaatcttaaaatgaatgaataaaaatgtttcattttacaagagga

SEQ ID NO: 387143 - DNA, 272 bp, Homo sapiens
aattcaaatatatacttatctatactgataattgtaaaaagtaattattttaagttaattgaaaattctgaaaaatggctaattatgtatttaatgattaagagtggctatgcatatatttgcatttttaaaatattgatttaaggattcttaatgtgtttttacaacatgtaattttgagaacaaattgtgtacagcagaaaacatttggtatcataataattaatctgatttctttacaaacacagagcagaagtccactggtaaacatt

SEQ ID NO: 387144 - DNA, 434 bp, Homo sapiens
ttctcctaacacactaccttcctttctggctctaagattttgaacatactatttattctctttactagtattatctgtctaattcattccttaaaatacaactcccataaaatctccttgatctccttccaacactctcaccactttctgtaccctacaaaaatatatattgttttacttgtcatattctgtagaaagctacttttaactacttacttattaatcaggtaagttttgcctatatgcagagaatttacaaccacaatctttttacctgtgtatattacaaggcccttggaagtcacattttcggccaggcacagtggctcacacctgtaatcccaacattttgggaggccaagaggggaggattgcttgagcccaggagttcaagaccagcctgggcaacaaggcaagacccccatctccacaaa

SEQ ID NO: 387145 - DNA, 691 bp, Homo sapiens
ctatgctatctttttcccagaagcattaagtttgaagactcaatcaccaagtgcaatcaaagctacctttcctccccccaaaattaaatagacatttttaaacacacatacacatttcaagatcaacagagttcccttttgagcatggaaatatagccattgctaaattacgttactggactgaactccaggtattagttacagtggaaagtaagagattgtaggagactcttttcttagaaccaggacatggattatggcctggatttaattaactgttgctcatggcaccatgcaggctgacatttaattatattcagtttagccctttattatatatcctctcgttattctccaaatgttctaaatatcctggtcttgttttatctagctctgttgtaagctctttgaaatcagagctaatgtcacacagtacatactcaataaacacattataaatgaatttatgagcaaagaactaaatgaatgtggctacaaattcgagatgctactgttcacaatacaagatgcgaccttaacaattcaagaaaagtgaacaactgaaggtgagggggtttccctgttgttccctgaaaggcatccaaattctcctgaagctcccatgaataagatggaggtttaatttttctctctttggtcctctgctcttttaatctgctccagcaaaaaa

SEQ ID NO: 387146 - DNA, 643 bp, Homo sapiens
gtgtttatgaaagagggttaaatcccacaaaaagataatttgaaatggattcactggtttggttcccttctggcttgtgccgtaagcaggacagtgacatggacccaacgaatggggagcactaccatgcccagaaatccaggtactggcacactcagccaagcagcaccttctactgctagaaatgggggagacgcaaaggtaagttcacaattgagaatcactaacatttgagaaaaccaacactacatgaaagaggcataaaactcaacaaacaagaatgaacactggagcaaagaggaatacttttaagagtatcacagtcaatatcttcagagtgataagagagagtattgctatcctaaaactagaatgggctgttatgaaaaataaccaacagaaaggcagaacaactgcatggacagcgctgaagaatacatctgtgagctgaaaattcagctgtgaaatcctcctagaaaccagtgtaataaaacaatgaagtgaacagtatgaaaacaacatttagagttctgaaggatatatccattactcaataactccaatatccatctaagagagtttctagaaggaaaaaagttcaacacacaaagtggttgtagaagaagaatttcaagaaatgaac

SEQ ID NO: 387147 - DNA, 443 bp, Homo sapiens
gctcaatatatgattctgggaaagacaagcaattacaaaacagtataataagtttgagagaaaacgtaggcagtgggagcacctaagccagactgtggtgggatgggaacatgggagatgaagatagagaaggttttcaaaaggtgatagctgaactgagtcttgaagtgccaggaagaaacacattgtaagggtattttatttagagggactggcatgtgcagaggctcgaggtctgagagcatggggtgtttggggacttgtaggtagttcctgtgggactaaggcatagggactgatgaagcttgaacaagatcataactgccttctaggggccatgctctggagttatgattttaaccaaagatgatggggaaatttggggagtgatgaaatcagattttcatttcagaacgattagtttgacagcattgttgtgtatg

SEQ ID NO: 387148 - DNA, 590 bp, Homo sapiens
tctcctcactgctaaagataaattgtttatctgtataacataactacaccaatgtcatttttgtatacgctagtacacaaatgtgtttttttattaagtaatgaagtatttgctgtgaaaaatgtattatttgtgccaccgtttatatctgtgttcattttctgtgtgtatatgcgtgtgtattcgaatctcaatttttcttttactctagtttagattaagacatatttagatgaaattttaaaaataacattggaaataggaggctaagttttgttcagtctcattcccttggggggaaattgcttttgccattttattttcatgtacaataacctaaaaaggatctcctactgacttccttcctaattattattgttttacacgaaagaaaggaaatacgttttcaattgagttgtttgaaatcattcactttgtgtagatttcccagactgatgtttcattgtaagaatattacattatagacaggttggccatttcacaagcaactaatccatagttttggaagcccgctttaagagacctgaatatctttgtttttaataaaatacttagagtttaaaaaaagc

SEQ ID NO: 387149 - DNA, 449 bp, Homo sapiens
ggatctagtgggtagaggccagggatgcttctaaacatcctgtaaggcacaaaatagcccacagtaacaaagaattattcaacccaaaatgtcaatatgcaaatactccatatgttcctgtagaaaagcatgaacaaacctataatttaaatccgaaggaatctctggcgtctaaaacttcacaggtggaatgcaaagtaagggcaggagactaagccaactccaagatggccgccaatgatccccacttcctggtgttcatgtctttgtctaattccttttctgtgtgggcctgatctattgactcgcttctaatgaatagaatatgtttaaaatgatgtgatgtcacttttgagattaagttacagaagactccatgttgggagttgtgcctcaccctcttagatcatttttccctggggaaagccagctgtcatgatgtgaggtag

SEQ ID NO: 387150 - DNA, 98 bp, Homo sapiens
aaacaaccactccatctcccaaccccctgacaaccaccattctactttgctcctataaatctgactactctaggtacctaataaatggaatcatatgg

SEQ ID NO: 387151 - DNA, 359 bp, Homo sapiens
agggtagcaagggtgggatggttaggggcctttctcccttcccaggtggactgtctgagggcaccagagtcaccctgctcccatagttatcctcgcctccaggcggaagggagggaaggccttggaacatttcctctccccttcccccctctgcagttgcagtttccctggccccctcttggcatctggaaaagtttgggaaacttaaaaaaaatatttttggagagtttgtctattgctccccagccctgtgagggagctacagccaagaggaagaaggaaaaggagtgggttggggtgactaggggatagagagtaaagtcaaagagaagcagagcactcggaaaaagggcagcacc

SEQ ID NO: 387152 - DNA, 227 bp, Homo sapiens
aatgagttacctgacaaataggtgaggtaaggtattgcacagcttcacttgggaacagccgcctgagaggcactgggagagaaccccttctgcaaagctaacagctgtgaacctaaccccagtgcacaccctagctgggctgctgacttgaagctggcagaacaatggaaaactgcaccaccaccaagggggcaatgtcagatcgccaggatcacacagtcgggcgc

SEQ ID NO: 387153 - DNA, 483 bp, Homo sapiens
atagaaaaacatgagttgagggcctactgtgtatatatacataacatatatacatatatagtgtatatacattcactgtatatatgtgtgtatacatacacacgtacacatgtatatctctctcaatatatatcaggtactcaatatatactgtctcccttcttccataccatatctcaactgtagggtgactaattacgtttgttttttattccttctgatttattattaatgagtctattttgacagcaatataaaagaaaatagcctcgtttttttgtaagagcttacttcactttcccaggacataagagaacatcaatttttgatgcaataggaattcagtagcaaaatagatgtctcaaaatatttacttcttgatggctggaaacatattttcagcattctttagtacagggacatggatttgatgttctatgagactacatccacttcagaatgtatatatatatggccaaaaaa

SEQ ID NO: 387154 - DNA, 856 bp, Homo sapiens
tctgttcctttgtcatctataccattttcttagtttgtagaaaactggcctgcttctgtcttgggaccactgcaagggaatgttattccccagcaataaagtaggtcagagccagactggagacttgcattcctgtgtggttgtctccattgtcaccactcaagtctcagggattgctcttcctaaaaccatgtccttgggagcaaggctttgcccattgttttctcttctcttctcttctctagcagaaggtctctaaaggctactatccctagaactggccatcttcaggctgaagctaggttgggctaaaatgatcagccttcagtagaaatcaaggctgaaacaggtaaaaagcaggctgtctgagcatttccctaccagagacccttcagctaagtgtctgggtatactcagtcaaacaccatccctgcctttgtgttcatattctgtgtccctattcaagaaaggtagttttctttctttctctctttctttcttttctttctttccttttctttctttcttttctctctctctctttcttcccgtctttctttctctctctttctttctttcctttctttctttttttttttttttgagacggagttttgctcttgttgcccaggctggagtgcaactgcgcaatctcggctaaccacaacctctgcctcccgggttcaagccattctcccgcctcagcctccggggtagctgggattacaggcatgcaccatcatgcccggataattctgtattttttagtagagacgggatttctccatattggtctggctggtctcgaattccaaacctcaggtatccacccgcctcagcctcccaaagtagtggg

SEQ ID NO: 387155 - DNA, 1782 bp, Homo sapiens
aaggttgacggaagtgctctatcttgttgccggaagtgggaagagagaaaggttgtgatggcggctatagctgcatccgaggtgctggtggacagcgcggaggaggggtccctcgctgcggcggcggagctggccgctcagaagcgcgaacagagactgcgcaaattccgggagctgcacctgatgcggaatgaagctcgtaaattaaatcaccaggaagttgtggaagaagataaaagactaaaattacctgcaaattgggaagccaaaaaagctcgtttggagtgggaactaaaggaagaggaaaagaaaaaggaatgtgcggcaagaggagaagactatgagaaagtgaagttgctggagatcagtgcagaagatgcagaaagatgggagaggaaaaagaagaggaaaaaccctgatctgggattttcagattatgctgctgcccagttacgccagtatcatcggttgaccaagcagatcaaacctgacatggaaacatatgagagactgagagaaaaacatggagaagagtttttcccaacatccaatagtcttcttcatggaacacatgtgccttccacagaggaaattgacaggatggtcatagatctggaaaaacagattgaaaaacgagacaaatatagccggagacgtccttataatgatgatgcagatatcgactacattaatgaaaggaatgccaaattcaacaagaaagctgaaagattctatgggaaatacacagctgaaattaaacagaatttggaaagaggaacagctgtctaatcccttcaagaactgtttatagaagcttgagaatggggtaaaaatttctgctagcaaaatcaagttctttttgaaattttatcagtaatccagaatttagtagtccatgccttctcactcagcatttagaaataaaaatgtggtttcttaaacgtatatcctttcatgtatatttccacatttttgtgcttggatataagatgtatttcttgtagtgaagttgttttgtaatctactttgtatacattctaattatattatttttctatgtattttaaatgtatatggctgtttaatctttgaagcattttgggcttaagattgccagcagcacacatcagatgcagtcattgttgctatcagtgtggaatttgatagagtctagactcgggccacttggagttgtgtactccaaagctaaggacagtgatgaggaagatggcagtggccaccggaggactggagcagtccctcctcatggcggcctgtgaccaaggtcggggaggagtggagctatccttccatgatctgatcatgtacagttccctttttaaaaagcaataaatgcttgggattagaatttctaaaaaaaaaaatctatcatttaaaacaaacatttgtatatatacatttgtttatatacatacatgcttccattctacaaacactgaaagaatattttattatgggaaattccatacacccaatacccctggtgagtcccatatacccagtaccctgttcaacaatcattaactcatggccagtcctgcttcatctttatttccatttactttcttcatgactcttattttgacgcatatactagatatataatttcatctataattattttagtatgtatctctgaaagataaagacttaaatgaccacaatactattatcactgcaatagatttatttttataaaactccagagggaaaggttgttattttttctctatgttgaattaaatgctaaatatctaattg

SEQ ID NO: 387156 - DNA, 1397 bp, Homo sapiens
aaggttgacggaagtgctctatcttgttgccggaagtgggaagagagaaaggttgtgatggcggctatagctgcatccgaggtgctggtggacagcgcggaggaggggtccctcgctgcggcggcggagctggccgctcagaagcgcgaacagagactgcgcaaattccgggagctgcacctgatgcggaatgaagctcgtaaattaaatcaccaggaagttgtggaagaagataaaagactaaaattacctgcaaattgggaagccaaaaaagctcgtttggagtgggaactaaaggaagaggaaaagaaaaaggaatgtgcggcaagaggagaagactatgagaaagtgaagttgctggagatcagtgcagaagatgcagaaagatgggagaggaaaaagaagaggaaaaaccctgatctgggattttcagattatgctgctgcccagttacgccagtatcatcggttgaccaagcagatcaaacctgacatggaaacatatgagagactgagagaaaaacatggagaagagtttttcccaacatccaatagtcttcttcatggaacacatgtgccttccacagaggaaattgacaggatggtcatagatctggaaaaacagattgaaaaacgagacaaatatagccggagacgtccttataatgatgatgcagatatcgactacattaatgaaaggaatgccaaattcaacaagaaagctgaaagattctatgggaaatacacagctgaaattaaacagaatttggaaagaggaacagctgtctaatcccttcaagaactgtttatagaagcttgagaatggggtaaaaatttctgctagcaaaatcaagttctttttgaaattttatcagtaatccagaatttagtagtccatgccttctcactcagcatttagaaataaaaatgtggtttcttaaacgtatatcctttcatgtatatttccacatttttgtgcttggatataagatgtatttcttgtagtgaagttgttttgtaatctactttgtatacattctaattatattatttttctatgtattttaaatgtatatggctgtttaatctttgaagcattttgggcttaagattgccagcagcacacatcagatgcagtcattgttgctatcagtgtggaatttgatagagtctagactcgggccacttggagttgtgtactccaaagctaaggacagtgatgaggaagatggcagtggccaccggaggactggagcagtcccttcttagcgcgcccctgcgcccacgtccccacacgagccctaatactctatcctgaccccgctccatccactccgcctttcaccccctccccttctcgccctctactctccctccttcctcctcacctcttctccc

SEQ ID NO: 387157 - DNA, 1249 bp, Homo sapiens
aaggttgacggaagtgctctatcttgttgccggaagtgggaagagagaaaggttgtgatggcggctatagctgcatccgaggtgctggtggacagcgcggaggaggggtccctcgctgcggcggcggagctggccgctcagaagcgcgaacagagactgcgcaaattccgggagctgcacctgatgcgggaatgtgcggcaagaggagaagactatgagaaagtgaagttgctggagatcagtgcagaagatgcagaaagatgggagaggaaaaagaagaggaaaaaccctgatctgggattttcagattatgctgctgcccagttacgccagtatcatcggttgaccaagcagatcaaacctgacatggaaacatatgagagactgagagaaaaacatggagaagagtttttcccaacatccaatagtcttcttcatggaacacatgtgccttccacagaggaaattgacaggatggtcatagatctggaaaaacagattgaaaaacgagacaaatatagccggagacgtccttataatgatgatgcagatatcgactacattaatgaaaggaatgccaaattcaacaagaaagctgaaagattctatgggaaatacacagctgaaattaaacagaatttggaaagaggaacagctgtctaatcccttcaagaactgtttatagaagcttgagaatggggtaaaaatttctgctagcaaaatcaagttctttttgaaattttatcagtaatccagaatttagtagtccatgccttctcactcagcatttagaaataaaaatgtggtttcttaaacgtatatcctttcatgtatatttccacatttttgtgcttggatataagatgtatttcttgtagtgaagttgttttgtaatctactttgtatacattctaattatattatttttctatgtattttaaatgtatatggctgtttaatctttgaagcattttgggcttaagattgccagcagcacacatcagatgcagtcattgttgctatcagtgtggaatttgatagagtctagactcgggccacttggagttgtgtactccaaagctaaggacagtgatgaggaagatggcagtggccaccggaggactggagcagtccctcctcatggcggcctgtgaccaaggtcggggaggagtggagctatccttccatgatctgatcatgtacagttccctttttaaaaagcaataaatgcttgggattagaatttcta

SEQ ID NO: 387158 - DNA, 874 bp, Homo sapiens
  misc_feature (27)..(27): n is a, c, g, or t
  misc_feature (38)..(38): n is a, c, g, or t
ccggaggggaactaaggaggggaaagnaaagtggaganggtcccactccatggtcttcttcatggaacacatgtgccttccacagaggaaattgacaggatggtcatagatctggaaaaacagattgaaaaacgagacaaatatagccggagacgtccttataatgatgatgcagatatcgactacattaatgaaaggaatgccaaattcaacaagaaagctgaaagattctatgggaaatacacagctgaaattaaacagaatttggaaagaggaacagctgtctaatcccttcaagaactgtttatagaagcttgagaatggggtaaaaatttctgctagcaaaatcaagttctttttgaaattttatcagtaatccagaatttagtagtccatgccttctcactcagcatttagaaataaaaatgtggtttcttaaacgtatatcctttcatgtatatttccacatttttgtgcttggatataagatgtatttcttgtagtgaagttgttttgtaatctactttgtatacattctaattatattatttttctatgtattttaaatgtatatggctgtttaatctttgaagcattttgggcttaagattgccagcagcacacatcagatgcagtcattgttgctatcagtgtggaatttgatagagtctagactcgggccacttggagttgtgtactccaaagctaaggacagtgatgaggaagatggcagtggccaccggaggactggagcagtccctcctcatggcggcctgtgaccaaggtcggggaggagtggagctatccttccatgatctgatcatgtacagttccctttttaaaaagcaataaatgcttgggattagaatttcta

SEQ ID NO: 387159 - DNA, 1131 bp, Homo sapiens
gaactcctgggctcaagtgatcctcccagaggaccttttgggaggccttgtcctccaaaagtagtgggattacaggcatgggattacagccgccatgcccagccaatagttatcttcttcagtacagtcaagttcccaacaatgagtcatcgctctagcattctgaagatgaatttgtatttactggatttcacagttcatattctgagttgtgccattaattcagtttcaactttaacttgatgaaaactctcctggcttcctctagccctcacaacatgtgctattctaaacgtgattatattcctgtttggttgtgttttattaagatcaaaagagaaggcaattttgaattttgtaaattttcttctttccccaggattgaaaaacgagacaaatatagccggagacgtccttataatgatgatgcagatatcgactacattaatgaaaggaatgccaaattcaacaagaaagctgaaagattctatgggaaatacacagctgaaattaaacagaatttggaaagaggaacagctgtctaatcccttcaagaactgtttatagaagcttgagaatggggtaaaaatttctgctagcaaaatcaagttctttttgaaattttatcagtaatccagaatttagtagtccatgccttctcactcagcatttagaaataaaaatgtggtttcttaaacgtatatcctttcatgtatatttccacatttttgtgcttggatataagatgtatttcttgtagtgaagttgttttgtaatctactttgtatacattctaattatattatttttctatgtattttaaatgtatatggctgtttaatctttgaagcattttgggcttaagattgccagcagcacacatcagatgcagtcattgttgctatcagtgtggaatttgatagagtctagactcgggccacttggagttgtgtactccaaagctaaggacagtgatgaggaagatggcagtggccaccggaggactggagcagtccctcctcatggcggcctgtgaccaaggtcggggaggagtggagctatccttccatgatctgatcatgtacagttccctttttaaaaagcaataaatgcttgggattagaatttcta

SEQ ID NO: 387160 - DNA, 1375 bp, Homo sapiens
aaggttgacggaagtgctctatcttgttgccggaagtgggaagagagaaaggttgtgatggcggctatagctgcatccgaggtgctggtggacagcgcggaggaggggtccctcgctgcggcggcggagctggccgctcagaagcgcgaacagagactgcgcaaattccgggagctgcacctgatgcggaatgaagctcgtaaattaaatcaccaggaagttgtggaagaagataaaagactaaaattacctgcaaattgggaagccaaaaaagctcgtttggagtgggaactaaaggaagaggaaaagaaaaaggaatgtgcggcaagaggagaagactatgagaaagtgaagttgctggagatcagtgcagaagatgcagaaagatgggagaggaaaaagaagaggaaaaaccctgatctgggattttcagattatgctgctgcccagttacgccagtatcatcggttgaccaagcagatcaaacctgacatggaaacatatgagagactgagagaaaaacatggagaagagtttttcccaacatccaatagtcttcttcatggaacacatgtgccttccacagaggaaattgacaggatggtcatagatctggaaaaacagattgaaaaacgagacaaatatagccggagacgtccttataatgatgatgcagatatcgactacattaatgaaaggaatgccaaattcaacaagaaagctgaaagattctatgggaaatacacagctgaaattaaacagaatttggaaagaggaacagctgtctaatcccttcaagaactgtttatagaagcttgagaatggggtaaaaatttctgctagcaaaatcaagttctttttgaaattttatcagtaatccagaatttagtagtccatgccttctcactcagcatttagaaataaaaatgtggtttcttaaacgtatatcctttcatgtatatttccacatttttgtgcttggatataagatgtatttcttgtagtgaagttgttttgtaatctactttgtatacattctaattatattatttttctatgtattttaaatgtatatggctgtttaatctttgaagcattttgggcttaagattgccagcagcacacatcagatgcagtcattgttgctatcagtgtggaatttgatagagtctagactcgggccacttggagttgtgtactccaaagctaaggacagtgatgaggaagatggcagtggccaccggaggactggagcagtccctcctcatggcggcctgtgaccaaggtcggggaggagtggagctatccttccatgatctgatcatgtacagttccctttttaaaaagcaataaatgcttgggattagaatttcta

SEQ ID NO: 387161 - DNA, 1986 bp, Homo sapiens
aaggttgacggaagtgctctatcttgttgccggaagtgggaagagagaaaggttgtgatggcggctatagctgcatccgaggtgctggtggacagcgcggaggaggggtccctcgctgcggcggcggagctggccgctcagaagcgcgaacagagactgcgcaaattccgggagctgcacctgatgcgggtgagtagtcttggaggccggcttagatccgtcatctggccaagcctgtgcgcttttgtagaggggacgaggaagccacaccactgcgtctgacagaccaacagagcaggatcatctgagaggaaagctctgttcggtggtactcaaccctggcagcacattgggatcattctgagaacatttgaaaatataactgttcactccagcccctctcccacccacatccaatttaatgtatctgggttaggtttgggagtctccattactaacaacctccctgctccgtgattccaacaaattcttcattttacctagggaaatatgtagagctagagacaggaagaaacttgtctagtgtcagtaagagacctggttcactttaaaaaataataatcttctgtcagaatctgtttgagtgaaaagaaaataatcatctgtttttgggacttctgggggaaaagaataaaaagaaaataaaaaaaatggcaaacttttgaaagtctacagtgtggtagttcagccagttgatagggaatctgatgtttaagtgccctggaggtgcagaggaggagagaggaatgcagtttgtgggtctccagggggtgcctcatgtagtaggtgacacctaaactactgtttgaaagccagacaactaaaggagttagagaaagagatatccaagcaaagggaacaaattcaaagaaagagaatttgtattagggataagagtccagcaaatagcttgctgcagttggagcagagaaagagaaaagcagcccctgtttcaccatggagtgacctgacagctaggccatggtttcacaaaatcccaaaatcactctgactgttgtagtgagacaaaacaaagaagacttttcaaattacaagaatgaccacatatttctttcttctgactaacaccagtgactgttattaacaaatacagcattagtctcactccgttacttctgcctcctatataaaaatgtaagatactgggccgggtgcggtggctcacgcctgtaatcccagcactttgggaggccgaggagggcggatcacaaggtcaggagatcaagaccatcctggctaacacggtgaaaccccgtctctactaaaaatagaaaaaattagccgggcgtgctggcgggctacacgggaggctgaggcaggagaatggcatgagcccgagagtcggagcttacagtgagtcgagatcacaccactgcactccagcctgggcgacagagcgagactccatctcaaaaaaaaaaaaaaaaaaaatctaagatacctaattgtagaaagcccctgctttctgacagtacccaatccacatccttaaccctcccctcagtcacctgatacaaacccaaatcctggaacaagcccttcctaacaccctgtcactcaaatgcccacggttccccgtggtttgctctcttctgtgcaacagactcaactttgttgaccgtaggtatgttcttggcgtctttaattgcagggcttttccagggccaagaatatactagggatggtagttgggaggagtatctctctttgccgagggaaagttaatctaataaacaattaaaaagacatgcttaaatatttagagtgattgtgtaaggaacacatgtctggaaattaggaggcggggcttcctggacaaactgccaccagcttatgacctaaggaatgtctaactcaagttttccttaagacgatacactcattttgctttatgcaattaagtttatttaaaaatagactcttctccctgctaccccagctcca

SEQ ID NO: 387162 - DNA, 1515 bp, Homo sapiens
ccaccgtacaccgggggttttgttggtgagggttccggggagcggcctggagagaggtggaggcgaagtctagtttcgcttcagggaggctcagacactgtggggtcaagtcggcggtggaggccctaggcccagcctgtggggaccggcggggactcggcctgggcagtcctgggagaagctgagccggctctgcctgaagccagttctccttgtcgcaggtgctggtggacagcgcggaggaggggtccctcgctgcggcggcggagctggccgctcagaagcgcgaacagagactgcgcaaattccgggagctgcacctgatgcggaatgaagctcgtaaattaaatcaccaggaagttgtggaagaagataaaagactaaaattacctgcaaattgggaagccaaaaaagctcgtttggagtgggaactaaaggaagaggaaaagaaaaaggaatgtgcggcaagaggagaagactatgagaaagtgaagttgctggagatcagtgcagaagatgcagaaagatgggagaggaaaaagaagaggaaaaaccctgatctgggattttcagattatgctgctgcccagttacgccagtatcatcggttgaccaagcagatcaaacctgacatggaaacatatgagagactgagagaaaaacatggagaagagtttttcccaacatccaatagtcttcttcatggaacacatgtgccttccacagaggaaattgacaggatggtcatagatctggaaaaacagattgaaaaacgagacaaatatagccggagacgtccttataatgatgatgcagatatcgactacattaatgaaaggaatgccaaattcaacaagaaagctgaaagattctatgggaaatacacagctgaaattaaacagaatttggaaagaggaacagctgtctaatcccttcaagaactgtttatagaagcttgagaatggggtaaaaatttctgctagcaaaatcaagttctttttgaaattttatcagtaatccagaatttagtagtccatgccttctcactcagcatttagaaataaaaatgtggtttcttaaacgtatatcctttcatgtatatttccacatttttgtgcttggatataagatgtatttcttgtagtgaagttgttttgtaatctactttgtatacattctaattatattatttttctatgtattttaaatgtatatggctgtttaatctttgaagcattttgggcttaagattgccagcagcacacatcagatgcagtcattgttgctatcagtgtggaatttgatagagtctagactcgggccacttggagttgtgtactccaaagctaaggacagtgatgaggaagatggcagtggccaccggaggactggagcagtccctcctcatggcggcctgtgaccaaggtcggggaggagtggagctatccttccatgatctgatcatgtacagttccctttttaaaaagcaataaatgcttgggattagaatttcta

SEQ ID NO: 387163 - DNA, 547 bp, Homo sapiens
aaggttgacggaagtgctctatcttgttgccggaagtgggaagagagaaaggttgtgatggcggctatagctgcatccgaggtgctggtggacagcgcggaggaggggtccctcgctgcggcggcggagctggccgctcagaagcgcgaacagagactgcgcaaattccgggagctgcacctgatgcggaatgaagctcgtaaattaaatcaccaggaagtagcagagaaagggaaaaaaagtggggatgaggaaggtagaggaaaagagaaagcggccaaacaatggtttggttgggctgtgtttcagagtataccaccctttaaaattctgatcaaatactcttgacccataaacccttagcccttgttctgatggggtagccacaggagtccaccagctgggaatcatccactgagctctggatcagagcattctagaggctggaatgtcgggggagttttaggggtagttttccggtcattcctaaaaccatccgtcctaactcccaggcaggtttaaatagtgcaaactcttaggcagagag

SEQ ID NO: 387164 - DNA, 235 bp, Homo sapiens
ctccacctgctccactgctccttggcaatctgtttcctaccttcagaggcttggtttctggccagtggctctttctcctttccccactggtctttctttaatctttttgctacaactttaatggtgttttgagagggagtggaggcaaacacgtatcatctgctctgcttaatgcaaagtatgcacaaattctctaatgagtgattgtgggggacaataaaacctatggttataa

SEQ ID NO: 387165 - DNA, 694 bp, Homo sapiens
tgatctcactgccactttccattccccaggcatgctacttgtctgctaggcctctgaaactccttagccccttgtatgctaccattttcaagggaacaaagggaaagaaaaagaaaagagaaaataaattttcacttatttttaggtctaatgtcttcagggtccagtaaaagtacagcgtcataaaagacctccttctgctccctttgctgacacctaccttagcctcgtaagccagaagacttgaaaaggttctggtccacatctcaggtaacttctgagaaatcaagaaattcttcattgtaacagcaaggtttaactctcttgaattctgttctttctggattttggcccaatatttaaaaattttcttctcagttcagcaaaatgaaagaagcttaaagtaaacagaataaagtaaaaaaaaaataaaaacaattaaattaaactggatacaggaaaacaatggagaaaattaatgaaagcaaaagctagttctcaaaaaaagattaataacattaataaacctctacaaagactgacaaagatgggaaaacagaggacctacattgctaaaatcagcaataaaataagaaatataaccacagattctacaaccagtgaaagcataagaagaaaagtctgtaaactttatgctagtaaatttgacaatttagaaggaatggccatttcc

SEQ ID NO: 387166 - DNA, 625 bp, Homo sapiens
acggtcggaggagtgtgagctgagtaactgggccggcggttcacagcggtcgtgactggggccctattaccttttggatcaaatgaaaaattctcattctttgtaatttgacacctgctggctgcttacatttacattttacttctatccaacaaacctctactctgcccctgtcatctgcctaatactctcatggacacagccatgcagatattccttctttcctttattcattcattatttctgcaaatactaactgcttgtcagatactgtgctagatgctctgggggaaacaaaagtgaatcactcactgccttgagcaactcactatccattggaaggggattaaacaaagtttttaaggaacagtgttttgtaacagaatgcacaaagtgctgagggaggagagaggagctgaaggcctcacagaggaagtgaatcctgccagaagttggttaggtgttcacccggggggaagagggagtgggggccattacaggcagagcagtgtgtcccagttcatggaggcagagcagaatgtggctcaatcagagtgctgacggcaggaatacaggatgggaactagtgggcaaaaataacattgggaaacagagccagatacca

SEQ ID NO: 387167 - DNA, 611 bp, Homo sapiens
actgccaatgtgtagatgtggaaactgaagcccagagagggtatggaacttgtccaaggtcacacagctggttaatggcttggtaaggaatgggttcaggagcccagagagggtctggaacttgtccaaggtcacacagctggttagtggcttgataagctcaagctctcctgacggcccttgtccctacaagcagcttcctctccaaggagtcccctaagcctgcttatatggggcttgagacctgtgctgtgataaatctgacttgcttaggggtgagctaagggattcctcctcttagaccccccatccatagctaccaggtacttgacaggatggaaatgtttcaccctccaaaagtaccctgtaaaggcccaacctcgaaccagaaagaatgtgtgtacaggaataaaggattgtggttcttaacctgtttcagttctcaaccccggaagaaactcatgaatgccttttcttagcaaaatgcatataaagaaaacgtgggccgggcgctgtggctcgcgcctgtaatcccagcactttgggaggccgaggggggcggatgacgagtcaagagatcgagaccatcctggccaacatggtgaaacccc

SEQ ID NO: 387168 - DNA, 385 bp, Homo sapiens
ctcacgcctataatcccaacactttggaaggcctaggtgggaggatcacttaagcctgggaggtgaaggttgcagtgagctgagattgtgccattgcactccagcctgggtgtcagagcaagatttggaaagatagcgaaatattcagcactgataaatgatacagtccacagtctcaagaagctcaaacaatagcagtcaggatttttaaaaagcccacgctgagattacagtgaacttaaaaagaaaagaaaatcttaaaagcaaccagagaataaaaggagggacaattggaccaacagctgactcctcaacaagcaataacataaaccagagacaaagaaatggggctggcgtgatggctcacacctacaatcccagcact

SEQ ID NO: 387169 - DNA, 918 bp, Homo sapiens
ggaaactgccccatggacagttttatgacgtagtctgaagcacaggaaatgggcggcacgggagcatcgggggacttttagaagttgtattgctttcttaagaaaatgctgctggcttctggaactgcagtttaattaaattcagttggctggataccttcaaaagaaataaaagaaaataaaaaaaaacaataaaaaaaaaagaagaaaaaagaaaaaaaatataaaaaataatagagtatagaaaaaaaggggcgggggggggagtagaaatctgttaagggtggaatagcgttgcgttcctcaggtttttcgtaaaagtggggagaacgtcactcgggggatcatatgtagctcgagtgaggtgcagagagacagtctgtggaagtgtctcccaagaaccgcgcgggaccaaataacccggataccgttggcaagatccttagatataggctaaacccccccatctggtgagagggcgtctgtgtacttgggcgcagagacatcaactgctttcgacgaattatgtactttacagtgcgcataagagcggaagatatgacaaagagtaaccatgggccaaggggagatcattaccacgtgattcagaacccaagaagtcccagagaagatctctagcaggtggcataggtgagagctaaccctggagaccatcaccagaatgtttccacggtggcaaagatctcttagataccgagcgtggatgacctgtacaaaacgaaggcttgaggagaacccccttcaggcgggaacagaccccctggggtgttggcctgggggaacaattctggatgaagaaaggatctcttggccatttggaatggaaagactggctgatagcagttcacgcccgcctaagattttgtgtgtgaattaggccagtaagtgaatctctgg

SEQ ID NO: 387170 - DNA, 1035 bp, Homo sapiens
ctggctagagaagccgcagcccgcagtgtccgacccagtcgtcccgcgccggagccggccccgtagcgtgccatggcctgctacatctaccagctgccctcctgggtgctggacgacctgtgccgcaacatggacgcgctcagcgagtgggactggatggagttcgcctcctacgtgatcacagacctgacccagctgcggaagatcaagtccatggagcgggtgcagggtgtgagcatcacgcgggagctgctgtggtggtggggcatgcggcaggccaccgtccagcaacttgtggacctcctgtgccgcctggagctctaccgggctgcccagatcatcctgaactggaaaccggctcctgaaatcaggtgtcccattccagccttccctgactctgtgaagccagaaaagcctttggcagcttctgtaagaaaggctgaggatgaacaggaagaggggcagcctgtgaggatggccacctttccaggcccagggtcctctccagccagagcccaccagccggcctttctccagcctcctgaagaagatgcccctcattccttgagaagcgacctccccacttcgtctgattcaaaggacttcagcacctccattcctaagcaggaaaaacttttgagcttggctggagacagccttttctggagtgaggcagacgtggtccaggcaaccgatgacttcaatcaaaaccgcaaaatcagccaggggacctttgctgacgtctacagagggcacaggcacgggaagccattcgtcttcaagaagctcagagagacagcctgttcaagtccaggatcaatcgaaagattcttccaggcagagttgcagatttgtcttagatgctgccaccccaatgtcttacctgtgctgggcttctgtgctgcaagacagtttcacagcttcatctacccctacatggcaaatggttccctacaggacagactgcagggtcagggtggctcggaccccctcccctggccccagcgtgtcagcatctgctcagggctgctctgt

SEQ ID NO: 387171 - DNA, 476 bp, Homo sapiens
tgtactggaccccatgggtgcccagcagagtcagcgttgtaacttgggccacctgtggacctcagctaatggtggtgtttccagtgtggaggcggtggttggggaggatgtcctggaaaagcccagctaggggctagtgtggggacctgtcctagagggactgcctctctgactctaagcagagttctctccgtcccttccagcctcctacgtgatcacagacctgacccagctgcggaagatcaagtccatggagcgggtgcagggtgtgagcatcacgcgggagctgctgtggtggtggggcatgcggcaggccaccgtccagcaacttgtggacctcctgtgccgcctggagctctaccgggctgcccagatcatcctgaactgtgagtaactcagggccctccttgagtggggcccatcacgctcctgagcagtttccatccgtgtgagttgcactctctggccttaatact

SEQ ID NO: 387172 - DNA, 325 bp, Homo sapiens
atgtctgtgaaattttcactgcatttgcatttaagaacatttgaggacaatggaagtgtgaatggatttggagagggaatgccacctgctctagaagaagccgccttgggatctgcatttctgtacctcgaattgcccttcagagcagcttcttccttgcccggctcatatcccccagaatgaactaactacactgccatccaaaaacagctgttttttagccagtaacaacccaggcatgtactctgtgtaccagagcgttttcaataagccacagatccttaggctgagaaagaagccactggaggttcagagccaggcacgg

SEQ ID NO: 387173 - DNA, 494 bp, Homo sapiens
gaatgagctgaaaaaaataccaagccagtgatataagtggagatttattaaggattcctgttgagtatattcttagtttcctcaaaatagggattattcaaaattaggtgtatgttcaatctcctgctttggttccagctacacaaggagagccatcctgtgctagtgtgatgtttcagacaacattctgaaactaaaatgtttggcacttattggcttttccaataaagaatctcttaagtacaggtatttctggaagctgttggtgtctgtgcttgaagatgattgctgatacttatccaccctttgggtacttctgttgactttgtttaaataatcatcttatggttgtccccaaatgtaatatggtatctcagatatagcagctggactgtaattacaacaaaaggttacctctaaagataacatcttaccattttagataaaattgtgtcccagaattcttatggtttcggaatgtacatttctagtca

SEQ ID NO: 387174 - DNA, 595 bp, Homo sapiens
  misc_feature (587)..(595): n is a, c, g, or t
atgacaccaaaaagggtaaaaagaaaaaggagggaattgtaggaaataacctatatgtgattacctattttcaattctaagtggcttggtataggtttaggcaggctacctggaaataaagaaataaagaagcagaatgtactgagccaccccctccaccttccttctttccctttcacccagtggccaggcatctatcggtgggggccccctcatctaccccttccccactccacagagaaatttagtttaagctagcttgcaacatagataattgtaccctttcttatcagctaagtgcagccactagagccgtaagtcaaatgtttgaaaaatcctgagagtcataatgcattgtatgctgcaataaaatgcagcagaaagaccctaaagaatgtacttgaagaacaatcaataggtgatgtctaggaagattgtggaaggctagtactcagcctatgaggaactgagggagggacctgtgcactagggcgtaaattgcttgttgaaactgtgctgggtgtgcctgcatgccagacacccgatcttgcaagaccgtcattaaaagtctcactttcgctgttcannnnnnnnn

SEQ ID NO: 387175 - DNA, 538 bp, Homo sapiens
acatgagggctccctgtagaccagacacacaccaccaacccagaatgggtggggtgttgaggatcagaactgcagagcatggccctctcctggctagaacagggcccttcatgcctggtgcatgtcagcacacacaatcggcctgcagaagaaaaaatccgtctatcaatcagctaagcagcaacacctccttcctgttctaatcagtcgtctaggggctgccacaagcaagagagcaaagccagcaaagaaagccaccccaagccctgtgtttcagtgtcccctcctctcacagtccccctctgccctggcatgggacccacttcattagcgcatggtcccgctgagcctatttcagctgggcttcatacccttccactcccatctcctgattccactggagccaggctcctctgcactcagtcagtaaacattgagtgacttaagtattcattagctagaacacttgaggccctcaagggactcaggaatgagtagcagccttctgaaggtcatgtcccatcatctaggcagaaag

SEQ ID NO: 387176 - DNA, 114 bp, Homo sapiens
tttcccccagtctccagttttaccctgacttagagtccacaaacttcatcagaccctctgtgctcatggacttgggcctttctagagggaagcctaaggctcggctccagatga

SEQ ID NO: 387177 - DNA, 467 bp, Homo sapiens
aagtggaaggcgcctcttcgttctctcttccgcgcttcgctgagggactcactcgcgcatcacccgcggctgccggtcgagtgtcccaggcgctccggggccgcggtgaccctcgcggtgcggaccgaggaggaagcgccgtggggggcggggcggcgccgcacgatccggccttcagcttcacggacgtgggctgagaacccgcccgcgccgcgctgagcagggccgagggagccggccagggccccagaggagtccggaacggattcccgtcgctaccgaggtctgcgcgtgtaaggagaggacgtcggagatttgcctcgaggggtggggtatagatgactggagaggtcaggcgcgggttggtcatcgctgaggctgggtgatgggtggccggattcgttatactgttttctccacttttctgtatgtttgatatttttcataataaagtttgtaaaagtaaa

SEQ ID NO: 387178 - DNA, 887 bp, Homo sapiens
gggtgttatttaataaggaatggtcagctctcttcccgaagcagtggccggttccacttgtgctggaaatgttggggagttccagttgccccctgttcataccagccccaatggcgtcagtctttctgtttttagctgctctggtggatgtgtggcacctcgtggttttaattctcatttctctcatgactgctggggttgagtgcttttcatgagcttgtctttcctgaagtgtgtgttcatgtcttctgctatttttaatgggctgtagtttttgttagtgagttgcagaaggtgacattctggacaccagttcttttcaggtgtgtggattacaaataccctcccagtagtggcttggctggtcaccttccgaagtgtttgttgatgagaagctttgagtttttgataaaatctaatttattacgtttttcttttgtgattattgcggtctgtgatacaggaagaccttgtttagcttcagtaacaaagattttcttttatttttctctaaaaatgatatggtttcacagttagtcctgtgatctgcccgggactaattctcaagagcagcattaggtgagtgttgaggctgtttcccccatgtagatactcacttgtctcagcagcatctgttggaaaggctttttagcccgagcacagtggctcacgcctgtaatcccagcactttgggaggctgagtcgggcggatcactcgaggtcaggagttcgagatcagcctggccaacatggtgaaaccccatgtctactgaaaaatacaaaaattagccaggcgtggtggggcgtgcctgtaatcccagctactcgggaggctgagataggagaatcacttgaacccgggaggcggaggttgcagtgagccaaga

SEQ ID NO: 387179 - DNA, 734 bp, Homo sapiens
aaaaaataaggctgggcatggtggctaatgcctgtaatccgaagcggatggatggcttgagcccaggatttgagaccaacttgggcaacatagcgaaacccccttctctataaaaaaaatacaattagccaggtgtggtggagggcaccggtagtctcagctgctcaggaggctgaggtgggatgatcactggagctcagggggtggaggctacagtgagctgtgattgcgcctgcactccactctgggtgagacagcaagacactgtttcaaatacacaaataaataaattgaaaaaacatatgatgttctgcacacatactgaaaaaaaacttgggtaaaacaagatccattcttaaaacatctctttagaaaacagagatgtatgaatacttatttgatgtaaatgtatttatgtttatgtatgttaacatggtacacctaacattagctatgtatgtgtatgtatacatatgtataaatatgtgcatatatatgtgtgtgtgtctttgcataaaattccaaaagctagccttttccttggtggagaaatgctaaaggcagtctcactaaggtcaagaactagacaacaatgctcaatatcttgacccctattgttttggaattattagctagtacaagtggacaatagaaaacagacatattaaaattgtaagaataaaagaaaagactattttctgttttcagatgatctgacagtatatctggaaaat

SEQ ID NO: 387180 - DNA, 369 bp, Homo sapiens
gggcaccaggatttggttgaagtcggcctggctctaaaacttctacacgtttccataccacacagctcgcactgcttccaggccacaattttatttttttttaaagaaaataaaatcctttttcctgccatgactggagtctcttaagcctcagaaaatatgatcatagcttgatttctttgcctttttccagaatggagtcccatggcacgccctaccttaatgtaaatttcatgcaaatagtatatggtatttctacttaacaaactttgaccatgtattcccaaagtgccagacagttttctggatacttccagatgtgtcattcgatggaagaagaagttgtgctttttattttatagagagcaa

SEQ ID NO: 387181 - DNA, 709 bp, Homo sapiens
cagatagcaataataatgccttccatttattgaccatcttgtggcagaaatcctttgagcacttccctacttccctagagttctttcatgaaacacatcagcagctctgggtattgccatttgcagaattgaggagggtatgggaagctgaagttcagggacattactttgctgtgaatttgccaccagaaatggtggtgtccaggactgtatcaaagccatatggccatgaggattttgctttgagtaaagttgggataacttttagagttctgtaagatgggaggatgaattggaccttcctcctagggtgaggcttagatgagttcccacatctcaggacacgcaacaggctgggcacagccactgctgggtaaaggctgccactgatattatttgtattattttgtttttattatagttgtcatcttgttgcttgtctgtgcttctgaaattacagttaagtgagcatccaaaggctcttctcaatcccaaagcccacccctccgcttctgcccttcaagtggtatcagtggagcactgcgtggttaggactttcggcgtaagagacaattaatcaaagttaatggacacttctttgttacacaacacgactaatgtcaatggcaaacaaatcactgaaaaacaatgaccaataaacccaactgaaaggtttttccattgaaaataaaatcaaccatgcctaatc

SEQ ID NO: 387182 - DNA, 660 bp, Homo sapiens
tgggattacaggcacagtcggccaatatttttatataccagattatgtcactagtaaatagagataatttcactgtctccttttcaatctggaggcattttcttccttcctttttcccttcccttctctcccctcccctccccttccctcctgtttttctttctacttactttcttacttttgcctctttgtcttggttagaatttccagtatgatgttaaataacaatggaaagagcagttatccttgtcttgttcctcattttagaggcttaaccctggagtttttgtctatgccccttgtgaagtttaaaaagtttttcccaatcatagtttgttgatggttcttataatgacagagcatttgatttgattaagtggttttttctgcttttattgcaatgatgttgtgatttttgctttttaactattgatatggtgggttacattgattgatttcagatattaagccaactttgcatttctgggaataatcccactggttgatgatggataatcttttttatatgttactagactcatttttccagtattttggcgaggatttttgcatctatgttggtctatagttttcttttactgtgtacctttgcttctgatattgaggcaataatggtctcaaaggattagttgagaattg

SEQ ID NO: 387183 - DNA, 172 bp, Homo sapiens
ataatgtcctaaaaatcaaacagctaccaaacattgaattgaagttctgacttatataaatcatttgcataaaaactgatcattaaaaacagtatctaatgaacattttggccccaatattaattaaaactgaaatgatagcattacaagctaaagattaatttcaatgaca

SEQ ID NO: 387184 - DNA, 520 bp, Homo sapiens
tgtagtcatgtttgtgacatgcctaaatattcactattactatattactacaaagtccatactttatagttgagtgatgccttctatacagtgatattgtccccttagattaatttatttcatttaagggacaaagactctcacatatgtcatttgtctcttgacaaaccctgtggtggtaatgaaaagatcattttactgagcaggttgctgatgcctagaaggctatggctttctcagagtctcatggctattaagtgatgaagctgaaaccaaactgtcatagtcctacttcatctctagtgtgtttctacagagtcttggttcctctctctggcttcttttctattccttcttctgaatcttgtaagaatttgcattaccctgcttattgccagaatgtctttgtgttaatgctttatctaactgtctgctgaattctcacctcccctctgagatcagtgccagacctcatcaatggtatcatgattctttccctaaatttgctagcatttggtat

SEQ ID NO: 387185 - DNA, 321 bp, Homo sapiens
cccacagggaggcggtctcaggagggggtcagaaaaggcactggggagggaaggcacaagagggggggcacgaggagccgccttcccaagggtggtggttctgcggggcacctggaaggggatggcagacaagctgcccaccacggtgggaaataaggacacaggggcggagcgcgtcttaacaagaggatttaagatttggcggaggggagccacggggaaagctgaaaccggggtttacattcctgggaaatgccagagcctggcctcccctgcgcctcccctgcgcttcctctgcagcctgtgagctcccgcccacct

SEQ ID NO: 387186 - DNA, 305 bp, Homo sapiens
gccaccctccctagagtccagcgctaatacaaccacctctggcctcagagtccccgggactcactcactcacttcactgatcagccgtggaatcctgaattcaaaccctacttcctaaacatcttttgaggcctacattcctcttgtaataaaaataaggaaaatgcaattttctgggattttgtaggaaaaaaagagaacataagtgaagatatctagcagagcatgtgcctctcacagaccttaggagttactgggaaatacaagtgaacaggccgctgtggagtgcgggaattcagaaaagc

SEQ ID NO: 387187 - DNA, 276 bp, Homo sapiens
tatttttgagtaggttttgtttcaaaggaacttatattttgggtttcctgaaaaattttctaatacttttctaatcttatttgctttatagctggggacttaagcataaaaagattatttttaaaacatacactttgaatgttagacataaattgtgttaggttttggtcttggaaacaagttctgcagtcatttgtagtaccacggtatggcatagagtaaggtcaacagccctgagtttctgtagccttgtatgccttcatggatttaccagtt

SEQ ID NO: 387188 - DNA, 381 bp, Homo sapiens
ggaaggatctgaaaataacttcttaaataagataaataaaaagaacaacatctgttcaaataattttactttaagtaaaatactttctataccagtattttctacttccaagaagtaatatttttcaaatatgtggaatgaaatataatgcaaagtttttaaacaataagtcagtaatgcctaacctgaatataggcatttaattttgtttcttttacaaatttgttatatgacttttgataggtcacttaattctctggacttcagcgttctacataactgcacaattacttatctgagaaattacttattaagtactccagaattacatgtctttgttttctgttttattgggtttaaatcagttaattaggattttaa

SEQ ID NO: 387189 - DNA, 218 bp, Homo sapiens
ttcagtgctcaggatatcaatggcatctttatctccttaagtggtctaggtcaggacatcaccacagagaaaaacaatagcttgaatcccaaattatttaacagtcaaagacttcttcataaaaataattgctccaggaaagggagatttgtgtgacattaggcagccaaagtgtcttcctgccagaccctttgctcttggtgaacatgctagatcag

SEQ ID NO: 387190 - DNA, 168 bp, Homo sapiens
aacttatgtacttattgtacatattatatgcagtatacaataagtatacttatgttgtcttattaccataaacagagcagtggtcatgatatataaatactgaggaaatcaaatgttttctttttttgtgatctaatatgaaaatcaatgcaacatttctggataatt

SEQ ID NO: 387191 - DNA, 196 bp, Homo sapiens
tagaaagctctgttgaggtcagaggattgaagggccactttggggacccttgctgaagatgatgggctctgctctggggatgcccagcctaggtggtcacagaacccagcttgctataaatacttgccgaatggtggggacttcctgatgtgccttcatcctaacatgctctgcagggcccatgacttagccacag

SEQ ID NO: 387192 - DNA, 2862 bp, Homo sapiens
gcatcatacgatagacgcccgaacacggtcagcgcaggcttagagatgtggaagtatctggccggatctcatctatagctgaggtcgtgtcaatcacaattaaggcagcgtgagtctgtattaataaatggctaatgtccagcaaccatcgatgtcaagtatccacacacctggcctgaatggatccctctgcctttcagagtttgggatatgagattgaaaatgacgactcggaattttcctgagagagaagtaccctgtgatgtagaagtggaaagattcacaagggaagttccctgcttgtccagtttaggtgatggttgggactgtgagaaccaggagggacacttgaggcaatcagctttaactctggagaaaccagggactcaggaagcaatttgtgaatatcctggttttggggagcatttgattgcaagctcagaccttccaccgtctcagagagttctggcaacaaatggtttccatgcacctgactcaaatgttagtggtctggattgtgaccccgccttacccagctatcctaaaagttatgcagataagagaactggtgacagtgatgcctgtggaaaaggcttcaaccattccatggaagttattcatggaagaaatccagtgagagagaagccctacaaataccctgaaagtgttaagtcttttaatcattttacctctcttggtcatcagaaaataatgaaaagaggcaagaaatcgtatgaaggtaagaattttgagaacatctttactctgagctcatcgcttaatgaaaaccagagaaatctccctggagagaaacaatatagatgtactgaatgtggcaaatgcttcaaacggaactcttctcttgttttgcatcaccgaactcacaccggagagaagccttatacttgtaatgagtgtggaaagtccttctccaagaactacaacctgattgtgcatcaaagaatccacacaggagagaagccctatgaatgcagtaaatgtgggaaagctttcagtgatggctcagctctgacacagcaccagagaattcacacaggcgagaaaccttatgaatgcctagagtgtggaaaaaccttcaaccgaaattcatccttaattttgcaccaaagaactcatacaggggaaaaaccatatagatgtaacgaatgtgggaaacccttcactgacatctcccaccttacagtgcatctcagaatccacaccggtgagaagccctatgagtgtagcaaatgtggaaaggctttccgggacggctcgtacctcacccagcatgagaggactcacactggagaaaagccctttgagtgtgcagagtgcgggaaatccttcaacagaaactctcacctcattgtgcatcaaaagatccattctggggagaaaccctatgaatgtaaagaatgtggcaagactttcatcgagagtgcgtacctcatcaggcatcagaggattcatactggcgagaagccctatggctgcaaccagtgtcagaaacttttcaggaatatcgctggcctcattaggcaccagaggactcatactggtgagaagccctatgagtgtaatcagtgtggcaaagccttcagggacagctcctgtctgaccaagcaccagagaattcacactaaggagaccccatatcagtgtccagaatgtgggaagtccttcaagcagaactctcacctggcagtacatcagagactccatagcagggagggtcccagccggtgtcctcagtgtggaaaaatgttccaaaagagctcatcccttgttcgacatcaaagagcacacctgggagagcaacccatggaaacataatggttgggggccacatgagtcttccagttcactctcactcctgtgtttaggaggcgtgtcttagatctgactcctctctggtcagtagaaaagaatcctttaagctatccagtgaattgatgaatgtgagacattgctgagccacactgttaagtctgctcattggggaactccagagacaacttaggatgagggcagaaaagtctttggggatgattcagtctgtaccagacatgacaacacacacactggaatgaaatgtgcaaacatgggggtgacaccacagagagaacctgtgaatgcattcagaacatgattggaatgaagagccctgtagtagggagtttccaccttgtacgtaagcaaacactgaatcaacttttttttttttttcggacagagtctcactgtgcagtggcatgatctccactcacagcaacctctgcctcccaggttcaagcagttctcctgcctcagcctggccagcatggtgaaaccccatctctaccaaaaatacaggaaattatctgggcatagtagtgtgtgcctgtaatcccagctacttgggaagctgaggcaggagaattgcttgaacctgggaggtggaggttgcagtgagctaagatcgcaccactgcactccagcctgggtgacagagcgagactccatttcaaaaaaaaagactgaaacaagcttgtgctaagatggaaagggctgcttctaacagatgtggtttgttgctttagttgttgaagcaaaaatactgagttgttatgtttatgttatcaccccaccactacctccatggttgttcatttaggatgcttctaattcagccactgtgaaccattataaaggttttattgccatgttgaaaatgtttataatatggcaaaaaggggcatcaaatagaagatttactattattccagccatgtaaaaatatgtgcacatatggatgtatgttgaaagtggatgatggagaaataaaatgtggttttctttggggactggaaaaaaaaaaaa

SEQ ID NO: 387193 - DNA, 2855 bp, Homo sapiens
tacatggctctttttgaatctgttcttggttccattccttggctacgattttacctcttccttgtataaatttgaatttaaaagagaaaacaagtaaaaaaatacacatctttacacctagcccatcatcattgtctgtttctcttacagataaagcttcatatacctaagtctgcatttttcttctttttgcagtttgggatatgagattgaaaatgacgactcggaattttcctgagagagaagtaccctgtgatgtagaagtggaaagattcacaagggaagttccctgcttgtccagtttaggtgatggttgggactgtgagaaccaggagggacacttgaggcaatcagctttaactctggagaaaccagggactcaggaagcaatttgtgaatatcctggttttggggagcatttgattgcaagctcagaccttccaccgtctcagagagttctggcaacaaatggtttccatgcacctgactcaaatgttagtggtctggattgtgaccccgccttacccagctatcctaaaagttatgcagataagagaactggtgacagtgatgcctgtggaaaaggcttcaaccattccatggaagttattcatggaagaaatccagtgagagagaagccctacaaataccctgaaagtgttaagtcttttaatcattttacctctcttggtcatcagaaaataatgaaaagaggcaagaaatcgtatgaaggtaagaattttgagaacatctttactctgagctcatcgcttaatgaaaaccagagaaatctccctggagagaaacaatatagatgtactgaatgtggcaaatgcttcaaacggaactcttctcttgttttgcatcaccgaactcacaccggagagaagccttatacttgtaatgagtgtggaaagtccttctccaagaactacaacctgattgtgcatcaaagaatccacacaggagagaagccctatgaatgcagtaaatgtgggaaagctttcagtgatggctcagctctgacacagcaccagagaattcacacaggcgagaaaccttatgaatgcctagagtgtggaaaaaccttcaaccgaaattcatccttaattttgcaccaaagaactcatacaggggaaaaaccatatagatgtaacgaatgtgggaaacccttcactgacatctcccaccttacagtgcatctcagaatccacaccggtgagaagccctatgagtgtagcaaatgtggaaaggctttccgggacggctcgtacctcacccagcatgagaggactcacactggagaaaagccctttgagtgtgcagagtgcgggaaatccttcaacagaaactctcacctcattgtgcatcaaaagatccattctggggagaaaccctatgaatgtaaagaatgtggcaagactttcatcgagagtgcgtacctcatcaggcatcagaggattcatactggcgagaagccctatggctgcaaccagtgtcagaaacttttcaggaatatcgctggcctcattaggcaccagaggactcatactggtgagaagccctatgagtgtaatcagtgtggcaaagccttcagggacagctcctgtctgaccaagcaccagagaattcacactaaggagaccccatatcagtgtccagaatgtgggaagtccttcaagcagaactctcacctggcagtacatcagagactccatagcagggagggtcccagccggtgtcctcagtgtggaaaaatgttccaaaagagctcatcccttgttcgacatcaaagagcacacctgggagagcaacccatggaaacataatggttgggggccacatgagtcttccagttcactctcactcctgtgtttaggaggcgtgtcttagatctgactcctctctggtcagtagaaaagaatcctttaagctatccagtgaattgatgaatgtgagacattgctgagccacactgttaagtctgctcattggggaactccagagacaacttaggatgagggcagaaaagtctttggggatgattcagtctgtaccagacatgacaacacacacactggaatgaaatgtgcaaacatgggggtgacaccacagagagaacctgtgaatgcattcagaacatgattggaatgaagagccctgtagtagggagtttccaccttgtacgtaagcaaacactgaatcaacttttttttttttttcggacagagtctcactgtgcagtggcatgatctccactcacagcaacctctgcctcccaggttcaagcagttctcctgcctcagcctggccagcatggtgaaaccccatctctaccaaaaatacaggaaattatctgggcatagtagtgtgtgcctgtaatcccagctacttgggaagctgaggcaggagaattgcttgaacctgggaggtggaggttgcagtgagctaagatcgcaccactgcactccagcctgggtgacagagcgagactccatttcaaaaaaaaagactgaaacaagcttgtgctaagatggaaagggctgcttctaacagatgtggtttgttgctttagttgttgaagcaaaaatactgagttgttatgtttatgttatcaccccaccactacctccatggttgttcatttaggatgcttctaattcagccactgtgaaccattataaaggttttattgccatgttgaaaatgtttataatatggcaaaaaggggcatcaaatagaagatttactattattccagccatgtaaaaatatgtgcacatatggatgtatgttgaaagtggatgatggagaaataaaatgtggttttctttggggactggaaaaaaaaaaaa

SEQ ID NO: 387194 - DNA, 2520 bp, Homo sapiens
tacatggctctttttgaatctgttcttggttccattccttggctacgattttacctcttccttgtataaatttgaatttaaaagagaaaacaagtaaaaaaatacacatctttacacctagcccatcatcattgtctgtttctcttacagataaagcttcatatacctaagtctgcatttttcttctttttgcagtttgggatatgagattgaaaatgacgactcggaattttcctgagagagaagtaccctgtgatgtagaagtggaaagattcacaagggaagttccctgcttgtccagtttaggtgatggttgggactgtgagaaccaggagggacacttgaggcaatcagctttaactctggagaaaccagggactcaggaagcaatttgtgaatatcctggttttggggagcatttgattgcaagctcagaccttccaccgtctcagagagttctggcaacaaatggtttccatgcacctgactcaaatgttagtggtctggattgtgaccccgccttacccagctatcctaaaagttatgcagataagagaactggtgacagtgatgcctgtggaaaaggcttcaaccattccatggaagttattcatggaagaaatccagtgagagagaagcccctatgaatgcagtaaatgtgggaaagctttcagtgatggctcagctctgacacagcaccagagaattcacacaggcgagaaaccttatgaatgcctagagtgtggaaaaaccttcaaccgaaattcatccttaattttgcaccaaagaactcatacaggggaaaaaccatatagatgtaacgaatgtgggaaacccttcactgacatctcccaccttacagtgcatctcagaatccacaccggtgagaagccctatgagtgtagcaaatgtggaaaggctttccgggacggctcgtacctcacccagcatgagaggactcacactggagaaaagccctttgagtgtgcagagtgcgggaaatccttcaacagaaactctcacctcattgtgcatcaaaagatccattctggggagaaaccctatgaatgtaaagaatgtggcaagactttcatcgagagtgcgtacctcatcaggcatcagaggattcatactggcgagaagccctatggctgcaaccagtgtcagaaacttttcaggaatatcgctggcctcattaggcaccagaggactcatactggtgagaagccctatgagtgtaatcagtgtggcaaagccttcagggacagctcctgtctgaccaagcaccagagaattcacactaaggagaccccatatcagtgtccagaatgtgggaagtccttcaagcagaactctcacctggcagtacatcagagactccatagcagggagggtcccagccggtgtcctcagtgtggaaaaatgttccaaaagagctcatcccttgttcgacatcaaagagcacacctgggagagcaacccatggaaacataatggttgggggccacatgagtcttccagttcactctcactcctgtgtttaggaggcgtgtcttagatctgactcctctctggtcagtagaaaagaatcctttaagctatccagtgaattgatgaatgtgagacattgctgagccacactgttaagtctgctcattggggaactccagagacaacttaggatgagggcagaaaagtctttggggatgattcagtctgtaccagacatgacaacacacacactggaatgaaatgtgcaaacatgggggtgacaccacagagagaacctgtgaatgcattcagaacatgattggaatgaagagccctgtagtagggagtttccaccttgtacgtaagcaaacactgaatcaacttttttttttttttcggacagagtctcactgtgcagtggcatgatctccactcacagcaacctctgcctcccaggttcaagcagttctcctgcctcagcctggccagcatggtgaaaccccatctctaccaaaaatacaggaaattatctgggcatagtagtgtgtgcctgtaatcccagctacttgggaagctgaggcaggagaattgcttgaacctgggaggtggaggttgcagtgagctaagatcgcaccactgcactccagcctgggtgacagagcgagactccatttcaaaaaaaaagactgaaacaagcttgtgctaagatggaaagggctgcttctaacagatgtggtttgttgctttagttgttgaagcaaaaatactgagttgttatgtttatgttatcaccccaccactacctccatggttgttcatttaggatgcttctaattcagccactgtgaaccattataaaggttttattgccatgttgaaaatgtttataatatggcaaaaaggggcatcaaatagaagatttactattattccagccatgtaaaaatatgtgcacatatggatgtatgttgaaagtggatgatggagaaataaaatgtggttttctttggggactggaaaaaaaaaaaa

SEQ ID NO: 387195 - DNA, 2891 bp, Homo sapiens
agcgggaacatggctgccgccggccgccaaccggtcttgctgtctcacccaggctggagtgcagtggcacgatcacagctcactgcagccttgagctcctgggctaccaagtagctgggacttcagagatggctggagccgtgtggatgggcataaatggctaatgtccagcaaccatcgatgtcaagtatccacacacctggcctgaatggatccctctgcctttcagagtttgggatatgagattgaaaatgacgactcggaattttcctgagagagaagtaccctgtgatgtagaagtggaaagattcacaagggaagttccctgcttgtccagtttaggtgatggttgggactgtgagaaccaggagggacacttgaggcaatcagctttaactctggagaaaccagggactcaggaagcaatttgtgaatatcctggttttggggagcatttgattgcaagctcagaccttccaccgtctcagagagttctggcaacaaatggtttccatgcacctgactcaaatgttagtggtctggattgtgaccccgccttacccagctatcctaaaagttatgcagataagagaactggtgacagtgatgcctgtggaaaaggcttcaaccattccatggaagttattcatggaagaaatccagtgagagagaagccctacaaataccctgaaagtgttaagtcttttaatcattttacctctcttggtcatcagaaaataatgaaaagaggcaagaaatcgtatgaaggtaagaattttgagaacatctttactctgagctcatcgcttaatgaaaaccagagaaatctccctggagagaaacaatatagatgtactgaatgtggcaaatgcttcaaacggaactcttctcttgttttgcatcaccgaactcacaccggagagaagccttatacttgtaatgagtgtggaaagtccttctccaagaactacaacctgattgtgcatcaaagaatccacacaggagagaagccctatgaatgcagtaaatgtgggaaagctttcagtgatggctcagctctgacacagcaccagagaattcacacaggcgagaaaccttatgaatgcctagagtgtggaaaaaccttcaaccgaaattcatccttaattttgcaccaaagaactcatacaggggaaaaaccatatagatgtaacgaatgtgggaaacccttcactgacatctcccaccttacagtgcatctcagaatccacaccggtgagaagccctatgagtgtagcaaatgtggaaaggctttccgggacggctcgtacctcacccagcatgagaggactcacactggagaaaagccctttgagtgtgcagagtgcgggaaatccttcaacagaaactctcacctcattgtgcatcaaaagatccattctggggagaaaccctatgaatgtaaagaatgtggcaagactttcatcgagagtgcgtacctcatcaggcatcagaggattcatactggcgagaagccctatggctgcaaccagtgtcagaaacttttcaggaatatcgctggcctcattaggcaccagaggactcatactggtgagaagccctatgagtgtaatcagtgtggcaaagccttcagggacagctcctgtctgaccaagcaccagagaattcacactaaggagaccccatatcagtgtccagaatgtgggaagtccttcaagcagaactctcacctggcagtacatcagagactccatagcagggagggtcccagccggtgtcctcagtgtggaaaaatgttccaaaagagctcatcccttgttcgacatcaaagagcacacctgggagagcaacccatggaaacataatggttgggggccacatgagtcttccagttcactctcactcctgtgtttaggaggcgtgtcttagatctgactcctctctggtcagtagaaaagaatcctttaagctatccagtgaattgatgaatgtgagacattgctgagccacactgttaagtctgctcattggggaactccagagacaacttaggatgagggcagaaaagtctttggggatgattcagtctgtaccagacatgacaacacacacactggaatgaaatgtgcaaacatgggggtgacaccacagagagaacctgtgaatgcattcagaacatgattggaatgaagagccctgtagtagggagtttccaccttgtacgtaagcaaacactgaatcaacttttttttttttttcggacagagtctcactgtgcagtggcatgatctccactcacagcaacctctgcctcccaggttcaagcagttctcctgcctcagcctggccagcatggtgaaaccccatctctaccaaaaatacaggaaattatctgggcatagtagtgtgtgcctgtaatcccagctacttgggaagctgaggcaggagaattgcttgaacctgggaggtggaggttgcagtgagctaagatcgcaccactgcactccagcctgggtgacagagcgagactccatttcaaaaaaaaagactgaaacaagcttgtgctaagatggaaagggctgcttctaacagatgtggtttgttgctttagttgttgaagcaaaaatactgagttgttatgtttatgttatcaccccaccactacctccatggttgttcatttaggatgcttctaattcagccactgtgaaccattataaaggttttattgccatgttgaaaatgtttataatatggcaaaaaggggcatcaaatagaagatttactattattccagccatgtaaaaatatgtgcacatatggatgtatgttgaaagtggatgatggagaaataaaatgtggttttctttggggactggaaaaaaaaaaaa

SEQ ID NO: 387196 - DNA, 2797 bp, Homo sapiens
agcgggaacatggctgccgccggccgccaaccagatggctggagccgtgtggatgggcataaatggctaatgtccagcaaccatcgatgtcaagtatccacacacctggcctgaatggatccctctgcctttcagagtttgggatatgagattgaaaatgacgactcggaattttcctgagagagaagtaccctgtgatgtagaagtggaaagattcacaagggaagttccctgcttgtccagtttaggtgatggttgggactgtgagaaccaggagggacacttgaggcaatcagctttaactctggagaaaccagggactcaggaagcaatttgtgaatatcctggttttggggagcatttgattgcaagctcagaccttccaccgtctcagagagttctggcaacaaatggtttccatgcacctgactcaaatgttagtggtctggattgtgaccccgccttacccagctatcctaaaagttatgcagataagagaactggtgacagtgatgcctgtggaaaaggcttcaaccattccatggaagttattcatggaagaaatccagtgagagagaagccctacaaataccctgaaagtgttaagtcttttaatcattttacctctcttggtcatcagaaaataatgaaaagaggcaagaaatcgtatgaaggtaagaattttgagaacatctttactctgagctcatcgcttaatgaaaaccagagaaatctccctggagagaaacaatatagatgtactgaatgtggcaaatgcttcaaacggaactcttctcttgttttgcatcaccgaactcacaccggagagaagccttatacttgtaatgagtgtggaaagtccttctccaagaactacaacctgattgtgcatcaaagaatccacacaggagagaagccctatgaatgcagtaaatgtgggaaagctttcagtgatggctcagctctgacacagcaccagagaattcacacaggcgagaaaccttatgaatgcctagagtgtggaaaaaccttcaaccgaaattcatccttaattttgcaccaaagaactcatacaggggaaaaaccatatagatgtaacgaatgtgggaaacccttcactgacatctcccaccttacagtgcatctcagaatccacaccggtgagaagccctatgagtgtagcaaatgtggaaaggctttccgggacggctcgtacctcacccagcatgagaggactcacactggagaaaagccctttgagtgtgcagagtgcgggaaatccttcaacagaaactctcacctcattgtgcatcaaaagatccattctggggagaaaccctatgaatgtaaagaatgtggcaagactttcatcgagagtgcgtacctcatcaggcatcagaggattcatactggcgagaagccctatggctgcaaccagtgtcagaaacttttcaggaatatcgctggcctcattaggcaccagaggactcatactggtgagaagccctatgagtgtaatcagtgtggcaaagccttcagggacagctcctgtctgaccaagcaccagagaattcacactaaggagaccccatatcagtgtccagaatgtgggaagtccttcaagcagaactctcacctggcagtacatcagagactccatagcagggagggtcccagccggtgtcctcagtgtggaaaaatgttccaaaagagctcatcccttgttcgacatcaaagagcacacctgggagagcaacccatggaaacataatggttgggggccacatgagtcttccagttcactctcactcctgtgtttaggaggcgtgtcttagatctgactcctctctggtcagtagaaaagaatcctttaagctatccagtgaattgatgaatgtgagacattgctgagccacactgttaagtctgctcattggggaactccagagacaacttaggatgagggcagaaaagtctttggggatgattcagtctgtaccagacatgacaacacacacactggaatgaaatgtgcaaacatgggggtgacaccacagagagaacctgtgaatgcattcagaacatgattggaatgaagagccctgtagtagggagtttccaccttgtacgtaagcaaacactgaatcaacttttttttttttttcggacagagtctcactgtgcagtggcatgatctccactcacagcaacctctgcctcccaggttcaagcagttctcctgcctcagcctggccagcatggtgaaaccccatctctaccaaaaatacaggaaattatctgggcatagtagtgtgtgcctgtaatcccagctacttgggaagctgaggcaggagaattgcttgaacctgggaggtggaggttgcagtgagctaagatcgcaccactgcactccagcctgggtgacagagcgagactccatttcaaaaaaaaagactgaaacaagcttgtgctaagatggaaagggctgcttctaacagatgtggtttgttgctttagttgttgaagcaaaaatactgagttgttatgtttatgttatcaccccaccactacctccatggttgttcatttaggatgcttctaattcagccactgtgaaccattataaaggttttattgccatgttgaaaatgtttataatatggcaaaaaggggcatcaaatagaagatttactattattccagccatgtaaaaatatgtgcacatatggatgtatgttgaaagtggatgatggagaaataaaatgtggttttctttggggactggaaaaaaaaaaaa

SEQ ID NO: 387197 - DNA, 754 bp, Homo sapiens
agtcaaaggcagaggtgatgtttcccgcctccctgtaatcccagcacctagtagcgtgcccagcaagtgaatctctttgtcaggtagttaagacagtggattaatatgaaataaaaatatccctttggcgattcttttggtcacactgtgttatctcctccaggcaggaaaaatactattgtattacaaggctcggaccaaagacatcctgattcgattcactgcttggtgttgtattcttgtaagtaagcagcattcctcgctaaaattcctttccttcacatgtatagatatttaaaaggaataaaatgtttagcaacactgagctagccattgtcaccacatggcagcaggtaccattttcttcacttgaataacagagaggaacaaatctttccacctaaatgcacagatttattttcttaggaaaatgtctttatcaataaggcagtgtttgccatcagataggccaggaatgcctgaagaaatgtgaggtatgggctctgtgtggagaggcgtatcagagagactgggcaaatcagaccaggttgcagacatcaacttccagattatatgggaaagagagttgcaaggttgactgtttgttcatttcatcctgaccgcagccatgcctcctcttcagagtcactgtcatttaatcagtaagcttaccctcttcaactcagtagaatggtgaagagattttgggagagtatttttcagttcatacatttaaaaaaatatgtttccattt

SEQ ID NO: 387198 - DNA, 4165 bp, Homo sapiens
  misc_feature (103)..(103): n is a, c, g, or t
agcgggggtgggcagggcgctggccgcgctgctgctggccgcgtccgtgctgagcgccgcgctgctggcccccggcggctcttcggggcgcgatgcccaggcngcggccgccacgagacttagacaaaaaaagacatgcagagctgaagatggatcaggctttgctactcatccataatgaacttctctggaccaacttgaccgtctactggaaatctgaatgctgttatcactgcttgtttcaggttctggtaaacgttcctcagagtccaaaagcagggaagcctagtgctgcagctgcctctgtcagcacccagcacggatctatcctgcagctgaacgacaccttggaagagaaagaagtttgtaggttggaatacagatttggagaatttggaaactattctctcttggtaaagaacatccataatggagttagtgaaattgcctgtgacctggctgtgaacgaggatccagttgatagtaaccttcctgtgagcattgcattccttattggtcttgctgtcatcattgtgatatcctttctgaggctcttgttgagtttggatgactttaacaattggatttctaaagccataagttctcgagaaactgatcgcctcatcaattctgagctgggatctcccagcaggacagaccctctcgatggtgatgttcagccagcaacgtggcgtctatctgccctgccgccccgcctccgcagcgtggacaccttcagggggattgctcttatactcatggtctttgtcaattatggaggaggaaaatattggtacttcaaacatgcaagttggaatgggctgacagtggctgacctcgtgttcccgtggtttgtatttattatgggatcttccatttttctatcgatgacttctatactgcaacgggggtgttcaaaattcagattgctggggaagattgcatggaggagtttcctgttaatctgcataggaattatcattgtgaatcccaattattgccttggtccattgtcttgggacaaggtgcgcattcctggtgtgctgcagcgattgggagtgacatactttgtggttgctgtgttggagctcctctttgctaaacctgtgcctgaacattgtgcctcggagaggagctgcctttctcttcgagacatcacgtccagctggccccagtggctgctcatcctggtgctggaaggcctgtggctgggcttgacattcctcctgccagtccctgggtgccctactggttatcttggtcctgggggcattggagattttggcaagtatccaaattgcactggaggagctgcaggctacatcgaccgcctgctgctgggagacgatcacctttaccagcacccatcttctgctgtactttaccacaccgaggtggcctatgaccccgagggcatcctgggcaccatcaactccatcgtgatggcctttttaggagttcaggcaggaaaaatactattgtattacaaggctcggaccaaagacatcctgattcgattcactgcttggtgttgtattcttgggctcatttctgttgctctgacgaaggtttctgaaaatgaaggctttattccagtaaacaaaaatctctggtccctttcgtatgtcactacgctcagttcttttgccttcttcatcctgctggtcctgtacccagttgtggatgtgaaggggctgtggacaggaaccccattcttttatccaggaatgaattccattctggtatacgtcggccacgaggtgtttgagaactacttcccctttcagtggaagctgaaggacaaccagtcccacaaggagcacctgactcagaacatcgtcgccactgccctctgggtgctcattgcctacatcctctatagaaagaagattttttggaaaatctgatggctcccactgagatgtgctgctggaagactctagtaggcctgcagggaggactgaagcagcctttgttaaagggaagcattcattaggaaattgactggctgcgtgtttacagactctgggggaagacactgatgtcctcaaactggttaactgtgacacggctcgccagaactctgcctgtctatttgtgacttacagatttgaaatgtaattgtcttttttcctccatcttctgtggaaatggatgtctttggaacttcattccgaggagataagctttaactttccaaaagggaattgccatgggtgtttttcttctgtggtgagtgaaacaatctgaggtctggttcttgctgaccttgttgccctgcaaacttcctttccacgtgtacgcgcacaccaacacgaaatgccatcactcctactgcggctgctatgaagcttactggttgtgatgtgttataatttagtctgtttttttgattgaatgcagtttaatgtttccagaaagccaaagtaattttcttttcagatatgcaaggctttggtgggtccaaaaaatgtctatcacaagccattttttccttttcctctctcgaaaagttaaaatatctatgtgttattcccaaaccctcttacctatgtatctgcctgtctgtccatcatcttccttcctccctatctctgtgtatctggatggcagccgctgcccaggggagtggctgtggggagggcaggtactgtctttgcctgtgggtccagctgagccatccctgctgggtgatgctgggcaagacccttggcccgtctgggccttggcttcctcacttgtgaaatgagcgggaagatgactctcagttccttccacctcttagacatggtgaggtaacagacatcaaaagcttttctgaaatcttcagaagaaatagttccattacagaaaactcttcaaaataaatagtagtgaaaacttttaaaaactctcattggagtaagtcttttcaagatgatcctccacaatggaggcagcgttcctacttgtcatcacacagctgaagacattgtttcttaggtgtgaaatcggggacaaaggacaaacagagacacacggcattgttcatgggaggcatcgtcaccctcctgggtgttctgtgggaatttcctgtgtgaggaaaacgtggccacagggttgtgctgtacccacccttccccggcgagatggccctcggcctgtgccgctgcttccaccctcgccactccatggcagcttttggtctgtttccggctctgccctctgccctgaactctcatccggcttgtacctgcctgctggacccctccacctggaggccagcccatgtctcaggcccagccctagcctcttctcctcaaattctaagtgttttctctttaggtttccctggctttgtgaatggatcatgtgtctctaggtataaacctgacatcatctttccacccggcttacctccaccagatctccccagttctgtctccatcttctacctgcagctgctctgttctcatggtcactgctgcatcactgagtctggacccttgttatcattttcaaactggcctccttccctcgttccccacttcttaaagtcacctgtccattgccaccagattaagctttctccagccagatcacctctctctgagaaacctccattgacatggaaacaccattgtctggcacacatactcacatactcaccttcccgtcttgatccccacacatctttccagcctcccctcccactccactccctgctccctcctccacctccccatcctcttgtctcccctcccctctgaatccagcccagcggggcttctcctgcctccatcacatcacagaagtacctcctgcttctggttttaattagagccttccccgattacattttcctctgaattttttcctatctacatttgatctgtcatgtttaaaccccctacttctaagggaacttctctaatctcttatcctcatccccaaatagtgttttcttcctctgggttcttataatgttggtatcaatctcacagcatttagtgcttcctgcctggtgtgacagttacctgtgtgcatgtgcaatttctaatttcccacgctagactgtgagcttcctaaggcaagaatcatgccttgttggtttctgtattcctcatggtgccaaacacagtgccttctacattgcaggcgctgaataaacatttttaaagcaaaa

SEQ ID NO: 387199 - DNA, 4102 bp, Homo sapiens
  misc_feature (103)..(103): n is a, c, g, or t
agcgggggtgggcagggcgctggccgcgctgctgctggccgcgtccgtgctgagcgccgcgctgctggcccccggcggctcttcggggcgcgatgcccaggcngcggccgccacgagacttagacaaaaaaagacatgcagagctgaagatggatcaggctttgctactcatccataatgaacttctctggaccaacttgaccgtctactggaaatctgaatgctgttatcactgcttgtttcaggttctggtaaacgttcctcagagtccaaaagcagggaagcctagtgctgcagctgcctctgtcagcacccagcacggatctatcctgcagctgaacgacaccttggaagagaaagaagtttgtaggttggaatacagatttggagaatttggaaactattctctcttggtaaagaacatccataatggagttagtgaaattgcctgtgacctggctgtgaacgaggatccagttgatagtaaccttcctgtgagcattgcattccttattggtcttgctgtcatcattgtgatatcctttctgaggctcttgttgagtttggatgactttaacaattggatttctaaagccataagttctcgagaaactgatcgcctcatcaattctgagctgggatctcccagcaggacagaccctctcgatggtgatgttcagccagcaacgtggcgtctatctgccctgccgccccgcctccgcagcgtggacaccttcagggggattgctcttatactcatggtctttgtcaattatggaggaggaaaatattggtacttcaaacatgcaagttggaatgggctgacagtggctgacctcgtgttcccgtggtttgtatttattatgggatcttccatttttctatcgatgacttctatactgcaacgggggtgttcaaaattcagattgctggggaagattgcatggaggagtttcctgttaatctgcataggaattatcattgtgaatcccaattattgccttggtccattgtcttgggacaaggtgcgcattcctggtgtgctgcagcgattgggagtgacatactttgtggttgctgtgttggagctcctctttgctaaacctgtgcctgaacattgtgcctcggagaggagctgcctttctcttcgagacatcacgtccagctggccccagtggctgctcatcctggtgctggaaggcctgtggctgggcttgacattcctcctgccagtccctgggtgccctactggttatcttggtcctgggggcattggagattttggcaagtatccaaattgcactggaggagctgcaggctacatcgaccgcctgctgctgggagacgatcacctttaccagcacccatcttctgctgtactttaccacaccgaggtggcctatgaccccgagggcatcctgggcaccatcaactccatcgtgatggcctttttaggagttcaggcaggaaaaatactattgtattacaaggctcggaccaaagacatcctgattcgattcactgcttggtgttgtattcttgggctcatttctgttgctctgacgaaggtttctgaaaatgaaggctttattccagtaaacaaaaatctctggtccctttcgtatgtcactacgctcagttcttttgccttcttcatcctgctggtcctgtacccagttgtggatgtgaaggggctgtggacaggaaccccattcttttatccaggaatgaattccattctggtatacgtcggccacgaggtgtttgagaactacttcccctttcagtggaagctgaaggacaaccagtcccacaaggagcacctgactcagaacatcgtcgccactgccctctgggtgctcattgcctacatcctctatagaaagaagattttttggaaaatctgatggctcccactgagatgtgctgctggaagactctagtaggcctgcagggaggactgaagcagcctttgttaaagggaagcattcattaggaaattgactggctgcgtgtttacagactctgggggaagacactgatgtcctcaaactggttaactgtgacacggctcgccagaactctgcctgtctatttgtgacttacagatttgaaatgtaattgtcttttttcctccatcttctgtggaaatggatgtctttggaacttcattccgaggagataagctttaactttccaaaagggaattgccatgggtgtttttcttctgtggtgagtgaaacaatctgaggtctggttcttgctgaccttgttgccctgcaaacttcctttccacgtgtacgcgcacaccaacacgaaatgccatcactcctactgcggctgctatgaagcttactggttgtgatgtgttataatttagtctgtttttttgattgaatgcagtttaatgtttccagaaagccaatttttccttttcctctctcgaaaagttaaaatatctatgtgttattcccaaaccctcttacctatgtatctgcctgtctgtccatcatcttccttcctccctatctctgtgtatctggatggcagccgctgcccaggggagtggctgtggggagggcaggtactgtctttgcctgtgggtccagctgagccatccctgctgggtgatgctgggcaagacccttggcccgtctgggccttggcttcctcacttgtgaaatgagcgggaagatgactctcagttccttccacctcttagacatggtgaggtaacagacatcaaaagcttttctgaaatcttcagaagaaatagttccattacagaaaactcttcaaaataaatagtagtgaaaacttttaaaaactctcattggagtaagtcttttcaagatgatcctccacaatggaggcagcgttcctacttgtcatcacacagctgaagacattgtttcttaggtgtgaaatcggggacaaaggacaaacagagacacacggcattgttcatgggaggcatcgtcaccctcctgggtgttctgtgggaatttcctgtgtgaggaaaacgtggccacagggttgtgctgtacccacccttccccggcgagatggccctcggcctgtgccgctgcttccaccctcgccactccatggcagcttttggtctgtttccggctctgccctctgccctgaactctcatccggcttgtacctgcctgctggacccctccacctggaggccagcccatgtctcaggcccagccctagcctcttctcctcaaattctaagtgttttctctttaggtttccctggctttgtgaatggatcatgtgtctctaggtataaacctgacatcatctttccacccggcttacctccaccagatctccccagttctgtctccatcttctacctgcagctgctctgttctcatggtcactgctgcatcactgagtctggacccttgttatcattttcaaactggcctccttccctcgttccccacttcttaaagtcacctgtccattgccaccagattaagctttctccagccagatcacctctctctgagaaacctccattgacatggaaacaccattgtctggcacacatactcacatactcaccttcccgtcttgatccccacacatctttccagcctcccctcccactccactccctgctccctcctccacctccccatcctcttgtctcccctcccctctgaatccagcccagcggggcttctcctgcctccatcacatcacagaagtacctcctgcttctggttttaattagagccttccccgattacattttcctctgaattttttcctatctacatttgatctgtcatgtttaaaccccctacttctaagggaacttctctaatctcttatcctcatccccaaatagtgttttcttcctctgggttcttataatgttggtatcaatctcacagcatttagtgcttcctgcctggtgtgacagttacctgtgtgcatgtgcaatttctaatttcccacgctagactgtgagcttcctaaggcaagaatcatgccttgttggtttctgtattcctcatggtgccaaacacagtgccttctacattgcaggcgctgaataaacatttttaaagcaaaa

SEQ ID NO: 387200 - DNA, 3058 bp, Homo sapiens
ggaatagtacgaggcggtacgcggtttgttatttcagtcacgagggatcagggtccagctggccccagtggctgctcatcctggtgctggaaggcctgtggctgggcttgacattcctcctgccagtccctgggtgccctactggttatcttggtcctgggggcattggagattttggcaagtatccaaattgcactggaggagctgcaggctacatcgaccgcctgctgctgggagacgatcacctttaccagcacccatcttctgctgtactttaccacaccgaggtggcctatgaccccgagggcatcctgggcaccatcaactccatcgtgatggcctttttaggagttcaggcaggaaaaatactattgtattacaaggctcggaccaaagacatcctgattcgattcactgcttggtgttgtattcttgggctcatttctgttgctctgacgaaggtttctgaaaatgaaggctttattccagtaaacaaaaatctctggtccctttcgtatgtcactacgctcagttcttttgccttcttcatcctgctggtcctgtacccagttgtggatgtgaaggggctgtggacaggaaccccattcttttatccaggaatgaattccattctggtatacgtcggccacgaggtgtttgagaactacttcccctttcagtggaagctgaaggacaaccagtcccacaaggagcacctgactcagaacatcgtcgccactgccctctgggtgctcattgcctacatcctctatagaaagaagattttttggaaaatctgatggctcccactgagatgtgctgctggaagactctagtaggcctgcagggaggactgaagcagcctttgttaaagggaagcattcattaggaaattgactggctgcgtgtttacagactctgggggaagacactgatgtcctcaaactggttaactgtgacacggctcgccagaactctgcctgtctatttgtgacttacagatttgaaatgtaattgtcttttttcctccatcttctgtggaaatggatgtctttggaacttcattccgaggagataagctttaactttccaaaagggaattgccatgggtgtttttcttctgtggtgagtgaaacaatctgaggtctggttcttgctgaccttgttgccctgcaaacttcctttccacgtgtacgcgcacaccaacacgaaatgccatcactcctactgcggctgctatgaagcttactggttgtgatgtgttataatttagtctgtttttttgattgaatgcagtttaatgtttccagaaagccaaagtaattttcttttcagatatgcaaggctttggtgggtccaaaaaatgtctatcacaagccattttttccttttcctctctcgaaaagttaaaatatctatgtgttattcccaaaccctcttacctatgtatctgcctgtctgtccatcatcttccttcctccctatctctgtgtatctggatggcagccgctgcccaggggagtggctgtggggagggcaggtactgtctttgcctgtgggtccagctgagccatccctgctgggtgatgctgggcaagacccttggcccgtctgggccttggcttcctcacttgtgaaatgagcgggaagatgactctcagttccttccacctcttagacatggtgaggtaacagacatcaaaagcttttctgaaatcttcagaagaaatagttccattacagaaaactcttcaaaataaatagtagtgaaaacttttaaaaactctcattggagtaagtcttttcaagatgatcctccacaatggaggcagcgttcctacttgtcatcacacagctgaagacattgtttcttaggtgtgaaatcggggacaaaggacaaacagagacacacggcattgttcatgggaggcatcgtcaccctcctgggtgttctgtgggaatttcctgtgtgaggaaaacgtggccacagggttgtgctgtacccacccttccccggcgagatggccctcggcctgtgccgctgcttccaccctcgccactccatggcagcttttggtctgtttccggctctgccctctgccctgaactctcatccggcttgtacctgcctgctggacccctccacctggaggccagcccatgtctcaggcccagccctagcctcttctcctcaaattctaagtgttttctctttaggtttccctggctttgtgaatggatcatgtgtctctaggtataaacctgacatcatctttccacccggcttacctccaccagatctccccagttctgtctccatcttctacctgcagctgctctgttctcatggtcactgctgcatcactgagtctggacccttgttatcattttcaaactggcctccttccctcgttccccacttcttaaagtcacctgtccattgccaccagattaagctttctccagccagatcacctctctctgagaaacctccattgacatggaaacaccattgtctggcacacatactcacatactcaccttcccgtcttgatccccacacatctttccagcctcccctcccactccactccctgctccctcctccacctccccatcctcttgtctcccctcccctctgaatccagcccagcggggcttctcctgcctccatcacatcacagaagtacctcctgcttctggttttaattagagccttccccgattacattttcctctgaattttttcctatctacatttgatctgtcatgtttaaaccccctacttctaagggaacttctctaatctcttatcctcatccccaaatagtgttttcttcctctgggttcttataatgttggtatcaatctcacagcatttagtgcttcctgcctggtgtgacagttacctgtgtgcatgtgcaatttctaatttcccacgctagactgtgagcttcctaaggcaagaatcatgccttgttggtttctgtattcctcatggtgccaaacacagtgccttctacattgcaggcgctgaataaacatttttaaagcaaaa

SEQ ID NO: 387201 - DNA, 4435 bp, Homo sapiens
  misc_feature (103)..(103): n is a, c, g, or t
agcgggggtgggcagggcgctggccgcgctgctgctggccgcgtccgtgctgagcgccgcgctgctggcccccggcggctcttcggggcgcgatgcccaggcngcggccgccacgagacttagacaaaaaaagacatgcagagctgaagatggatcaggctttgctactcatccataatgaacttctctggaccaacttgaccgtctactggaaatctgaatgctgttatcactgcttgtttcaggttctggtaaacgttcctcagagtccaaaagcagggaagcctagtgctgcagctgcctctgtcagcacccagcacggatctatcctgcagctgaacgacaccttggaagagaaagaagtttgtaggttggaatacagatttggagaatttggaaactattctctcttggtaaagaacatccataatggagttagtgaaattgcctgtgacctggctgtgaacgaggatccagttgatagtaaccttcctgtgagcattgcattccttattggtcttgctgtcatcattgtgatatcctttctgaggctcttgttgagtttggatgactttaacaattggatttctaaagccataagttctcgagaaactgatcgcctcatcaattctgagctgggatctcccagcaggacagaccctctcgatggtgatgttcagccagcaacgtggcgtctatctgccctgccgccccgcctccgcagcgtggacaccttcagggggattgctcttatactcatggtctttgtcaattatggaggaggaaaatattggtacttcaaacatgcaagttggaatgggctgacagtggctgacctcgtgttcccgtggtttgtatttattatgggatcttccatttttctatcgatgacttctatactgcaacgggggtgttcaaaattcagattgctggggaagattgcatggaggagtttcctgttaatctgcataggaattatcattgtgaatcccaattattgccttggtccattgtcttgggacaaggtgcgcattcctggtgtgctgcagcgattgggagtgacatactttgtggttgctgtgttggagctcctctttgctaaacctgtgcctgaacattgtgcctcggagaggagctgcctttctcttcgagacatcacgtccagctggccccagtggctgctcatcctggtgctggaaggcctgtggctgggcttgacattcctcctgccagtccctgggtgccctactggttatcttggtcctgggggcattggagattttggcaagtatccaaattgcactggaggagctgcaggctacatcgaccgcctgctgctgggagacgatcacctttaccagcacccatcttctgctgtactttaccacaccgaggtggcctatgaccccgagggcatcctgggcaccatcaactccatcgtgatggcctttttaggagttcaggcaggaaaaatactattgtattacaaggctcggaccaaagacatcctgattcgattcactgcttggtgttgtattcttgggctcatttctgttgctctgacgaaggtttctgaaaatgaaggctttattccagtaaacaaaaatctctggtccctttcgtatgtcactacgctcagttcttttgccttcttcatcctgctggtcctgtacccagttgtggatgtgaaggggctgtggacaggaaccccattcttttatccaggaatgaattccattctggtatacgtcggccacgaggtgtttgagaactacttcccctttcagtggaagctgaaggacaaccagtcccacaaggagcacctgactcagaacatcgtcgccactgccctctgggtgctcattgcctacatcctctatagaaagaagattttttggaaaatctgatggctcccactgagatgtgctgctggaagactctagtaggcctgcagggaggactgaagcagcctttgttaaagggaagcattcattaggaaattgactggctgcgtgtttacagactctgggggaagacactgatgtcctcaaactggttaactgtgacacggctcgccagaactctgcctgtctatttgtgacttacagatttgaaatgtaattgtcttttttcctccatcttctgtggaaatggatgtctttggaacttcattccgaggagataagctttaactttccaaaagggaattgccatgggtgtttttcttctgtggtgagtgaaacaatctgaggtctggttcttgctgaccttgttgccctgcaaacttcctttccacgtgtacgcgcacaccaacacgaaatgccatcactcctactgcggctgctatgaagcttactggttgtgatgtgttataatttagtctgtttttttgattgaatgcagtttaatgtttccagaaagccaaagtaattttcttttcagatatgcaaggctttggtgggtccaaaaaatgtctatcacaagccattttttccttttcctctctcgaaaagttaaaatatctatgtgttattcccaaaccctcttacctatgtatctgcctgtctgtccatcatcttccttcctccctatctctgtgtatctggatggcagccgctgcccaggggagtggctgtggggagggcaggtactgtctttgcctgtgggtccagctgagccatccctgctgggtgatgctgggcaagacccttggcccgtctgggccttggcttcctcacttgtgaaatgagcgggaagatgactctcagttccttccacctcttagacatggtgaggtaacagacatcaaaagcttttctgaaatcttcagaagaaatagttccattacagaaaactcttcaaaataaatagtagtgaaaacttttaaaaactctcattggagtaagtcttttcaagatgatcctccacaatggaggcagcgttcctacttgtcatcacacagctgaagacattgtttcttaggtgtgaaatcggggacaaaggacaaacagagacacacggcattgttcatgggaggcatcgtcaccctcctgggtgttctgtgggaatttcctgtgtgaggaaaacgtggccacagggttgtgctgtacccacccttccccggcgagatggccctcggcctgtgccgctgcttccaccctcgccactccatggcagcttttggtctgtttccggctctgccctctgccctgaactctcatccggcttgtacctgcctgctggacccctccacctggaggccagcccatgtctcaggcccagccctagcctcttctcctcaaattctaagtgttttctctttaggtttccctggctttgtgaatggatcatgtgtctctaggtataaacctgacatcatctttccacccggcttacctccaccagatctccccagttctgtctccatcttctacctgcagctgctctgttctcatggtcactgctgcatcactgagtctggacccttgttatcattttcaaactggcctccttccctcgttccccacttcttaaagtcacctgtccattgccaccagattaagctttctccagccagatcacctctctctgagaaacctccattgacatggaaacaccattgtctggcacacatactcacatactcaccttcccgtcttgatccccacacatctttccagcctcccctcccactccactccctgctccctcctccacctccccatcctcttgtctcccctcccctctgaatccagcccagcggggcttctcctgcctccatcacatcacagaagtacctcctgcttctggttttaattagagccttccccgattacattttcctctgaattttttcctatctacatttgatctgtcatgtttaaaccccctacttctaagggaacttctctaatctcttatcctcatccccaaatagtgttttcttcctctgggttcttataatgttggtatcaatctcacagcatttagtgcttcctgcctggtgtgacagttacctgtgtgcatgtgcaatttctaatttcccacgctagactgtgagcttcctaaggcaagaatcatgccttgttggtttctgtattcctcatggtgccaaacacagtgccttctacattgcaggcgctgaataaacatttttaaagcaaaaaaaaaaaacaaaaacaacaaaacacaaaaaccaaccaaacaaacacacacacaaaaaaaaacaaaaaaaaaaaaaaacacaaaaaaacaaaaacaagagaaaaacgacaaacaaaaaaaacaaacaaaacagcgagacgagtggcgggcgcgtgcgctagcgagttcttcgccgtcgatggagacgccgtacaccaccccccgccaccctgccctgctactgcggtgccgacagcggcgcgcgccaagatcactcgcagacctgacctcg

SEQ ID NO: 387202 - DNA, 4789 bp, Homo sapiens
  misc_feature (103)..(103): n is a, c, g, or t
agcgggggtgggcagggcgctggccgcgctgctgctggccgcgtccgtgctgagcgccgcgctgctggcccccggcggctcttcggggcgcgatgcccaggcngcggccgccacgagacttagacaaaaaaagacatgcagagctgaagatggatcaggctttgctactcatccataatgaacttctctggaccaacttgaccgtctactggaaatctgaatgctgttatcactgcttgtttcaggttctggtaaacgttcctcagagtccaaaagcagggaagcctagtgctgcagctgcctctgtcagcacccagcacggatctatcctgcagctgaacgacaccttggaagagaaagaagtttgtaggttggaatacagatttggagaatttggaaactattctctcttggtaaagaacatccataatggagttagtgaaattgcctgtgacctggctgtgaacgaggatccagttgatagtaaccttcctgtgagcattgcattccttattggtcttgctgtcatcattgtgatatcctttctgaggctcttgttgagtttggatgactttaacaattggatttctaaagccataagttctcgagaaactgatcgcctcatcaattctgagctgggatctcccagcaggacagaccctctcgatggtgatgttcagccagcaacgtggcgtctatctgccctgccgccccgcctccgcagcgtggacaccttcagggggattgctcttatactcatggtctttgtcaattatggaggaggaaaatattggtacttcaaacatgcaagttggaatgggctgacagtggctgacctcgtgttcccgtggtttgtatttattatgggatcttccatttttctatcgatgacttctatactgcaacgggggtgttcaaaattcagattgctggggaagattgcatggaggagtttcctgttaatctgcataggaattatcattgtgaatcccaattattgccttggtccattgtcttgggacaaggtgcgcattcctggtgtgctgcagcgattgggagtgacatactttgtggttgctgtgttggagctcctctttgctaaacctgtgcctgaacattgtgcctcggagaggagctgcctttctcttcgagacatcacgtccagctggccccagtggctgctcatcctggtgctggaaggcctgtggctgggcttgacattcctcctgccagtccctgggtgccctactggttatcttggtcctgggggcattggagattttggcaagtatccaaattgcactggaggagctgcaggctacatcgaccgcctgctgctgggagacgatcacctttaccagcacccatcttctgctgtactttaccacaccgaggtggcctatgaccccgagggcatcctgggcaccatcaactccatcgtgatggcctttttaggagttcaggcaggaaaaatactattgtattacaaggctcggaccaaagacatcctgattcgattcactgcttggtgttgtattcttgggctcatttctgttgctctgacgaaggtttctgaaaatgaaggctttattccagtaaacaaaaatctctggtccctttcgtatgtcactacgctcagttcttttgccttcttcatcctgctggtcctgtacccagttgtggatgtgaaggggctgtggacaggaaccccattcttttatccaggaatgaattccattctggtatacgtcggccacgaggtgtttgagaactacttcccctttcagtggaagctgaaggacaaccagtcccacaaggagcacctgactcagaacatcgtcgccactgccctctgggtgctcattgcctacatcctctatagaaagaagattttttggaaaatctgatggctcccactgagatgtgctgctggaagactctagtaggcctgcagggaggactgaagcagcctttgttaaagggaagcattcattaggaaattgactggctgcgtgtttacagactctgggggaagacactgatgtcctcaaactggttaactgtgacacggctcgccagaactctgcctgtctatttgtgacttacagatttgaaatgtaattgtcttttttcctccatcttctgtggaaatggatgtctttggaacttcattccgaggagataagctttaactttccaaaagggaattgccatgggtgtttttcttctgtggtgagtgaaacaatctgaggtctggttcttgctgaccttgttgccctgcaaacttcctttccacgtgtacgcgcacaccaacacgaaatgccatcactcctactgcggctgctatgaagcttactggttgtgatgtgttataatttagtctgtttttttgattgaatgcagtttaatgtttccagaaagccaaagtaattttcttttcagatatgcaaggctttggtgggtccaaaaaatgtctatcacaagccattttttccttttcctctctcgaaaagttaaaatatctatgtgttattcccaaaccctcttacctatgtatctgcctgtctgtccatcatcttccttcctccctatctctgtgtatctggatggcagccgctgcccaggggagtggctgtggggagggcaggtactgtctttgcctgtgggtccagctgagccatccctgctgggtgatgctgggcaagacccttggcccgtctgggccttggcttcctcacttgtgaaatgagcgggaagatgactctcagttccttccacctcttagacatggtgaggtaacagacatcaaaagcttttctgaaatcttcagaagaaatagttccattacagaaaactcttcaaaataaatagtagtgaaaacttttaaaaactctcattggagtaagtcttttcaagatgatcctccacaatggaggcagcgttcctacttgtcatcacacagctgaagacattgtttcttaggtgtgaaatcggggacaaaggacaaacagagacacacggcattgttcatgggaggcatcgtcaccctcctgggtgttctgtgggaatttcctgtgtgaggaaaacgtggccacagggttgtgctgtacccacccttccccggcgagatggccctcggcctgtgccgctgcttccaccctcgccactccatggcagcttttggtctgtttccggctctgccctctgccctgaactctcatccggcttgtacctgcctgctggacccctccacctggaggccagcccatgtctcaggcccagccctagcctcttctcctcaaattctaagtgttttctctttaggtttccctggctttgtgaatggatcatgtgtctctaggtataaacctgacatcatctttccacccggcttacctccaccagatctccccagttctgtctccatcttctacctgcagctgctctgttctcatggtcactgctgcatcactgagtctggacccttgttatcattttcaaactggcctccttccctcgttccccacttcttaaagtcacctgtccattgccaccagattaagctttctccagccagatcacctctctctgagaaacctccattgacatggaaacaccattgtctggcacacatactcacatactcaccttcccgtcttgatccccacacatctttccagcctcccctcccactccactccctgctccctcctccacctccccatcctcttgtctcccctcccctctgaatccagcccagcggggcttctcctgcctccatcacatcacagaagtacctcctgcttctggttttaattagagccttccccgattacattttcctctgaattttttcctatctacatttgatctgtcatgtttaaaccccctacttctaagggaacttctctaatctcttatcctcatccccaaatagtgttttcttcctctgggttcttataatgttggtatcaatctcacagcatttagtgcttcctgcctggtgtgacagttacctgtgtgcatgtgcaatttctaatttcccacgctagactgtgagcttcctaaggcaagaatcatgccttgttggtttctgtattcctcatggtgccaaacacagtgccttctacattgcaggcgctgaataaacatttttaaagcaaaatgatgtggatttttaaaataaatatttaagtgctggtaagatgagcatgtatccggggtgcccatgaaatgttcttggggccgtgtggggacagtcgtcattcctcctcctgccacccttttctttcagtgagtcactgtggatggtcccagctgtgtcatcccaaagttcagcagggaaagctgagctgggcctctccaggtgagttttctagaagcatttctcaaactgtgggttacatcaacttgggtgtcttgagctgtaaggaaggaactccggagtcagctgggctacaggggagcttctctaagtcctgcgggaggccagacccagcctgagcttgctgttagctagcggaggcagctgctggtggcccaggtgctcgacaccaggcatcccctctcctcccacgaagggtgtgccataatccccttcaacaggaaatgcttcccagaagcctctcagcagcctcccctcctgtcctatcagctagaagcgcctgcccaaacccctcctgctcctaaatgtctgtctctggtgttaaccagaggctgctcttcccaggctgctggatggctaccttgcaggctgtcacccttaacaagaaataaagtgtcctttgca

SEQ ID NO: 387203 - DNA, 3305 bp, Homo sapiens
  misc_feature (103)..(103): n is a, c, g, or t
agcgggggtgggcagggcgctggccgcgctgctgctggccgcgtccgtgctgagcgccgcgctgctggcccccggcggctcttcggggcgcgatgcccaggcngcggccgccacgagacttagacaaaaaaagacatgcagagctgaagatggatcaggctttgctactcatccataatgaacttctctggaccaacttgaccgtctactggaaatctgaatgctgttatcactgcttgtttcaggttctggtaaacgttcctcagagtccaaaagcagggaagcctagtgctgcagctgcctctgtcagcacccagcacggatctatcctgcagctgaacgacaccttggaagagaaagaagtttgtaggttggaatacagatttggagaatttggaaactattctctcttggtaaagaacatccataatggagttagtgaaattgcctgtgacctggctgtgaacgaggatccagttgatagtaaccttcctgtgagcattgcattccttattggtcttgctgtcatcattgtgatatcctttctgaggctcttgttgagtttggatgactttaacaattggatttctaaagccataagttctcgagaaactgatcgcctcatcaattctgagctgggatctcccagcaggacagaccctctcgatggtgatgttcagccagcaacgtggcgtctatctgccctgccgccccgcctccgcagcgtggacaccttcagggggattgctcttatactcatggtctttgtcaattatggaggaggaaaatattggtacttcaaacatgcaagttggaatgggctgacagtggctgacctcgtgttcccgtggtttgtatttattatgggatcttccatttttctatcgatgacttctatactgcaacgggggtgttcaaaattcagattgctggggaagattgcatggaggagtttcctgttaatctgcataggaattatcattgtgaatcccaattattgccttggtccattgtcttgggacaaggtgcgcattcctggtgtgctgcagcgattgggagtgacatactttgtggttgctgtgttggagctcctctttgctaaacctgtgcctgaacattgtgcctcggagaggagctgcctttctcttcgagacatcacgtccagctggccccagtggctgctcatcctggtgctggaaggcctgtggctgggcttgacattcctcctgccagtccctgggtgccctactggttatcttggtcctgggggcattggagattttggcaagtatccaaattgcactggaggagctgcaggctacatcgaccgcctgctgctgggagacgatcacctttaccagcacccatcttctgctgtactttaccacaccgaggtggcctatgaccccgagggcatcctgggcaccatcaactccatcgtgatggcctttttaggagttcaggcaggaaaaatactattgtattacaaggctcggaccaaagacatcctgattcgattcactgcttggtgttgtattcttgggctcatttctgttgctctgacgaaggtttctgaaaatgaaggctttattccagtaaacaaaaatctctggtccctttcgtatgtcactacgctcagttcttttgccttcttcatcctgctggtcctgtacccagttgtggatgtgaaggggctgtggacaggaaccccattcttttatccaggaatgaattccattctggtatacgtcggccacgaggtgtttgagaactacttcccctttcagtggaagctgaaggacaaccagtcccacaaggagcacctgactcagaacatcgtcgccactgccctctgggtgctcattgcctacatcctctatagaaagaagattttttggaaaatctgatggctcccactgagatgtgctgctggaagactctagtaggcctgcagggaggactgaagcagcctttgttaaagggaagcattcattaggaaattgactggctgcgtgtttacagactctgggggaagacactgatgtcctcaaactggttaactgtgacacggctcgccagaactctgcctgtctatttgtgacttacagatttgaaatgtaattgtcttttttcctccatcttctgtggaaatggatgtctttggaacttcattccgaggagataagctttaactttccaaaagggaattgccatgggtgtttttcttctgtggtgagtgaaacaatctgaggtctggttcttgctgaccttgttgccctgcaaacttcctttccacgtgtacgcgcacaccaacacgaaatgccatcactcctactgcggctgctatgaagcttactggttgtgatgtgttataatttagtctgtttttttgattgaatgcagtttaatgtttccagaaagccaatagcctcttctcctcaaattctaagtgttttctctttaggtttccctggctttgtgaatggatcatgtgtctctaggtataaacctgacatcatctttccacccggcttacctccaccagatctccccagttctgtctccatcttctacctgcagctgctctgttctcatggtcactgctgcatcactgagtctggacccttgttatcattttcaaactggcctccttccctcgttccccacttcttaaagtcacctgtccattgccaccagattaagctttctccagccagatcacctctctctgagaaacctccattgacatggaaacaccattgtctggcacacatactcacatactcaccttcccgtcttgatccccacacatctttccagcctcccctcccactccactccctgctccctcctccacctccccatcctcttgtctcccctcccctctgaatccagcccagcggggcttctcctgcctccatcacatcacagaagtacctcctgcttctggttttaattagagccttccccgattacattttcctctgaattttttcctatctacatttgatctgtcatgtttaaaccccctacttctaagggaacttctctaatctcttatcctcatccccaaatagtgttttcttcctctgggttcttataatgttggtatcaatctcacagcatttagtgcttcctgcctggtgtgacagttacctgtgtgcatgtgcaatttctaatttcccacgctagactgtgagcttcctaaggcaagaatcatgccttgttggtttctgtattcctcatggtgccaaacacagtgccttctacattgcaggcgctgaataaacatttttaaagcaaaa

SEQ ID NO: 387204 - DNA, 3586 bp, Homo sapiens
  misc_feature (103)..(103): n is a, c, g, or t
agcgggggtgggcagggcgctggccgcgctgctgctggccgcgtccgtgctgagcgccgcgctgctggcccccggcggctcttcggggcgcgatgcccaggcngcggccgccacgagacttagacaaaaaaagacatgcagagctgaagatggatcaggctttgctactcatccataatgaacttctctggaccaacttgaccgtctactggaaatctgaatgctgttatcactgcttgtttcaggttctggtaaacgttcctcagagtccaaaagcagggaagcctagtgctgcagctgcctctgtcagcacccagcacggatctatcctgcagctgaacgacaccttggaagagaaagaagtttgtaggttggaatacagatttggagaatttggaaactattctctcttggtaaagaacatccataatggagttagtgaaattgcctgtgacctggctgtgaacgaggatccagttgatagtaaccttcctgtgagcattgcattccttattggtcttgctgtcatcattgtgatatcctttctgaggctcttgttgagtttggatgactttaacaattggatttctaaagccataagttctcgagaaactgatcgcctcatcaattctgagctgggatctcccagcaggacagaccctctcgatggtgatgttcagccagcaacgtggcgtctatctgccctgccgccccgcctccgcagcgtggacaccttcagggggattgctcttatactcatggtctttgtcaattatggaggaggaaaatattggtacttcaaacatgcaagttggaatgggctgacagtggctgacctcgtgttcccgtggtttgtatttattatgggatcttccatttttctatcgatgacttctatactgcaacgggggtgttcaaaattcagattgctggggaagattgcatggaggagtttcctgttaatctgcataggaattatcattgtgaatcccaattattgccttggtccattgtcttgggacaaggtgcgcattcctggtgtgctgcagcgattgggagtgacatactttgtggttgctgtgttggagctcctctttgctaaacctgtgcctgaacattgtgcctcggagaggagctgcctttctcttcgagacatcacgtccagctggccccagtggctgctcatcctggtgctggaaggcctgtggctgggcttgacattcctcctgccagtccctgggtgccctactggttatcttggtcctgggggcattggagattttggcaagtatccaaattgcactggaggagctgcaggctacatcgaccgcctgctgctgggagacgatcacctttaccagcacccatcttctgctgtactttaccacaccgaggtggcctatgaccccgagggcatcctgggcaccatcaactccatcgtgatggcctttttaggagttcaggcaggaaaaatactattgtattacaaggctcggaccaaagacatcctgattcgattcactgcttggtgttgtattcttgggctcatttctgttgctctgacgaaggtttctgaaaatgaaggctttattccagtaaacaaaaatctctggtccctttcgtatgtcactacgctcagttcttttgccttcttcatcctgctggtcctgtacccagttgtggatgtgaaggggctgtggacaggaaccccattcttttatccaggaatgaattccattctggtatacgtcggccacgaggtgtttgagaactacttcccctttcagtggaagctgaaggacaaccagtcccacaaggagcacctgactcagaacatcgtcgccactgccctctgggtgctcattgcctacatcctctatagaaagaagattttttggaaaatctgatggctcccactgagatgtgctgctggaagactctagtaggcctgcagggaggactgaagcagcctttgttaaagggaagcattcattaggaaattgactggctgcgtgtttacagactctgggggaagacactgatgtcctcaaactggttaactgtgacacggctcgccagaactctgcctgtctatttgtgacttacagatttgaaatgtaattgtcttttttcctccatcttctgtggaaatggatgtctttggaacttcattccgaggagataagctttaactttccaaaagggaattgccatgggtgtttttcttctgtggtgagtgaaacaatctgaggtctggttcttgctgaccttgttgccctgcaaacttcctttccacgtgtacgcgcacaccaacacgaaatgccatcactcctactgcggctgctatgaagcttactggttgtgatgtgttataatttagtctgtttttttgattgaatgcagtttaatgtttccagaaagccaaagtaattttcttttcagatatgcaaggctttggtgggtccaaaaaatgtctatcacaagccattttttccttttcctctctcgaaaagttaaaatatctatgtgttattcccaaaccctcttacctatgtatctgcctgtctgtccatcatcttccttcctccctatctctgtgtatctggatggcagccgctgcccaggggagtggctgtggggagggcaggtactgtctttgcctgtgggtccagctgagccatccctgctgggtgatgctgggcaagacccttggcccgtctgggccttggcttcctcacttgtgaaatgagcgggaagatgactctcagttccttccacctcttagacatggtgaggtaacagacatcaaaagcttttctgaaatcttcagaagaaatagttccattacagaaaactcttcaaaataaatagtagtgaaaacttttaaaaactctcattggagtaagtcttttcaagatgatcctccacaatggaggcagcgttcctacttgtcatcacacagctgaagacattgtttcttaggtgtgaaatcggggacaaaggacaaacagagacacacggcattgttcatgggaggcatcgtcaccctcctgggtgttctgtgggaatttcctgtgtgaggaaaacgtggccacagggttgtgctgtacccacccttccccggcgagatggccctcggcctgtgccgctgcttccaccctcgccactccatggcagcttttggtctgtttccggctctgccctctgccctgaactctcatccggcttgtacctgcctgctggacccctccacctggaggccagcccatgtctcaggcccagccctagcctcttctcctcaaattctaagtgttttctctttaggtttccctggctttgtgaatggatcatgtgtctctaggtataaacctgacatcatctttccacccggcttacctccaccagatctccccgggatacagaccaaaagctgccatggagtggcgagggtggaagcagcggcacaggccgagggccatctcgccggggaagggtgggtacagcacaaccctgtggccacgttttcctcacacaggaaattcccacagaacacccaggagggtgacgatgcctccccgggatacag

SEQ ID NO: 387205 - DNA, 1009 bp, Homo sapiens
tcttggagggcgaggacttcagggaggagttcttccgaaagaccgtgttgctcctgaactctcatccggcttgtacctgcctgctggacccctccacctggaggccagcccatgtctcaggcccagccctagcctcttctcctcaaattctaagtgttttctctttaggtttccctggctttgtgaatggatcatgtgtctctaggtataaacctgacatcatctttccacccggcttacctccaccagatctccccagttctgtctccatcttctacctgcagctgctctgttctcatggtcactgctgcatcactgagtctggacccttgttatcattttcaaactggcctccttccctcgttccccacttcttaaagtcacctgtccattgccaccagattaagctttctccagccagatcacctctctctgagaaacctccattgacatggaaacaccattgtctggcacacatactcacatactcaccttcccgtcttgatccccacacatctttccagcctcccctcccactccactccctgctccctcctccacctccccatcctcttgtctcccctcccctctgaatccagcccagcggggcttctcctgcctccatcacatcacagaagtacctcctgcttctggttttaattagagccttccccgattacattttcctctgaattttttcctatctacatttgatctgtcatgtttaaaccccctacttctaagggaacttctctaatctcttatcctcatccccaaatagtgttttcttcctctgggttcttataatgttggtatcaatctcacagcatttagtgcttcctgcctggtgtgacagttacctgtgtgcatgtgcaatttctaatttcccacgctagactgtgagcttcctaaggcaagaatcatgccttgttggtttctgtattcctcatggtgccaaacacagtgccttctacattgcaggcgctgaataaacatttttaaagcaaaa

SEQ ID NO: 387206 - DNA, 1171 bp, Homo sapiens
gatacttcatctgtgatacagtagggtgattacagtctccaccaaatgctaaactctggggtcttacgcctttataactccatgggccccagcaaaggttcaggctcaaaacaggttgctgcttgcggggctgtctccacggccagtgacagcatacacagtgatggtataatcaactccaggtttaaggccgctgatggtagctgtagacttgctcccaggcacagatcacccttcgtgcacacacacacagatcacccttcgtgccagcccatgtctcaggcccagccctagcctcttctcctcaaattctaagtgttttctctttaggtttccctggctttgtgaatggatcatgtgtctctaggtataaacctgacatcatctttccacccggcttacctccaccagatctccccagttctgtctccatcttctacctgcagctgctctgttctcatggtcactgctgcatcactgagtctggacccttgttatcattttcaaactggcctccttccctcgttccccacttcttaaagtcacctgtccattgccaccagattaagctttctccagccagatcacctctctctgagaaacctccattgacatggaaacaccattgtctggcacacatactcacatactcaccttcccgtcttgatccccacacatctttccagcctcccctcccactccactccctgctccctcctccacctccccatcctcttgtctcccctcccctctgaatccagcccagcggggcttctcctgcctccatcacatcacagaagtacctcctgcttctggttttaattagagccttccccgattacattttcctctgaattttttcctatctacatttgatctgtcatgtttaaaccccctacttctaagggaacttctctaatctcttatcctcatccccaaatagtgttttcttcctctgggttcttataatgttggtatcaatctcacagcatttagtgcttcctgcctggtgtgacagttacctgtgtgcatgtgcaatttctaatttcccacgctagactgtgagcttcctaaggcaagaatcatgccttgttggtttctgtattcctcatggtgccaaacacagtgccttctacattgcaggcgctgaataaacatttttaaagcaaaa

SEQ ID NO: 387207 - DNA, 3124 bp, Homo sapiens
  misc_feature (103)..(103): n is a, c, g, or t
agcgggggtgggcagggcgctggccgcgctgctgctggccgcgtccgtgctgagcgccgcgctgctggcccccggcggctcttcggggcgcgatgcccaggcngcggccgccacgagacttagacaaaaaaagacatgcagagctgaagatggatcaggctttgctactcatccataatgaacttctctggaccaacttgaccgtctactggaaatctgaatgctgttatcactgcttgtttcaggttctggtaaacgttcctcagagtccaaaagcagggaagcctagtgctgcagctgcctctgtcagcacccagcacggatctatcctgcagctgaacgacaccttggaagagaaagaagtttgtaggttggaatacagatttggagaatttggaaactattctctcttggtaaagaacatccataatggagttagtgaaattgcctgtgacctggctgtgaacgaggatccagttgatagtaaccttcctgtgagcattgcattccttattggtcttgctgtcatcattgtgatatcctttctgaggctcttgttgagtttggatgactttaacaattggatttctaaagccataagttctcgagaaactgatcgcctcatcaattctgagctgggatctcccagcaggacagaccctctcgatggtgatgttcagccagcaacgtggcgtctatctgccctgccgccccgcctccgcagcgtggacaccttcagggggattgctcttatactcatggtctttgtcaattatggaggaggaaaatattggtacttcaaacatgcaagttggaatgggctgacagtggctgacctcgtgttcccgtggtttgtatttattatgggatcttccatttttctatcgatgacttctatactgcaacgggggtgttcaaaattcagattgctggggaagattgcatggaggagtttcctgttaatctgcataggaattatcattgtgaatcccaattattgccttggtccattgtcttgggacaaggtgcgcattcctggtgtgctgcagcgattgggagtgacatactttgtggttgctgtgttggagctcctctttgctaaacctgtgcctgaacattgtgcctcggagaggagctgcctttctcttcgagacatcacgtccagctggccccagtggctgctcatcctggtgctggaaggcctgtggctgggcttgacattcctcctgccagtccctgggtgccctactggttatcttggtcctgggggcattggagattttggcaagtatccaaattgcactggaggagctgcaggctacatcgaccgcctgctgctgggagacgatcacctttaccagcacccatcttctgctgtactttaccacaccgaggtggcctatgaccccgagggcatcctgggcaccatcaactccatcgtgatggcctttttaggagttcaggcaggaaaaatactattgtattacaaggctcggaccaaagacatcctgattcgattcactgcttggtgttgtattcttgggctcatttctgttgctctgacgaaggtttctgaaaatgaaggctttattccagtaaacaaaaatctctggtccctttcgtatgtcactacgctcagttcttttgccttcttcatcctgctggtcctgtacccagttgtggatgtgaaggggctgtggacaggaaccccattcttttatccaggaatgaattccattctggtatacgtcggccacgaggtgtttgagaactacttcccctttcagtggaagctgaaggacaaccagtcccacaaggagcacctgactcagaacatcgtcgccactgccctctgggtgctcattgcctacatcctctatagaaagaagattttttggaaaatctgatggctcccactgagatgtgctgctggaagactctagtaggcctgcagggaggactgaagcagcctttgttaaagggaagcattcattaggaaattgactggctgcgtgtttacagactctgggggaagacactgatgtcctcaaactggttaactgtgacacggctcgccagaactctgcctgtctatttgtgacttacagatttgaaatgtaattgtcttttttcctccatcttctgtggaaatggatgtctttggaacttcattccgaggagataagctttaactttccaaaagggaattgccatgggtgtttttcttctgtggtgagtgaaacaatctgaggtctggttcttgctgaccttgttgccctgcaaacttcctttccacgtgtacgcgcacaccaacacgaaatgccatcactcctactgcggctgctatgaagcttactggttgtgatgtgttataatttagtctgtttttttgattgaatgcagtttaatgtttccagaaagccaaagtaattttcttttcagatatgcaaggctttggtgggtccaaaaaatgtctatcacaagccattttttccttttcctctctcgaaaagttaaaatatctatgtgttattcccaaaccctcttacctatgtatctgcctgtctgtccatcatcttccttcctccctatctctgtgtatctggatggcagccgctgcccaggggagtggctgtggggagggcaggtactgtctttgcctgtgggtccagctgagccatccctgctgggtgatgctgggcaagacccttggcccgtctgggccttggcttcctcacttgtgaaatgagcgggaagatgactctcagttccttccacctcttagacatggtgaggtaacagacatcaaaagcttttctgaaatcttcagaagaaatagttccattacagaaaactcttcaaaataaatagtagtgaaaacttttaaaaactctcattggagtaagtcttttcaagatgatcctccacaatggaggcagcgttcctacttgtcatcacacagctgaagacattgtttcttaggtgtgaaatcggggacaaaggacaaacagagacacacggcattgttcatgggaggcatcgtcaccctcctctgggctgtccacctcctctgtgctgtccacctcctctgtgctgtccagtgctgtccacctcctctgtgctg

SEQ ID NO: 387208 - DNA, 1558 bp, Homo sapiens
acttattacggtctacatgagcggccgtacttagctcgcaccatcgctctactactatgaacccctcctccgcataccctaccccctggtcaacctcaacctccccatcctcttgtctcccctcccctctgaatccagcccagcggggcttctcctgcctccatcacatcacagaagtacctcctgcttctggttttaattagagccttccccgattacattttcctctgaattttttcctatctacatttgatctgtcatgtttaaaccccctacttctaagggaacttctctaatctcttatcctcatccccaaatagtgttttcttcctctgggttcttataatgttggtatcaatctcacagcatttagtgcttcctgcctggtgtgacagttacctgtgtgcatgtgcaatttctaatttcccacgctagactgtgagcttcctaaggcaagaatcatgccttgttggtttctgtattcctcatggtgccaaacacagtgccttctacattgcaggcgctgaataaacatttttaaagcaaaatgatgtggatttttaaaataaatatttaagtgctggtaagatgagcatgtatccggggtgcccatgaaatgttcttggggccgtgtggggacagtcgtcattcctcctcctgccacccttttctttcagtgagtcactgtggatggtcccagctgtgtcatcccaaagttcagcagggaaagctgagctgggcctctccaggtgagttttctagaagcatttctcaaactgtgggttacatcaacttgggtgtcttgagctgtaaggaaggaactccggagtcagctgggctacaggggagcttctctaagtcctgcgggaggccagacccagcctgagcttgctgttagctagcggaggcagctgctggtggcccaggtgctcgacaccaggcatcccctctcctcccacgaagggtgtgccataatccccttcaacaggaaatgcttcccagaagcctctcagcagcctcccctcctgtcctatcagctagaagcgcctcgcttgtcccaagaccagcagggacagggaactgtccgagcccgtggctgtgtggaggaaggcgacccccagcacaagattggtttcctttgggaagggaagagggagtgtgttggggtaaggggtagagcagaggaatggtcagggggcaacaaccgctgacagctgcaacaggtgcatggcatctcacagggaggcagggaggtgcgagctcctaagtaatggagcaaaaaaattctattctgtagaatggggagagaaaatgtgacattttaatttttttttgcatttatattcctaattcctacttaaagtgaatatactgccgctgtagatcataaaatgtatcttttccatggccaacaaggggcatcttttataaatgcataataacccagtttgtatcaaagggtatcgacttaagtgaaatttcaacatgctgttactttttccttttaatgtaattctgttttccaaataaatgggggagacaaatggaaaaaaaaaaa

SEQ ID NO: 387209 - DNA, 2432 bp, Homo sapiens
  misc_feature (103)..(103): n is a, c, g, or t
agcgggggtgggcagggcgctggccgcgctgctgctggccgcgtccgtgctgagcgccgcgctgctggcccccggcggctcttcggggcgcgatgcccaggcngcggccgccacgagacttagacaaaaaaagacatgcagagctgaagatggatcaggctttgctactcatccataatgaacttctctggaccaacttgaccgtctactggaaatctgaatgctgttatcactgcttgtttcaggttctggtaaacgttcctcagagtccaaaagcagggaagcctagtgctgcagctgcctctgtcagcacccagcacggatctatcctgcagctgaacgacaccttggaagagaaagaagtttgtaggttggaatacagatttggagaatttggaaactattctctcttggtaaagaacatccataatggagttagtgaaattgcctgtgacctggctgtgaacgaggatccagttgatagtaaccttcctgtgagcattgcattccttattggtcttgctgtcatcattgtgatatcctttctgaggctcttgttgagtttggatgactttaacaattggatttctaaagccataagttctcgagaaactgatcgcctcatcaattctgagctgggatctcccagcaggacagaccctctcgatggtgatgttcagccagcaacgtggcgtctatctgccctgccgccccgcctccgcagcgtggacaccttcagggggattgctcttatactcatggtctttgtcaattatggaggaggaaaatattggtacttcaaacatgcaagttggaatgggctgacagtggctgacctcgtgttcccgtggtttgtatttattatgggatcttccatttttctatcgatgacttctatactgcaacgggggtgttcaaaattcagattgctggggaagattgcatggaggagtttcctgttaatctgcataggaattatcattgtgaatcccaattattgccttggtccattgtcttgggacaaggtgcgcattcctggtgtgctgcagcgattgggagtgacatactttgtggttgctgtgttggagctcctctttgctaaacctgtgcctgaacattgtgcctcggagaggagctgcctttctcttcgagacatcacgtccagctggccccagtggctgctcatcctggtgctggaaggcctgtggctgggcttgacattcctcctgccagtccctgggtgccctactggttatcttggtcctgggggcattggagattttggcaagtatccaaattgcactggaggagctgcaggctacatcgaccgcctgctgctgggagacgatcacctttaccagcacccatcttctgctgtactttaccacaccgaggtggcctatgaccccgagggcatcctgggcaccatcaactccatcgtgatggcctttttaggagttcaggcaggaaaaatactattgtattacaaggctcggaccaaagacatcctgattcgattcactgcttggtgttgtattcttgggctcatttctgttgctctgacgaaggtttctgaaaatgaaggctttattccagtaaacaaaaatctctggtccctttcgtatgtcactacgctcagttcttttgccttcttcatcctgctggtcctgtacccagttgtggatgtgaaggggctgtggacaggaaccccattcttttatccaggaatgaattccattctggtatacgtcggccacgaggtgtttgagaactacttcccctttcagtggaagctgaaggacaaccagtcccacaaggagcacctgactcagaacatcgtcgccactgccctctgggtgctcattgcctacatcctctatagaaagaagattttttggaaaatctgatggctcccactgagatgtgctgctggaagactctagtaggcctgcagggaggactgaagcagcctttgttaaagggaagcattcattaggaaattgactggctgcgtgtttacagactctgggggaagacactgatgtcctcaaactggttaactgtgacacggctcgccagaactctgcctgtctatttgtgacttacagatttgaaatgtaattgtcttttttcctccatcttctgtggaaatggatgtctttggaacttcattccgaggagataagctttaactttccaaaagggaattgccatgggtgtttttcttctgtggtgagtgaaacaatctgaggtctggttcttgctgaccttgttgccctgcaaacttcctttccacgtgtacgcgcacaccaacacgaaatgccatcactcctactgcggctgctatgaagcttactggttgtgatgtgttataatttagtctgtttaataggtaggctgcctccgacgaagttgggctacgagctcgaatt

SEQ ID NO: 387210 - DNA, 2330 bp, Homo sapiens
  misc_feature (103)..(103): n is a, c, g, or t
agcgggggtgggcagggcgctggccgcgctgctgctggccgcgtccgtgctgagcgccgcgctgctggcccccggcggctcttcggggcgcgatgcccaggcngcggccgccacgagacttagacaaaaaaagacatgcagagctgaagatggatcaggctttgctactcatccataatgaacttctctggaccaacttgaccgtctactggaaatctgaatgctgttatcactgcttgtttcaggttctggtaaacgttcctcagagtccaaaagcagggaagcctagtgctgcagctgcctctgtcagcacccagcacggatctatcctgcagctgaacgacaccttggaagagaaagaagtttgtaggttggaatacagatttggagaatttggaaactattctctcttggtaaagaacatccataatggagttagtgaaattgcctgtgacctggctgtgaacgaggatccagttgatagtaaccttcctgtgagcattgcattccttattggtcttgctgtcatcattgtgatatcctttctgaggctcttgttgagtttggatgactttaacaattggatttctaaagccataagttctcgagaaactgatcgcctcatcaattctgagctgggatctcccagcaggacagaccctctcgatggtgatgttcagccagcaacgtggcgtctatctgccctgccgccccgcctccgcagcgtggacaccttcagggggattgctcttatactcatggtctttgtcaattatggaggaggaaaatattggtacttcaaacatgcaagttggaatgggctgacagtggctgacctcgtgttcccgtggtttgtatttattatgggatcttccatttttctatcgatgacttctatactgcaacgggggtgttcaaaattcagattgctggggaagattgcatggaggagtttcctgttaatctgcataggaattatcattgtgaatcccaattattgccttggtccattgtcttgggacaaggtgcgcattcctggtgtgctgcagcgattgggagtgacatactttgtggttgctgtgttggagctcctctttgctaaacctgtgcctgaacattgtgcctcggagaggagctgcctttctcttcgagacatcacgtccagctggccccagtggctgctcatcctggtgctggaaggcctgtggctgggcttgacattcctcctgccagtccctgggtgccctactggttatcttggtcctgggggcattggagattttggcaagtatccaaattgcactggaggagctgcaggctacatcgaccgcctgctgctgggagacgatcacctttaccagcacccatcttctgctgtactttaccacaccgaggtggcctatgaccccgagggcatcctgggcaccatcaactccatcgtgatggcctttttaggagttcaggcaggaaaaatactattgtattacaaggctcggaccaaagacatcctgattcgattcactgcttggtgttgtattcttgggctcatttctgttgctctgacgaaggtttctgaaaatgaaggctttattccagtaaacaaaaatctctggtccctttcgtatgtcactacgctcagttcttttgccttcttcatcctgctggtcctgtacccagttgtggatgtgaaggggctgtggacaggaaccccattcttttatccaggaatgaattccattctggtatacgtcggccacgaggtgtttgagaactacttcccctttcagtggaagctgaaggacaaccagtcccacaaggagcacctgactcagaacatcgtcgccactgccctctgggtgctcattgcctacatcctctatagaaagaagattttttggaaaatctgatggctcccactgagatgtgctgctggaagactctagtaggcctgcagggaggactgaagcagcctttgttaaagggaagcattcattaggaaattgactggctgcgtgtttacagactctgggggaagacactgatgtcctcaaactggttaactgtgacacggctcgccagaactctgcctgtctatttgtgacttacagatttgaaatgtaattgtcttttttcctccatcttctgtggaaatggatgtctttggaacttcattccgaggagataagctttaactttccaaaagggaattgccatgggtgtttttcttctgtggtgagtgaaacaatctgaggtctggttcttgctgaccttgttgccctgcaaacttcctttccacgtgtacgcgccatcgtgcgcttcgggtaccgagc

SEQ ID NO: 387211 - DNA, 2256 bp, Homo sapiens
  misc_feature (103)..(103): n is a, c, g, or t
agcgggggtgggcagggcgctggccgcgctgctgctggccgcgtccgtgctgagcgccgcgctgctggcccccggcggctcttcggggcgcgatgcccaggcngcggccgccacgagacttagacaaaaaaagacatgcagagctgaagatggatcaggctttgctactcatccataatgaacttctctggaccaacttgaccgtctactggaaatctgaatgctgttatcactgcttgtttcaggttctggtaaacgttcctcagagtccaaaagcagggaagcctagtgctgcagctgcctctgtcagcacccagcacggatctatcctgcagctgaacgacaccttggaagagaaagaagtttgtaggttggaatacagatttggagaatttggaaactattctctcttggtaaagaacatccataatggagttagtgaaattgcctgtgacctggctgtgaacgaggatccagttgatagtaaccttcctgtgagcattgcattccttattggtcttgctgtcatcattgtgatatcctttctgaggctcttgttgagtttggatgactttaacaattggatttctaaagccataagttctcgagaaactgatcgcctcatcaattctgagctgggatctcccagcaggacagaccctctcgatggtgatgttcagccagcaacgtggcgtctatctgccctgccgccccgcctccgcagcgtggacaccttcagggggattgctcttatactcatggtctttgtcaattatggaggaggaaaatattggtacttcaaacatgcaagttggaatgggctgacagtggctgacctcgtgttcccgtggtttgtatttattatgggatcttccatttttctatcgatgacttctatactgcaacgggggtgttcaaaattcagattgctggggaagattgcatggaggagtttcctgttaatctgcataggaattatcattgtgaatcccaattattgccttggtccattgtcttgggacaaggtgcgcattcctggtgtgctgcagcgattgggagtgacatactttgtggttgctgtgttggagctcctctttgctaaacctgtgcctgaacattgtgcctcggagaggagctgcctttctcttcgagacatcacgtccagctggccccagtggctgctcatcctggtgctggaaggcctgtggctgggcttgacattcctcctgccagtccctgggtgccctactggttatcttggtcctgggggcattggagattttggcaagtatccaaattgcactggaggagctgcaggctacatcgaccgcctgctgctgggagacgatcacctttaccagcacccatcttctgctgtactttaccacaccgaggtggcctatgaccccgagggcatcctgggcaccatcaactccatcgtgatggcctttttaggagttcaggtatttgttcatttcattaggttactttttctgacaatttatgatattttattcactcatttaaaaaccatttcattaaaataattggaagcatattctctcttgtgctatgggcctaatatattctgttatctttgacagattgtgcagaaccaaaagttactgaaattcagcacattcaagtaattagatataattcttatattctcaaaaaaattcttacttatatggcttatcttagcacggcagtttctagataaaaggtttcccttgccaagctgcagtggctcatgcctataacgccaacattttgggaagccaaggcaggaggattgcttgagtccgggagtttgagaccagcctgggtaacatagtgagaccctgtctctacaagaaattaaaaatattagccaggcatgatggcacacacctgtagtcccagctacttgggagctgaggtaggagtatggcttgaaccaaggaggttgaggctgcagtgagccttgattgcaccactgcactcctggctgggcaacagagtgagaccctgtctcaaaaaagaaaaaaataaaaaaaataaagtgattttatagggaatattttgttagtgtagatatggtatgccagatcctgaaaccttgtaggaaattatacattctgaacatgtagttcagttccattaatcctgaaaatacttataaaatcctatttcctgaagaattacagtatattggtatcagtgaatgctaataaatatgtaggtgggcaatgatagtcataaactaaaaaaaaa

SEQ ID NO: 387212 - DNA, 4283 bp, Homo sapiens
  misc_feature (103)..(103): n is a, c, g, or t
agcgggggtgggcagggcgctggccgcgctgctgctggccgcgtccgtgctgagcgccgcgctgctggcccccggcggctcttcggggcgcgatgcccaggcngcggccgccacgagacttagacaaaaaaagacatgcagagctgaagatggatcaggctttgctactcatccataatgaacttctctggaccaacttgaccgtctactggaaatctgaatgctgttatcactgcttgtttcaggttctggtaaacgttcctcagagtccaaaagcagggaagcctagtgctgcagctgcctctgtcagcacccagcacggatctatcctgcagctgaacgacaccttggaagagaaagaagtttgtaggttggaatacagatttggagaatttggaaactattctctcttggtaaagaacatccataatggagttagtgaaattgcctgtgacctggctgtgaacgaggatccagttgatagtaaccttcctgtgagcattgcattccttattggtcttgctgtcatcattgtgatatcctttctgaggctcttgttgagagtcttgctatgtcacccaggctggagtgcggtggcaccatctcggctcactccaagctctgcctcccgggttcacaccattctcctacctcagcctcctgagtagctggaactgcagtttggatgactttaacaattggatttctaaagccataagttctcgagaaactgatcgcctcatcaattctgagctgggatctcccagcaggacagaccctctcgatggtgatgttcagccagcaacgtggcgtctatctgccctgccgccccgcctccgcagcgtggacaccttcagggggattgctcttatactcatggtctttgtcaattatggaggaggaaaatattggtacttcaaacatgcaagttggaatgggctgacagtggctgacctcgtgttcccgtggtttgtatttattatgggatcttccatttttctatcgatgacttctatactgcaacgggggtgttcaaaattcagattgctggggaagattgcatggaggagtttcctgttaatctgcataggaattatcattgtgaatcccaattattgccttggtccattgtcttgggacaaggtgcgcattcctggtgtgctgcagcgattgggagtgacatactttgtggttgctgtgttggagctcctctttgctaaacctgtgcctgaacattgtgcctcggagaggagctgcctttctcttcgagacatcacgtccagctggccccagtggctgctcatcctggtgctggaaggcctgtggctgggcttgacattcctcctgccagtccctgggtgccctactggttatcttggtcctgggggcattggagattttggcaagtatccaaattgcactggaggagctgcaggctacatcgaccgcctgctgctgggagacgatcacctttaccagcacccatcttctgctgtactttaccacaccgaggtggcctatgaccccgagggcatcctgggcaccatcaactccatcgtgatggcctttttaggagttcaggcaggaaaaatactattgtattacaaggctcggaccaaagacatcctgattcgattcactgcttggtgttgtattcttgggctcatttctgttgctctgacgaaggtttctgaaaatgaaggctttattccagtaaacaaaaatctctggtccctttcgtatgtcactacgctcagttcttttgccttcttcatcctgctggtcctgtacccagttgtggatgtgaaggggctgtggacaggaaccccattcttttatccaggaatgaattccattctggtatacgtcggccacgaggtgtttgagaactacttcccctttcagtggaagctgaaggacaaccagtcccacaaggagcacctgactcagaacatcgtcgccactgccctctgggtgctcattgcctacatcctctatagaaagaagattttttggaaaatctgatggctcccactgagatgtgctgctggaagactctagtaggcctgcagggaggactgaagcagcctttgttaaagggaagcattcattaggaaattgactggctgcgtgtttacagactctgggggaagacactgatgtcctcaaactggttaactgtgacacggctcgccagaactctgcctgtctatttgtgacttacagatttgaaatgtaattgtcttttttcctccatcttctgtggaaatggatgtctttggaacttcattccgaggagataagctttaactttccaaaagggaattgccatgggtgtttttcttctgtggtgagtgaaacaatctgaggtctggttcttgctgaccttgttgccctgcaaacttcctttccacgtgtacgcgcacaccaacacgaaatgccatcactcctactgcggctgctatgaagcttactggttgtgatgtgttataatttagtctgtttttttgattgaatgcagtttaatgtttccagaaagccaaagtaattttcttttcagatatgcaaggctttggtgggtccaaaaaatgtctatcacaagccattttttccttttcctctctcgaaaagttaaaatatctatgtgttattcccaaaccctcttacctatgtatctgcctgtctgtccatcatcttccttcctccctatctctgtgtatctggatggcagccgctgcccaggggagtggctgtggggagggcaggtactgtctttgcctgtgggtccagctgagccatccctgctgggtgatgctgggcaagacccttggcccgtctgggccttggcttcctcacttgtgaaatgagcgggaagatgactctcagttccttccacctcttagacatggtgaggtaacagacatcaaaagcttttctgaaatcttcagaagaaatagttccattacagaaaactcttcaaaataaatagtagtgaaaacttttaaaaactctcattggagtaagtcttttcaagatgatcctccacaatggaggcagcgttcctacttgtcatcacacagctgaagacattgtttcttaggtgtgaaatcggggacaaaggacaaacagagacacacggcattgttcatgggaggcatcgtcaccctcctgggtgttctgtgggaatttcctgtgtgaggaaaacgtggccacagggttgtgctgtacccacccttccccggcgagatggccctcggcctgtgccgctgcttccaccctcgccactccatggcagcttttggtctgtttccggctctgccctctgccctgaactctcatccggcttgtacctgcctgctggacccctccacctggaggccagcccatgtctcaggcccagccctagcctcttctcctcaaattctaagtgttttctctttaggtttccctggctttgtgaatggatcatgtgtctctaggtataaacctgacatcatctttccacccggcttacctccaccagatctccccagttctgtctccatcttctacctgcagctgctctgttctcatggtcactgctgcatcactgagtctggacccttgttatcattttcaaactggcctccttccctcgttccccacttcttaaagtcacctgtccattgccaccagattaagctttctccagccagatcacctctctctgagaaacctccattgacatggaaacaccattgtctggcacacatactcacatactcaccttcccgtcttgatccccacacatctttccagcctcccctcccactccactccctgctccctcctccacctccccatcctcttgtctcccctcccctctgaatccagcccagcggggcttctcctgcctccatcacatcacagaagtacctcctgcttctggttttaattagagccttccccgattacattttcctctgaattttttcctatctacatttgatctgtcatgtttaaaccccctacttctaagggaacttctctaatctcttatcctcatccccaaatagtgttttcttcctctgggttcttataatgttggtatcaatctcacagcatttagtgcttcctgcctggtgtgacagttacctgtgtgcatgtgcaatttctaatttcccacgctagactgtgagcttcctaaggcaagaatcatgccttgttggtttctgtattcctcatggtgccaaacacagtgccttctacattgcaggcgctgaataaacatttttaaagcaaaa

SEQ ID NO: 387213 - DNA, 3485 bp, Homo sapiens
ggggctatattctgaactcttcctctactgttagctcagtattatttcagtaattggctactttaaacaaattatggttgcttctcttttatagcatattataaaatgttactgatatatagacaaaaaatttggaaatggccacctattaataactagattctttttaggtttgtatttattatgggatcttccatttttctatcgatgacttctatactgcaacgggggtgttcaaaattcagattgctggggaagattgcatggaggagtttcctgttaatctgcataggaattatcattgtgaatcccaattattgccttggtccattgtcttgggacaaggtgcgcattcctggtgtgctgcagcgattgggagtgacatactttgtggttgctgtgttggagctcctctttgctaaacctgtgcctgaacattgtgcctcggagaggagctgcctttctcttcgagacatcacgtccagctggccccagtggctgctcatcctggtgctggaaggcctgtggctgggcttgacattcctcctgccagtccctgggtgccctactggttatcttggtcctgggggcattggagattttggcaagtatccaaattgcactggaggagctgcaggctacatcgaccgcctgctgctgggagacgatcacctttaccagcacccatcttctgctgtactttaccacaccgaggtggcctatgaccccgagggcatcctgggcaccatcaactccatcgtgatggcctttttaggagttcaggcaggaaaaatactattgtattacaaggctcggaccaaagacatcctgattcgattcactgcttggtgttgtattcttgggctcatttctgttgctctgacgaaggtttctgaaaatgaaggctttattccagtaaacaaaaatctctggtccctttcgtatgtcactacgctcagttcttttgccttcttcatcctgctggtcctgtacccagttgtggatgtgaaggggctgtggacaggaaccccattcttttatccaggaatgaattccattctggtatacgtcggccacgaggtgtttgagaactacttcccctttcagtggaagctgaaggacaaccagtcccacaaggagcacctgactcagaacatcgtcgccactgccctctgggtgctcattgcctacatcctctatagaaagaagattttttggaaaatctgatggctcccactgagatgtgctgctggaagactctagtaggcctgcagggaggactgaagcagcctttgttaaagggaagcattcattaggaaattgactggctgcgtgtttacagactctgggggaagacactgatgtcctcaaactggttaactgtgacacggctcgccagaactctgcctgtctatttgtgacttacagatttgaaatgtaattgtcttttttcctccatcttctgtggaaatggatgtctttggaacttcattccgaggagataagctttaactttccaaaagggaattgccatgggtgtttttcttctgtggtgagtgaaacaatctgaggtctggttcttgctgaccttgttgccctgcaaacttcctttccacgtgtacgcgcacaccaacacgaaatgccatcactcctactgcggctgctatgaagcttactggttgtgatgtgttataatttagtctgtttttttgattgaatgcagtttaatgtttccagaaagccaaagtaattttcttttcagatatgcaaggctttggtgggtccaaaaaatgtctatcacaagccattttttccttttcctctctcgaaaagttaaaatatctatgtgttattcccaaaccctcttacctatgtatctgcctgtctgtccatcatcttccttcctccctatctctgtgtatctggatggcagccgctgcccaggggagtggctgtggggagggcaggtactgtctttgcctgtgggtccagctgagccatccctgctgggtgatgctgggcaagacccttggcccgtctgggccttggcttcctcacttgtgaaatgagcgggaagatgactctcagttccttccacctcttagacatggtgaggtaacagacatcaaaagcttttctgaaatcttcagaagaaatagttccattacagaaaactcttcaaaataaatagtagtgaaaacttttaaaaactctcattggagtaagtcttttcaagatgatcctccacaatggaggcagcgttcctacttgtcatcacacagctgaagacattgtttcttaggtgtgaaatcggggacaaaggacaaacagagacacacggcattgttcatgggaggcatcgtcaccctcctgggtgttctgtgggaatttcctgtgtgaggaaaacgtggccacagggttgtgctgtacccacccttccccggcgagatggccctcggcctgtgccgctgcttccaccctcgccactccatggcagcttttggtctgtttccggctctgccctctgccctgaactctcatccggcttgtacctgcctgctggacccctccacctggaggccagcccatgtctcaggcccagccctagcctcttctcctcaaattctaagtgttttctctttaggtttccctggctttgtgaatggatcatgtgtctctaggtataaacctgacatcatctttccacccggcttacctccaccagatctccccagttctgtctccatcttctacctgcagctgctctgttctcatggtcactgctgcatcactgagtctggacccttgttatcattttcaaactggcctccttccctcgttccccacttcttaaagtcacctgtccattgccaccagattaagctttctccagccagatcacctctctctgagaaacctccattgacatggaaacaccattgtctggcacacatactcacatactcaccttcccgtcttgatccccacacatctttccagcctcccctcccactccactccctgctccctcctccacctccccatcctcttgtctcccctcccctctgaatccagcccagcggggcttctcctgcctccatcacatcacagaagtacctcctgcttctggttttaattagagccttccccgattacattttcctctgaattttttcctatctacatttgatctgtcatgtttaaaccccctacttctaagggaacttctctaatctcttatcctcatccccaaatagtgttttcttcctctgggttcttataatgttggtatcaatctcacagcatttagtgcttcctgcctggtgtgacagttacctgtgtgcatgtgcaatttctaatttcccacgctagactgtgagcttcctaaggcaagaatcatgccttgttggtttctgtattcctcatggtgccaaacacagtgccttctacattgcaggcgctgaataaacatttttaaagcaaaa

SEQ ID NO: 387214 - DNA, 5175 bp, Homo sapiens
  misc_feature (103)..(103): n is a, c, g, or t
agcgggggtgggcagggcgctggccgcgctgctgctggccgcgtccgtgctgagcgccgcgctgctggcccccggcggctcttcggggcgcgatgcccaggcngcggccgccacgagacttagacaaaaaaagacatgcagagctgaagatggatcaggctttgctactcatccataatgaacttctctggaccaacttgaccgtctactggaaatctgaatgctgttatcactgcttgtttcaggttctggtaaacgttcctcagagtccaaaagcagggaagcctagtgctgcagctgcctctgtcagcacccagcacggatctatcctgcagctgaacgacaccttggaagagaaagaagtttgtaggttggaatacagatttggagaatttggaaactattctctcttggtaaagaacatccataatggagttagtgaaattgcctgtgacctggctgtgaacgaggatccagttgatagtaaccttcctgtgagcattgcattccttattggtcttgctgtcatcattgtgatatcctttctgaggctcttgttgagtttggatgactttaacaattggatttctaaagccataagttctcgagaaactgatcgcctcatcaattctgagctgggatctcccagcaggacagaccctctcgatggtgatgttcagccagcaacgtggcgtctatctgccctgccgccccgcctccgcagcgtggacaccttcagggggattgctcttatactcatggtctttgtcaattatggaggaggaaaatattggtacttcaaacatgcaagttggaatgggctgacagtggctgacctcgtgttcccgtggtttgtatttattatgggatcttccatttttctatcgatgacttctatactgcaacgggggtgttcaaaattcagattgctggggaagattgcatggaggagtttcctgttaatctgcataggaattatcattgtgaatcccaattattgccttggtccattgtcttgggacaaggtgcgcattcctggtgtgctgcagcgattgggagtgacatactttgtggttgctgtgttggagctcctctttgctaaacctgtgcctgaacattgtgcctcggagaggagctgcctttctcttcgagacatcacgtccagctggccccagtggctgctcatcctggtgctggaaggcctgtggctgggcttgacattcctcctgccagtccctgggtgccctactggttatcttggtcctgggggcattggagattttggcaagtatccaaattgcactggaggagctgcaggctacatcgaccgcctgctgctgggagacgatcacctttaccagcacccatcttctgctgtactttaccacaccgaggtggcctatgaccccgagggcatcctgggcaccatcaactccatcgtgatggcctttttaggagttcaggcaggaaaaatactattgtattacaaggctcggaccaaagacatcctgattcgattcactgcttggtgttgtattcttgggctcatttctgttgctctgacgaaggtttctgaaaatgaaggctttattccagtaaacaaaaatctctggtccctttcgtatgtcactacgctcagttcttttgccttcttcatcctgctggtcctgtacccagttgtggatgtgaaggggctgtggacaggaaccccattcttttatccaggaatgaattccattctggtatacgtcggccacgaggtgtttgagaactacttcccctttcagtggaagctgaaggacaaccagtcccacaaggagcacctgactcagaacatcgtcgccactgccctctgggtgctcattgcctacatcctctatagaaagaagattttttggaaaatctgatggctcccactgagatgtgctgctggaagactctagtaggcctgcagggaggactgaagcagcctttgttaaagggaagcattcattaggaaattgactggctgcgtgtttacagactctgggggaagacactgatgtcctcaaactggttaactgtgacacggctcgccagaactctgcctgtctatttgtgacttacagatttgaaatgtaattgtcttttttcctccatcttctgtggaaatggatgtctttggaacttcattccgaggagataagctttaactttccaaaagggaattgccatgggtgtttttcttctgtggtgagtgaaacaatctgaggtctggttcttgctgaccttgttgccctgcaaacttcctttccacgtgtacgcgcacaccaacacgaaatgccatcactcctactgcggctgctatgaagcttactggttgtgatgtgttataatttagtctgtttttttgattgaatgcagtttaatgtttccagaaagccaaagtaattttcttttcagatatgcaaggctttggtgggtccaaaaaatgtctatcacaagccattttttccttttcctctctcgaaaagttaaaatatctatgtgttattcccaaaccctcttacctatgtatctgcctgtctgtccatcatcttccttcctccctatctctgtgtatctggatggcagccgctgcccaggggagtggctgtggggagggcaggtactgtctttgcctgtgggtccagctgagccatccctgctgggtgatgctgggcaagacccttggcccgtctgggccttggcttcctcacttgtgaaatgagcgggaagatgactctcagttccttccacctcttagacatggtgaggtaacagacatcaaaagcttttctgaaatcttcagaagaaatagttccattacagaaaactcttcaaaataaatagtagtgaaaacttttaaaaactctcattggagtaagtcttttcaagatgatcctccacaatggaggcagcgttcctacttgtcatcacacagctgaagacattgtttcttaggtgtgaaatcggggacaaaggacaaacagagacacacggcattgttcatgggaggcatcgtcaccctcctgggtgttctgtgggaatttcctgtgtgaggaaaacgtggccacagggttgtgctgtacccacccttccccggcgagatggccctcggcctgtgccgctgcttccaccctcgccactccatggcagcttttggtctgtttccggctctgccctctgccctgaactctcatccggcttgtacctgcctgctggacccctccacctggaggccagcccatgtctcaggcccagccctagcctcttctcctcaaattctaagtgttttctctttaggtttccctggctttgtgaatggatcatgtgtctctaggtataaacctgacatcatctttccacccggcttacctccaccagatctccccagttctgtctccatcttctacctgcagctgctctgttctcatggtcactgctgcatcactgagtctggacccttgttatcattttcaaactggcctccttccctcgttccccacttcttaaagtcacctgtccattgccaccagattaagctttctccagccagatcacctctctctgagaaacctccattgacatggaaacaccattgtctggcacacatactcacatactcaccttcccgtcttgatccccacacatctttccagcctcccctcccactccactccctgctccctcctccacctccccatcctcttgtctcccctcccctctgaatccagcccagcggggcttctcctgcctccatcacatcacagaagtacctcctgcttctggttttaattagagccttccccgattacattttcctctgaattttttcctatctacatttgatctgtcatgtttaaaccccctacttctaagggaacttctctaatctcttatcctcatccccaaatagtgttttcttcctctgggttcttataatgttggtatcaatctcacagcatttagtgcttcctgcctggtgtgacagttacctgtgtgcatgtgcaatttctaatttcccacgctagactgtgagcttcctaaggcaagaatcatgccttgttggtttctgtattcctcatggtgccaaacacagtgccttctacattgcaggcgctgaataaacatttttaaagcaaaatgatgtggatttttaaaataaatatttaagtgctggtaagatgagcatgtatccggggtgcccatgaaatgttcttggggccgtgtggggacagtcgtcattcctcctcctgccacccttttctttcagtgagtcactgtggatggtcccagctgtgtcatcccaaagttcagcagggaaagctgagctgggcctctccaggtgagttttctagaagcatttctcaaactgtgggttacatcaacttgggtgtcttgagctgtaaggaaggaactccggagtcagctgggctacaggggagcttctctaagtcctgcgggaggccagacccagcctgagcttgctgttagctagcggaggcagctgctggtggcccaggtgctcgacaccaggcatcccctctcctcccacgaagggtgtgccataatccccttcaacaggaaatgcttcccagaagcctctcagcagcctcccctcctgtcctatcagctagaagcgcctcgcttgtcccaagaccagcagggacagggaactgtccgagcccgtggctgtgtggaggaaggcgacccccagcacaagattggtttcctttgggaagggaagagggagtgtgttggggtaaggggtagagcagaggaatggtcagggggcaacaaccgctgacagctgcaacaggtgcatggcatctcacagggaggcagggaggtgcgagctcctaagtaatggagcaaaaaaattctattctgtagaatggggagagaaaatgtgacattttaatttttttttgcatttatattcctaattcctacttaaagtgaatatactgccgctgtagatcataaaatgtatcttttccatggccaacaaggggcatcttttataaatgcataataacccagtttgtatcaaagggtatcgacttaagtgaaatttcaacatgctgttactttttccttttaatgtaattctgttttccaaataaatgggggagacaaatggaaaaaaaaaaa

SEQ ID NO: 387215 - DNA, 5011 bp, Homo sapiens
  misc_feature (103)..(103): n is a, c, g, or t
agcgggggtgggcagggcgctggccgcgctgctgctggccgcgtccgtgctgagcgccgcgctgctggcccccggcggctcttcggggcgcgatgcccaggcngcggccgccacgagacttagacaaaaaaagacatgcagagctgaagatggatcaggctttgctactcatccataatgaacttctctggaccaacttgaccgtctactggaaatctgaatgctgttatcactgcttgtttcaggttctggtaaacgttcctcagagtccaaaagcagggaagcctagtgctgcagctgcctctgtcagcacccagcacggatctatcctgcagctgaacgacaccttggaagagaaagaagtttgtaggttggaatacagatttggagaatttggaaactattctctcttggtaaagaacatccataatggagttagtgaaattgcctgtgacctggctgtgaacgaggatccagttgatagtaaccttcctgtgagcattgcattccttattggtcttgctgtcatcattgtgatatcctttctgaggctcttgttgagtttggatgactttaacaattggatttctaaagccataagttctcgagaaactgatcgcctcatcaattctgagctgggatctcccagcaggacagaccctctcgatggtgatgttcagccagcaacgtggcgtctatctgccctgccgccccgcctccgcagcgtggacaccttcagggggattgctcttatactcatggtctttgtcaattatggaggaggaaaatattggtacttcaaacatgcaagttggaatgggctgacagtggctgacctcgtgttcccgtggtttgtatttattatgggatcttccatttttctatcgatgacttctatactgcaacgggggtgttcaaaattcagattgctggggaagattgcatggaggagtttcctgttaatctgcataggaattatcattgtgaatcccaattattgccttggtccattgtcttgggacaaggtgcgcattcctggtgtgctgcagcgattgggagtgacatactttgtggttgctgtgttggagctcctctttgctaaacctgtgcctgaacattgtgcctcggagaggagctgcctttctcttcgagacatcacgtccagctggccccagtggctgctcatcctggtgctggaaggcctgtggctgggcttgacattcctcctgccagtccctgggtgccctactggttatcttggtcctgggggcattggagattttggcaagtatccaaattgcactggaggagctgcaggctacatcgaccgcctgctgctgggagacgatcacctttaccagcacccatcttctgctgtactttaccacaccgaggtggcctatgaccccgagggcatcctgggcaccatcaactccatcgtgatggcctttttaggagttcaggcaggaaaaatactattgtattacaaggctcggaccaaagacatcctgattcgattcactgcttggtgttgtattcttgggctcatttctgttgctctgacgaaggtttctgaaaatgaaggctttattccagtaaacaaaaatctctggtccctttcgtatgtcactacgctcagttcttttgccttcttcatcctgctggtcctgtacccagttgtggatgtgaaggggctgtggacaggaaccccattcttttatccaggaatgaattccattctggtatacgtcggccacgaggtgtttgagaactacttcccctttcagtggaagctgaaggacaaccagtcccacaaggagcacctgactcagaacatcgtcgccactgccctctgggtgctcattgcctacatcctctatagaaagaagattttttggaaaatctgatggctcccactgagatgtgctgctggaagactctagtaggcctgcagggaggactgaagcagcctttgttaaagggaagcattcattaggaaattgactggctgcgtgtttacagactctgggggaagacactgatgtcctcaaactggttaactgtgacacggctcgccagaactctgcctgtctatttgtgacttacagatttgaaatgtaattgtcttttttcctccatcttctgtggaaatggatgtctttggaacttcattccgaggagataagctttaactttccaaaagggaattgccatgggtgtttttcttctgtggtgagtgaaacaatctgaggtctggttcttgctgaccttgttgccctgcaaacttcctttccacgtgtacgcgcacaccaacacgaaatgccatcactcctactgcggctgctatgaagcttactggttgtgatgtgttataatttagtctgtttttttgattgaatgcagtttaatgtttccagaaagccaaagtaattttcttttcagatatgcaaggctttggtgggtccaaaaaatgtctatcacaagccattttttccttttcctctctcgaaaagttaaaatatctatgtgttattcccaaaccctcttacctatgtatctgcctgtctgtccatcatcttccttcctccctatctctgtgtatctggatggcagccgctgcccaggggagtggctgtggggagggcaggtactgtctttgcctgtgggtccagctgagccatccctgctgggtgatgctgggcaagacccttggcccgtctgggccttggcttcctcacttgtgaaatgagcgggaagatgactctcagttccttccacctcttagacatggtgaggtaacagacatcaaaagcttttctgaaatcttcagaagaaatagttccattacagaaaactcttcaaaataaatagtagtgaaaacttttaaaaactctcattggagtaagtcttttcaagatgatcctccacaatggaggcagcgttcctacttgtcatcacacagctgaagacattgtttcttaggtgtgaaatcggggacaaaggacaaacagagacacacggcattgttcatgggaggcatcgtcaccctcctgggtgttctgtgggaatttcctgtgtgaggaaaacgtggccacagggttgtgctgtacccacccttccccggcgagatggccctcggcctgtgccgctgcttccaccctcgccactccatggcagcttttggtctgtttccggctctgccctctgccctgaactctcatccggcttgtacctgcctgctggacccctccacctggaggccagcccatgtctcaggcccagccctagcctcttctcctcaaattctaagtgttttctctttaggtttccctggctttgtgaatggatcatgtgtctctaggtataaacctgacatcatctttccacccggcttacctccaccagatctccccagttctgtctccatcttctacctgcagctgctctgttctcatggtcactgctgcatcactgagtctggacccttgttatcattttcaaactggcctccttccctcgttccccacttcttaaagtcacctgtccattgccaccagattaagctttctccagccagatcacctctctctgagaaacctccattgacatggaaacaccattgtctggcacacatactcacatactcaccttcccgtcttgatccccacacatattttcctctgaattttttcctatctacatttgatctgtcatgtttaaaccccctacttctaagggaacttctctaatctcttatcctcatccccaaatagtgttttcttcctctgggttcttataatgttggtatcaatctcacagcatttagtgcttcctgcctggtgtgacagttacctgtgtgcatgtgcaatttctaatttcccacgctagactgtgagcttcctaaggcaagaatcatgccttgttggtttctgtattcctcatggtgccaaacacagtgccttctacattgcaggcgctgaataaacatttttaaagcaaaatgatgtggatttttaaaataaatatttaagtgctggtaagatgagcatgtatccggggtgcccatgaaatgttcttggggccgtgtggggacagtcgtcattcctcctcctgccacccttttctttcagtgagtcactgtggatggtcccagctgtgtcatcccaaagttcagcagggaaagctgagctgggcctctccaggtgagttttctagaagcatttctcaaactgtgggttacatcaacttgggtgtcttgagctgtaaggaaggaactccggagtcagctgggctacaggggagcttctctaagtcctgcgggaggccagacccagcctgagcttgctgttagctagcggaggcagctgctggtggcccaggtgctcgacaccaggcatcccctctcctcccacgaagggtgtgccataatccccttcaacaggaaatgcttcccagaagcctctcagcagcctcccctcctgtcctatcagctagaagcgcctcgcttgtcccaagaccagcagggacagggaactgtccgagcccgtggctgtgtggaggaaggcgacccccagcacaagattggtttcctttgggaagggaagagggagtgtgttggggtaaggggtagagcagaggaatggtcagggggcaacaaccgctgacagctgcaacaggtgcatggcatctcacagggaggcagggaggtgcgagctcctaagtaatggagcaaaaaaattctattctgtagaatggggagagaaaatgtgacattttaatttttttttgcatttatattcctaattcctacttaaagtgaatatactgccgctgtagatcataaaatgtatcttttccatggccaacaaggggcatcttttataaatgcataataacccagtttgtatcaaagggtatcgacttaagtgaaatttcaacatgctgttactttttccttttaatgtaattctgttttccaaataaatgggggagacaaatggaaaaaaaaaaa

SEQ ID NO: 387216 - DNA, 3466 bp, Homo sapiens
  misc_feature (103)..(103): n is a, c, g, or t
agcgggggtgggcagggcgctggccgcgctgctgctggccgcgtccgtgctgagcgccgcgctgctggcccccggcggctcttcggggcgcgatgcccaggcngcggccgccacgagacttagacaaaaaaagacatgcagagctgaagatggatcaggctttgctactcatccataatgaacttctctggaccaacttgaccgtctactggaaatctgaatgctgttatcactgcttgtttcaggttctggtaaacgttcctcagagtccaaaagcagggaagcctagtgctgcagctgcctctgtcagcacccagcacggatctatcctgcagctgaacgacaccttggaagagaaagaagtttgtaggttggaatacagatttggagaatttggaaactattctctcttggtaaagaacatccataatggagttagtgaaattgcctgtgacctggctgtgaacgaggatccagttgatagtaaccttcctgtgagcattgcattccttattggtcttgctgtcatcattgtgatatcctttctgaggctcttgttgagtttggatgactttaacaattggatttctaaagccataagttctcgagaaactgatcgcctcatcaattctgagctgggatctcccagcaggacagaccctctcgatggtgatgttcagccagcaacgtggcgtctatctgccctgccgccccgcctccgcagcgtggacaccttcagggggattgctcttatactcatggtctttgtcaattatggaggaggaaaatattggtacttcaaacatgcaagttggaatgggctgacagtggctgacctcgtgttcccgtggtttgtatttattatgggatcttccatttttctatcgatgacttctatactgcaacgggggtgttcaaaattcagattgctggggaagattgcatggaggagtttcctgttaatctgcataggaattatcattgtgaatcccaattattgccttggtccattgtcttgggacaaggtgcgcattcctggtgtgctgcagcgattgggagtgacatactttgtggttgctgtgttggagctcctctttgctaaacctgtgcctgaacattgtgcctcggagaggagctgcctttctcttcgagacatcacgtccagctggccccagtggctgctcatcctggtgctggaaggcctgtggctgggcttgacattcctcctgccagtccctgggtgccctactggttatcttggtcctgggggcattggagattttggcaagtatccaaattgcactggaggagctgcaggctacatcgaccgcctgctgctgggagacgatcacctttaccagcacccatcttctgctgtactttaccacaccgaggtggcctatgaccccgagggcatcctgggcaccatcaactccatcgtgatggcctttttaggagttcaggcaggaaaaatactattgtattacaaggctcggaccaaagacatcctgattcgattcactgcttggtgttgtattcttgggctcatttctgttgctctgacgaaggtttctgaaaatgaaggctttattccagtaaacaaaaatctctggtccctttcgtatgtcactacgctcagttcttttgccttcttcatcctgctggtcctgtacccagttgtggatgtgaaggggctgtggacaggaaccccattcttttatccaggaatgaattccattctggtatacgtcggccacgaggtgtttgagaactacttcccctttcagtggaagctgaaggacaaccagtcccacaaggagcacctgactcagaacatcgtcgccactgccctctgggtgctcattgcctacatcctctatagaaagaagattttttggaaaatctgatggctcccactgagatgtgctgctggaagactctagtaggcctgcagggaggactgaagcagcctttgttaaagggaagcattcattaggaaattgactggctgcgtgtttacagactctgggggaagacactgatgtcctcaaactggttaactgtgacacggctcgccagaactctgcctgtctatttgtgacttacagatttgaaatgtaattgtcttttttcctccatcttctgtggaaatggatgtctttggaacttcattccgaggagataagctttaactttccaaaagggaattgccatgggtgtttttcttctgtggtgagtgaaacaatctgaggtctggttcttgctgaccttgttgccctgcaaacttcctttccacgtgtacgcgcacaccaacacgaaatgccatcactcctactgcggctgctatgaagcttactggttgtgatgtgttataatttagtctgtttttttgattgaatgcagtttaatgtttccagaaagccaaagtaattttcttttcagatatgcaaggctttggtgggtccaaaaaatgtctatcacaagccattttttccttttcctctctcgaaaagttaaaatatctatgtgttattcccaaaccctcttacctatgtatctgcctgtctgtccatcatcttccttcctccctatctctgtgtatctggatggcagccgctgcccaggggagtggctgtggggagggcaggtactgtctttgcctgtgggtccagctgagccatccctgctgggtgatgctgggcaagacccttggcccgtctgggccttggcttcctcacttgtgaaatgagcgggaagatgactctcagttccttccacctcttagacatggtgaggtaacagacatcaaaagcttttctgaaatcttcagaagaaatagttccattacagaaaactcttcaaaataaatagtagtgaaaacttttaaaaactctcattggagtaagtcttttcaagatgatcctccacaatggaggcagcgttcctacttgtcatcacacagctgaagacattgtttcttaggtgtgaaatcggggacaaaggacaaacagagacacacggcattgttcatgggaggcatcgtcaccctcctgggtgttctgtgggaatttcctgtgtgaggaaaacgtggccacagggttgtgctgtacccacccttccccggcgagatggccctcggcctgtgccgctgcttccaccctcgccactccatggcagcttttggtctgtttccggctctgccctctgccctgaactctcatccggcttgtacctgcctgctggacccctccacctggaggccagcccatgtctcaggcccagccctagcctcttctcctcaaattctaagtgttttctctttaggtttccctggctttgtgaatggatcatgtgtctctgtgtgtgtctgtatatttgtgtgtgtctgtgtatgtatgtgtgtgttttgtgtgtgtatgtgtatctctttgtgtctgtatatttgtgtgtgtctgatgggagtata

SEQ ID NO: 387217 - DNA, 910 bp, Homo sapiens
ggacagatagaatcgagccggtacccaggttagcctcttctcctcaaattctaagtgttttctctttaggtttccctggctttgtgaatggatcatgtgtctctaggtataaacctgacatcatctttccacccggcttacctccaccagatctccccagttctgtctccatcttctacctgcagctgctctgttctcatggtcactgctgcatcactgagtctggacccttgttatcattttcaaactggcctccttccctcgttccccacttcttaaagtcacctgtccattgccaccagattaagctttctccagccagatcacctctctctgagaaacctccattgacatggaaacaccattgtctggcacacatactcacatactcaccttcccgtcttgatccccacacatctttccagcctcccctcccactccactccctgctccctcctccacctccccatcctcttgtctcccctcccctctgaatccagcccagcggggcttctcctgcctccatcacatcacagaagtacctcctgcttctggttttaattagagccttccccgattacattttcctctgaattttttcctatctacatttgatctgtcatgtttaaaccccctacttctaagggaacttctctaatctcttatcctcatccccaaatagtgttttcttcctctgggttcttataatgttggtatcaatctcacagcatttagtgcttcctgcctggtgtgacagttacctgtgtgcatgtgcaatttctaatttcccacgctagactgtgagcttcctaaggcaagaatcatgccttgttggtttctgtattcctcatggtgccaaacacagtgccttctacattgcaggcgctgaataaacatttttaaagcaaaa

SEQ ID NO: 387218 - DNA, 1893 bp, Homo sapiens
  misc_feature (57)..(57): n is a, c, g, or t
aaactctgcaaaacactcatccgtagtgaccataaacatgacataccaaagcagagnctcagaaagatggagcaacagactgaggacattttcaacatggtacttggggatacctttgggaaagatgccttccccagcagaggccagcactgtggagagataggaccagagccactactggcacagttgtcaagatcttttgctttctgaactctggggaccgctgccttttagcctgaggggaatgtctccaaattaccccctattgccaccagattaagctttctccagccagatcacctctctctgagaaacctccattgacatggaaacaccattgtctggcacacatactcacatactcaccttcccgtcttgatccccacacatctttccagcctcccctcccactccactccctgctccctcctccacctccccatcctcttgtctcccctcccctctgaatccagcccagcggggcttctcctgcctccatcacatcacagaagtacctcctgcttctggttttaattagagccttccccgattacattttcctctgaattttttcctatctacatttgatctgtcatgtttaaaccccctacttctaagggaacttctctaatctcttatcctcatccccaaatagtgttttcttcctctgggttcttataatgttggtatcaatctcacagcatttagtgcttcctgcctggtgtgacagttacctgtgtgcatgtgcaatttctaatttcccacgctagactgtgagcttcctaaggcaagaatcatgccttgttggtttctgtattcctcatggtgccaaacacagtgccttctacattgcaggcgctgaataaacatttttaaagcaaaatgatgtggatttttaaaataaatatttaagtgctggtaagatgagcatgtatccggggtgcccatgaaatgttcttggggccgtgtggggacagtcgtcattcctcctcctgccacccttttctttcagtgagtcactgtggatggtcccagctgtgtcatcccaaagttcagcagggaaagctgagctgggcctctccaggtgagttttctagaagcatttctcaaactgtgggttacatcaacttgggtgtcttgagctgtaaggaaggaactccggagtcagctgggctacaggggagcttctctaagtcctgcgggaggccagacccagcctgagcttgctgttagctagcggaggcagctgctggtggcccaggtgctcgacaccaggcatcccctctcctcccacgaagggtgtgccataatccccttcaacaggaaatgcttcccagaagcctctcagcagcctcccctcctgtcctatcagctagaagcgcctcgcttgtcccaagaccagcagggacagggaactgtccgagcccgtggctgtgtggaggaaggcgacccccagcacaagattggtttcctttgggaagggaagagggagtgtgttggggtaaggggtagagcagaggaatggtcagggggcaacaaccgctgacagctgcaacaggtgcatggcatctcacagggaggcagggaggtgcgagctcctaagtaatggagcaaaaaaattctattctgtagaatggggagagaaaatgtgacattttaatttttttttgcatttatattcctaattcctacttaaagtgaatatactgccgctgtagatcataaaatgtatcttttccatggccaacaaggggcatcttttataaatgcataataacccagtttgtatcaaagggtatcgacttaagtgaaatttcaacatgctgttactttttccttttaatgtaattctgttttccaaataaatgggggagacaaatggaaaaaaaaaaa

SEQ ID NO: 387219 - DNA, 2054 bp, Homo sapiens
  misc_feature (103)..(103): n is a, c, g, or t
agcgggggtgggcagggcgctggccgcgctgctgctggccgcgtccgtgctgagcgccgcgctgctggcccccggcggctcttcggggcgcgatgcccaggcngcggccgccacgagacttagacaaaaaaagacatgcagagctgaagatggatcaggctttgctactcatccataatgaacttctctggaccaacttgaccgtctactggaaatctgaatgctgttatcactgcttgtttcaggttctggtaaacgttcctcagagtccaaaagcagggaagcctagtgctgcagctgcctctgtcagcacccagcacggatctatcctgcagctgaacgacaccttggaagagaaagaagtttgtaggttggaatacagatttggagaatttggaaactattctctcttggtaaagaacatccataatggagttagtgaaattgcctgtgacctggctgtgaacgaggatccagttgatagtaaccttcctgtgagcattgcattccttattggtcttgctgtcatcattgtgatatcctttctgaggctcttgttgagtttggatgactttaacaattggatttctaaagccataagttctcgagaaactgatcgcctcatcaattctgagctgggatctcccagcaggacagaccctctcgatggtgatgttcagccagcaacgtggcgtctatctgccctgccgccccgcctccgcagcgtggacaccttcagggggattgctcttatactcatggtctttgtcaattatggaggaggaaaatattggtacttcaaacatgcaagttggaatgggctgacagtggctgacctcgtgttcccgtggtttgtatttattatgggatcttccatttttctatcgatgacttctatactgcaacgggggtgttcaaaattcagattgctggggaagattgcatggaggagtttcctgttaatctgcataggaattatcattgtgaatcccaattattgccttggtccattgtcttgggacaaggtgcgcattcctggtgtgctgcagcgattgggagtgacatactttgtggttgctgtgttggagctcctctttgctaaacctgtgcctgaacattgtgcctcggagaggagctgcctttctcttcgagacatcacgtccagctggccccagtggctgctcatcctggtgctggaaggcctgtggctgggcttgacattcctcctgccagtccctgggtgccctactggttatcttggtcctgggggcattggagattttggcaagtatccaaattgcactggaggagctgcaggctacatcgaccgcctgctgctgggagacgatcacctttaccagcacccatcttctgctgtactttaccacaccgaggtggcctatgaccccgagggcatcctgggcaccatcaactccatcgtgatggcctttttaggagttcaggcaggaaaaatactattgtattacaaggctcggaccaaagacatcctgattcgattcactgcttggtgttgtattcttgtaagtaagcagcattcctcgctaaaattcctttccttcacatgtatagatatttaaaaggaataaaatgtttagcaacactgagctagccattgtcaccacatggcagcaggtaccattttcttcacttgaataacagagaggaacaaatctttccacctaaatgcacagatttattttcttaggaaaatgtctttatcaataaggcagtgtttgccatcagataggccaggaatgcctgaagaaatgtgaggtatgggctctgtgtggagaggcgtatcagagagactgggcaaatcagaccaggttgcagacatcaacttccagattatatgggaaagagagttgcaaggttgactgtttgttcatttcatcctgaccgcagccatgcctcctcttcagagtcactgtcatttaatcagtaagcttaccctcttcaactcagtagaatggtgaagagattttgggagagtatttttcagttcatacatttaaaaaaatatgtttccattt

SEQ ID NO: 387220 - DNA, 1324 bp, Homo sapiens
  misc_feature (103)..(103): n is a, c, g, or t
agcgggggtgggcagggcgctggccgcgctgctgctggccgcgtccgtgctgagcgccgcgctgctggcccccggcggctcttcggggcgcgatgcccaggcngcggccgccacgagacttagacaaaaaaagacatgcagagctgaagatggatcaggctttgctactcatccataatgaacttctctggaccaacttgaccgtctactggaaatctgaatgctgttatcactgcttgtttcaggttctggtaaacgttcctcagagtccaaaagcagggaagcctagtgctgcagctgcctctgtcagcacccagcacggatctatcctgcagctgaacgacaccttggaagagaaagaagtttgtaggttggaatacagatttggagaatttggaaactattctctcttggtaaagaacatccataatggagttagtgaaattgcctgtgacctggctgtgaacgaggatccagttgatagtaaccttcctgtgagcattgcattccttattggtcttgctgtcatcattgtgatatcctttctgaggctcttgttgagtttggatgactttaacaattggatttctaaagccataagttctcgagaaactgatcgcctcatcaattctgagctgggatctcccagcaggacagaccctctcgatggtgatgttcagccagcaacgtggcgtctatctgccctgccgccccgcctccgcagcgtggacaccttcagggggattgctcttatactcatggtctttgtcaattatggaggaggaaaatattggtacttcaaacatgcaagttggaatgggctgacagtggctgacctcgtgttcccgtggtgagttgccggtctgccctcttctcttccacgggttgactccaatctcctgtttttcagatgatgctggagcctctcttctgagacgggcatgtgttatgtggttaggaagtccttccaaaagtcctgttactggatagttctcatacttgacccagtgcctacacgtgtgtataaaagagtgatttggggccgggcgcggtggctcacgcctgtaatcctagcactttgggaggctgaggcaggcgaattacctgaggtcaggagttcaagaccagcctggccaacatggtgaaactctgtctctactaaaaatacaaaaaattagctgggtgcagtggcacgtgcctgtaatcccagctactcgggaggctgaggaaggagaatcacttgaacccaggaggcgggggttgcggtgagcagagatcacgccactgcactccagcctgggcgacagagtgagacttcatctca

SEQ ID NO: 387221 - DNA, 2320 bp, Homo sapiens
atgggttccaaaaagagaactacccctctcctggtacatttccaggtgtttttcacagggcaagtggatttcacaatgtgagtgctgtcagcaccaaagggaatggccaacaggcatgaagcagcctttgttaaagggaagcattcattaggaaattgactggctgcgtgtttacagactctgggggaagacactgatgtcctcaaactggttaactgtgacacggctcgccagaactctgcctgtctatttgtgacttacagatttgaaatgtaattgtcttttttcctccatcttctgtggaaatggatgtctttggaacttcattccgaggagataagctttaactttccaaaagggaattgccatgggtgtttttcttctgtggtgagtgaaacaatctgaggtctggttcttgctgaccttgttgccctgcaaacttcctttccacgtgtacgcgcacaccaacacgaaatgccatcactcctactgcggctgctatgaagcttactggttgtgatgtgttataatttagtctgtttttttgattgaatgcagtttaatgtttccagaaagccaaagtaattttcttttcagatatgcaaggctttggtgggtccaaaaaatgtctatcacaagccattttttccttttcctctctcgaaaagttaaaatatctatgtgttattcccaaaccctcttacctatgtatctgcctgtctgtccatcatcttccttcctccctatctctgtgtatctggatggcagccgctgcccaggggagtggctgtggggagggcaggtactgtctttgcctgtgggtccagctgagccatccctgctgggtgatgctgggcaagacccttggcccgtctgggccttggcttcctcacttgtgaaatgagcgggaagatgactctcagttccttccacctcttagacatggtgaggtaacagacatcaaaagcttttctgaaatcttcagaagaaatagttccattacagaaaactcttcaaaataaatagtagtgaaaacttttaaaaactctcattggagtaagtcttttcaagatgatcctccacaatggaggcagcgttcctacttgtcatcacacagctgaagacattgtttcttaggtgtgaaatcggggacaaaggacaaacagagacacacggcattgttcatgggaggcatcgtcaccctcctgggtgttctgtgggaatttcctgtgtgaggaaaacgtggccacagggttgtgctgtacccacccttccccggcgagatggccctcggcctgtgccgctgcttccaccctcgccactccatggcagcttttggtctgtttccggctctgccctctgccctgaactctcatccggcttgtacctgcctgctggacccctccacctggaggccagcccatgtctcaggcccagccctagcctcttctcctcaaattctaagtgttttctctttaggtttccctggctttgtgaatggatcatgtgtctctaggtataaacctgacatcatctttccacccggcttacctccaccagatctccccagttctgtctccatcttctacctgcagctgctctgttctcatggtcactgctgcatcactgagtctggacccttgttatcattttcaaactggcctccttccctcgttccccacttcttaaagtcacctgtccattgccaccagattaagctttctccagccagatcacctctctctgagaaacctccattgacatggaaacaccattgtctggcacacatactcacatactcaccttcccgtcttgatccccacacatctttccagcctcccctcccactccactccctgctccctcctccacctccccatcctcttgtctcccctcccctctgaatccagcccagcggggcttctcctgcctccatcacatcacagaagtacctcctgcttctggttttaattagagccttccccgattacattttcctctgaattttttcctatctacatttgatctgtcatgtttaaaccccctacttctaagggaacttctctaatctcttatcctcatccccaaatagtgttttcttcctctgggttcttataatgttggtatcaatctcacagcatttagtgcttcctgcctggtgtgacagttacctgtgtgcatgtgcaatttctaatttcccacgctagactgtgagcttcctaaggcaagaatcatgccttgttggtttctgtattcctcatggtgccaaacacagtgccttctacattgcaggcgctgaataaacatttttaaagcaaaa

SEQ ID NO: 387222 - DNA, 452 bp, Homo sapiens
ggcataaattccttttttttttttcattatttttcagttatctctgtcaaatactgaggagccagaggcattttgttcccgcccttccttcctagtcctgatgtgattggtttgcacatgaccatggaggtggatggagggtttgtatattacatatataaaagaaggcacaaacaacagcctaagaactggataaccttttcctacttcccagcatcacgtgctttcaaaggccacctcttattttacacttgtttcaggtaaaggatagactagagaactggccttaaacttacacccagtttcaagtcctgacttgccaacttattaactgtgtgatcttgagcaaatcacttcatctttctaaagcctccgttctttttcatctataaagtggggatgatactctcaacttcagagttgtgaacactgaataatttctataaagtttt

SEQ ID NO: 387223 - DNA, 222 bp, Homo sapiens
ggaagcctgggtcactcaacactgtgcccctgctgtggctgggagccatgggtcctgcatggaactctcagagcaggcaggatccgccccaacctcagcccacggggaaagcagccactgcctgcagagagggtggggctgggacaggaggctcggggtgagtggggtgtagggacaatcaggaatccttccagggggtgccagggccgtctccacctcctg

SEQ ID NO: 387224 - DNA, 448 bp, Homo sapiens
gacttcagagaagagtctgcctggagatggccagactccaggggaagatcaccttcctgccccatccccctttcagctccccttcccactgcaagctgctttcatcagcaataaaatcctctgcattcaccaccattcgatttgttcgtgcaacctcattcctcctggacatcagacaaggacttgggtgtgggtgcaaaaggctgtcacactgatcttctactgagctgttaacacttaagccatctgcagacagcaaagataaaacagcacactgtaacgtatgcccttttaggcttcaaggttcgtgggtacataccccctagatgttaccaccagggtgcatggagttttggtcctgtcagtgtccaaaagtgcttgctgcagcttttgcacctgctcacctgcacgctccctctcccacagggggttgagagctgtaggccaa

SEQ ID NO: 387225 - DNA, 222 bp, Homo sapiens
tcaacaaaatttctaaaaagttaaaacaaaaatgccacacatcagaatctatgacatttatttaaaacagtgattaaaggaaaattcatagccttaaaaatttatacaaatttgtctgaacccatagaatgcacaacagcaagagtgagtgaacaacagtgtaaactacggattttgggtgattatgatgagtcaatgaaaaatacaaaagtaatgagataa

SEQ ID NO: 387226 - DNA, 382 bp, Homo sapiens
aactaaagagagtgaattttattttagaggttatctttattttaggaattttaaaaatatattatagaaaaggctggaaatttatgcctatgggagacaattttatttctcttgtttcaataatagcaattaaaaaacaagacattaactgtcagtaatctattatggtgagggttatatgaatatatacatgtgttaaaatgtatggaactatacaccaaaaaagtcaagtttactatatgataccgtagaaaataaaatttttaaaaatcaatgcattgatataatgtacaagagaaacatatatattactgtaaaaatgctgtattagtttcctatggctgctgtaacaaagtatcacaaactggattggcttaaaacc

SEQ ID NO: 387227 - DNA, 1049 bp, Homo sapiens
acggggttatgtaggagcaatgcagagccacttttgaaaaacagtagccaaggttctactggctgccttcttaggacattattaaatatcataaacacaagtggaatttaacacccagccagtttgtgttcaaccagacagcgtcattatgaacaaagattatataacgatagctgatattaagtaagttttaaaagttgacatcccaagagtgaagcctacttattcagtacagatttgttgaatgaaattcgtagttttattttacggcataatgaaacagagttccagacatgtacctgccaaatttggttctggttgtcttatcgtatgcaggctggatacctgctactgtgcttctacaggatgttaacagtgtcccctgagtaaaacagttccacggtcagtacatttgggaaccactgagttaaatgggttttatcactgcagaacagacacaagaacaatgtgtgctgtaaatcactgtttgcagggaaggtggcagcaaatggcacagaaacccacctgaccacagactgctttcttctgggcgttcacgcactgtgctccacaggatactcttgagaaacattgagctatggttggtctgttgtttgaaattcaaataataaagaatccattttaaggacaggaattggtttactgaccttgatgttgggatgactcttcatttcagggtgaaaatatcacagcatcagcacaggccaggaccacagagataacaaggtggtagttgtgtaacaggttgtgtctgaaccacaggagcttcaaaacatacacggctggacaccctgccaggatgctctaatggggctgggcatgtgtccatgaaaaagactccccagttgtttctaaaatgtggcctttgttctagaaatgcaatgaccagcatttgggagtcagtcaaaagatccacttcctaaaagcctacctgctcatttctttcattcaatacatattaaccaagtgcctactttgtttgagtccatgcctggcaatgacattattccattaaaagtcaaacaagg

SEQ ID NO: 387228 - DNA, 538 bp, Homo sapiens
atgattgtgtgccatgagttacacacagactcctaaatcagtttcacctgtggtgtcctcattctgtttactttgagcattttgcattctatatctgcttagttatatggatttattcgtcccatataatatgtgtagccacatggacacatgttctaaaaggttttaaattctgcaagatagtgacgatgatgtaaacacaagaaaagggcaaatggatacattttcctactctgtgctcatcaaacatattacaggataaaattattggctatctaataaaaacacagactaataagacctgataagttggacaaaatgtttaaaaattaacatgaagatgataggaagtatgaatctatattcactgtcattaatgtcaaacctttaccttatggtatattgtactttgagaaattatggccaggcatggtggctcacacctataatcctagcactttgggaggctgagacaggaggatctcttgagcccaggagttcgagaccagcctgggcaacacagggagacactgtcttt

SEQ ID NO: 387229 - DNA, 857 bp, Homo sapiens
ggacattagtcactggatctagggtccaccctaagtccaggatgatcttatctcaagatccttaacttaatttcatctacaaaaccctatttccaaataagatcacattcacaggtacagggggccatggactgaatgtgtccccccagaattcctatgctgaaatcctaatccctgtgtgacagtatttggaggcggggcctttgggaggtgattacgctgtgagagtggagccgtcatgaatgggatcagcgcctttatgagaagaggctggagaccgaccatgtgaggatacggggggagggtagtgctcttgagcccagaagcaggtcctcgccagaactgaccatgctagcaccttgatcttggatttgcagcctccagacggtgagagacgactgtctgctgtttaagccacccagtcttggcatttcttataacagccctaagtgataactgatttgggtgcccctattcaacccttgttttgacttagatgacattctctacagggaaaatttcttaggactattggacaaaatataaagttcttttcttgctttttggttttgcaaaaaaaagaaagaaagatgaatgggtcaatgagaacatctgaaaagtctggagtatcactgaggaaatagagggcgattgagaatccgaaagtgaatggaaacctacaacagaagtgagatatgcttttctgttgtcacctcatcggactgtgtgtgatgacacaaatgccaatagccggcaaactgcgaggaaccgaacatgatcctgacagtctcaggagtgcccccgctgaatgatttttaagttgaatatctgactaaaataaataattgtctcatttc

SEQ ID NO: 387230 - DNA, 497 bp, Homo sapiens
ggacattagtcactggatctagggtccaccctaagtccaggatgatcttatctcaagatccttaacttaatttcatctacaaaaccctatttccaaataagatcacattcacaggtacagggggccatggactgaatgtgtccccccagaattcctatgctgaaatcctaatccctgtgtgacagtatttggaggcggggcctttgggaggtgattacgctgtgagagtggagccgtcatgaatgggatcagcgcctttatgagaagaggctggagaccgaccatgtgaggatacggggggagggtagtgctcttgagcccagaagcaggtcctcgccagaactgaccatgctagcacctcccaaatgccccgcctccaaatactgtcacacagggattaggatttcagcataggaattctggggggacacattcagtccatggccccctgtacctgtgaatgtgatcttatttggaaatagggttttgtaggtcga

SEQ ID NO: 387231 - DNA, 480 bp, Homo sapiens
cttgcagcctgcacttatgagtcaacaacttaatatgactagctttctacaatagcttttatagtaaagatacctggggacggactccacttatgactccctaaagcccatgtcgaagcccccatcgctgggtcaatagtacttgccgcagaactcttaaaactaggcggctatggtataatacgcctcacactcattctcaaccccctgacaaaacacatagcctaccccttccttgtactatccctatgaggcataattgtaacaagctccatctgcctacgacaaacagacctaaaatcgctcattgcatactcttcaatcagccacatagccctcgtagtaacagcctgggtgacagagcgggactccgtttcaaaagaaaaccaaaaaaacaaaaaaggtaaaaggggctactttatttaaacagggagaaagtaaggaaggaaggaagaatgccagacatttcaaagtatgaat

SEQ ID NO: 387232 - DNA, 286 bp, Homo sapiens
aactctggcaataaactgctgagaactgcacagcagcacttcccagctatctgccatatgagaattagaacaaaacaatgcaacccaaatgggaaggtggaagtgcacaatgaatacacaaagctataaactaagtgataatttttgtcttgattgtgtgagctaactattaagaagattataattaagagttcatttcttatagtaccaacaagcattttaatcaaccttgatagcattagctccaattaccattagtaaactataaagattctgttttaaattg

SEQ ID NO: 387233 - DNA, 920 bp, Homo sapiens
gaccagagaggcacatgtcaccaatttcagttctgccccagctggcctgaggcagctcgggacttcccagggtggaaggataggtccgggggccaggctacttggaggcagggccaggtcttgaggaccccctccccagcccagctgtctgccggggaggcagctctgggttcctggagtgggctggctacggaggtgtgtgcctccctggcggccctcatctctcccggagccctagagcaggtctttctaagacttcccactcatcagccccggcccaagattatcactacaaaagacgtccttggcccactgtcccctcaaaatgaaagctttaagaacagctgcccagaggtgtctgagaaaaactccaggatgagagtgaggggtaccaggccgtcagctctccccaggctgaaggatgaggtggaaaccacgaaagcccccaaaacaaagccatcttctccacacctccaggctgttccctaaagaaggaaagcggggaatggggtggggagggcgagtggagcccccgcctcgggcggtcagcaccggcgtcagcagggaagcaggcccctggccagggagcgcatctgaccggaccgaccgtgttcttgggagatcagttgtgaaacttgcatcaaacccccaaaccacaaaaacggccagttttcccagctctgttctcatgcttctcagaccagccgaggagtcttcagcatctccagccgagagaagccaggccagctgccagcgccgggggaggagaaaaccccaagtgcctggagacccgagccccaagtttgcctgaagcaccctgctcccttcaacgagcctgggaatgtgaggtctggagaaagggtgaggcctgggccggctccactgcacctggagccgggtgcagtggctcacgcctgtaa

SEQ ID NO: 387234 - DNA, 5528 bp, Homo sapiens
gagcgcacggcggcggcagaggcggcggcggccgggcctaggagcgactctcggtcgtgcagcggcggcgagcgctcgcgagcggctgcgggacgcgaggtttccggagctgagctcaatgtgcagcaatggatgacgacagcctggatgagcttgtggcccggagcccagggccggatggacacccacaggtcggccctgcggacccggcaggtgactttgaagaaagcagcgtgggcagcagtggggactctggggacgacagtgacagcgagcatggagatggcacagacggagaagacgagggggcgtctgaggaggaagacctggaagacagatctggttccgaggattctgaagacgacggggagacattgctggaggtagcgggtactcaggggaaactggaagccgctggctctttcaattctgatgatgatgcagagagctgcccaatctgtctcaacgcattcagagaccaggccgtggggacgccggagaactgtgcccattacttctgcctggactgcattgtcgaatggtccaagaatgccaattcctgtccagttgatcgaactctatttaagtgcatttgtattcgagctcaatttggtggtaaaatcttaaaaaagatcccagtggagaacaccaaagcgagcgaggaggaggaggacccgaccttctgtgaggtgtgcggcaggagcgaccgtgaggacaggcttttgctctgcgacggctgcgatgcggggtaccacatggaatgcttggacccccctctccaggaggtgccggtggacgagtggttctgcccggaatgtgctgcgcctggtgttgtccttgccgctgatgcgggtcccgtgagtgaggaggaggtctccctgctcttggctgatgtggtgcccaccaccagcaggcttcggcctcgagcaggtaggacccgggcgatagccaggacacggcagagtgagagagtgagagcaaccgtgaaccggaaccggatctccacggccaggagggtccagcacacaccagggcgcctcgggtcttccctgctggatgaagccatcgaggctgtggcgactggcctgagcactgccgtgtatcagcgccccctgacgccgcgcactcccgcccgacggaagaggaagacaagaagacggaagaaagtgccgggaagaaagaaaaccccgtccggaccatccgcaaaaagtaagagctcagcgacaagatctaagaaacgccaacatcgagtgaagaagagaagagggaagaaggtaaagagtgaagccaccactcgctctcgaatcgcgcggacgctgggcctgcgcaggcctgttcacagcagctgcatcccgtcagtgttgaagccagtggagccctctttggggctgctgagagcggatattggagctgcctctctgtctctgtttggagatccttatgagctggatcccttcgacagcagtgaagagctttctgcaaaccctctttcccctctgagtgccaagagacgggctctgtcccggtcagccctgcagtcccaccagcccgtggccaggcccgtctccgtggggctttccaggaggcgcctccctgccgcggtgccagagccagacttggaggaggagccagtgcctgacctgctgggcagcatcctgtcgggccagagcctcctgatgctgggcagcagtgatgtcatcatccaccgcgacggctccctcagcgccaagagggcggctccagtttcttttcagcgaaactcaggcagtctgtccagaggggaagaaggattcaagggctgcctgcagccccgagcactgccctccgggagcccggcccaaggcccgtcaggaaacaggccacagagcacagggctcagctgtcaaggcaggtcccgcacccccgcccgcaccgcgggggcgcctgtgaggctggacttgccagcagcccctggggcggttcaggctcggaacttgtcaaatgggagtgtgcctggcttcagacagagccacagcccctggttcaacggcaccaacaagcacaccttgccccttgcctctgccgcgtctaagatctcaagcagagattctaagcccccatgtcgcagtgtggtgccggggcctcccctgaagccagcgcccagaagaacagacatctctgagctacccaggataccaaagatcaggagagatgacggtggtggcagacgggatgcggccccggcccacgggcagagcattgagatccccagtgcctgcatcagccgactgactggcagggagggcaccgggcagccagggcgaggcacacgggcagagagcgaggccagcagcagggtgccccgggagcccggggtgcacacgggcagctcccggcccccagcccccagctcccatggcagtttggccccactgggaccatcaagagggaaaggggtcgggtcgacctttgagagcttccggatcaatattcctggaaacatggcacattccagccagctctccagccctggcttctgtaacacgttccggcctgtggacgataaggagcagaggaaggagaacccctcacccctcttctccatcaagaagacgaagcagctgcggagcgaggtctacgacccatccgaccccaccggctccgactccagcgcccctggcagcagccccgagaggtctggccccggcctcctgccctctgagatcacacgaaccatctccatcaacagcccgaaggcccagacggtgcaggctgtgcgctgcgtcacctcctacacggtggagagcatctttggtacagagcccgaaccccctctcggaccgtcctccgccatgtccaagctccggggtgcagtggctgccgagggggcctctgacacggagcgagaggagcccacagagagccagggcctggctgcccggctgcggaggccatcccccccagagccctgggatgaggaggatggggcgtcttgcagcaccttctttggctctgaggagcggacggtgacctgtgtgactgtcgtggagccggaagccccacccagcccggacgtgctgcaggctgccacccacagagtcgtggagctcaggcccccttcccggtcccgctccacatccagctcccgcagcaggaagaaggccaagaggaagagggtgtccagggagcacggacggacgcgctctgggacgcgctctgaatccagggacaggagctcgaggtcagcgtcaccatcagtgggtgaggagcgccccaggaggcagcggtccaaggccaagagccggcggtcctccagtgaccgctccagcagccgagagcgagctaagaggaagaaagccaaggacaagagcagggagcacaggcggggcccctggggccacagccggaggacgtcccggtcgcggtcggggagccctggcagctcttcctatgagcactatgagagtaggaagaagaagaaaaggagatcagcgtccagacctcggggaagggagtgctcccccaccagcagcctggagaggctctgcaggcacaagcatcagcgggaacgcagccacgagcggccagacaggaaggagagtgtggcgtggccccgagaccggaggaagcggaggtcccggtccccaagctcggagcacagggcacgggagcacaggcggcctcggtcccgtgagaagtggccgcagacccggtcccattccccagagaggaagggggctgtgagggaggcttccccagcgccccttgcacagggggagccagggcgggaagacctccccaccaggttgccagccttgggggaagcacatgtctcgccggaggtggctacggccgacaaggcccccctgcaggctccccctgtcctggaggtggcagctgagtgtgagccggacgacctggacctggattatggcgactccgtggaggccggacacgtctttgatgatttctcaagcgacgccgttttcatccagctcgatgacatgagctcgccaccttctcccgaaagcacagactcttccccggagcgagacttcccactgaagcctgcgttgcccccagccagcctggccgtggccgccatccagagggaggtgtcattgatgcacgatgaagacccttcgcagcccccacccctgccagagggcacccaggagccacatttgctcaggccggacgcggctgagaaggctgaggcacccagttccccggatgtggcgcctgcggggaaggaagacagcccctctgcgagtgggagggtacaggaggcagcccggcctgaggaggtggtttcgcagacccccctgctgcggtccagagccctggtgaagcgggtcacctggaacctgcaggagtcggagagcagcgcccccgccgaggacagagccccccgggcaccacttcacaggccacagaagccccgagaaggagcctgggacatggaggatgtggcccccacaggggtcaggcaggcgttctccgagctgccctttcccagtcacgtgcttccggaacccgggttcccagacacagacccctctcaggtttacagccccggcctgccgcctgccccggcccagccctcaagcatcccaccctgcgcactggtcagccagcccacggtccagttcatccttcaggggagcctgccgctagtgggctgtggggcagcacagaccctggccccagtgcccgctgccctgaccccagcctcagagccagccagtcaagccactgcagccagcaactcggaggagaagaccccggcccccaggctagctgcggagaaaaccaagaaggaggagtacatgaagaagctgcacatgcaggagcgtgctgtggaggaggtgaagctggccatcaagcccttctaccagaagagggaggtgaccaaggaggagtacaaggacatcctgcgcaaggccgtgcagaagatctgccacagcaagagtggagagatcaaccccgtgaaggtggccaacctggtgaaggcgtacgtggacaagtacaggcacatgcgcaggcacaagaaaccagaggccggggaggagccgcccacgcagggggccgagggctgaggccaggcaatcacgggctatgcccggggagctgtcgggagtggcgggaatcggggccatgcccggggagctgtcgggagtggcgggaatcggggccatgcccggggagctgtcgggagtggcgggaaatggggggcatcaccatgcctgccgtcgggttcctgcgctgacacctggtctgtgcacctgtgttgctcacagttgaaaactggacacttttgtatgtatattatagagacactgtttccattctaatttatcaaaaatggattatctttagaaacctcttgattgacttactacttggaagataaagcacttggtgatcaagaggggctcctggtggggtggcgcgtccttgataaatctctaggtggcctcccgccaacagctgctgtgtacctttggctctgaattaggaatatctttactttctcttttccaattatg

SEQ ID NO: 387235 - DNA, 3128 bp, Homo sapiens
gagcgcacggcggcggcagaggcggcggcggccgggcctaggagcgactctcggtcgtgcagcggcggcgagcgctcgcgagcggctgcgggacgcgaggtttccggagctgagctcaatgtgcagcaatggatgacgacagcctggatgagcttgtggcccggagcccagggccggatggacacccacaggtcggccctgcggacccggcaggtgactttgaagaaagcagcgtgggcagcagtggggactctggggacgacagtgacagcgagcatggagatggcacagacggagaagacgagggggcgtctgaggaggaagacctggaagacagatctggttccgaggattctgaagacgacggggagacattgctggaggtagcgggtactcaggggaaactggaagccgctggctctttcaattctgatgatgatgcagagagctgcccaatctgtctcaacgcattcagagaccaggccgtggggacgccggagaactgtgcccattacttctgcctggactgcattgtcgaatggtccaagaatgccaattcctgtccagttgatcgaactctatttaagtgcatttgtattcgagctcaatttggtggtaaaatcttaaaaaagatcccagtggagaacaccaaagcgagcgaggaggaggaggacccgaccttctgtgaggtgtgcggcaggagcgaccgtgaggacaggcttttgctctgcgacggctgcgatgcggggtaccacatggaatgcttggacccccctctccaggaggtgccggtggacgagtggttctgcccggaatgtgctgcgcctggtgttgtccttgccgctgatgcgggtcccgtgagtgaggaggaggtctccctgctcttggctgatgtggtgcccaccaccagcaggcttcggcctcgagcaggtaggacccgggcgatagccaggacacggcagagtgagagagtgagagcaaccgtgaaccggaaccggatctccacggccaggagggtccagcacacaccagggcgcctcgggtcttccctgctggatgaagccatcgaggctgtggcgactggcctgagcactgccgtgtatcagcgccccctgacgccgcgcactcccgcccgacggaagaggaagacaagaagacggaagaaagtgccgggaagaaagaaaaccccgtccggaccatccgcaaaaagtaagagctcagcgacaagatctaagaaacgccaacatcgagtgaagaagagaagagggaagaaggtaaagagtgaagccaccactcgctctcgaatcgcgcggacgctgggcctgcgcaggcctgttcacagcagctgcatcccgtcagtgttgaagccagtggagccctctttggggctgctgagagcggatattggagctgcctctctgtctctgtttggagatccttatgagctggatcccttcgacagcagtgaagagctttctgcaaaccctctttcccctctgagtgccaagagacgggctctgtcccggtcagccctgcagtcccaccagcccgtggccaggcccgtctccgtggggctttccaggaggcgcctccctgccgcggtgccagagccagacttggaggaggagccagtgcctgacctgctgggcagcatcctgtcgggccagagcctcctgatgctgggcagcagtgatgtcatcatccaccgcgacggctccctcagcgccaagagggcggctccagtttcttttcagcgaaactcaggcagtctgtccagaggggaagaaggattcaagggctgcctgcagccccgagcactgccctccgggagcccggcccaaggcccgtcaggaaacaggccacagagcacagggctcagctgtcaaggcaggtcccgcacccccgcccgcaccgcgggggcgcctgtgaggctggacttgccagcagcccctggggcggttcaggctcggaacttgtcaaatgggagtgtgcctggcttcagacagagccacagcccctggttcaacggcaccaacaagcacaccttgccccttgcctctgccgcgtctaagatctcaagcagagattctaagcccccatgtcgcagtgtggtgccggggcctcccctgaagccagcgcccagaagaacagacatctctgagctacccaggataccaaagatcaggagagatgacggtggtggcagacgggatgcggccccggcccacgggcagagcattgagatccccagtgcctgcatcagccgactgactggcagggagggcaccgggcagccagggcgaggcacacgggcagagagcgaggccagcagcagggtgccccgggagcccggggtgcacacgggcagctcccggcccccagcccccagctcccatggcagtttggccccactgggaccatcaagagggaaaggggtcgggtcgacctttgagagcttccggatcaatattcctggaaacatggcacattccagccagctctccagccctggcttctgtaacacgttccggcctgtggacgataaggagcagaggaaggagaacccctcacccctcttctccatcaagaagacgaagcagctgcggagcgaggtctacgacccatccgaccccaccggctccgactccagcgcccctggcagcagccccgagggctgaggccaggcaatcacgggctatgcccggggagctgtcgggagtggcgggaatcggggccatgcccggggagctgtcgggagtggcgggaatcggggccatgcccggggagctgtcgggagtggcgggaaatggggggcatcaccatgcctgccgtcgggttcctgcgctgacacctggtctgtgcacctgtgttgctcacagttgaaaactggacacttttgtatgtatattatagagacactgtttccattctaatttatcaaaaatggattatctttagaaacctcttgattgacttactacttggaagataaagcacttggtgatcaagaggggctcctggtggggtggcgcgtccttgataaatctctaggtggcctcccgccaacagctgctgtgtacctttggctctgaattaggaatatctttactttctcttttccaattatg

SEQ ID NO: 387236 - DNA, 380 bp, Homo sapiens
gggttcccagacacagacccctctcaggtgggtgtctgggctggagggctgtgggccgtgggcagtggcctggcacccgtgccacacacaccacactaggctggggctgaggcctcacagctcctgggcacagagctgctagctgtagggcccagtgctcagcaggggtgtccctcccaggtttacagccccggcctgccgcctgccccggcccagccctcaagcatcccaccctgcgcactggtcagccagcccacggtccagttcatccttcaggggagcctgccgctagtgggctgtggggcagcacagaccctggccccagtgcccgctgccctgaccccagcctcagagccagccagtcaagccactgcagccag

SEQ ID NO: 387237 - DNA, 461 bp, Homo sapiens
gctctggcccggaacatctggatgtgaaagggcatttggtgattgcacctctttctccagatctgccacagcaagagtggagagatcaaccccgtgaaggtggccaacctggtgaaggcgtacgtggacaagtacaggcacatgcgcaggcacaagaaaccagaggccggggaggagccgcccacgcagggggccgagggctgaggccaggcaatcacgggctatgcccggggagctgtcgggagtggcgggaatcggggccatgcccggggagctgtcgggagtggcgggaatcggggccatgcccggggagctgtcgggagtggcgggaaatggggggcatcaccatgcctgccgtcgggttcctgcgctgacacctggtctgtgcacctgtgttgctcacagttgaaaactggacacttttgtatgtatattatagagacactgtttccattctaatt

SEQ ID NO: 387238 - DNA, 5185 bp, Homo sapiens
gagcgcacggcggcggcagaggcggcggcggccgggcctaggagcgactctcggtcgtgcagcggcggcgagcgctcgcgagcggctgcgggacgcgaggtttccggagctgagctcaatgtgcagcaatggatgacgacagcctggatgagcttgtggcccggagcccagggccggatggacacccacaggtcggccctgcggacccggcaggtgactttgaagaaagcagcgtgggcagcagtggggactctggggacgacagtgacagcgagcatggagatggcacagacggagaagacgagggggcgtctgaggaggaagacctggaagacagatctggttccgaggattctgaagacgacggggagacattgctggaggtagcgggtactcaggggaaactggaagccgctggctctttcaattctgatgatgatgcagagagctgcccaatctgtctcaacgcattcagagaccaggccgtggggacgccggagaactgtgcccattacttctgcctggactgcattgtcgaatggtccaagaatgccaattcctgtccagttgatcgaactctatttaagtgcatttgtattcgagctcaatttggtggtaaaatcttaaaaaagatcccagtggagaacaccaaagcgagcgaggaggaggaggacccgaccttctgtgaggtgtgcggcaggagcgaccgtgaggacaggcttttgctctgcgacggctgcgatgcggggtaccacatggaatgcttggacccccctctccaggaggtgccggtggacgagtggttctgcccggaatgtgctgcgcctggtgttgtccttgccgctgatgcgggtcccgtgagtgaggaggaggtctccctgctcttggctgatgtggtgcccaccaccagcaggcttcggcctcgagcaggtaggacccgggcgatagccaggacacggcagagtgagagagtgagagcaaccgtgaaccggaaccggatctccacggccaggagggtccagcacacaccagggcgcctcgggtcttccctgctggatgaagccatcgaggctgtggcgactggcctgagcactgccgtgtatcagcgccccctgacgccgcgcactcccgcccgacggaagaggaagacaagaagacggaagaaagtgccgggaagaaagaaaaccccgtccggaccatccgcaaaaagtaagagctcagcgacaagatctaagaaacgccaacatcgagtgaagaagagaagagggaagaaggtaaagagtgaagccaccactcgctctcgaatcgcgcggacgctgggcctgcgcaggcctgttcacagcagctgcatcccgtcagtgttgaagccagtggagccctctttggggctgctgagagcggatattggagctgcctctctgtctctgtttggagatccttatgagctggatcccttcgacagcagtgaagagctttctgcaaaccctctttcccctctgagtgccaagagacgggctctgtcccggtcagccctgcagtcccaccagcccgtggccaggcccgtctccgtggggctttccaggaggcgcctccctgccgcggtgccagagccagacttggaggaggagccagtgcctgacctgctgggcagcatcctgtcgggccagagcctcctgatgctgggcagcagtgatgtcatcatccaccgcgacggctccctcagcgccaagagggcggctccagtttcttttcagcgaaactcaggcagtctgtccagaggggaagaaggattcaagggctgcctgcagccccgagcactgccctccgggagcccggcccaaggcccgtcaggaaacaggccacagagcacagggctcagctgtcaaggcaggtcccgcacccccgcccgcaccgcgggggcgcctgtgaggctggacttgccagcagcccctggggcggttcaggctcggaacttgtcaaatgggagtgtgcctggcttcagacagagccacagcccctggttcaacggcaccaacaagcacaccttgccccttgcctctgccgcgtctaagatctcaagcagagattctaagcccccatgtcgcagtgtggtgccggggcctcccctgaagccagcgcccagaagaacagacatctctgagctacccaggataccaaagatcaggagagatgacggtggtggcagacgggatgcggccccggcccacgggcagagcattgagatccccagtgcctgcatcagccgactgactggcagggagggcaccgggcagccagggcgaggcacacgggcagagagcgaggccagcagcagggtgccccgggagcccggggtgcacacgggcagctcccggcccccagcccccagctcccatggcagtttggccccactgggaccatcaagagggaaaggggtcgggtcgacctttgagagcttccggatcaatattcctggaaacatggcacattccagccagctctccagccctggcttctgtaacacgttccggcctgtggacgataaggagcagaggaaggagaacccctcacccctcttctccatcaagaagacgaagcagctgcggagcgaggtctacgacccatccgaccccaccggctccgactccagcgcccctggcagcagccccgagaggtctggccccggcctcctgccctctgagatcacacgaaccatctccatcaacagcccgaaggcccagacggtgcaggctgtgcgctgcgtcacctcctacacggtggagagcatctttggtacagagcccgaaccccctctcggaccgtcctccgccatgtccaagctccggggtgcagtggctgccgagggggcctctgacacggagcgagaggagcccacagagagccagggcctggctgcccggctgcggaggccatcccccccagagccctgggatgaggaggatggggcgtcttgcagcaccttctttggctctgaggagcggacggtgacctgtgtgactgtcgtggagccggaagccccacccagcccggacgtgctgcaggctgccacccacagagtcgtggagctcaggcccccttcccggtcccgctccacatccagctcccgcagcaggaagaaggccaagaggaagagggtgtccagggagcacggacggacgcgctctgggacgcgctctgaatccagggacaggagctcgaggtcagcgtcaccatcagtgggtgaggagcgccccaggaggcagcggtccaaggccaagagccggcggtcctccagtgaccgctccagcagccgagagcgagctaagaggaagaaagccaaggacaagagcagggagcacaggcggggcccctggggccacagccggaggacgtcccggtcgcggtcggggagccctggcagctcttcctatgagcactatgagagtaggaagaagaagaaaaggagatcagcgtccagacctcggggaagggagtgctcccccaccagcagcctggagaggctctgcaggcacaagcatcagcgggaacgcagccacgagcggccagacaggaaggagagtgtggcgtggccccgagaccggaggaagcggaggtcccggtccccaagctcggagcacagggcacgggagcacaggcggcctcggtcccgtgagaagtggccgcagacccggtcccattccccagagaggaagggggctgtgagggaggcttccccagcgccccttgcacagggggagccagggcgggaagacctccccaccaggttgccagccttgggggaagcacatgtctcgccggaggtggctacggccgacaaggcccccctgcaggctccccctgtcctggaggtggcagctgagtgtgagccggacgacctggacctggattatggcgactccgtggaggccggacacgtctttgatgatttctcaagcgacgccgttttcatccagctcgatgacatgagctcgccaccttctcccgaaagcacagactcttccccggagcgagacttcccactgaagcctgcgttgcccccagccagcctggccgtggccgccatccagagggaggtgtcattgatgcacgatgaagacccttcgcagcccccacccctgccagagggcacccaggagccacatttgctcaggccggacgcggctgagaaggctgaggcacccagttccccggatgtggcgcctgcggggaaggaagacagcccctctgcgagtgggagggtacaggaggcagcccggcctgaggaggtggtttcgcagacccccctgctgcggtccagagccctggtgaagcgggtcacctggaacctgcaggagtcggagagcagcgcccccgccgaggacagagccccccgggcaccacttcacaggccacagaagccccgagaaggagcctgggacatggaggatgtggcccccacaggggtcaggcaggcgttctccgagctgccctttcccagtcacgtgcttccggaacccgggttcccagacacagacccctctcaggtttacagccccggcctgccgcctgccccggcccagccctcaagcatcccatcaagcccttctaccagaagagggaggtgaccaaggaggagtacaaggacatcctgcgcaaggccgtgcagaagatctgccacagcaagagtggagagatcaaccccgtgaaggtggccaacctggtgaaggcgtacgtggacaagtacaggcacatgcgcaggcacaagaaaccagaggccggggaggagccgcccacgcagggggccgagggctgaggccaggcaatcacgggctatgcccggggagctgtcgggagtggcgggaaatggggggcatcaccatgcctgccgtcgggttcctgcgctgacacctggtctgtgcacctgtgttgctcacagttgaaaactggacacttttgtatgtatattatagagacactgtttccattctaatttatcaaaaatggattatctttagaaacctcttgattgacttactacttggaagataaagcacttggtgatcaagaggggctcctggtggggtggcgcgtccttgataaatctctaggtggcctcccgccaacagctgctgtgtacctttggctctgaattaggaatatctttactttctcttttccaattatg

SEQ ID NO: 387239 - DNA, 2844 bp, Homo sapiens
gagcgcacggcggcggcagaggcggcggcggccgggcctaggagcgactctcggtcgtgcagcggcggcgagcgctcgcgagcggctgcgggacgcgaggtttccggagctgagctcaatgtgcagcaatggatgacgacagcctggatgagcttgtggcccggagcccagggccggatggacacccacaggtcggccctgcggacccggcaggtgactttgaagaaagcagcgtgggcagcagtggggactctggggacgacagtgacagcgagcatggagatggcacagacggagaagacgagggggcgtctgaggaggaagacctggaagacagatctggttccgaggattctgaagacgacggggagacattgctggaggtagcgggtactcaggggaaactggaagccgctggctctttcaattctgatgatgatgcagagagctgcccaatctgtctcaacgcattcagagaccaggccgtggggacgccggagaactgtgcccattacttctgcctggactgcattgtcgaatggtccaagaatgccaattcctgtccagttgatcgaactctatttaagtgcatttgtattcgagctcaatttggtggtaaaatcttaaaaaagatcccagtggagaacaccaaagcgagcgaggaggaggaggacccgaccttctgtgaggtgtgcggcaggagcgaccgtgaggacaggcttttgctctgcgacggctgcgatgcggggtaccacatggaatgcttggacccccctctccaggaggtgccggtggacgagtggttctgcccggaatgtgctgcgcctggtgttgtccttgccgctgatgcgggtcccgtgagtgaggaggaggtctccctgctcttggctgatgtggtgcccaccaccagcaggcttcggcctcgagcaggtaggacccgggcgatagccaggacacggcagagtgagagagtgagagcaaccgtgaaccggaaccggatctccacggccaggagggtccagcacacaccagggcgcctcgggtcttccctgctggatgaagccatcgaggctgtggcgactggcctgagcactgccgtgtatcagcgccccctgacgccgcgcactcccgcccgacggaagaggaagacaagaagacggaagaaagtgccgggaagaaagaaaaccccgtccggaccatccgcaaaaagtaagagctcagcgacaagatctaagaaacgccaacatcgagtgaagaagagaagagggaagaaggtaaagagtgaagccaccactcgctctcgaatcgcgcggacgctgggcctgcgcaggcctgttcacagcagctgcatcccgtcagtgttgaagccagtggagccctctttggggctgctgagagcggatattggagctgcctctctgtctctgtttggagatccttatgagctggatcccttcgacagcagtgaagagctttctgcaaaccctctttcccctctgagtgccaagagacgggctctgtcccggtcagccctgcagtcccaccagcccgtggccaggcccgtctccgtggggctttccaggaggcgcctccctgccgcggtgccagagccagacttggaggaggagccagtgcctgacctgctgggcagcatcctgtcgggccagagcctcctgatgctgggcagcagtgatgtcatcatccaccgcgacggctccctcagcgccaagagggcggctccagtttcttttcagcgaaactcaggcagtctgtccagaggggaagaaggattcaagggctgcctgcagccccgagcactgccctccgggagcccggcccaaggcccgtcaggaaacaggccacagagcacagggctcagctgtcaaggcaggtcccgcacccccgcccgcaccgcgggggcgcctgtgaggctggacttgccagcagcccctggggcggttcaggctcggaacttgtcaaatgggagtgtgcctggcttcagacagagccacagcccctggttcaacggcaccaacaagcacaccttgccccttgcctctgccgcgtctaagatctcaagcagagattctaagcccccatgtcgcagtgtggtgccggggcctcccctgaagccagcgcccagaagaacagacatctctgagctacccaggataccaaagatcaggagagatgacggtggtggcagacgggatgcggccccggcccacgggcagagcattgagatccccagtgcctgcatcagccgactgactggcagggagggcaccgggcagccagggcgaggcacacgggcagagagcgaggccagcagcagggtgccccgggagcccggggtgcacacgggcagctcccggcccccagcccccagctcccatggcagtttggccccactgggaccatcaagagggaaaggggtcgggtcgacctttgagagcttccggatcaatattcctggaaacatggcacattccagccagctctccagccctggcttctgtaacacgttccggcctgtggacgataaggagcagaggaaggagaacccctcacccctcttctccatcaagaagacgaagcagagatgctaagcccccatgtcgcagtgtggtgccggggcctcccctgaagccagcgcccagaagagacagacatctctgagctacccaggataccaaagatcaggagagatgacggtggtggcagacgggatgcggcccggcccaggggcagagcattgagatcccagtgcctgatcagcgactgactggcagggagggccgggcagcaggagaggcccacggcaaagcgagcacgggggccggc

SEQ ID NO: 387240 - DNA, 366 bp, Homo sapiens
gggtgagcctggaagagtaaaatgttaggaatgcttagcacacacacattgaaaagactggggaaggtttaagaacatcatcttcagagtcagacagacctctaggtgtggctctgacatttacaaattaagtgacccaaatcaagcctcctcccataaatctccttaatctgtgcaatgggtataatagtggtgtctactcccataggctagctgtgagggctaacaagagtaacatgtgtgtccagtggctgggcacagtgaatggaatgttcagtcaatgttgggcactgctgcacagagcaatgacatcactaccgtcatcatcatcatcatgatctctgaagcattcttaaatgccgaaag

SEQ ID NO: 387241 - DNA, 1014 bp, Homo sapiens
  misc_feature (1)..(2): n is a, c, g, or t
nngggcagtttttacattgtgatgtgtgggtggatggtcatatttagttaggttattaagaaatcatgaagtgttccctaacaagaaacttgcaaagctatttggcaggaagaaaatcattaacttctagtttatttattttttttctcatgctatacgcttaattaccaagtaaattcacttgcataccattaccttaattcaaaggagaagccagaatgtttatcattggtgggagtaaaatatacacagattctttaccatggtgaaatagaataatactgaattcccaatacagaaatactaatttcataagctaatattcctatcttttagctgacttctttctctcttcaggatatatttactatttattatttacctttgaatttttgatttgggggatttttacctattgccatcctactatcttaagtatcctgtacaatgaaatatcttagcaaggaaacacttttaaaacttcacaaatatccaatttcattcttaacatatgggggaagcagtaaaagaaaaagcacttcaccacgtagaagagaaagtgatcattttaattaagataatttcaattcattatcaacatttaatcctctgcaaacaagggaacacttactagcagtacttgaagacttgtgagttggaattgcatgttacttgaaagatctaattaagctaaattttggtgcacagcaggttgtacatgatttcatgtttatgtagcaaaatgcattgaaatgtattagtgttgaaacatacatgtaaaggtagttgtggaaattgttatattttccttgtgtgtcatttatttagagcataaaggttttttttattcagcctaactgaataaggctaaatgaatactgtaattgaaaatatattttaaatctttgtcatgagtttttttaaaaaaaactattgcaaattgtatcattcctgattacacagaactttgtgggtggttttaaataaattttatacttctattttgcaaaaata

SEQ ID NO: 387242 - DNA, 409 bp, Homo sapiens
aaaggtgatgctttctgtaaaattgtctgtttataaactaagcataaaatgtcaaaaggttcttgtgtctggtattctaaatttaaaaaaaagttcttagtttatgattcttaaaatatgggaaatgaacaagtactcactgtcgtctctagtcacctattcctatttttggctgacaacatttctggttagagctttatttggaagctttaacatattttaactgttacacattactcagctcaaactatagccaagataacttgcttgtcagtttattaacagcaaattattcaaatatgttccatcgtttgtgattaaagggcctgtggtgagaggggagagatgaagggaggaacaaacaaagatggggagggattgtcacggttaataataaaacagtatttct

SEQ ID NO: 387243 - DNA, 502 bp, Homo sapiens
gaaatgcagaactggtgaagaaataaattaacccctgttgatattctagaaaagcatgataatgcgttttgaaataattttatttatgtctctctctcatgtttaagatattgaaatactcaaaataaccagcagtcttattgcagtgtatattgtttaaattatcttaattagtcaactttagaaataattttcaaatgctgaaggaaaatttttctttgaaattttgtgaataaaatgtagtatacatagctgtgacattcgaaaggaaagtgtaactgtccacagcagttgggctttaggacagtttgatggggcatatgagagacggaagagagagagttttgaggagcagctgcttttatgcctagaagacatttagaatcaaaaatggggagaaacgggaggtaaattgttaactgtttaactgtacatttaacatttactcttccttttgaagtttctcaagttgtgaataaagatttgaaattatatcaagtat

SEQ ID NO: 387244 - DNA, 589 bp, Homo sapiens
aagtcaggtggagaaaataagagtggaagagggagttcttactggggagaactggaaaacacaggtagggtagagtcagataaagaggtctctgaaactagacttggatattaatggaggaagcaatgggaaccactgtagttttgagcagagaatcagcgtgcctaaaattttgtttggagatgactaatctgagaagattacgcaaaatgaatttgagggaagagaatcaaaatggtctgccacgaagaactgtagtgattcaagttcagatagtcatagaaaagataaaggaaatgaaggggtcaagaataacaccaacatttttgccctgagagactggaagagtgtgctataaagggaaatgaaaaagttgagtaactgttatggagataaagggcaaaataaacttggttttggatatcataaaggatatttatgtggaaggattctcaacatattatttttaaagacaaggtctcactatgttgcccaggctggacttggactcatgggctcaagcaatcctcccacctcagcctcctgaatagatgggtctccaggaatgcaaccaccatgcccagctttc

SEQ ID NO: 387245 - DNA, 570 bp, Homo sapiens
accatgttgcccaggctggtcttgagctcctgggctcaagcgatctgcccaccttggcctcccaaaatgctggagttacaggcgtgagccactgcacctggctattaaccccaaatttattctgtgtctttctctctttaccttcagactttgcgatgtgctgctctttaatgtgaaatgcccaactcttgtcccaaacacacatatccacttgtgaaaatctaacctatcatcaaaagtacatctcagatgataggtatttcttgaataaagtctttcatctttgcattgccatagagtttgttttacatctttcttatgacagcactcacattcaaaccgtagttatatttatgtgtatacttgtctctccaccagatgggtagtaagactcttaaaatcagagtccgaattttatcagtcctaggagtcttccattctcttcagtagataatcaaacacttttgttaaatattggaatgaataagcaagtgacttattttgtcgatttatttctacagaacattagtgatgtggtgaacaaacactttgagcacatccaaaataaaa

SEQ ID NO: 387246 - DNA, 198 bp, Homo sapiens
ttttacagatgaaaaaactgaggctcagaaaggcagtcatatagctcaatatgctagaactggagtttaaacctagttctgtgttctttcaaagcacgttactaaactgtttagcctgcttatttttttaaacgaaaatttatgtgatcacaaattcaacccatctcatgttaactaacactgattatggaatcattt

SEQ ID NO: 387247 - DNA, 411 bp, Homo sapiens
taagagacgaggtctcactttgttggccaggttggtctcaaactcctggtcacaaacaatcctccagcctcagcctcccaaagtgctggcattacaagcatgagccaccatgcccagcttaagggggatatttttatagagcatcttgccctggttctggaattctctgtagataatacagttaacagatattcccctaagtgattaagaacctttccatttgactgatttttcagaaaagtttacctatgtaacctcagtgggtagcacaatgcctgacacatctttgaagctcaaatgtctctgaggtaaaacttggtggggaggaggtaagagtaaaccaataatctataaacctgtatataaacctgtaaaaacaatcaacaaagattaagtcttcaaaaccttgag

SEQ ID NO: 387248 - DNA, 396 bp, Homo sapiens
taagagacgaggtctcactttgttggccaggttggtctcaaaaatcctccagcctcagcctcccaaagtgctggcattacaagcatgagccaccatgcccagcttaagggggatatttttatagagcatcttgccctggttctggaattctctgtagataatacagttaacagatattcccctaagtgattaagaacctttccatttgactgatttttcagaaaagtttacctatgtaacctcagtgggtagcacaatgcctgacacatctttgaagctcaaatgtctctgaggtaaaacttggtggggaggaggtaagagtaaaccaataatctataaacctgtatataaacctgtaaaaacaatcaacaaagattaagtcttcaaaaccttgag

SEQ ID NO: 387249 - DNA, 352 bp, Homo sapiens
tagtccccagaactgtgagaagtagatttctgctgattacgctttcctgtctgcggcctgagctaagacagcagcgcttggggagaagcagaatttgaggagctcctcagtggcaggctgccctggccctgctgtcagcagaggggaatggccatccatgctggcccctcaccagccgggccttcagtgagctccccgggtaggtgaagctctcccagctctgtgtcccccgccaaagcaggcccacaagcgagcgcctatggggtggagtgagagtgaggaagaaacattacccgaggggtcactctcttcagaagacctcaatgactgtagactactgaattatttcctt

SEQ ID NO: 387250 - DNA, 252 bp, Homo sapiens
acccacaaggaggggtgaagtggggggggtgttatacagatatgcaagtcactgagctcaattgtggtagagaaaaggcaatgagggcccaaatgggtaaatggcatttggggagagaggtggattcttaaactacatcacagatgatgataggagcaggagggggagggttcagatgtgtccaagacatatctacagcagagagtatgtaatgataaataatagtgatctcttttgagattcaaacagcca

SEQ ID NO: 387251 - DNA, 111 bp, Homo sapiens
gtcagtatatcaggctctgtgcggttgatcccctcttcagcatcagccaaggaatcttaccactccttaccatctgtaggcattttacctaccaaagcaccattaagacag

SEQ ID NO: 387252 - DNA, 308 bp, Homo sapiens
tgcctgaactgtccgggtgttactcttgtttctaaccagaaaataaggtcactggcgtgttgatgcccaagcaaacaggtgttagaggtgctcctacccatcaaattcaacaatggtttccactgacgcatagaaaaacaatggtgtttgcctacttattttgcaacaggctgccatactgtcttattctaattaattttgagtttgtctactttgaaaacctaagacaacggctgtatccactcaaaacattcattttgcaacctcctatctgagagttatgccctgcctctttttctttctttttt

SEQ ID NO: 387253 - DNA, 477 bp, Homo sapiens
tcctggtgtatatgactttaaaagaagaatcagtgtttggcttttggctttggctttttattttatttgtttatttattttcagaaagcatctcatatggttaaaaagaaattcagatttttatgctgaaaaaggtacttttttggtacgtagctttaaaattttaggttgagaaaagtgtacgtaaaaatcttgaaggaaaagatggagaaatttgactacatacaatttaaaaatgaaaaaccctgttgttaacaaagaagggaactggaactgtattggcaacatagatgataacccaaaggataatattcttatggtatataaagaatttttggctgggtatggtggcccacacctgtaatcccagcactttgggagaccaaagcaggaggatctcttgaggccagtagtttgagaccagcctgggcaatatagtgagaccccatctctaccaaaacagcaacaacaatgaga

SEQ ID NO: 387254 - DNA, 455 bp, Homo sapiens
aagacctactctgtcctggagaagagttagttctttgggcttttcccttaccctcaggaaaaatctctaagatcatcaaactttctttctgtgatcgtgattcagagccaaataaccttttgattagcaactcactttcccagtgtcttaatgctgggaaacagaatattctaggggaatagagatatataacccacttgcaggaagatgttctgcttggtaaatgaaaccattgacattctgatgtatcagtcccttgcaaatttagtcagagggtcaccccccacccgaattttatcaatttggaataaacaagattgcctatgtatgatgacttaaacagccccttgttcttgtattttgacatcattttaatttgtacattgtttaaacttaaataactacttagatcccaaacaataccatttcaaggatactgtttcttccttattaaa

SEQ ID NO: 387255 - DNA, 806 bp, Homo sapiens
atggacgctcactactgtgtagtagtctctgtggaatgaaattctcctcgctcctgttaacgggcttgtttctttggtaacctgagaacagtgctgacaggaatgttctcgcgcccaccccggagcctcctgctcttggggcgtgtgctctgcacgtgtactggcatctgctcgtggagtgtgtgctcctcacatgtgcctgctgctcgtcgggcgtgtgctccacagaggcggctggcacaggctctgtcctcggaactcaagtgttcctgttgcttcactcccatttcacactctgccaacctttacatttctgtgaatctgagaggtatgaagtagtatctcactgtaggggtttaaaaaatcctttgtattttgaaaattttcaaccacagctaacttttgaaagaattttacggggaacatctgtatactcctcctagatcctgctattaagattttgctatgcttaggccgggcgcggtggctcacgcctgtaatcccagcactttgggaggccgaggcgggcggctcacgaggtcaagagatcgagaccatcctggctaacactgtgaaacccccgtctctactaaaaaatacaaaaaattagccgggcgtggtggtgggcgcctgtagtcggtggtaatttcctatgcgtcattgacccacagtgaggggacacatttttacaagtgcgggcaccgtgtgactcacaccctgatcctgccgtgcccttcccactcggccccgctgcccaccctcccctccgcccagaggtgacgctgctctgattttcccaccgtaat

SEQ ID NO: 387256 - DNA, 337 bp, Homo sapiens
atatttgtacctatgtatacactcatctgatttataactaactccatttaaaggttacaatctttgacattgtccaaacaaaacatatgaactactgtcagacatgctaaaggacatacatttactactataaatcccacaaattttgcatcccaaaccctatatttaatggaagacatggacaagtaatacagtaatttatttttctggttaatagtagcaagttggccgggcacagtggctcctgcctgtaatcccagcacttcaagagactgaggtgggaagccaggagtttgacaccagcctgggctatatggcaagactgtgtctctactta

SEQ ID NO: 387257 - DNA, 524 bp, Homo sapiens
attgtataccatcagcagggaccattataaaatctaaatattaatgagtggttgtaaaactaatgtgaacactcatatacccttcacatagattcacaaattgtggatgttttgtcacatttgttttatatgtttgcttttgccagacccattgataattagttgaatttcatctccaaatactttacctttcttttatcttctaacaagaagaatgttcttcacataattacagtgcagttatcatacatttggaaacttaacattaatatggtactgtaatcaaatacaaatctatttaggaattttctcatttatgccaaaaatgtcctttattgcttttattttttaatctagcatccagtcaaagactattcattgcattcagttgtcatgataagttttatttttaatgatcatattaatgtaggatttatatatataaaaaaaactagtccaaatgacagaagatacttaacaaatgtggttttgcctttttctttttttttttttttttttttttt

SEQ ID NO: 387258 - DNA, 271 bp, Homo sapiens
ttgtaaatcttttaaaatgagtatgggtgtaaattaaaaacgaattaaagcagaggcttataaagacactatctccccttcaatgggttatgtatttttgttgtgtgttaggaagatatctcttgatctccacacccaaaactccttccaaatgaacaaaggcctacacacaaaaattatttcaattgctaatagccagtttttatttttcaaaagtaaatgctttctttttttgaaaagtaaatataactattttaacaaagtaagattt

SEQ ID NO: 387259 - DNA, 141 bp, Homo sapiens
tgcataggtatatatgtatgtcaaaacgtacccagttgtacataaatatatgttcggtttacatatcagttataccccaacaagcctgttaaaaaatgacatgctggctgggtgcagtggctcacgcctgtaatcccagca

SEQ ID NO: 387260 - DNA, 580 bp, Homo sapiens
aattttttaaaagcaattttaggttcatagcaaaatttagcagaaagaacagagttcttatataccctttctgcttttccccaagcctcttgcactaataacgttctgtaccagagtggtatgtttgttacaatcagtgaacctagactggacacctcattatcacccaagaccaaggtttacgttaaggttcgctcttagtgttgtatattctatgagtttgacaaatgtttaatgacatgtatccaccatgatagtatcatacagaatagtttcactgccttcctctgtgctctgcctgttcatccctcccttcctgctgatcttctattgtctccatagttttgtcttttcccaaatgctgtatagttggaattatcatgtaacctttcaaattggcctttttcacttataatatgcgtttaaggttttctacatgtctttgcatggcttgatagctcatttttctttagtgctgaatactattccattgtttggatgcattacagtttattcattcacctactgaaggaaatcttgcctgcttccaagttttgtcaataaagctgctttgtaaaca

SEQ ID NO: 387261 - DNA, 524 bp, Homo sapiens
  misc_feature (347)..(347): n is a, c, g, or t
caaccattataggatttgggtgtgctctgtcttgtcttcatagttaactatcgtcaattatctggttatagacttccaatatttaatcaacaaatattgattgagtgcccacaaagtaacaggcagtggggggcaggctagactcagtcatcatctggagaagagagggaagtaagccgacaattacaataccgtggggtaatgtatgattagggaaatgccggacagagcagcaagtgcccaaaggtgttcagggaaatgaaacaagttattatttctggaacataggtcgcaaggtgggaagagatataggatgggaatgttaagccatgaggcagggcccaganccagcagagccttttcagctatgtttaagagtacagactttatttcaggagctatgaggagccttgtaagagctgcaagtagaagagtaacgtgctcaagttagcattttagaccactttggctgcaatatagagaacgaatgggatgaagtgaccctagggagtaggttcactctc

SEQ ID NO: 387262 - DNA, 292 bp, Homo sapiens
aaaattagccgggcatggtggtgtgtgcctgtagtcccagctacttgggaggctgaggcaggaaaattgcttgaacccaagagacagaggttgtggtgagccaagatcatgccactgcactccagtctgggcaacagagcaagactctgtctcaaaaataaataaataagtaaataaataaataaactaggtatttttttttttttatctaaagtggtgatgttttaaatgattgctttatatattggggtctaaatcttaaatatgtttaaattagacaaattctatttga

SEQ ID NO: 387263 - DNA, 216 bp, Homo sapiens
  misc_feature (10)..(10): n is a, c, g, or t
gaattctttnattattttaattaccaattacttccttgtctcagtgtatttttacccactagaatcacaagtgacatcattccttatttttatcctgctttgctttgatttcttacatagccttgatgtaaatcatttaaaaatcccatttaaaccacagaccagcagagcctggcagcctttggatttagtgctgttgaaccatacaggaaacta

SEQ ID NO: 387264 - DNA, 504 bp, Homo sapiens
tgcggccctgaacggcaacacggaattgatcagcctgctgctggaggcccaggccgctgtggacatcaaggacaacaaaggcatgcggccgctgcactatgcggcctggcagggccggaaggagcccatgaagctggtgctgaaggcgggctcggccgtgaacatcccgtctgatgagggccacatccccctgcacctggcggcccagcatggtcactatgatgtgtctgagatgctgctacagcaccagtctaacccgtgcatggtggacaactcggggaagacgcccctggacctggcctgcgagttcggccgcgttggggtggtccagctgctcctcagcagcaatatgtgtgcggcgctgctggagccccggccgggagacgccaccgaccccaacggcaccagccctttgcacctcgcagctaaaaacggccacatcgacatcatcaggctcctcctccaagccggcatcgacattaaccgccagaccaagtccggcac

SEQ ID NO: 387265 - DNA, 599 bp, Homo sapiens
  misc_feature (545)..(545): n is a, c, g, or t
tgcggccctgaacggcaacacggaattgatcagcctgctgctggaggcccaggccgctgtggacatcaaggacaacaaaggcatgcggccgctgcactatgcggcctggcagggccggaaggagcccatgaagctggtgctgaaggcgggctcggccgtgaacatcccgtctgatgagggccacatccccctgcacctggcggcccagcatggtcactatgatgtgtctgagatgctgctacagcaccagtctaacccgtgcatggtggacaactcggggaagacgcccctggacctggcctgcgagttcggccgcgttggggtggtccagctgctcctcagcagcaatatgtgtgcggcgctgctggagccccggccgggagacgccaccgaccccaacggcaccagccctttgcacctcgcagctaaaaacggccacatcgacatcatcaggtagagccggtagcagggagggcctcagccttagggtccccaggggtttcagcagcagcctggggcttcaggggcaccagtttttggctttnggggataaggggcgggacaagggcagggtcccaggtccctggttcaggcctctg

SEQ ID NO: 387266 - DNA, 297 bp, Homo sapiens
cgcccctggacctggcctgcgagttcggccgcgttggggtgagtctcctgtggagccctgtggggtggggctggggagccccacatcaggacccccctaccctgacccctccttcaaggtggtccagctgctcctcagcagcaatatgtgtgcggcgctgctggagccccggccgggagacgccaccgaccccaacggcaccagccctttgcacctcgcagctaaaaacggccacatcgacatcatcaggtagagccggtagcagggagggcctcagccttagggtccccaggggtt

SEQ ID NO: 387267 - DNA, 471 bp, Homo sapiens
gcaagtacaaaattaaataagtgagtactgttcatggaagtccctaccgagaaagggagaaacaaagagtttcaaagtatgtttcaggctgaaaacaaaaaagaaaacaaacaaacaaaaaagcttgaaaatgcattttgaggctgtgatcttccgttacaagactgtggtctgaagaccagtgggggttcctgacttttgtaagaactgcaatgagccaaccaacgactgccaaacctacctgaagaccaattagaaactctccctgcttcctaaaatgccacctttagtgggtccggaattggttctttccagtgggttcatggtcttggctgacttcaataatgaagccactgacccccgcacccttgggatgatgcagcaagaaacccctcaccagatggggtgcctcagccatggacttcccagcctccagactatcagccaaataaatgtctgttcattataaat

SEQ ID NO: 387268 - DNA, 516 bp, Homo sapiens
aaatttcaaagcagagctgaggggattttaaaagttccctggaaatgtgcctgatgccaggtagtcctgggcattaccaaatactcgtactacctaagcactgtggctgtgtaccacacacaggaaggattcactcaacatcagtttctctccttctggtctatcacatcccagagcattgagtgaatcctattgttctgggcacagcttagctgcaactctacagggagaccctcaggagcatggatgacatctcctctggctactgccagtatctgtatggctctgagaactcaatgggcatttgaatatccccaatgtttagctggtaagccaacccattttaattcactgttgtcattgtgggcagatgagatagaaaatgtctgttttcagataattccccagaaggggtgactggaagctagtgcagagacaaacaaggatgccggtggttcccaaactggagaggaatctttggggagccctcagccggagtactcaaggcccagccct

SEQ ID NO: 387269 - DNA, 622 bp, Homo sapiens
aaaaaaaaaaaaaaagctaagctccacaaaacttaagtgattcagtactgcctgattctttaattagcctgagagacttgtaatccaccaaaacttaactaggcagttaggcaattagtgtgctgtcttctctcatatcaaaaaggcttgaatcatggccattgtcattacttacaattatttctagtttttcatgccataataatggctaattatactggttaatcacaaaactcagccaatccaaattcactaataaatcagctaaaacaattagattgcaccatttataaatgtttagctacacacattttcacaggatctaggattaggcatttttctaaagctacatttgatggtttgggtcattctacctaagagcagctacaataatgttaatcaactccttggctgtgagccattattatgaaggaaaaaagttaagtgaacaaggtatcagcgaactcaatcacactacaaaatcatagactaaatggaattcaactcagacctcctttttgggttcaggaggctgttaacatatgctgtccaaggttggtgagagaaatgctgttctttaccccatcacagattctcagatcccctgagatttggggtgggt

SEQ ID NO: 387270 - DNA, 494 bp, Homo sapiens
gaacccatgtcgacccagaagaacattaagccaattggctttcaacatcacagtcaggtagttaagaaacaaaaggcctatgtttcccgttcaactaccatggtgaccttattataaaagatgaccagctaaaatttgatagcctaaaagaaatgacactgaagagtagtgagaagttctcagactgtattcttggagtactagggtactagggtctccaaggagcctctcaaggactgagagaggtggggaagtgaggtggacaagcaggtagggccgtacccccaactcccctgccaattcaagcaatgcagtgatccatttatctggatgagatagagatggaaagatagatagatagatagatagatagatagatagatagatagagatacatacatacatacatacatacatacatacatacatacatacagatatagatatacaagcttccagatgagcttctatttgttgaaaggattttgcagtta

SEQ ID NO: 387271 - DNA, 820 bp, Homo sapiens
ggattacaggggtgagccaccgcgcccagcgagacctgaaatgttcttttctggactcctggatttagaataactacaaactagttttgtttcactaatgttcaagaagaatttctagcgtcagtgaataaaggttcatgtcatagggtgtgagtttcactctgctacttgttttgacctggtgtgccaatgcagcaggtttccaagctgccccactagtaggagacatggcagtgagcacctgcaggcccctggggaagccaaggaaacccacactgattctgtgataaagcctgtgaaagctctgtgaaatgttaaaagtggtatgcaaatctaaggcatcattattattaagggagtttcggccacaccacatcaatggagaacctctttggtaattatgaaggaagagttatcatcacaatattattctttgaaaacacagggttgctttattgcagccctcacgggcacgtcttaaccatcactgtgctttctccctatgatgcgccccgttggtcttcctcggagacctcttatgttgtatttatactacttagaggactggacaataaggaaattggtgtattacattaagctggccgtacccccaactcccctgccaattcaagcaatgcagtgatccatttatctggatgagatagagatggaaagatagatagatagatagatagatagatagatagatagatagagatacatacatacatacatacatacatacatacatacatacatacagatatagatatacaagcttccagatgagcttctatttgttgaaaggattttgcagtta

SEQ ID NO: 387272 - DNA, 373 bp, Homo sapiens
agtgaatgataattttcccaggaactacaatggatgttttggagtggcatgatttatccacatattgcaatacagactttcaatcataggtgatgaaaaatagcaaactggtcttaaagtataaaacaaatgtactttcagtgattttcattgaatatgattgttgttattgagctttagacttctcaagtttgatttacatatgtaccccccaatataaatctgatttagcaaatgcatcttacccataattcaatacgcagttatttatattaaattgggcaaacagtaaaattttttggtgggatgaaccttgagagttttttattttatttttttctttttgaggcagaatctcgttctgtcgcccagg

SEQ ID NO: 387273 - DNA, 338 bp, Homo sapiens
aatgtatttattaatcaatgttcagggtgaactgttgatatataaaattaataatttgtttaatcataatatgaagcttattctcaaacttttcgttatgtgccttcactacgttttagaagtaataattttatactacatcattacaaaagccctaagtctcaccttaacaacatgccttcctccaatcataagtgtttggtgtacatatgcatataaaatattatcctaaggtggggcgcagtggaacccgggaggcagaggttgcagtgagccgagattgtgccactgcactccagcctgggtgacacagtgagtctccgtctcaaaaaaaaaaa

SEQ ID NO: 387274 - DNA, 395 bp, Homo sapiens
gttccttaagagtaggatctattcatttgttatctcgattccatagtgttgagtactagtaagtattgtgaccaaaatctaaacatagatgtgtttctttcctctattccgtactcattacagaatgggtcatgctaaggggggttattattttgttgttcagagtagaatccttttttgaatttgatctcgatagtgtgaaataaggaagagtcttatgtcacatgactatgcaccaaccactttgcatatattgattatcctcctcttcataagatgcagattattatgatcatgttacagagaaagacattgaaacccagagaggttaagtacaatttctcaggtcatgcagcttctgagtggcagagacagaattcaaacccaattagtca

SEQ ID NO: 387275 - DNA, 334 bp, Homo sapiens
gtttctacgttctgtacgttcacgtttgtcagcggaacccctgcttctgcgcggattgtgcgcagctgcagccaagcgtaagctgaaaattgtaaagttaagcgctggggaagcttgatttacgcccacgacgaggtcaggcagtctctgcgccctaaaggtcccgaaactccccagttaggaggtgttctggctctgtcaacttcgtgaatgccacctgaagctaagggaatacatcctttctttctttctttttttttttttaatgccaagagaaatgtttctgttgcacacagacattactgaaagtgttcgccagtaaggaccctaggct

SEQ ID NO: 387276 - DNA, 293 bp, Homo sapiens
taatgtggaaactgccattcatcacaaattgaacacacatcagaatgtatggcaattacgtttaaaaaaaaagttttactttggacatggtttaacagtgtaactggaaggaaacagaaagcaatatgtttttctactacatctgatgccatgcaatctctctgggatccaggttcactctaagttaggagcaatggttctctgaggacatttgaatacagaactagtaaacctgatacatttctccactgagtgaaggtaataacacagaagccatcaccacacacacagag

SEQ ID NO: 387277 - DNA, 131 bp, Homo sapiens
gcactgatctcactggtggagtgacccccagaaattaaagtaacctctttatgccttgattcctccccctccattgaggataacagtagcatcatgtcacaggggttctgtgaggatttaaagctaataca

SEQ ID NO: 387278 - DNA, 340 bp, Homo sapiens
atatgagtgccagctaatgccaagcctaagcttggcttggagctaccagtaatgcaaaatgaatatgaatggatacttaaaagatcttatagcctagtagagagagataagatctttatgtgaattattctcatgaaagaaaagtgataattaggaatttagagaacaaagattagatagactttgaagattaaacagctcttctatgaagtacatgatggtggtgcataggtttggggtctataatttggctgaccaaagactcttgtttatttcctgattcttaagccacgtttcacgttgttgaggtgctgaataaattgacctgtggataagtgaa

SEQ ID NO: 387279 - DNA, 1246 bp, Homo sapiens
taagaattttggaaatcctagtcattgaaatagagtggcatgcgtaaaatccttgttaatacagtaacttgatattcagcatggactgtacagtatttttttcttcggcttcaatatttgaattaatattttcctggtttttttagatgacacaaattatttatgacagcaatatcaaatccctcgttttttaacaagaaaatcttactcttctctgatggtcaattttgtcacaggatcatgaattttctaaaactgaggaactaaaactagaagatgtggatgaggaaattaatgctgaaaatgtggaaagcaagaagaaaactgtgggagatgatgaaagtgttcctacaggttatcacagtaaaacagaaggagcagaaagaaccaatgatgatagctcagctgaaactattgaaaagaaagaaaaagccaacctagaggaacgggccatttgtgagtacaatgaaaacccaaaaggatacatgcttgatgatgcagatagcagttcattagaaatcctagaaaacagtgaaacaacaccaagcaaagacatgaaaaaaacaaagaagatttttctgttcaaaagagtcccctcaataaatcaaaagattgtcaagaataacaatgagccgctcccagagataaaatccataggagaccagatcattttaaaaagtgataataaagatgccgaccagaaccacatgagtcagaatcatcagaatatcccaccaacaaatacagagagaagatcaaaatcctgtacaatactataaatatatatttatgttttcacagtcaccaagtgtattgtaatgtatacttgaaaaatgttataacttatgaagtaaagtttctgatagtagtctttaaaagatataagacttaatatgttttattcagcttctataagtgtgaccagttttgatatttatttatgctaatatttttaacaagtcatttcaaaatatgtgtatctcaaattctccctaaagtgttgtggccttaactgttcagtattgcaataaaaaatatatttttatatgtggaaaattgaaataagatatttcctagtttttactaaacaattttacttctttataattttataaggcaatatttgcaatcttacgacactgtaacagtttttgatgtatttacaatttttacaaaactgaggtaaaattgtttataatgaacatattttaataaactatatctggtcagttccactgttaacatt

SEQ ID NO: 387280 - DNA, 3058 bp, Homo sapiens
tgtagttgatctccggagtttcgccatgcggaacttgggggctttcgcggcccgcgtcggtgcggagtagctgctttagccccgaccaaaccgtcctctacagcctcctggccccggcgcaggctgcccgtactgcccgtggcatgagggagccggaagagctgatgcccgattcgggtgctgtgtttacatttgggaaaagtaaatttgctgaaaataatcccggtaaattctggtttaaaaatgatgtccctgtacatctttcatgtggagatgaacattctgctgttgttaccggaaataataaactttacatgtttggcagtaacaactggggtcagttaggattaggatcaaagtcagccatcagcaagccaacatgtgtcaaagctctaaaacctgaaaaagtgaaattagctgcctgtggaaggaaccacaccctggtgtcaacagaaggaggcaatgtatatgcaactggtggaaataatgaaggacagttggggcttggtgacaccgaagaaagaaacacttttcatgtaattagcttttttacatccgagcataagattaagcagctgtctgctggatctaatacttcagctgccctaactgaggatggaagactttttatgtggggtgacaattccgaagggcaaattggtttaaaaaatgtaagtaatgtctgtgtccctcagcaagtgaccattgggaaacctgtctcctggatctcttgtggatattaccattcagcttttgtaacaacagatggtgagctatatgtgtttggagaacctgagaatgggaagttaggtcttcccaatcagctcctgggcaatcacagaacaccccagctggtgtctgaaattccggagaaggtgatccaagtagcctgtggtggagagcatactgtggttctcacggagaatgctgtgtatacctttgggctgggacaatttggtcagctgggtcttggcacttttctttttgaaacttcagaacccaaagtcattgagaatattagggatcaaacaataagttatatttcttgtggagaaaatcacacagctttgataacagatatcggccttatgtatacttttggagatggtcgccacggaaaattaggacttggactggagaattttaccaatcacttcattcctactttgtgctctaattttttgaggtttatagttaaattggttgcttgtggtggatgtcacatggtagtttttgctgctcctcatcgtggtgtggcaaaagaaattgaattcgatgaaataaatgatacttgcttatctgtggcgacttttctgccgtatagcagtttaacctcaggaaatgtactgcagaggactctatcagcacgtatgcggcgaagagagagggagaggtctccagattctttttcaatgaggagaacactacctccaatagaagggactcttggcctttctgcttgttttctccccaattcagtctttccacgatgttctgagagaaacctccaagagagtgtcttatctgaacaggacctcatgcagccagaggaaccagattatttgctagatgaaatgaccaaagaagcagagatagataattcttcaactgtagaaagccttggagaaactactgatatcttaaacatgacacacatcatgagcctgaattccaatgaaaagtcattaaaattatcaccagttcagaaacaaaagaaacaacaaacaattggggaactgacgcaggatacagctcttactgaaaacgatgatagtgatgaatatgaagaaatgtcagaaatgaaagaagggaaagcatgtaaacaacatgtgtcacaagggattttcatgacgcagccagctacgactatcgaagcattttcagatgaggaagtagagatcccagaggagaaggaaggagcagaggattcaaaaggaaatggaatagaggagcaagaggtagaagcaaatgaggaaaatgtgaaggtgcatggaggaagaaaggagaaaacagagatcctatcagatgaccttacagacaaagcagaggatcatgaattttctaaaactgaggaactaaaactagaagatgtggatgaggaaattaatgctgaaaatgtggaaagcaagaagaaaactgtgggagatgatgaaagtgttcctacaggttatcacagtaaaacagaaggagcagaaagaaccaatgatgatagctcagctgaaactattgaaaagaaagaaaaagccaacctagaggaacgggccatttgtgagtacaatgaaaacccaaaaggatacatgcttgatgatgcagatagcagttcattagaaatcctagaaaacagtgaaacaacaccaagcaaagacatgaaaaaaacaaagaagatttttctgttcaaaagagtcccctcaataaatcaaaagattgtcaagaataacaatgagccgctcccagagataaaatccataggagaccagatcattttaaaaagtgataataaagatgccgaccagaaccacatgagtcagaatcatcagaatatcccaccaacaaatacagagagaagatcaaaatcctgtacaatactataaatatatatttatgttttcacagtcaccaagtgtattgtaatgtatacttgaaaaatgttataacttatgaagtaaagtttctgatagtagtctttaaaagatataagacttaatatgttttattcagcttctataagtgtgaccagttttgatatttatttatgctaatatttttaacaagtcatttcaaaatatgtgtatctcaaattctccctaaagtgttgtggccttaactgttcagtattgcaataaaaaatatatttttatatgtggaaaattgaaataagatatttcctagtttttactaaacaattttacttctttataattttataaggcaatatttgcaatcttacgacactgtaacagtttttgatgtatttacaatttttacaaaactgaggtaaaattgtttataatgaacatattttaataaactatatctggtcagttccactgttaacatt

SEQ ID NO: 387281 - DNA, 2864 bp, Homo sapiens
tgtagttgatctccggagtttcgccatgcggaacttgggggctttcgcggcccgcgtcggtgcggagtagctgctttagccccgaccaaaccgtcctctacagcctcctggccccggcgcaggctgcccgtactgcccgtggcatgagggagccggaagagctgatgcccgattcgggtgctgtgtttacatttgggaaaagtaaatttgctgaaaataatcccggtaaattctggtttaaaaatgatgtccctgtacatctttcatgtggagatgaacattctgctgttgttaccggaaataataaactttacatgtttggcagtaacaactggggtcagttaggattaggatcaaagtcagccatcagcaagccaacatgtgtcaaagctctaaaacctgaaaaagtgaaattagctgcctgtggaaggaaccacaccctggtgtcaacagaaggaggcaatgtatatgcaactggtggaaataatgaaggacagttggggcttggtgacaccgaagaaagaaacacttttcatgtaattagcttttttacatccgagcataagattaagcagctgtctgctggatctaatacttcagctgccctaactgaggatggaagactttttatgtggggtgacaattccgaagggcaaattggtttaaaaaatgtaagtaatgtctgtgtccctcagcaagtgaccattgggaaacctgtctcctggatctcttgtggatattaccattcagcttttgtaacaacagatggtgagctatatgtgtttggagaacctgagaatgggaagttaggtcttcccaatcagctcctgggcaatcacagaacaccccagctggtgtctgaaattccggagaaggtgatccaagtagcctgtggtggagagcatactgtggttctcacggagaatgctgtgtatacctttgggctgggacaatttggtcagctgggtcttggcacttttctttttgaaacttcagaacccaaagtcattgagaatattagggatcaaacaataagttatatttcttgtggagaaaatcacacagctttgataacagatatcggccttatgtatacttttggagatggtcgccacggaaaattaggacttggactggagaattttaccaatcacttcattcctactttgtgctctaattttttgaggtttatagttaaattggttgcttgtggtggatgtcacatggtagtttttgctgctcctcatcgtggtgtggcaaaagaaattgaattcgatgaaataaatgatacttgcttatctgtggcgacttttctgccgtatagcagtttaacctcaggaaatgtactgcagaggactctatcagcacgtatgcggcgaagagagagggagaggtctccagattctttttcaatgaggagaacactacctccaatagaagggactcttggcctttctgcttgttttctccccaattcagtctttccacgatgttctgagagaaacctccaagagagtgtcttatctgaacaggacctcatgcagccagaggaaccagattatttgctagatgaaatgaccaaagaagcagagatagataattcttcaactgtagaaagccttggagaaactactgatatcttaaacatgacacacatcatgagcctgaattccaatgaaaagtcattaaaattatcaccagttcagaaacaaaagaaacaacaaacaattggggaactgacgcaggatacagctcttactgaaaacgatgatagtgatgaatatgaagaaatgtcagaaatgaaagaagggaaagcatgtaaacaacatgtgtcacaagggattttcatgacgcagccagctacgactatcgaagcattttcagatgaggaagtagagatcccagaggagaaggaaggagcagaggattcaaaaggaaatggaatagaggagcaagaggtagaagcaaatgaggaaaatgtgaaggtgcatggaggaagaaaggagaaaacagagatcctatcagatgaccttacagacaaagcagaggatcatgaattttctaaaactgaggaactaaaactagaagatgtggatgaggaaattaatgctgaaaatgtggaaagcaagaagaaaactgtgggagatgatgaaagtgttcctacaggttatcacagtaaaacagaaggagcagaaagaaccaatgatgatagctcagctgaaactattgaaaagaaagaaaaagccaacctagaggaacgggccatttgtgagtacaatgaaaacccaaaaggatacatgcttgatgatgcagatagcagttcattagaaatcctagaaaacagtgaaacaacaccaagcaaagacatgaaaaaaacaaagaagatttttctgttcaaaagagtcccctcaataaatcaaaagattgtcaagaataacaatgagccgctcccagagataaaatccataggagaccagatcattttaaaaagtgataataaagatgccgaccagaaccacatgagtcagaatcatcagaatatcccaccaacaaatacagagagaagatcaaaatcctgtacaatactataaatatatatttatgttttcacagtcaccaagtgtattgtaatgtatacttgaaaaatgttataacttatgaagtaaagtttctgatagtagtctttaaaagatataagacttaatatgttttattcagcttctataagtgtgaccagttttgatatttatttatgctaatatttttaacaagtcatttcaaaatatgtgtatctcaaattctccctaaagtgttgtggccttaactgttcagtattgcaataaaaaatatatttttatatgtgg

SEQ ID NO: 387282 - DNA, 2477 bp, Homo sapiens
tgtagttgatctccggagtttcgccatgcggaacttgggggctttcgcggcccgcgtcggtgcggagtagctgctttagccccgaccaaaccgtcctctacagcctcctggccccggcgcaggctgcccgtactgcccgtggcatgagggagccggaagagctgatgcccgattcgggtgctgtgtttacatttgggaaaagtaaatttgctgaaaataatcccggtaaattctggtttaaaaatgatgtccctgtacatctttcatgtggagatgaacattctgctgttgttaccggaaataataaactttacatgtttggcagtaacaactggggtcagttaggattaggatcaaagtcagccatcagcaagccaacatgtgtcaaagctctaaaacctgaaaaagtgaaattagctgcctgtggaaggaaccacaccctggtgtcaacagaaggaggcaatgtatatgcaactggtggaaataatgaaggacagttggggcttggtgacaccgaagaaagaaacacttttcatgtaattagcttttttacatccgagcataagattaagcagctgtctgctggatctaatacttcagctgccctaactgaggatggaagactttttatgtggggtgacaattccgaagggcaaattggtttaaaaaatgtaagtaatgtctgtgtccctcagcaagtgaccattgggaaacctgtctcctggatctcttgtggatattaccattcagcttttgtaacaacagatggtgagctatatgtgtttggagaacctgagaatgggaagttaggtcttcccaatcagctcctgggcaatcacagaacaccccagctggtgtctgaaattccggagaaggtgatccaagtagcctgtggtggagagcatactgtggttctcacggagaatgctgtgtatacctttgggctgggacaatttggtcagctgggtcttggcacttttctttttgaaacttcagaacccaaagtcattgagaatattagggatcaaacaataagttatatttcttgtggagaaaatcacacagctttgataacagatatcggccttatgtatacttttggagatggtcgccacggaaaattaggacttggactggagaattttaccaatcacttcattcctactttgtgctctaattttttgaggtttatagttaaattggttgcttgtggtggatgtcacatggtagtttttgctgctcctcatcgtggtgtggcaaaagaaattgaattcgatgaaataaatgatacttgcttatctgtggcgacttttctgccgtatagcagtttaacctcaggaaatgtactgcagaggactctatcagcacgtatgcggcgaagagagagggagaggtctccagattctttttcaatgaggagaacactacctccaatagaagggactcttggcctttctgcttgttttctccccaattcagtctttccacgatgttctgagagaaacctccaagagagtgtcttatctgaacaggacctcatgcagccagaggaaccagattatttgctagatgaaatgaccaaagaagcagagatagataattcttcaactgtagaaagccttggagaaactactgatatcttaaacatgacacacatcatgagcctgaattccaatgaaaagtcattaaaattatcaccagttcagaaacaaaagaaacaacaaacaattggggaactgacgcaggatacagctcttactgaaaacgatgatagtgatgaatatgaagaaatgtcagaaatgaaagaagggaaagcatgtaaacaacatgtgtcacaagggattttcatgacgcagccagctacgactatcgaagcattttcagatgaggaagtagagatcccagaggagaaggaaggagcagaggattcaaaaggaaatggaatagaggagcaagaggtagaagcaaatgaggaaaatgtgaaggtgcatggaggaagaaaggagaaaacagagatcctatcagatgaccttacagacaaagcagaggtgagtgaaggcaaggcaaaatcagtgggagaagcagaggatgggcctgaaggtagaggggatggaacctgtgaggaaggtagttcaggagcagaacactggcaagatgaggagagggagaagggggagaaagacaagggtagaggagaaatggagaggccaggggagggagagaaggaactagcagagaaggaagaatggaagaagagggatggggaagagcaggagcaaaaggagagggagcagggccatcagaaggaaagaaaccaagagatggaggagggaggggaggaggagcatggagaaggagaagaagaggagggacagacaagaggaagaagagagagaggagggagaagggaaagaagcaggaagagctcaacagctgaagaacctgaagaggaaggagattctgcctcttctatgagg

SEQ ID NO: 387283 - DNA, 1506 bp, Homo sapiens
tgtagttgatctccggagtttcgccatgcggaacttgggggctttcgcggcccgcgtcggtgcggagtagctgctttagccccgaccaaaccgtcctctacagcctcctggccccggcgcaggctgcccgtactgcccgtggcatgagggagccggaagagctgatgcccgattcgggtgctgtgtttacatttgggaaaagtaaatttgctgaaaataatcccggtaaattctggtttaaaaatgatgtccctgtacatctttcatgtggagatgaacattctgctgttgttaccggaaataataaactttacatgtttggcagtaacaactggggtcagttaggattaggatcaaagtcagccatcagcaagccaacatgtgtcaaagctctaaaacctgaaaaagtgaaattagctgcctgtggaaggaaccacaccctggtgtcaacagaaggaggcaatgtatatgcaactggtggaaataatgaaggacagttggggcttggtgacaccgaagaaagaaacacttttcatgtaattagcttttttacatccgagcataagattaagcagctgtctgctggatctaatacttcagctgccctaactgaggatggaagactttttatgtggggtgacaattccgaagggcaaattggtttaaaaaatgtaagtaatgtctgtgtccctcagcaagtgaccattgggaaacctgtctcctggatctcttgtggatattaccattcagcttttgtaacaacagatggtgagctatatgtgtttggagaacctgagaatgggaagttaggtcttcccaatcagctcctgggcaatcacagaacaccccagctggtgtctgaaattccggagaaggtgatccaagtagcctgtggtggagagcatactgtggttctcacggagaatgctgtgtatacctttgggctgggacaatttggtcagctgggtcttggcacttttctttttgaaacttcagaacccaaagtcattgagaatattagggatcaaacaataagttatatttcttgtggagaaaatcacacagctttgataacagatatcggccttatgtatacttttggagatggtcgccacggaaaattaggacttggactggagaattttaccaatcacttcattcctactttgtgctctaattttttgaggtttatagttaaattggttgcttgtggtggatgtcacatggtagtttttgctgctcctcatcgtggtgtggcaaaagaaattgaattcgatgaaataaatgatacttgcttatctgtggcgacttttctgccgtatagcagtttaacctcaggaaatgtactgcagaggactctatcagcacgtatgcggcgaagagagaggttaagcctcatgagcagtgggagcttatatactataaacaatgaaatgggaaaacaaaggaataaggacttcaattagagagaggaaatattctctcaattaaatttagagattttcc

SEQ ID NO: 387284 - DNA, 544 bp, Homo sapiens
attctcagaatatttattgcctgatgttacatgcaggaccacagagaccatagagagtgtggaaagatcaatagagtaaattcaaggcagaatttgagggggataattataattgcagtatgagttaacatgtttatctgtttacaaatagatccatacaagtaacacttttataattctcttcattatttttgcattttagatatcggccttatgtatacttttggagatggtcgccacggaaaattaggacttggactggagaattttaccaatcacttcattcctactttgtgctctaattttttgaggtttatagttaaattggtaagggcatcacatttccctgtttatattttcatattactgtatttgagtctttcagtatttcatagaaaataagtaattttatgtttgtatggaagagtatcatatatatatctaataaatatacttgtttcctaaaagccaaatgtcagacattatgccattcagaaaatgtgttgctcctaattttcctcctttagcctcttcctttttgctg

SEQ ID NO: 387285 - DNA, 558 bp, Homo sapiens
accaaggttaattgatttattctcagaatatttattgcctgatgttacatgcaggaccacagagaccatagagagtgtggaaagatcaatagagtaaattcaaggcagaatttgagggggataattataattgcagtatgagttaacatgtttatctgtttacaaatagatccatacaagtaacacttttataattctcttcattatttttgcattttagatatcggccttatgtatacttttggagatggtcgccacggaaaattaggacttggactggagaattttaccaatcacttcattcctactttgtgctctaattttttgaggtttatagttaaattggtaagggcatcacatttccctgtttatattttcatattactgtatttgagtctttcagtatttcatagaaaataagtaattttatgtttgtatggaagagtatcatatatatatctaataaatatacttgtttcctaaaagccaaatgtcagacattatgccattcagaaaatgtgttgctcctaattttcctcctttagcctcttccttttt

SEQ ID NO: 387286 - DNA, 2903 bp, Homo sapiens
tgtagttgatctccggagtttcgccatgcggaacttgggggctttcgcggcccgcgtcggtgcggagtagctgctttagccccgaccaaaccgtcctctacagcctcctggccccggcgcaggctgcccgtactgcccgtggcatgagggagccggaagagctgatgcccgattcgggtgctgtgtttacatttgggaaaagtaaatttgctgaaaataatcccggtaaattctggtttaaaaatgatgtccctgtacatctttcatgtggagatgaacattctgctgttgttaccggaaataataaactttacatgtttggcagtaacaactggggtcagttaggattaggatcaaagtcagccatcagcaagccaacatgtgtcaaagctctaaaacctgaaaaagtgaaattagctgcctgtggaaggaaccacaccctggtgtcaacagaaggaggcaatgtatatgcaactggtggaaataatgaaggacagttggggcttggtgacaccgaagaaagaaacacttttcatgtaattagcttttttacatccgagcataagattaagcagctgtctgctggatctaatacttcagctgccctaactgaggatggaagactttttatgtggggtgacaattccgaagggcaaattggtttaaaaaatgtaagtaatgtctgtgtccctcagcaagtgaccattgggaaacctgtctcctggatctcttgtggatattaccattcagcttttgtaacaacagatggtgagctatatgtgtttggagaacctgagaatgggaagttaggtcttcccaatcagctcctgggcaatcacagaacaccccagctggtgtctgaaattccggagaaggtgatccaagtagcctgtggtggagagcatactgtggttctcacggagaatgctgtgtatacctttgggctgggacaatttggtcagctgggtcttggcacttttctttttgaaacttcagaacccaaagtcattgagaatattagggatcaaacaataagttatatttcttgtggagaaaatcacacagctttgataacagatatcggccttatgtatacttttggagatggtcgccacggaaaattaggacttggactggagaattttaccaatcacttcattcctactttgtgctctaattttttgaggtttatagttaaattggttgcttgtggtggatgtcacatggtagtttttgctgctcctcatcgtggtgtggcaaaagaaattgaattcgatgaaataaatgatacttgcttatctgtggcgacttttctgccgtatagcagtttaacctcaggaaatgtactgcagaggactctatcagcacgtatgcggcgaagagagagggagaggtctccagattctttttcaatgaggagaacactacctccaatagaagggactcttggcctttctgcttgttttctccccaattcagtctttccacgatgttctgagagaaacctccaagagagtgtcttatctgaacaggacctcatgcagccagaggaaccagattatttgctagatgaaatgaccaaagaagcagagatagataattcttcaactgtagaaagccttggagaaactactgatatcttaaacatgacacacatcatgagcctgaattccaatgaaaagtcattaaaattatcaccagttcagaaacaaaagaaacaacaaacaattggggaactgacgcaggatacagctcttactgaaaacgatgatagtgatgaatatgaagaaatgtcagaaatgaaagaagggaaagcatgtaaacaacatgtgtcacaagggattttcatgacgcagccagctacgactatcgaagcattttcagatgaggaagtagagatcccagaggagaaggaaggagcagaggattcaaaaggaaatggaatagaggagcaagaggtagaagcaaatgaggaaaatgtgaaggtgcatggaggaagaaaggagaaaacagagatcctatcagatgaccttacagacaaagcagagtattctgccagtcactcccaaattgtttcagtttaaaaggatcatgaattttctaaaactgaggaactaaaactagaagatgtggatgaggaaattaatgctgaaaatgtggaaagcaagaagaaaactgtgggagatgatgaaagtgttcctacaggttatcacagtaaaacagaaggagcagaaagaaccaatgatgatagctcagctgaaactattgaaaagaaagaaaaagccaacctagaggaacgggccatttgtgagtacaatgaaaacccaaaaggatacatgcttgatgatgcagatagcagttcattagaaatcctagaaaacagtgaaacaacaccaagcaaagacatgaaaaaaacaaagaagatttttctgttcaaaagagtcccctcaataaatcaaaagattgtcaagaataacaatgagccgctcccagagataaaatccataggagaccagatcattttaaaaagtgataataaagatgccgaccagaaccacatgagtcagaatcatcagaatatcccaccaacaaatacagagagaagatcaaaatcctgtacaatactataaatatatatttatgttttcacagtcaccaagtgtattgtaatgtatacttgaaaaatgttataacttatgaagtaaagtttctgatagtagtctttaaaagatataagacttaatatgttttattcagcttctataagtgtgaccagttttgatatttatttatgctaatatttttaacaagtcatttcaaaatatgtgtatctcaaattctccctaaagtgttgtggccttaactgttcagtattgcaataaaaaatatatttttatatgtgg

SEQ ID NO: 387287 - DNA, 2735 bp, Homo sapiens
tgtagttgatctccggagtttcgccatgcggaacttgggggctttcgcggcccgcgtcggtgcggagtagctgctttagccccgaccaaaccgtcctctacagcctcctggccccggcgcaggctgcccgtactgcccgtggcatgagggagccggaagagctgatgcccgattcgggtgctgtgtttacatttgggaaaagtaaatttgctgaaaataatcccggtaaattctggtttaaaaatgatgtccctgtacatctttcatgtggagatgaacattctgctgttgttaccggaaataataaactttacatgtttggcagtaacaactggggtcagttaggattaggatcaaagtcagccatcagcaagccaacatgtgtcaaagctctaaaacctgaaaaagtgaaattagctgcctgtggaaggaaccacaccctggtgtcaacagaaggaggcaatgtatatgcaactggtggaaataatgaaggacagttggggcttggtgacaccgaagaaagaaacacttttcatgtaattagcttttttacatccgagcataagattaagcagctgtctgctggatctaatacttcagctgccctaactgaggatggaagactttttatgtggggtgacaattccgaagggcaaattggtttaaaaaatgtaagtaatgtctgtgtccctcagcaagtgaccattgggaaacctgtctcctggatctcttgtggatattaccattcagcttttgtaacaacagatggtgagctatatgtgtttggagaacctgagaatgggaagttaggtcttcccaatcagctcctgggcaatcacagaacaccccagctggtgtctgaaattccggagaaggtgatccaagtagcctgtggtggagagcatactgtggttctcacggagaatgctgtgtatacctttgggctgggacaatttggtcagctgggtcttggcacttttctttttgaaacttcagaacccaaagtcattgagaatattagggatcaaacaataagttatatttcttgtggagaaaatcacacagctttgataacagatatcggccttatgtatacttttggagatggtcgccacggaaaattaggacttggactggagaattttaccaatcacttcattcctactttgtgctctaattttttgaggtttatagttaaattggttgcttgtggtggatgtcacatggtagtttttgctgctcctcatcgtggtgtggcaaaagaaattgaattcgatgaaataaatgatacttgcttatctgtggcgacttttctgccgtatagcagtttaacctcaggaaatgtactgcagaggactctatcagcacgtatgcggcgaagagagagggagaggtctccagattctttttcaatgaggagaacactacctccaatagaagggactcttggcctttctgcttgttttctccccaattcagtctttccacgatgttctgagagaaacctccaagagagtgtcttatctgaacaggacctcatgcagccagaggaaccagattatttgctagatgaaatgaccaaagaagcagagatagataattcttcaactgtagaaagccttggagaaactactgatatcttaaacatgacacacatcatgagcctgaattccaatgaaaagtcattaaaattatcaccagttcagaaacaaaagaaacaacaaacaattggggaactgacgcaggatacagctcttactgaaaacgatgatagtgatgaatatgaagaaatgtcagaaatgaaagaagaaaactgtgggagatgatgaaagtgttcctacaggttatcacagtaaaacagaaggagcagaaagaaccaatgatgatagctcagctgaaactattgaaaagaaagaaaaagccaacctagaggaacgggccatttgtgagtacaatgaaaacccaaaaggatacatgcttgatgatgcagatagcagttcattagaaatcctagaaaacagtgaaacaacaccaagcaaagacatgaaaaaaacaaagaagatttttctgttcaaaagagtcccctcaataaatcaaaagattgtcaagaataacaatgagccgctcccagagataaaatccataggagaccagatcattttaaaaagtgataataaagatgccgaccagaaccacatgagtcagaatcatcagaatatcccaccaacaaatacagagagaagatcaaaatcctgtacaatactataaatatatatttatgttttcacagtcaccaagtgtattgtaatgtatacttgaaaaatgttataacttatgaagtaaagtttctgatagtagtctttaaaagatataagacttaatatgttttattcagcttctataagtgtgaccagttttgatatttatttatgctaatatttttaacaagtcatttcaaaatatgtgtatctcaaattctccctaaagtgttgtggccttaactgttcagtattgcaataaaaaatatatttttatatgtggaaaattgaaataagatatttcctagtttttactaaacaattttacttctttataattttataaggcaatatttgcaatcttacgacactgtaacagtttttgatgtatttacaatttttacaaaactgaggtaaaattgtttataatgaacatattttaataaactatatctggtcagttccactgttaacatt

SEQ ID NO: 387288 - DNA, 835 bp, Homo sapiens
tgtagttgatctccggagtttcgccatgcggaacttgggggctttcgcggcccgcgtcggtgcggagtagctgctttagccccgaccaaaccgtcctctacagcctcctggccccggcgcaggctgcccgtactgcccgtggcatgagggagccggaagagctgatgcccgattcgggtgctgtgtttacatttgggaaaagtaaatttgctgaaaataatcccggtaaattctggtttaaaaatgatgtccctgtacatctttcatgtggagatgaacattctgctgttgttaccggaaataataaactttacatgtttggcagtaacaactggggtcagttaggattaggatcaaagtcagccatcagcaagccaacatgtgtcaaagctctaaaacctgaaaaagtgaaattagctgcctgtggaaggaaccacaccctggtgtcaacagaaggaggcaatgtatatgcaactggtggaaataatgaaggacagttggggcttggtgacaccgaagaaagaaacacttttcatgtaattagcttttttacatccgagcataagattaagcagctgtctgctggatctaatacttcagctgccctaactgaggatggaagactttttatgtggggtgacaattccgaagggcaaattggtttaaaaaatgtaagtaatgtctgtgtccctcagcaagtgaccattgggaaacctgtctcctggatctcttgtggatattaccattcagcttttgtaacaagtaagacacattttgaagtcatcatgttatctcccacttctatgttgttattaaattaataatgaaatgaaag

SEQ ID NO: 387289 - DNA, 481 bp, Homo sapiens
tgcgtatggtagatgctctgtaagtatttgttgaatgaatgggtttgttggaggtaagatgggtgccagggaaacctagtagaagctttagaagtcatccatgcaagaatagagaaagtctaaactagggttttggtaacagagatggggaggtaattggttgagaaatatttaggaggtagcatcaataggacttggtaattgaaaaaagagggagcatgtgaatgaaagaagaaataaagatgacttctctcttgcacatctaatgaatagtggtgctactaagttagatggagaatccaagtagaaactaatgaaatcaattatggatatgatacatttgaggttcttctggaacatctagatggagatggatatatgggtctggagcttggaagagatgtctgtacttacataaattgggagttggtatccagctagtaattgctcagaaagaatacacataagaagaagataagta

SEQ ID NO: 387290 - DNA, 974 bp, Homo sapiens
ctcatgatccacccgcctcggcctcccaaagtgctgggattacaggcatgagccactgtgcctggcctcggctttaattttcactgtgttttttgtttgtttttatagagatgagatcttgttatgttatccaggctagtctcaacctcctggtctccagctatcctcttgcctctgcttcccgaaaaagcactgagattacagataggaaccagcatacctggccctatcttcattttgaaaagccatttctttaggacatattttcctgatactttttcccaaaaccaaaattatgactgaaattgcctaatccaatgacatcttcatggctgttatctaacacataacattagtgtatagattcattcctttccagactataagctccatgagaggagtcatgtttcttttattcacagttgaatttgtgacactgagacatccagtaaatctttgtaaactgaataaataaatcttgaatatatgaacaaaatttgatagcacgaactaaaggctgtaaatgtgaatagttaccatttaaaaattaagcttttgtagtaaaatttatgaaatatgcttctaaggaagctatattctttactgtgtattccgtttgcattgagcaacacaacaagcttgaaacaagagtgcctttactcttaaaactcaccaataaattctacttccctgtccagaaaaaacagaaaaaagacacataaaagcataacaaaatgaaatacacgcagcaagctacaaaagaggggggggccgcaagaaaaaagactcccaggagggggccaagtgcgcgagcgaccgttcgtaaaccagggccccacagagggggccgtatcaaaaggagcagggaggccgaaaaacacgagcgcggaaaacacgcggagaatggggaagcacacaactgcggggacaaggggaaccacaaagagaaagcccggggataaaaaggggggcag

SEQ ID NO: 387291 - DNA, 485 bp, Homo sapiens
atccctcctgtgaggatgaaattgaaaactccggtttctggcttggcgatcgggtgaccgagcagccgcgaggtgacagcgccggcggcccgcgggcggggaccggctgggatagaggcgcgttgttctctgagcgatgtttaccgagaagcccgctccgcggcacgggcgggtgtcagttgggaccccaaccctgggtcccgcggctcctagcccggggcctgcggtgtagacgggggttggggacaggcccagctggccctgaccgggtgtcgggcgcccagagatgccgcgcgggaggagccgcgggagagccgccggactcagcgagcagagggtcgtggagcctgatggatcgatgagatctgaaaaagaacactgtgcgagattgtattcctgcttattctttccaagttagtaggcagattggaactatagaatttatccgtgataataataaagttcgcataacttttgttctgaaa

SEQ ID NO: 387292 - DNA, 680 bp, Homo sapiens
cccagtcagtcgggcccaggtggggatcaggaggtttcaggaaaacacaagctatgcagtggggcaggtgaggcttggcctgcccagcctgtcctgagtgtcatgggaacagctctggaagtgactcctctgtcctctggaatctggatcagatggggccttctccagacatctgtgctcagcagatgcgacagacggcccctcgagtgtagcccaggatccagcaccggcccaagcaggtgggagctaaggggaaaccgaggctcacagcgaggaacttggtcaacaagcccaggcccctccaccctgcccgcgtttcctgcactgcactggatcaaaccggtttgatccttgataatgcctccgacaaatatttgatgagggaggaggctgagagaggggctgtggaacaaatcaccacaaactggagggccgaaaacaccagcaatgggctccctcttggttctggagccgagaaggcagaaatgaaggcgtcatcagggttgctccttctggggcctcagagcaggactctgttccctgcccgtccccagctccggtggttggcggccttcctccgcctgtggccctgcactccaatcgctgcctctgttgtcacttggccccccatgtgcctctgtgtctcagaaggacacaagtcatattgaattaaggaccct

SEQ ID NO: 387293 - DNA, 335 bp, Homo sapiens
catgggaccaggactcaatctctgaataactgaatccttggcttggtggaaagagccactctcacataataacagagaagaagcaaggtgtggtggctcatgcctatagtcccagcattctgggaggtggaggcgggatgatcacttgaggccagcctgggcaacatatcaagaccctctctccacaaaaaataaataaattagttgagcgtggtgtcacgcacctgtaatcccagctactcaggaggctgaaatgggaggatcgctgaagcccaggagtttaaggctgcagtgagctatgatcacgcaagccactacctctaaaaaataaaaat

SEQ ID NO: 387294 - DNA, 300 bp, Homo sapiens
acagacgcagtcaactcacctgccagagttttgcttgccccaacacttagcaagaagctgaatgcatccaaggatccccacaatcccagaacattctaaaaatattgcaggatgagaaagaattgtcagcaactgagggaggaagttgttcaacttccaccaagcatcaggctgaggcaggagaatcgcttgaacccaggaggtggaggttgcagtgagctgagatcgtgccattgtgatatgaatatgccttatatgctgatatgaatatgccttaaaataaagtgttccccacccccg

SEQ ID NO: 387295 - DNA, 338 bp, Homo sapiens
cttgtgttctttctaagtagctcggccataatatcacttttctttagcagcattctaacttctaagaggcttaataggcaaggagattgtggggtctttgacttcctctgcgtcttagccctaagtggtttattctattaagctgattcttggtggtggatagagctttgctggataagaagttggggtcggggaaagttgcagttggaggaattggatactttcactcccccttccactgtgccccaccctccaacccactcctgccccattctgtttttagagcttttgaatgaaggaagtggtgatgaaattaagtaaagaactcttcttagagg

SEQ ID NO: 387296 - DNA, 394 bp, Homo sapiens
ctgcgttccatgtagcgtcttccacagttctctgttataagatggtttgttacattgctgcagatatttctgcatgtctcttgagtttctcaagaccagggttgtattttttcatgtctgtcgatgaaacagtacatgacaaaagaaggtacttaatacatgtttgataaattaattactgtttggtaaattaattattgaaggaagacccagactggttctgataaatcattgattacattttacaaatttgtataaattaggggagccttgagaagttagagctctagggaaggttccaggaacgttgaaggatgtgaaatatgttttcaaattcatagttattgcagattctgaatacttccaagtgagggaagatgagaagagatggctt

SEQ ID NO: 387297 - DNA, 209 bp, Homo sapiens
cttgttaggctagggatgactgtcttccaggagttgaatgtggcttggataaggttttggaagaaaatgagagtaaagtagttggatttggcaggaagttaatagtacagactttataccaaagagtgtaacattatcccaagactgtggctagaggaggtgaatctatctgtgactgcccagtcaggttggtgggatgggggaaacat

SEQ ID NO: 387298 - DNA, 2558 bp, Homo sapiens
taatagtcacatgacacgtttcccgtcaagatggcggatactctcccttcggagtttgatgtgatcgtaatagggacgggtttgcctgaatccatcattgcagctgcatgttcaagaagtggccggagagttctgcatgttgattcaagaagctactatggaggaaactgggccagttttagcttttcaggactattgtcctggctaaaggaataccaggaaaacagtgacattgtaagtgacagtccagtgtggcaagaccagatccttgaaaatgaagaagccattgctcttagcaggaaggacaaaactattcaacatgtggaagtattttgttatgccagtcaggatttgcatgaagatgtcgaagaagctggtgcactgcagaaaaatcatgctcttgtgacatctgcaaactccacagaagctgcagattctgccttcctgcctacggaggatgagtcattaagcactatgagctgtgaaatgctcacagaacaaactccaagcagcgatccagagaatgcgctagaagtaaatggtgctgaagtgacaggggaaaaagaaaaccattgtgatgataaaacttgtgtgccatcaacttcagcagaagacatgagtgaaaatgtgcctatagcagaagataccacagagcaaccaaagaaaaacagaattacttactcacaaattattaaagaaggcaggagatttaatattgatttagtatcaaagctgctgtattctcgaggattactaattgatcttctaatcaaatctaatgttagtcgatatgcagagtttaaaaatattaccaggattcttgcatttcgagaaggacgagtggaacaggttccgtgttccagagcagatgtctttaatagcaaacaacttactatggtagaaaagcgaatgctaatgaaatttcttacattttgtatggaatatgagaaatatcctgatgaatataaaggatatgaagagatcacattttatgaatatttaaagactcaaaaattaacccccaacctccaatatattgtcatgcattcaattgcaatgacatcagagacagccagcagcaccatagatggtctcaaagctaccaaaaactttcttcactgtcttgggcggtatggcaacactccatttttgtttcctttatatggccaaggagaactcccccagtgtttctgcaggatgtgtgctgtgtttggtggaatttattgtcttcgccattcagtacagtgccttgtagtggacaaagaatccagaaaatgtaaagcaattatagatcagtttggtcagagaataatctctgagcatttcctcgtggaggacagttactttcctgagaacatgtgctcacgtgtgcaatacaggcagatctccagggcagtgctgattacagatagatctgtcctaaaaacagattcagatcaacagatttccattttgacagtgccagcagaggaaccaggaacttttgctgttcgggtcattgagttatgttcttcaacgatgacatgcatgaaaggcacctatttggttcatttgacttgcacatcttctaaaacagcaagagaagatttagaatcagttgtgcagaaattgtttgttccatatactgaaatggagatagaaaatgaacaagtagaaaagccaagaattctgtgggctctttacttcaatatgagagattcgtcagacatcagcaggagctgttataatgatttaccatccaacgtttatgtctgctctggcccagattgtggtttaggaaatgataatgcagtcaaacaggctgaaacacttttccaggaaatctgccccaatgaagatttctgtccccctccaccaaatcctgaagacattatccttgatggagacagtttacagccagaggcttcagaatccagtgccataccagaggctaactcggagactttcaaggaaagcacaaaccttggaaacctagaggagtcctctgaataatggatatacaccaaactggatacccaactttggaaattctgactggtctcagagtctacttgatagaaggactgtttgagaaatgttagaaagcagcagcaattataaggcaaaataggtaatagaaatccaaaaggggattttccttatagaggacattccaagaacacacaacacttataaagcacattgacttgctcattttaaataccaaacttgtgtgactagcagatgaaaattataaatcaattgattctcaggaatgtaactgtggatatgaaagtgatcctatgcattgttaataattccatggtcttaggacaattttgcttaccactttggatctttgtttgaaagccacattttcagaaccagctcatgtattttctttggttatttgaattttattttctttatggacaagagcatcataacataatgataaaaacatatagaaaaactaaagtatcatgatctagatagaagcctgtatttggaatacaggtttgttttgctttctatgttgagaagcattgaaaatgctaatataaaggtgtttagacatt

SEQ ID NO: 387299 - DNA, 1643 bp, Homo sapiens
cggagaagaccaaggagggcgtcctctacgtcggaagcaagaccttgttcatcaggatatgaagagatcacattttatgaatatttaaagactcaaaaattaacccccaacctccaatatattgtcatgcattcaattgcaatgacatcagagacagccagcagcaccatagatggtctcaaagctaccaaaaactttcttcactgtcttgggcggtatggcaacactccatttttgtttcctttatatggccaaggagaactcccccagtgtttctgcaggatgtgtgctgtgtttggtggaatttattgtcttcgccattcagtacagtgccttgtagtggacaaagaatccagaaaatgtaaagcaattatagatcagtttggtcagagaataatctctgagcatttcctcgtggaggacagttactttcctgagaacatgtgctcacgtgtgcaatacaggcagatctccagggcagtgctgattacagatagatctgtcctaaaaacagattcagatcaacagatttccattttgacagtgccagcagaggaaccaggaacttttgctgttcgggtcattgagttatgttcttcaacgatgacatgcatgaaaggcacctatttggttcatttgacttgcacatcttctaaaacagcaagagaagatttagaatcagttgtgcagaaattgtttgttccatatactgaaatggagatagaaaatgaacaagtagaaaagccaagaattctgtgggctctttacttcaatatgagagattcgtcagacatcagcaggagctgttataatgatttaccatccaacgtttatgtctgctctggcccagattgtggtttaggaaatgataatgcagtcaaacaggctgaaacacttttccaggaaatctgccccaatgaagatttctgtccccctccaccaaatcctgaagacattatccttgatggagacagtttacagccagaggcttcagaatccagtgccataccagaggctaactcggagactttcaaggaaagcacaaaccttggaaacctagaggagtcctctgaataatggatatacaccaaactggatacccaactttggaaattctgactggtctcagagtctacttgatagaaggactgtttgagaaatgttagaaagcagcagcaattataaggcaaaataggtaatagaaatccaaaaggggattttccttatagaggacattccaagaacacacaacacttataaagcacattgacttgctcattttaaataccaaacttgtgtgactagcagatgaaaattataaatcaattgattctcaggaatgtaactgtggatatgaaagtgatcctatgcattgttaataattccatggtcttaggacaattttgcttaccactttggatctttgtttgaaagccacattttcagaaccagctcatgtattttctttggttatttgaattttattttctttatggacaagagcatcataacataatgataaaaacatatagaaaaactaaagtatcatgatctagatagaagcctgtatttggaatacaggtttgttttgctttctatgttgagaagcattgaaaatgctaatataaaggtgtttagacatt

SEQ ID NO: 387300 - DNA, 1318 bp, Homo sapiens
acctactaacccacttcctgcttatcctggatatttcatgtgtatatactattgaataactatataatttatcaagttggtttgtccatttgaaacataaggaaatcaatttatgttatcttctctatagggaaaattttaggatgaatgtgatcataaaccctttgatactagtgagaagaagtaatagaagtccaaaggagcatgactggagtaaaatctaattaacttactaatcaaaatagagtgtgtagatgcaaatttactaaatgtttacatacgaagctctgatttcctactatgtctagtcatggcttaatcggtaataggctacacagtgtagtaattgacaaacatattgtattttagaatgtaaataaaatttatttctatatttagaaaatgaacaagtagaaaagccaagaattctgtgggctctttacttcaatatgagagattcgtcagacatcagcaggagctgttataatgatttaccatccaacgtttatgtctgctctggcccagattgtggtttaggaaatgataatgcagtcaaacaggctgaaacacttttccaggaaatctgccccaatgaagatttctgtccccctccaccaaatcctgaagacattatccttgatggagacagtttacagccagaggcttcagaatccagtgccataccagaggctaactcggagactttcaaggaaagcacaaaccttggaaacctagaggagtcctctgaataatggatatacaccaaactggatacccaactttggaaattctgactggtctcagagtctacttgatagaaggactgtttgagaaatgttagaaagcagcagcaattataaggcaaaataggtaatagaaatccaaaaggggattttccttatagaggacattccaagaacacacaacacttataaagcacattgacttgctcattttaaataccaaacttgtgtgactagcagatgaaaattataaatcaattgattctcaggaatgtaactgtggatatgaaagtgatcctatgcattgttaataattccatggtcttaggacaattttgcttaccactttggatctttgtttgaaagccacattttcagaaccagctcatgtattttctttggttatttgaattttattttctttatggacaagagcatcataacataatgataaaaacatatagaaaaactaaagtatcatgatctagatagaagcctgtatttggaatacaggtttgttttgctttctatgttgagaagcattgaaaatgctaatataaaggtgtttagacatt

SEQ ID NO: 387301 - DNA, 903 bp, Homo sapiens
cccccgggctgcaggattcggcacgagcttcggagtttgatgtgatcgtaatagggacgggtttgcctgaatccatcattgcagctgcatgttcaagaagtggccggagagttctgcatgttgattcaagaagctactatggaggaaactgggccagttttagcttttcaggactattgtcctggctaaaggaataccaggaaaacagtgacattgtaagtgacagtccagtgtggcaagaccagatccttgaaaatgaagaagccattgctcttagcaggaaggacaaaatgtaacactcaccgcgaagatctgcagcttcactcctgcgcccaccgagaccacaagcccaccgggaggaacgaacaactccagacgctctgccttaagagctgtaacattcaccgcgaaggtctgcagcttcactcctgagccagcgagaccacgaacccaccagaaggaagaaactccgaacacatctgaacatcagaaggaacaaactccagacgtgccaccttaagagctgtaacactcaccgcgcgggtccgcggcttcattctttaagtcagtgagaccaagaacccaccaattccggacacaccgatagcattctaatattttacatttgattgcaaggaggactaggcgagaattcaaatggattagtgcaaacccattaccactgcttggaaaatacgtcaaagtatttgggcaatataattctaatatatgtattctaatataaatatatagggtgtatttatatattatgtattctaatataaatatataggatagttattttttgattaccatgacttatttaaaaagtattctgaagtattattcaacttaaaggttttcatgatcatttcaacattaaatttaatacgttgggtattg

SEQ ID NO: 387302 - DNA, 436 bp, Homo sapiens
cccccgggctgcaggattcggcacgagcttcggagtttgatgtgatcgtaatagggacgggtttgcctgaatccatcattgcagctgcatgttcaagaagtggccggagagttctgcatgttgattcaagaagctactatggaggaaactgggccagttttagcttttcaggactattgtcctggctaaaggaataccaggaaaacagtgacattgtaagtgacagtccagtgtggcaagaccagatccttgaaaatgaagaagccattgctcttagcaggaaggacaaaactattcaacatgtggaagtattttgttatgccaggtatgaaaagtatttactgcaggtaaactaaattaatgactttttcactcttctttagaagaagccaacaataaagatttatgtggcattggttgctacaagtcacgttaa

SEQ ID NO: 387303 - DNA, 1878 bp, Homo sapiens
cgaattccgattaaagacatctgctctggaacacggaacctgttccactcgtccttctcgaaatgcaagaatcctggtaatatttttaaactctgcatatcgactaacattagatttgattagaagatcaattagtaatcctcgagaatacagcagctttgatactaaatcaatattaaatctcctgcatgtctttaatagcaaacaacttactatggtagaaaagcgaatgctaatgaaatttcttacattttgtatggaatatgagaaatatcctgatgaatataaaggatatgaagagatcacattttatgaatatttaaagactcaaaaattaacccccaacctccaatatattgtcatgcattcaattgcaatgacatcagagacagccagcagcaccatagatggtctcaaagctaccaaaaactttcttcactgtcttgggcggtatggcaacactccatttttgtttcctttatatggccaaggagaactcccccagtgtttctgcaggatgtgtgctgtgtttggtggaatttattgtcttcgccattcagtacagtgccttgtagtggacaaagaatccagaaaatgtaaagcaattatagatcagtttggtcagagaataatctctgagcatttcctcgtggaggacagttactttcctgagaacatgtgctcacgtgtgcaatacaggcagatctccagggcagtgctgattacagatagatctgtcctaaaaacagattcagatcaacagatttccattttgacagtgccagcagaggaaccaggaacttttgctgttcgggtcattgagttatgttcttcaacgatgacatgcatgaaaggcacctatttggttcatttgacttgcacatcttctaaaacagcaagagaagatttagaatcagttgtgcagaaattgtttgttccatatactgaaatggagatagaaaatgaacaagtagaaaagccaagaattctgtgggctctttacttcaatatgagagattcgtcagacatcagcaggagctgttataatgatttaccatccaacgtttatgtctgctctggcccagattgtggtttaggaaatgataatgcagtcaaacaggctgaaacacttttccaggaaatctgccccaatgaagatttctgtccccctccaccaaatcctgaagacattatccttgatggagacagtttacagccagaggcttcagaatccagtgccataccagaggctaactcggagactttcaaggaaagcacaaaccttggaaacctagaggagtcctctgaataatggatatacaccaaactggatacccaactttggaaattctgactggtctcagagtctacttgatagaaggactgtttgagaaatgttagaaagcagcagcaattataaggcaaaataggtaatagaaatccaaaaggggattttccttatagaggacattccaagaacacacaacacttataaagcacattgacttgctcattttaaataccaaacttgtgtgactagcagatgaaaattataaatcaattgattctcaggaatgtaactgtggatatgaaagtgatcctatgcattgttaataattccatggtcttaggacaattttgcttaccactttggatctttgtttgaaagccacattttcagaaccagctcatgtattttctttggttatttgaattttattttctttatggacaagagcatcataacataatgataaaaacatatagaaaaactaaagtatcatgatctagatagaagcctgtatttggaatacaggtttgttttgctttctatgttgagaagcattgaaaatgctaatataaaggtgtttagacatt

SEQ ID NO: 387304 - DNA, 977 bp, Homo sapiens
taatagtcacatgacacgtttcccgtcaagatggcggatactctcccttcggagtttgatgtgatcgtaatagggacgggtttgcctgaatccatcattgcagctgcatgttcaagaagtggccggagagttctgcatgttgattcaagaagctactatggaggaaactgggccagttttagcttttcaggactattgtcctggctaaaggaataccaggaaaacagtgacattgtaagtgacagtccagtgtggcaagaccagatccttgaaaatgaagaagccattgctcttagcaggaaggacaaaactattcaacatgtggaagtattttgttatgccaggtccacgctgcttttatgagctgtaacactcaccgcgaagatctgcagcttcactcctgcgcccaccgagaccacaagcccaccgggaggaacgaacaactccagacgctctgccttaagagctgtaacattcaccgcgaaggtctgcagcttcactcctgagccagcgagaccacgaacccaccagaaggaagaaactccgaacacatctgaacatcagaaggaacaaactccagacgtgccaccttaagagctgtaacactcaccgcgcgggtccgcggcttcattctttaagtcagtgagaccaagaacccaccaattccggacacaccgatagcattctaatattttacatttgattgcaaggaggactaggcgagaattcaaatggattagtgcaaacccattaccactgcttggaaaatacgtcaaagtatttgggcaatataattctaatatatgtattctaatataaatatatagggtgtatttatatattatgtattctaatataaatatataggatagttattttttgattaccatgacttatttaaaaagtattctgaagtattattcaacttaaaggttttcatgatcatttcaacattaaatttaatacgttgggtattg

SEQ ID NO: 387305 - DNA, 422 bp, Homo sapiens
gaattcaagtccatcctgagcaacatggtgaaaccccatctctacaaaagatatgaaaattagccggatgtggtggcacacacctacagtcctagctacttaggaggctaagatgggaggattgcttgagcttgggaggcaaaggttgcagtgagctgagactgcgccactgacgaagcgagaccctgcctcaaaaaaaaaaacaaaaacaaaaacaaaaacaaaactcaaacttcacacttgagatctgtgcaatttactgtatataaattatactttaaatagttaagtggtcggctgggcacggtggctcacgactgtaatcccagcactttaggagaccaaggtgggcagatcacgaggtcaggagatcaagaccatcctggctaacatggtgaaaccctgtctctactaaaaaatac

SEQ ID NO: 387306 - DNA, 927 bp, Homo sapiens
  misc_feature (68)..(68): n is a, c, g, or t
cggcggcgggcccaaggcgtgaggcgccgcccgggtgtccccgcggcgcaggaggcggtggagcgcanagcgggcgagcgcgaaaaatcactaccaatataatggattttatatatcagattgctttattctggatatcatggtaacaatacagaaagtatacataatttcccatttctgcaagtagtcatgactgctgaagaaagaaaaacttaaagctacggcagaattattttatggaaattctgattttgtttttaatttttgataactttttactaaaggtatgaacacacaaagagcttattttgttaggcaaatacacattaataagaatgcctagaagaggactgattcttcacacccggacccactggttgctgttgggccttgctttgctctgcagtttggtattatttatgtacctcctggaatgtgccccccagactgatggaaatgcatctcttcctggtgttgttggggaaaattatggtaaagagtattatcaagccctcctacaggaacaagaagaacattatcagaccagggcaaccagtctgaaacgccaaattgcccaactaaaacaagaattacaagaaatgagtgagaagatgcggtcactgcaagaaagaaggaatgtaggggctaatggcataggctatcagagcaacaaagagcaagcacctagtgatcttttagagtttcttcattcccaaattgacaaagctgaagttagcataggggccaaactacccagtgagtatggggtcattccctttgaaagttttaccttaatgaaagtatttcaattggaaatgggtctcactcgccatcctgaagaaaagccagttagaaaagacaaacgagatgaattggtggaagttattgaagcgggcttggaggtcattaataatcctgatgaagatg

SEQ ID NO: 387307 - DNA, 295 bp, Homo sapiens
tcctgagtagctgggactctagttgagttgttcagaccaaaactcttggaatcctccctgatgccagttttcaattaaacaggaaattctggcagctctatctttaaaatatacagaaatgtgcttctcaccaccctggtctcaaccatcattatttctggcctagattattgcagtaacctcctaacttgcctttctgctgcttcccttgctcctcacaacccattccccatacagcatcctgttaactttttaagacgttaaatcagtcatcaactcaatcatgtgacttctc

SEQ ID NO: 387308 - DNA, 404 bp, Homo sapiens
aggtcacacgcccacaggactggaaaacagtgaactagacaacctcagcgctctggcgcttccagaaaaccgcgtgtcactgcagcatcctccgcatcatccagcaaggagggaggtgactgtcatccccatttacaagggaggagacagagcagggggctctagatgggccgccccatgaagtcagccagtcagcccaagcacctggactcggatctcccaaacctcatgcgatttctactccatcgcactgcctttccacgtggctttcaaagtcattgctaagccttgtttccatgatgccacactcaagttttaggtgaaaatctattacgaaatggaaactttttttggaaactatactgctgcagaaaatgcgcacactgtctagagtctttgttccg

SEQ ID NO: 387309 - DNA, 429 bp, Homo sapiens
tgctttttatatttagaagcctcccttttgggtgcataaatatataaagctatattctcttgagaaattaacctctattattgtatggtaaactcatttcattcttgtgagagacattgctagaaagtctattttgtctaatttaagcattaccatttcactcctttggttattatttgcatggaatatcattttctatcctttcacttttagcctatgctcttaattcataattgagtctcttgtaagcagcatattatgaggtttaaaagattaatttatccactctgtctgctttagtctcttttggctgctataacagaatatcacacactggtaattaataaagaatagaattttatttgactcatgattctggaggctgggaagccaaaacaacattatactggtatatgttgaaggtctagt

SEQ ID NO: 387310 - DNA, 341 bp, Homo sapiens
tcctacaccagctctgcctgtgctgcctcacccttctctccctggagaaaggcccctccaagaggctgttgcttttctttgttggcttctggtagatgtgctcctgaaggcaactgtctcaaaggtgggaggaggcagcgcacttgccagtgtggctcgggttatgaaagcacaggcttttagtcccctgctgaggatcctgcacaaagcctctacttccagcttcagggccaggaaagactcagcccacacacccagttgcctcttgaccccttcagggccagagagagcaggtccactcactcaggactcatgtcagccttctccccacgactccttca

SEQ ID NO: 387311 - DNA, 825 bp, Homo sapiens
ggcggtgtctccggggttgggcacacgagagtagcgggcagaagccaacgcagggttgggatacgtggggccacagccagtctctgtggtccccgggtctaggcttagcaccagttacagcaaccagacatccaacaggtgtttaaacctgttttttctgtaggctaaattcacatccgtttgtcaagaggggattgtcaacctctgtccagcgtctctttccgctgcaggaccatcccaagatgaacttaaaggacagccttgatgtggcaaagccggcggacgccaagaatggcaattccatccgcttggctttgacagtgtcagaagcatgatgcctgacgattgcgcatgagggtcggccccttgcggcagcggtggggtgcactgcctccatagtacaccgctgcccgctgcttggattctggtgggcccacctcatgctgatttccaacacctgaggttgtgggagttgaagagtttccagttgtggctcagtcactaactagtgctgagactgcgaggcacttcagctctctgagtgtcagtttcctcatctataaaatggggccgatatcctgcccttcctactcacctaggagagcgtaggtatgaaagccttccaacgtccccagcatatgtaagggataacctttatacatttaattagaaccaaataggtgaaggctgcaaagagccaggtgctcattacttttaggaaatcttcagtacatctgttcccacactgggactatgatcaggtttgcggcatgtaagagaagggtgaggcaaaactccctcatcaaacttgccatcaggataaag

SEQ ID NO: 387312 - DNA, 2574 bp, Homo sapiens
tataaaattattagtataaaaggggagatgctaccattcgctcctcaggacgagccctgggaccgagaaatggaagtgttcagcggcggcggcgcgagcagcggcgaggtaaatggtcttaaaatggttgatgagccaatggaagagggagaagcagattcttgtcatgatgaaggagttgttaaagaaatccctattactcatcatgttaaggaaggctatgagaaagcagatcctgcacagtttgagttgctcaaggttcttggtcaggggtcatttggaaaggtttttcttgttagaaagaagaccggtcctgatgctgggcagctctatgcaatgaaggtgttaaaaaaagcctctttaaaagttcgagacagagttcggacaaagatggagagggatatactggtggaagtaaatcatccatttattgtcaaattgcactatgcctttcagactgaagggaaactgtacttaatactggattttctcaggggaggagatgttttcacaagattatccaaagaggttctgtttacagaggaagatgtgaaattctacctcgcagaactggcccttgctttggatcatctgcaccaattaggaattgtttatagagacctgaagccagaaaacattttgcttgatgaaataggacatatcaaattaacagattttggactcagcaaggagtcagtagatcaagaaaagaaggcttactcattttgtggtacagtagagtatatggctcctgaagtagtaaataggagaggccattcccagagtgctgattggtggtcatatggtgttcttatgtttgaaatgcttactggtactctgccatttcaaggtaaagacagaaatgagaccatgaatatgatattaaaagcaaaacttggaatgcctcaatttcttagtgctgaagcacaaagtcttctaaggatgttattcaaaaggaatccagcaaatagattgggatcagaaggagttgaagaaatcaaaagacatctgttttttgcaaatattgactgggataaattatataaaagagaagttcaacctcctttcaaacctgcttctggaaaaccagatgatactttttgttttgatcctgaatttactgcaaaaacacctaaagattctcccggtttgccagccagtgcaaatgctcatcagctcttcaaaggattcagctttgttgcaacttctattgcagaagaatataaaatcactcctatcacaagtgcaaatgtattaccaattgttcagataaatggaaatgctgcacaatttggtgaagtatatgaattgaaggaggatattggtgttggctcctactctgtttgcaagcgatgcatacatgcaactaccaacatggaatttgcagtgaagatcattgacaaaagtaagcgagacccttcagaagagattgaaatattgatgcgctatggacaacatcccaacattattactttgaaggatgtctttgatgatggtagatatgtttaccttgttacggatttaatgaaaggaggagagttacttgaccgtattctcaaacaaaaatgtttctcggaacgggaggctagtgatatactatatgtaataagtaagacagttgactatcttcattgtcaaggagttgttcatcgtgatcttaaacctagtaatattttatacatggatgaatcagccagtgcagattcaatcaggatatgtgattttgggtttgcaaaacaacttcgaggagaaaatggacttctcttaactccatgctacactgcaaactttgttgcacctgaggttcttatgcaacagggatatgatgctgcttgtgatatctggagtttaggagtccttttttacacaatgttggctggctacactccatttgctaatggccccaatgatactcctgaagagatactgctgcgtataggcaatggaaaattctctttgagtggtggaaactgggacaatatttcagacggagcaaaggatttgctttcccatatgcttcatatggacccacatcagcggtatactgctgaacaaatattaaagcactcatggataactcacagagaccagttgccaaatgatcagccaaagagaaatgatgtgtcacatgttgttaagggagcaatggttgcaacatactctgccctgactcacaagacctttcaaccagtcctagagcctgtagctgcttcaagcttagcccagcgacggagcatgaaaaagcgaacatcaactggcctgtaagatttgtggtgttcctaggccaaactggatgaagatgaaattaaatgtgtggcttttttcctattcttatcaaaggcatcgttgtctgctaaattacttgaatattaagtaatattaaatccccatttttaggggaagtgagatttaaaaaaccattcacaggtccacaatattcatactatgtgtttgcagtagtgttcaagtgtttatttaagcatataattggtgtccaccaggtcctcacaacttctctgcacacaagcttctaaaattcctttcaaataaagttactttaatattttttttctt

SEQ ID NO: 387313 - DNA, 522 bp, Homo sapiens
gcggtaggcggcagctcctgtttgagtgctcctgaaggggagatgctaccattcgctcctcaggacgagccctgggaccgagaaatggaagtgttcagcggcggcggcgcgagcagcggcgagtttgctggctgggaacattttgggggacagctgcggactccagctcgctgttgaaccccggacgctttacgaacccagtgcaacaaacacaccaagaaagttggatccttttctgataacttaatcgactgcgtactactccagtagaggccaccatacacctcctaaaaatagttggtgaaattgattcacagtaggatattttgagtatgttttaggtattgtagagatttaacaatgggtctctctacctcagcaatttggaaaaatactcgagtggaaattgttaatccctatgaagtaaaacgaaaggtgaaggtaaatggtcttaaaatggttgatgagccaatggaagagggagaagcagattcttgtcatgtaagtatttatgttaattta

SEQ ID NO: 387314 - DNA, 2766 bp, Homo sapiens
gcggtaggcggcagctcctgtttgagtgctcctgaaggggagatgctaccattcgctcctcaggacgagccctgggaccgagaaatggaagtgttcagcggcggcggcgcgagcagcggcgagtttgctggctgggaacattttgggggacagctgcggactccagctcgctgttgaaccccggacgctttacgaacccagtgcaacaaacacaccaagaaagttggatccttttctgataacttaatcgactgcgtactactccagtagaggccaccatacacctcctaaaaatagttggtgaaattgattcacagtaggatattttgagtatgttttaggtattgtagagatttaacaatgggtctctctacctcagcaatttggaaaaatactcgagtggaaattgttaatccctatgaagtaaaacgaaaggtgaaggtaaatggtcttaaaatggttgatgagccaatggaagagggagaagcagattcttgtcatgatgaaggagttgttaaagaaatccctattactcatcatgttaaggaaggctatgagaaagcagatcctgcacagtttgagttgctcaaggttcttggtcaggggtcatttggaaaggtttttcttgttagaaagaagaccggtcctgatgctgggcagctctatgcaatgaaggtgttaaaaaaagcctctttaaaagttcgagacagagttcggacaaagatggagagggatatactggtggaagtaaatcatccatttattgtcaaattgcactatgcctttcagactgaagggaaactgtacttaatactggattttctcaggggaggagatgttttcacaagattatccaaagaggttctgtttacagaggaagatgtgaaattctacctcgcagaactggcccttgctttggatcatctgcaccaattaggaattgtttatagagacctgaagccagaaaacattttgcttgatgaaataggacatatcaaattaacagattttggactcagcaaggagtcagtagatcaagaaaagaaggcttactcattttgtggtacagtagagtatatggctcctgaagtagtaaataggagaggccattcccagagtgctgattggtggtcatatggtgttcttatgtttgaaatgcttactggtactctgccatttcaaggtaaagacagaaatgagaccatgaatatgatattaaaagcaaaacttggaatgcctcaatttcttagtgctgaagcacaaagtcttctaaggatgttattcaaaaggaatccagcaaatagattgggatcagaaggagttgaagaaatcaaaagacatctgttttttgcaaatattgactgggataaattatataaaagagaagttcaacctcctttcaaacctgcttctggaaaaccagatgatactttttgttttgatcctgaatttactgcaaaaacacctaaagattctcccggtttgccagccagtgcaaatgctcatcagctcttcaaaggattcagctttgttgcaacttctattgcagaagaatataaaatcactcctatcacaagtgcaaatgtattaccaattgttcagataaatggaaatgctgcacaatttggtgaagtatatgaattgaaggaggatattggtgttggctcctactctgtttgcaagcgatgcatacatgcaactaccaacatggaatttgcagtgaagatcattgacaaaagtaagcgagacccttcagaagagattgaaatattgatgcgctatggacaacatcccaacattattactttgaaggatgtctttgatgatggtagatatgtttaccttgttacggatttaatgaaaggaggagagttacttgaccgtattctcaaacaaaaatgtttctcggaacgggaggctagtgatatactatatgtaataagtaagacagttgactatcttcattgtcaaggagttgttcatcgtgatcttaaacctagtaatattttatacatggatgaatcagccagtgcagattcaatcaggatatgtgattttgggtttgcaaaacaacttcgaggagaaaatggacttctcttaactccatgctacactgcaaactttgttgcacctgaggttcttatgcaacagggatatgatgctgcttgtgatatctggagtttaggagtccttttttacacaatgttggctggctacactccatttgctaatggccccaatgatactcctgaagagatactgctgcgtataggcaatggaaaattctctttgagtggtggaaactgggacaatatttcagacggagcaaagggagcaatggttgcaacatactctgccctgactcacaagacctttcaaccagtcctagagcctgtagctgcttcaagcttagcccagcgacggagcatgaaaaagcgaacatcaactggcctgtaagatttgtggtgttcctaggccaaactggatgaagatgaaattaaatgtgtggcttttttcctattcttatcaaaggcatcgttgtctgctaaattacttgaatattaagtaatattaaatccccatttttaggggaagtgagatttaaaaaaccattcacaggtccacaatattcatactatgtgtttgcagtagtgttcaagtgtttatttaagcatataattggtgtccaccaggtcctcacaacttctctgcacacaagcttctaaaattcctttcaaataaagttactttaatattttttttctt

SEQ ID NO: 387315 - DNA, 728 bp, Homo sapiens
ttctgaccaggtgcagtggctcatacctgtaatccagcactttaggtggctgaggcaggttggatcgcttgagctcataagttcgagacagcctggccaacatggtaaaaccccgtctttactcaaagtacaaaaattagccgggtgtggtggtggctgcctgtagtcccagctacttgggaggctgaggcaagagaatcacttgaacccgagaggtggaggttgcgggagccaagattgcgccactgcactccagcctgggtgacagcgcaagactccatctccaaaaaaaagatgaataacttgcctaaagacacacaactagtaagtgtagagtctggttttgaacactcagcccagatctttctgctttcctgaccatgcgtccagaaacatgttcccaccaagaaatttttgtcttctggaccctttccaagatgtaactctaactacctggacattctgaattctgcttctgggtagttggtaggacaggtaaacagcattcttggagccaacagacaccagccatgcaaataccctctttctgtggacaggatagttttacttaagataaatgcttccactcaccagttttcttcaattctatctcctttctgaccatctctgtgcttgggaaagtagctcttatcaaacacaggagaactgatcatattgctgtttatttaaaatccggtgtaatgtggaatttttgcaatgtttcagga

SEQ ID NO: 387316 - DNA, 355 bp, Homo sapiens
tgagtttttttttaaaaggtcccttctaaaaaagaggggctacattttctcccgccattattaagaaatatatcctgaatcatatatttagttactttctatagtgattgtatggatttaaaagaataattaaaatgtgaagttgaaaaacttgtaaaatttggaatatacagatactgatttttttcatttttgttagtatacctataatacataatcacattgacaaaccaatgaaaatattgtttttctgatgaatggcttgatttttctccttgacatgttttgactgttcattctaactgaaaacatatatgggaaaatatgaacctgaaataaaagcactcaaattcaa

SEQ ID NO: 387317 - DNA, 4678 bp, Homo sapiens
  misc_feature (825)..(825): n is a, c, g, or t
  misc_feature (841)..(847): n is a, c, g, or t
  misc_feature (859)..(859): n is a, c, g, or t
  misc_feature (870)..(870): n is a, c, g, or t
  misc_feature (873)..(873): n is a, c, g, or t
  misc_feature (875)..(875): n is a, c, g, or t
  misc_feature (895)..(895): n is a, c, g, or t
  misc_feature (901)..(901): n is a, c, g, or t
  misc_feature (904)..(904): n is a, c, g, or t
ctttgaagaacatcctgaagattatatcggagacaatatatcaagaatctatttattgaatcatctagaacaaaagccaggagctccctaatggaagcacattagtgtttattttgatgaagaaatatatagattttttaaaacaaccacaaagtagatagctcagtaaaaaatcaattttggaagatgtcactgaacaactcttccaatgtatttctggattcagtgcccagtaataccaatcgctttcaagttagtgtcataaatgagaaccatgagagcagtgcagctgcagatgacaatactgacccaccacattatgaagaaacctcttttggggatgaagctcagaaaagactcagaatcagctttaggcctgggaatcaggagtgctatgacaatttcctccaaagtggagaaactgctaaaacagatgccagttttcacgcttatgattctcacacaaacacatactatctacaaacttttggccacaacaccatggatgccgttcccaagatagagtactatcgtaacaccggcagcatcagtgggcccaaggtcaaccgacccagcctgcttgagattcacgagcaactcgcaaagaatgtggcagtcaccccaagttcagctgacagagttgctaacggtgatgggatacctggagatgaacaagctgaaaataaggaagatgatcaagctggtgttgtgaagtttggatgggtgaaaggtgtgctggtaagatgcatgctgaacatctggggagtcatgctcttcattcgcctctcctggattgttggagaagctggaattggtcttggagtnatcatcattggcctannnnnnntagtaacgacantcacaggtatntcnangtctgctatttgccacgaanggagtngtnagaggaggtggggcctactatcttatttccagaagtttagggcccgagttcggtgggtcaataggcctgatctttgcttttgctaatgcagtggctgttgctatgtatgtggtgggattcgctgaaactgtagtagatcttcttaaggagagtgattcgatgatggtggatccaaccaatgacatccggattataggctccatcacagtggtgattcttctaggaatttcagtagctggaatggaatgggaggcaaaggcccaagtcattcttctggtcattcttctaattgctattgcaaacttcttcattggaactgtcattccatccaacaatgagaaaaagtccagaggtttctttaattaccaagcatcaatatttgcagaaaactttgggccacgcttcacaaagggtgaaggcttcttctctgtctttgccatttttttcccagcagctactgggattcttgctggtgccaatatctcaggagatttggaggatccccaagatgccatccccagaggaaccatgctggccattttcatcaccactgttgcctacttaggggttgcaatttgtgtaggggcctgtgtggtccgagatgccaccgggaacatgaatgacaccatcatttctgggatgaactgcaatggttcagcagcatgtgggttgggctatgacttctcaagatgtcgacatgaaccatgtcagtacgggctgatgaacaatttccaggtcatgagcatggtatcagggttcggccccctcatcactgcgggaatcttttctgcaacactctcctccgccctggcctcccttgtcagcgcacccaaagtgttccaggctctgtgcaaggacaacatctacaaagccctgcagttttttgcaaagggatatgggaaaaacaatgaacccctgagaggatatattctcacttttcttatagccatggcatttattcttattgcggaactgaacaccattgctcccatcatctccaactttttcctggcctcatatgcacttattaatttctcctgcttccatgcctcttatgccaaatctccaggatggagacctgcgtatggaatttacaacatgtgggtatctctttttggagctgttttgtgctgtgcagtcatgtttgtcatcaactggtgggcagctgtcatcacctatgtcattgaattcttcctttacgtctatgtgacttgtaagaagccagatgtgaactggggctcctccacacaggctctttcctacgtgagtgctttagacaatgctctggaattaaccacagtggaagaccacgtaaaaaacttcaggccccagtgcattgtcttaacagggggacccatgacaagacctgctctcctggacataactcacgcctttaccaagaacagtggcctttgcatctgctgtgaagtctttgtgggaccgcgcaaactgtgtgttaaggagatgaacagtggcatggcgaaaaaacaggcctggcttataaagaacaaaatcaaggctttttatgctgcagtggcggcagactgtttcagggatggtgtccgaagtcttcttcaggcctcaggcttaggaagaatgaaaccaaacactctggtgattggatataagaaaaactggaggaaagctcccttgacagagattgagaactacgtgggaatcatacatgatgcatttgattttgagattggcgtggttatagtcagaatcagccaaggatttgacatctctcaggttcttcaggtgcaagaggaattagagagattagaacaggagagactagcattggaagcgactatcaaagataatgagtgtgaagaggaaagtggaggcatccgaggcttgtttaaaaaagctggcaagttgaacattactaagacaacgcctaaaaaagatggcagcattaacacaagccagtcgatgcatgtgggagagttcaaccagaaactggtggaagccagcactcaatttaaaaagaaacaagaaaaaggcacaattgatgtttggtggttgtttgatgatggagggttaacacttcttatcccctatatcttaactctcagaaaaaaatggaaagactgtaaattaagaatctatgtgggagggaagatcaaccgcattgaagaagaaaaaattgcaatggcttcccttctgagcaaatttaggataaaatttgcagacatccatatcatcggtgacatcaacattaggccaaacaaagagagctggaaagtctttgaagagatgattgaaccatatcgtctccatgaaagctgcaaagatttaacaactgctgagaaattaaaaagagaaactccgtggaaaattacagatgcagaactggaagcagtcaaggaaaagagttaccgccaagttcgactgaatgaactcttacaggagcactccagagctgctaatctcattgtcctgagccttcccgtggcaagaaagggatccatatcggatttgttgtatatggcttggttggaaatcctcacaaagaacctcccacctgtcttactagttagaggaaatcacaaaaatgtcttgacattttactcttaaaacatgaaagattggaatacattttaacttaatgtaatgcataattaagaaacatgttccagtactttatgttgtaaatctgatctatggatatgcaaacctctggagatgatcctaccagattctacatacattgcataatttttatcagttaatgcgagcttttttttctcttctcagcttaaggggttgtcaaagccaatgttatccctagaaaaacatttttgtcactgctgttgataaacaagaaaatcaaggaaactcatgttggcttatgctcatggaaaccaccaatgtgattgtaaacttctccagacaaacttaaccttttgtttcttaattttttgtttgagtgtttgcttctcagccctggtataggtctcagccccacagcaggatctcaataaatgcttattgacaggctggcatagtaaccacaggtggttatcaaaggaaaagaccaataggctggggaacataattatgcttggcccctcagaggcttatacctccaaagcagatttaaaaatcagtaactcaaaactttaagaagtagttgagtctacaaaatattcaaagcagttacctaaataaggttatttaatgtaacagattatatacttaaagtgatctgagcaatcattgataacatatggcttaaatttgctgctgcctgaaaagtatattaactagattagaagacaccatatactccaataaaatgaaatatattctattctcaatatataaactttaattgtactccctatcaaatattttgaaatttccatcacggcattactttgcatatttttttctaattaaatggttagtacagatgaaatctttatagatgactacttgaaaactaagtgctacaaattttcaaaccattattaagaaatatatcctgaatcatatatttagttactttctatagtgattgtatggatttaaaagaataattaaaatgtgaagttgaaaaacttgtaaaatttggaatatacagatactgatttttttcatttttgttagtatacctataatacataatcacattgacaaaccaatgaaaatattgtttttctgatgaatggcttgatttttctccttgacatgttttgactgttcattctaactgaaaacatatatgggaaaatatgaacctgaaataaaagcactcaaattcaa

SEQ ID NO: 387318 - DNA, 1742 bp, Homo sapiens
  misc_feature (825)..(825): n is a, c, g, or t
  misc_feature (841)..(847): n is a, c, g, or t
  misc_feature (859)..(859): n is a, c, g, or t
  misc_feature (870)..(870): n is a, c, g, or t
  misc_feature (873)..(873): n is a, c, g, or t
  misc_feature (875)..(875): n is a, c, g, or t
  misc_feature (895)..(895): n is a, c, g, or t
  misc_feature (901)..(901): n is a, c, g, or t
  misc_feature (904)..(904): n is a, c, g, or t
ctttgaagaacatcctgaagattatatcggagacaatatatcaagaatctatttattgaatcatctagaacaaaagccaggagctccctaatggaagcacattagtgtttattttgatgaagaaatatatagattttttaaaacaaccacaaagtagatagctcagtaaaaaatcaattttggaagatgtcactgaacaactcttccaatgtatttctggattcagtgcccagtaataccaatcgctttcaagttagtgtcataaatgagaaccatgagagcagtgcagctgcagatgacaatactgacccaccacattatgaagaaacctcttttggggatgaagctcagaaaagactcagaatcagctttaggcctgggaatcaggagtgctatgacaatttcctccaaagtggagaaactgctaaaacagatgccagttttcacgcttatgattctcacacaaacacatactatctacaaacttttggccacaacaccatggatgccgttcccaagatagagtactatcgtaacaccggcagcatcagtgggcccaaggtcaaccgacccagcctgcttgagattcacgagcaactcgcaaagaatgtggcagtcaccccaagttcagctgacagagttgctaacggtgatgggatacctggagatgaacaagctgaaaataaggaagatgatcaagctggtgttgtgaagtttggatgggtgaaaggtgtgctggtaagatgcatgctgaacatctggggagtcatgctcttcattcgcctctcctggattgttggagaagctggaattggtcttggagtnatcatcattggcctannnnnnntagtaacgacantcacaggtatntcnangtctgctatttgccacgaanggagtngtnagaggaggtggggcctactatcttatttccagaagtttagggcccgagttcggtgggtcaataggcctgatctttgcttttgctaatgcagtggctgttgctatgtatgtggtgggattcgctgaaactgtagtagatcttcttaaggagagtgattcgatgatggtggatccaaccaatgacatccggattataggctccatcacagtggtgattcttctaggaatttcagtagctggaatggaatgggaggcaaaggcccaagtcattcttctggtcattcttctaattgctattgcaaacttcttcattggaactgtcattccatccaacaatgagaaaaagtccagaggtttctttaattaccaagcatcaatatttgcagaaaactttgggccacgcttcacaaagggtgaaggcttcttctctgtctttgccatttttttcccagcagctactgggattcttgctggtgccaatatctcaggagatttggaggtacgttgtttgctctgctttgcagtcctgggagtggtggtacacttggtgggtagcacaaggagctagagaggttagatgtgaccatattaccctacagattcaaactgtaggtttctgcaagatttcctgatgatttaaaagttctctcttttaatgccaaatttggatttatattccagataattcttccaaaagtcttattcagtgatatcagaagaacagggtagtgtgatagtgtgtcatatttccccaaaataaatgtagttcagtgaaaaaaataccagaaccaccctttctcttttaaacccaaatgaataggaatattttcctgtaaaag

SEQ ID NO: 387319 - DNA, 519 bp, Homo sapiens
agttatagaacacaggattagatgcctccagaaaagctacagggagttaattgtatgcccagtcgcacatctacccattgccacttgaactttttgtagtagaggtctcgattgtctattttctgattggtaggcttttttattacttactttatggaaaccctagctaagagtaaatatgtatccccaaagaaaaatgactaacttcttaaactttgacagatgctcgctatgttttcaatttccaaataaattcaagcttcgaggctataacagctgttcagcccctggtctcatcactcatacgtacatgttcaattctgttacttttacagcggaactgaacaccattgctcccatcatctccaactttttcctggcctcatatgcacttattaatttctcctgcttccatgcctcttatgccaaatctccaggtaagctgacttccaaactaaaatatgcctaagcaaacagttagtttgtctcaataaaacgaaataaatcagtgaaaagtgt

SEQ ID NO: 387320 - DNA, 654 bp, Homo sapiens
ctataatcccagccctttgagaggctgaggtgggcggatcacttgaggtcaggagttcaagaccagcctggccaacatggtgaaaccccgtctctactagaaatacaaaaattagcgaggcgtggtagcaggtgcctgtaatcccagctactcggtaggctaaggtacaagaatcgcttgaaccgggaggcagcggttgcagtgagccaagatcgtgccactgcactccagcctgggcgatagagcgagactgtctcaaacaaacaacaacaacaagaaaaggaatgtgagaatgaagcagggggaaaaaatgtagttgaaagccgtttgcttatgaaacagattccaaatcacagaaagtctccttacttgtacctctcttctcaaggtcatgagcatggtatcagggttcggccccctcatcactgcgggaatcttttctgcaacactctcctccgccctggcctcccttgtcagcgcacccaaagtgttccaggtaatacaagcacaacagcttgtgcttctccctattgctatttccacagaatgtgaatcaagctgaaatattcgttctcactggcaatcattttccatcattttctgaaacagttaatgtttgcatctggctcaagttctatgtctgccacatagtca

SEQ ID NO: 387321 - DNA, 721 bp, Homo sapiens
gactcagaatcagctttaggcctgggaatcaggagtgctatgacaatttcctccaaagtggagaaactgctaaaacagatgccagttttcacgcttatgattctcacacaaacacatactatctacaaacttttggccacaacaccatggatgccgttcccaagatagagtactatcgtaacaccggcagcatcagtgggcccaaggtcaaccgacccagcctgcttgagattcacgagcaactcgcaaaggtaagcttgaaggacacaagcaagtctcctcccttattcataacttcagataatttccttctctttcattacactatgaatgaatgtgaaacagtcaaatggagaggtctattccaaacactatccatcttacttacaaaactgtccctagttcccagaaaagtgtttcacagatgctttttctttggatttttttttttcttgagacaaagtcttgctctgtcacccagcctgaagtgtggtggacactgcagctttgaactcctgggctcaaacaatcctcccacctcaacctcctgagtagctgggactgcaggcatgcaccaccacacctgactaacttttttattttttgtagagacagggtcttgctatgttgctcaagctggtctcgaactcctgacttaaagggatcctcccaccttggcctcccaaagagatgggattgcaggcatgagccactgtgccca

SEQ ID NO: 387322 - DNA, 929 bp, Homo sapiens
ctttgaagaacatcctgaagattatatcggagacaatatatcaagaatctatttattgaatcatctagaacaaaagccaggagctccctaatggaagcacattagtgtttattttgatgaagaaatatatagattttttaaaacaaccacaaagtagatagctcagtaaaaaatcaattttggaagatgtcactgaacaactcttccaatgtatttctggattcagtgcccagtaataccaatcgctttcaagttagtgtcataaatgagaaccatgagagcagtgcagctgcagatgacaatactgacccaccacattatgaagaaacctcttttggggatgaagctcagaaaagactcagaatcagctttaggcctgggaatcaggagtgctatgacaatttcctccaaagtggagaaactgctaaaacagatgccagttttcacgcttatgattctcacacaaacacatactatctacaaacttttggccacaacaccatggatgccgttcccaagatagagtactatcgtaacaccggcagcatcagtgggcccaaggtcaaccgacccagcctgcttgagattcacgagcaactcgcaaagaatgtggcagtcaccccaagttcagctgacagagttgctaacggtgatgggatacctggagatgaacaagctgaaaataaggaagatgatcaagctggtgttgtgaagtttggatgggtgaaaggtgtgctggtaagatgcatgctgaacatctggggagtcatgctcttcattcgcctctcctggattgttggagaagctggaattgagtatccttcttggcatgattggtaaaacttcactgaacaaaaataacttgtgagaaaactggtgaaaatgtgacctgactaataaaaatgctgaattgttgaactttttccaaa

SEQ ID NO: 387323 - DNA, 3864 bp, Homo sapiens
ggtcttggtgtgattatcatcggcttagccgtgacagtgactggtatcactggtttatccacctctgctattgccacaaatggatgtgtcagaggaggtggggcctactatcttatttccagaagtttagggcccgagttcggtgggtcaataggcctgatctttgcttttgctaatgcagtggctgttgctatgtatgtggtgggattcgctgaaactgtagtagatcttcttaaggagagtgattcgatgatggtggatccaaccaatgacatccggattataggctccatcacagtggtgattcttctaggaatttcagtagctggaatggaatgggaggcaaaggcccaagtcattcttctggtcattcttctaattgctattgcaaacttcttcattggaactgtcattccatccaacaatgagaaaaagtccagaggtttctttaattaccaagcatcaatatttgcagaaaactttgggccacgcttcacaaagggtgaaggcttcttctctgtctttgccatttttttcccagcagctactgggattcttgctggtgccaatatctcaggagatttggaggatccccaagatgccatccccagaggaaccatgctggccattttcatcaccactgttgcctacttaggggttgcaatttgtgtaggggcctgtgtggtccgagatgccaccgggaacatgaatgacaccatcatttctgggatgaactgcaatggttcagcagcatgtgggttgggctatgacttctcaagatgtcgacatgaaccatgtcagtacgggctgatgaacaatttccaggtcatgagcatggtatcagggttcggccccctcatcactgcgggaatcttttctgcaacactctcctccgccctggcctcccttgtcagcgcacccaaagtgttccaggctctgtgcaaggacaacatctacaaagccctgcagttttttgcaaagggatatgggaaaaacaatgaacccctgagaggatatattctcacttttcttatagccatggcatttattcttattgcggaactgaacaccattgctcccatcatctccaactttttcctggcctcatatgcacttattaatttctcctgcttccatgcctcttatgccaaatctccaggatggagacctgcgtatggaatttacaacatgtgggtatctctttttggagctgttttgtgctgtgcagtcatgtttgtcatcaactggtgggcagctgtcatcacctatgtcattgaattcttcctttacgtctatgtgacttgtaagaagccagatgtgaactggggctcctccacacaggctctttcctacgtgagtgctttagacaatgctctggaattaaccacagtggaagaccacgtaaaaaacttcaggccccagtgcattgtcttaacagggggacccatgacaagacctgctctcctggacataactcacgcctttaccaagaacagtggcctttgcatctgctgtgaagtctttgtgggaccgcgcaaactgtgtgttaaggagatgaacagtggcatggcgaaaaaacaggcctggcttataaagaacaaaatcaaggctttttatgctgcagtggcggcagactgtttcagggatggtgtccgaagtcttcttcaggcctcaggcttaggaagaatgaaaccaaacactctggtgattggatataagaaaaactggaggaaagctcccttgacagagattgagaactacgtgggaatcatacatgatgcatttgattttgagattggcgtggttatagtcagaatcagccaaggatttgacatctctcaggttcttcaggtgcaagaggaattagagagattagaacaggagagactagcattggaagcgactatcaaagataatgagtgtgaagaggaaagtggaggcatccgaggcttgtttaaaaaagctggcaagttgaacattactaagacaacgcctaaaaaagatggcagcattaacacaagccagtcgatgcatgtgggagagttcaaccagaaactggtggaagccagcactcaatttaaaaagaaacaagaaaaaggcacaattgatgtttggtggttgtttgatgatggagggttaacacttcttatcccctatatcttaactctcagaaaaaaatggaaagactgtaaattaagaatctatgtgggagggaagatcaaccgcattgaagaagaaaaaattgcaatggcttcccttctgagcaaatttaggataaaatttgcagacatccatatcatcggtgacatcaacattaggccaaacaaagagagctggaaagtctttgaagagatgattgaaccatatcgtctccatgaaagctgcaaagatttaacaactgctgagaaattaaaaagagaaactccgtggaaaattacagatgcagaactggaagcagtcaaggaaaagagttaccgccaagttcgactgaatgaactcttacaggagcactccagagctgctaatctcattgtcctgagccttcccgtggcaagaaagggatccatatcggatttgttgtatatggcttggttggaaatcctcacaaagaacctcccacctgtcttactagttagaggaaatcacaaaaatgtcttgacattttactcttaaaacatgaaagattggaatacattttaacttaatgtaatgcataattaagaaacatgttccagtactttatgttgtaaatctgatctatggatatgcaaacctctggagatgatcctaccagattctacatacattgcataatttttatcagttaatgcgagcttttttttctcttctcagcttaaggggttgtcaaagccaatgttatccctagaaaaacatttttgtcactgctgttgataaacaagaaaatcaaggaaactcatgttggcttatgctcatggaaaccaccaatgtgattgtaaacttctccagacaaacttaaccttttgtttcttaattttttgtttgagtgtttgcttctcagccctggtataggtctcagccccacagcaggatctcaataaatgcttattgacaggctggcatagtaaccacaggtggttatcaaaggaaaagaccaataggctggggaacataattatgcttggcccctcagaggcttatacctccaaagcagatttaaaaatcagtaactcaaaactttaagaagtagttgagtctacaaaatattcaaagcagttacctaaataaggttatttaatgtaacagattatatacttaaagtgatctgagcaatcattgataacatatggcttaaatttgctgctgcctgaaaagtatattaactagattagaagacaccatatactccaataaaatgaaatatattctattctcaatatataaactttaattgtactccctatcaaatattttgaaatttccatcacggcattactttgcatatttttttctaattaaatggttagtacagatgaaatctttatagatgactacttgaaaactaagtgctacaaattttcaaaccattattaagaaatatatcctgaatcatatatttagttactttctatagtgattgtatggatttaaaagaataattaaaatgtgaagttgaaaaacttgtaaaatttggaatatacagatactgatttttttcatttttgttagtatacctataatacataatcacattgacaaaccaatgaaaatattgtttttctgatgaatggcttgatttttctccttgacatgttttgactgttcattctaactgaaaacatatatgggaaaatatgaacctgaaataaaagcactcaaattcaa

SEQ ID NO: 387324 - DNA, 450 bp, Homo sapiens
cttaaactaatattgtttctctgacctactcatttcaggaaacaaaagactacaattgcctttatgctgatatgcccttatattgaagacttgaccatatataggaacattaaacagaatgccaggtagaggttttgattttcttgtcaaaataaaatgtcagaaatattcttcatgtgttttggggaagggagtattaataggggtcaactgtacattagtgaatacctgtcatttgaaataggagcttttaaaatagtatatatttaaggtgtaaaacatgatattttgatatacatatacatagttaaatgattactacagtaataggagcaataattttatgtgtgctgttctaagcacttatggtaactcattttatgttaacaacaatcctgtgagatgggaatatttatcctccatctgaaaaaaattaaggcacggagagac

SEQ ID NO: 387325 - DNA, 2351 bp, Homo sapiens
ttcaaacagtgctcattcctcaactcccaagtagctgagattacaggcatgcaccatcacgcctggctaatttttctatttttagcagagatggggtttcgccatgttggccaggctggtctcgaactcctgacctcaagtgatctgcccgcctccacctcacaaagctttgggattacaggcatgagccacggtgcctggcctgcagcctcctttattttacaaaaggcattaccacttaaacactgaagatagcacgaatctctgatgtttgcaagttcagaataaaatggaaatgaaaattcattatgtggcagtctcagtactgagcacaaaggcttttaaccacaagcaaattactgtgctagccagaccgtgtgagagaactccaggccagcttgctaaaactgagcaggagaatttggagagagtccagaggagagccacagaaacaactgaagcatgacaagaataattgcagttctgttatagagaggtcatctatatcaggcttttatggagtaccatgtggaatgttaccacgcagagcatggggaacagctgttgtgactcaacaagagacaggacagaagaaatgagaacaggtggaagatcaataatttaggtttgatatggggaaagatggaacagtcaaagggattcacactgatttttggctgagcagaaggcagagtctcctccaacgggcaatgtaagtgcccccactcatctacaccccgagaagagccatcaaactgtattaaacttggaaaaagctatttaacttcaagtgtgctgcgagaaaacttcataatagttcctaagatgtgctaaaaagtaaagtccaaaaagatcataaagtctgtagagaagttctaagagtgcagtcagctataaaaacctagcaatttaatttcttagaaaaatgtagctggagttcaaactgtagtaacaaaggcaagtaaattaagttgtgggcaggtgtaattaagttaataggaatggcagggatgaatataaatcagaacaggactaacagtttgaaacattagatattcaaatgctcagagctgatgagccgagccactacgctaacaactctgcaaaccaaaggtttcacaaattgcacaagaacctggcctcgatcccattgtgttgctggcataagattagaagggcctgttggttcaattgttgctttggacagaggaggacaaacttgccacagtgaagaaatcatttttaaaaaccaccactgtcctttagtgcactaatttctctaataactaggtgtatattagaaataatgatatataagtgcagtatactccagtttcaacagaatggtgtcacttctgtaaaatgttgattttcagattgtcatactttctaaatacaaaaatttgtcacagcttccacatttacaagatattaaacattccataaaatatttgtagaaatatgaaaaaccaatttttgtagttgccttttgaaatgtatacaaaatatcccacatgggcaacatggtaaaacctcgtctctacaaaaaaaaaaaaaaaaatacaaaaagttagccaggcctggtggtgcacgcctgtggtcccagctactcgggaagctgaagtgagatcacctgtgcccaggaggtcgaagctgcagtgagctgtgattgcaccactgcactccagcctgggtgacagagtgagactttgtctcaaataaacaaaaagagacatatacaaaatatattagaaagttgggttaatatcctacaaacaaagtattacatagtttgcacaggattatgtgtgtaaaaagttttaaattcagtatagcttttatttctgcagaactaaaagtagtgcataaaaataaaagtgggatgagcatatctttttaatttgctatgcagtaaaaagtatctcagtcaacatataggaaaccagtgccatttctgtatcatttgacaccgaaggggtattgttttttgttttgttttgtttttcttttgaagaaagacttttatgtcttttattctattcttccgatttggggtttaaattacccccaataagtttgcagaatattctgattactactgcttaggtgatatatttcatatgagaactatctttacacaatgggaaaaaatatggtaaccacttcattcatcagagaagttgtgttttgtttacttgtattttgtttgctaaatgaaattggttatttagactcatggcatgctttttctcaaatggagatttaaaagtcatttccaatgtccttctaacttctggccaattcccagtaggctatagaataaacagttttcatataatagtcaaaaaagt

SEQ ID NO: 387326 - DNA, 170 bp, Homo sapiens
gcggccgcctactactactactactgctcgaattcaagcttctaacgatgtacggggacatgctttttctcaaatggagatttaaaagtcatttccaatgtccttctaacttctggccaattcccagtaggctatagaataaacagttttcatataatagtcaaaaaagt

SEQ ID NO: 387327 - DNA, 436 bp, Homo sapiens
atagtttttctgagaagtgtgggatagaacccttattttaaatggacagtttatcttaagacatccagttaaaataggaaaaaattaacatctagaatctaattaatgaggtttactctaagatttgtttaaaaatatgccttttaaaatctatttgtctctttgttttatttgtaattttagcgagatgaaatataattttgatagaccattcatttataacttttgtaattggcctctcatgcttttccttatctttttttgtgtcagctatgtgtaaatttgaaactaattatgacaccaaataaagaatccatttagggtgacctcattggaaaacagcatttttgcagatactcactctccttttagcaaatatggttaaattaccattttgaatacttctagaactatgaagaatggtggtgattcatga

SEQ ID NO: 387328 - DNA, 435 bp, Homo sapiens
ccataatataacactaacgaaaatgaacacattcgctacaatcaacaagtaataaataatggactgggattactattaggaaaaaaaaggcacacaaagactaggagttttatatatattaattcaggtaagtactattatgctactactgtcattttgcaaatgagaaaactgcaacacaaagaagttaaataacttgttcaagattatacggctatttaagtatgaagctggcattcaagcttaagcacgcggttagtcccagaatcccctatcataactatcatgctatacttgttcatcttaaaaatttttggtttgttcttgatttttgagatagagtctcgctccgtcacccaggctggataagtatgtagttagttacgagcattaccatattgctttaatttctcctgtatctgtcgattacttccc

SEQ ID NO: 387329 - DNA, 458 bp, Homo sapiens
ccataatataacactaacgaaaatgaacacattcgctacaatcaacaagtaataaataatggactgggattactattaggaaaaaaaaggcacacaaagactaggagttttatatatattaattcaggtaatcctcacaacaatatcaaggtaagtactattatgctactactgtcattttgcaaatgagaaaactgcaacacaaagaagttaaataacttgttcaagattatacggctatttaagtatgaagctggcattcaagcttaagcacgcggttagtcccagaatcccctatcataactatcatgctatacttgttcatcttaaaaatttttggtttgttcttgatttttgagatagagtctcgctccgtcacccaggctggataagtatgtagttagttacgagcattaccatattgctttaatttctcctgtatctgtcgattacttccc

SEQ ID NO: 387330 - DNA, 360 bp, Homo sapiens
acgtgaacccagagtcttcctgatggacggggtgcttggatggagttcaagagggggagtgacttagttatttctgaattttggaaagatcatttgcagggcgaatagacagggaggaagccatccaggggcagggagacgggccagggtccactgcagtagccccgggcagatatgagacaggaaggagggctgggcacagggccgaaacgtgtgtgtaacagggcttgctcagagaggtgcggggctgggaccttgctccgactgccctttgcagggcgtgtactgatttgagggcagccagactcattcagatgctagctgaggccaggacaatggctggccccagagagggctgca

SEQ ID NO: 387331 - DNA, 98 bp, Homo sapiens
gagctgggggactcggccctttatctttgcgccagcagctggcagcgggagctacaatgagcagttcttcgggccagggacacggctcaccgtgcata

SEQ ID NO: 387332 - DNA, 94 bp, Homo sapiens
gagctgggggactcggccctttatctttgcgccagcagctggcagcgggaacactgaagctttctttggacaaggcaccagactcacagttgta

SEQ ID NO: 387333 - DNA, 107 bp, Homo sapiens
  misc_feature (38)..(38): n is a, c, g, or t
gctgctccctcccagacatctgtgtacttctgtgccancagtgagggcgagcggccacagatacgcagtattttggcccaggcacccggctgacagtgctcgaggac

SEQ ID NO: 387334 - DNA, 106 bp, Homo sapiens
accagctcccagacatctgtgtacttctgtgccatcagtgacgggacagtggaactatggctacaccttcggttcggggaccaggttaaccgttgtagaggacctg

SEQ ID NO: 387335 - DNA, 99 bp, Homo sapiens
gagctgggggactcggccctttatctttgcgccagcagctggcagcgcacagatacgcagtattttggcccaggcacccggctgacagtgctcgaggac

SEQ ID NO: 387336 - DNA, 92 bp, Homo sapiens
gagctgggggactcggccctttatctttgcgccagcagctggcagcgataatgaaaaactgttttttggcagtggaacccagctctctgtct

SEQ ID NO: 387337 - DNA, 129 bp, Homo sapiens
  misc_feature (24)..(24): n is a, c, g, or t
  misc_feature (44)..(44): n is a, c, g, or t
  misc_feature (55)..(55): n is a, c, g, or t
gagcttcgtgactctgctgtgtanttctgtgccagcagctgaancgggagggtgnttcacccctccactttgggaacgggaccaggctcactgtgacagaggacctgaacaaggtgttcccacccgagg

SEQ ID NO: 387338 - DNA, 86 bp, Homo sapiens
cgggactcagccatgtatcgctgtgccagcagcttaagggctactacgagcagtacttcgggccgggcaccaggctcacggtcaca

SEQ ID NO: 387339 - DNA, 97 bp, Homo sapiens
gagctgggggactcggccctttatctttgcgccagcagctggcagcgagggctactacgagcagtacttcgggccgggcaccaggctcacggtcaca

SEQ ID NO: 387340 - DNA, 108 bp, Homo sapiens
accagctcccagacatctgtgtacttctgtgccatcagtgacgggacagtgggttgcaatcagccccagcattttggtgatgggactcgactctccatcctagaggac

SEQ ID NO: 387341 - DNA, 105 bp, Homo sapiens
  misc_feature (103)..(103): n is a, c, g, or t
  misc_feature (105)..(105): n is a, c, g, or t
gagcttcgtgactctgctgtgtatttctgtgccagcagccagagcacaggcgaacaccggggagctgttttttggagaaggctctaggctgaccgtactgggnan

SEQ ID NO: 387342 - DNA, 98 bp, Homo sapiens
gagcttcgtgactctgctgtgtatttctgtgccagcagccagagcacacagatacgcagtattttggcccaggcacccggctgacagtgctcgaggac

SEQ ID NO: 387343 - DNA, 102 bp, Homo sapiens
cctgcagaactggaggattctggagtttatttctgtgccagcagcggttgcaatcagccccagcattttggtgatgggactcgactctccatcctagaggac

SEQ ID NO: 387344 - DNA, 104 bp, Homo sapiens
gagctgggggactcggccctttatctttgcgccagcagctggcagcgggttgcaatcagccccagcattttggtgatgggactcgactctccatcctagaggac

SEQ ID NO: 387345 - DNA, 107 bp, Homo sapiens
  misc_feature (7)..(7): n is a, c, g, or t
gctgctncctcccagacatctgtgtacttctgtgccataagccccgggacaggcctccccgcataatgaaaaactgttttttggcagtggaacccagctctctgtct

SEQ ID NO: 387346 - DNA, 104 bp, Homo sapiens
  misc_feature (102)..(102): n is a, c, g, or t
  misc_feature (104)..(104): n is a, c, g, or t
cctgcagaactggaggattctggagtttatttctgtgccagcagccaggcgaacaccggggagctgttttttggagaaggctctaggctgaccgtactgggnan

SEQ ID NO: 387347 - DNA, 101 bp, Homo sapiens
gagcttcgtgactctgctgtgtatttctgtgccagcagccaagcagcgggggagctacaatgagcagttcttcgggccagggacacggctcaccgtgcata

SEQ ID NO: 387348 - DNA, 106 bp, Homo sapiens
  misc_feature (104)..(104): n is a, c, g, or t
  misc_feature (106)..(106): n is a, c, g, or t
gagctgggggactcggccctttatctttgcgccagcagctggcagcgcaggcgaacaccggggagctgttttttggagaaggctctaggctgaccgtactgggnan

SEQ ID NO: 387349 - DNA, 130 bp, Homo sapiens
  misc_feature (7)..(7): n is a, c, g, or t
  misc_feature (128)..(128): n is a, c, g, or t
  misc_feature (130)..(130): n is a, c, g, or t
gctgctncctcccagacatctgtgtacttctgtgccatcagtgaggctgcaatgctagcgggagtttctggcaggcgaacaccggggagctgttttttggagaaggctctaggctgaccgtactgggnan

SEQ ID NO: 387350 - DNA, 115 bp, Homo sapiens
caaaagaacccgacagctttctatctctgtgccagtacccccccacggggtgagggtggcgaactatggctacaccttcggttcggggaccaggttaaccgttgtagaggacctg

SEQ ID NO: 387351 - DNA, 96 bp, Homo sapiens
ccagaagactcagccctgtatctctgcgccagcagccaagacagcggagctacaatgagcagttcttcgggccagggacacggctcaccgtgcata

SEQ ID NO: 387352 - DNA, 92 bp, Homo sapiens
ccagaagactcagccctgtatctctgcgccagcagccaagacagcggaacactgaagctttctttggacaaggcaccagactcacagttgta

SEQ ID NO: 387353 - DNA, 99 bp, Homo sapiens
  misc_feature (96)..(97): n is a, c, g, or t
acatggggactcagctttgtatttctgtgccagcatcgtaggaatgtttcgggagacccagtacttcgggccaggcacgcggctcctggtgctcgnnga

SEQ ID NO: 387354 - DNA, 92 bp, Homo sapiens
  misc_feature (31)..(31): n is a, c, g, or t
  misc_feature (36)..(40): n is a, c, g, or t
  misc_feature (42)..(42): n is a, c, g, or t
  misc_feature (45)..(46): n is a, c, g, or t
  misc_feature (48)..(48): n is a, c, g, or t
gggcgactcggctgtgtatctctgtgccagnagctnnnnncncgnngngcctggaaacaccatatattttggagagggaagttggctcactg

SEQ ID NO: 387355 - DNA, 423 bp, Homo sapiens
agcctggaccagggcctccagttcctcattcagtattataatggagaagagagagcaaaaggaaacattcttgaacgattctccgcacaacagttccctgacttgcactctgaactaaacctgagctctctggagctgggggactcagctttgtatttctgtgccagcagccgaagcacagccctgcatgagcatcagccttctgtgcaataacattcctgccccactcaggaagtgacggtgaggggagggctgccagccagaggggctcaggccctggagagtggacaggcctttcccaggcactctctggtgcttctgtatgtgatctggtttactgctcactgaagctgtttcactcgaatagctccttgaccaactgtaacccagaatcataaagataaaggcattcttagaaatata

SEQ ID NO: 387356 - DNA, 105 bp, Homo sapiens
cctgcagaactggaggattctggagtttatttctgtgccagcagcttagggacatcagagacgcagtacttcgggccaggcacccggctcacagtgctcgaggac

SEQ ID NO: 387357 - DNA, 100 bp, Homo sapiens
gagcttcgtgactctgctgtgtatttctgtgccagcagccaagcagcgggagggctactacgagcagtacttcgggccgggcaccaggctcacggtcaca

SEQ ID NO: 387358 - DNA, 100 bp, Homo sapiens
cctgcagaactggaggattctggagtttatttctgtgccagcagcgaactatggctacaccttcggttcggggaccaggttaaccgttgtagaggacctg

SEQ ID NO: 387359 - DNA, 97 bp, Homo sapiens
gagcttcgtgactctgctgtgtatttctgtgccagcagccaagcagcgggggaacactgaagctttctttggacaaggcaccagactcacagttgta

SEQ ID NO: 387360 - DNA, 103 bp, Homo sapiens
gagcttcgtgactctgctgtgtatttctgtgccagcagccagagcaggttgcaatcagccccagcattttggtgatgggactcgactctccatcctagaggac

SEQ ID NO: 387361 - DNA, 101 bp, Homo sapiens
gagcttcgtgactctgctgtgtatttctgtgccagcagccagagcagaactatggctacaccttcggttcggggaccaggttaaccgttgtagaggacctg

SEQ ID NO: 387362 - DNA, 120 bp, Homo sapiens
  misc_feature (61)..(61): n is a, c, g, or t
gagctgggggactcggccctttatctttgcgccagcagctggcagcgcccggggagggggnacacttcacccctccactttgggaacgggaccaggctcactgtgacagaggacctgaac

SEQ ID NO: 387363 - DNA, 102 bp, Homo sapiens
accagctcccagacatctgtgtacttctgtgccatcagtgacgggacagtgggagctacaatgagcagttcttcgggccagggacacggctcaccgtgcata

SEQ ID NO: 387364 - DNA, 105 bp, Homo sapiens
  misc_feature (38)..(38): n is a, c, g, or t
gctgctccctcccagacatctgtgtacttctgtgccancagtgagggcgagcggcagggctactacgagcagtacttcgggccgggcaccaggctcacggtcaca

SEQ ID NO: 387365 - DNA, 97 bp, Homo sapiens
cctgcagaactggaggattctggagtttatttctgtgccagcagccacagatacgcagtattttggcccaggcacccggctgacagtgctcgaggac

SEQ ID NO: 387366 - DNA, 233 bp, Homo sapiens
agcctggaccagggcctccagttcctcattcagtattataatggagaagagagagcaaaaggaaacattcttgaacgattctccgcacaacagttccctgacttgcactctgaactaaacctgagctctctggagctgggggactcagctttgtatttctgtgccagcagccgaagcacagcccttctggggccaacgtcctgactttcggggccggcagcaggctgaccgtg

SEQ ID NO: 387367 - DNA, 116 bp, Homo sapiens
  misc_feature (7)..(7): n is a, c, g, or t
gctgctncctcccagacatctgtgtacttctgtgccagcagttaccgtacctctggggaaactggtagggctactacgagcagtacttcgggccgggcaccaggctcacggtcaca

SEQ ID NO: 387368 - DNA, 96 bp, Homo sapiens
gagcttcgtgactctgctgtgtatttctgtgccagcagccagagcaagggctactacgagcagtacttcgggccgggcaccaggctcacggtcaca

SEQ ID NO: 387369 - DNA, 98 bp, Homo sapiens
accagctcccagacatctgtgtacttctgtgccatcagtgacgggacagtgggaacactgaagctttctttggacaaggcaccagactcacagttgta

SEQ ID NO: 387370 - DNA, 95 bp, Homo sapiens
cccagggactcagctgtgtatttttgtgctagtctcggaagagggccaggaacactgaagctttctttggacaaggcaccagactcacagttgta

SEQ ID NO: 387371 - DNA, 95 bp, Homo sapiens
  misc_feature (37)..(37): n is a, c, g, or t
  misc_feature (39)..(39): n is a, c, g, or t
  misc_feature (41)..(42): n is a, c, g, or t
cagggggacttggctgtgtatctctgtgccagcagcncngnnacagcaggaacactgaagctttctttggacaaggcaccagactcacagttgta

SEQ ID NO: 387372 - DNA, 95 bp, Homo sapiens
gggggactcggccctttatctttgcgccagcagcgacaggactagattggtcggagagacccagtacttcggcgccgggacccggctctcagtgc

SEQ ID NO: 387373 - DNA, 127 bp, Homo sapiens
  misc_feature (53)..(53): n is a, c, g, or t
cgggactcagccatgtatcgctgtgccagcagcctatcagggtccggtctganttcacccctccactttgggaacgggaccaggctcactgtgacagaggacctgaacaaggtgttcccacccgagg

SEQ ID NO: 387374 - DNA, 522 bp, Homo sapiens
agttggcagttaacagtcgggagggtaaaacacaatcatggtgccataaaagagtgaaggagccggcattacacacagacagcccgcagaagggcagcaacgttttggagctccttttagttctctttattgatatattttaattgaacccagattttttttttcctgtctagcccttggagacaagctctgccagagctcgtatagcagagagaaggtcttgagattagtgatactcagcgtttctgacactggagacctgcataagaatttaacaaactgggaagcagttttcatgacaacccttttcattgcatagatgttaccaagagtttgggggtgtttttaagaaaagccattaggctggaagtcagacacacctggatttgagatccgctctgctacttcgtacttgcgtggttttgaggaatcatttggcctcttttcaggttttagatccttcacctgtaaaatgaggatggttgtgagaaagggaaattgctctgtaaacagtgaagcact

SEQ ID NO: 387375 - DNA, 387 bp, Homo sapiens
gagaacccccctcaagagaacttgaagaaggagcagaatgggaccagtgagttcattttagtgaaggctgatgcagcataacccccgggccttcctccagcagcctctccaggcctccttttctttctgaaaggtcttagggaggtaggattaaagctccagacagcgttgtaagaaaatatgtcatgtgccttgagaaaggtgattgtgaaaatgaacacttaggaagaggtgtcaccattaccgtctgagcctggccccaggaggtacacatccgcattctcacgactttgtgttttcatgagcacagcctgtgtcctgggtggatctgggagcatcaggagccagcccttccttcctctctctccctcctccctccctctgatt

SEQ ID NO: 387376 - DNA, 748 bp, Homo sapiens
tgtaaatgaatactgacaaaataatagtataacatcagagagatttttgtttgtttgttgagacggagtctcgctctgtcaccaggctggaacgcagtggcacaatctcagctcaccacaacctctgactccctggttcaagcaattctcctgcctcagcctcctgtgtagctggtattctactggtattagctgggtgtggaggcacgcgccaccacacccagctaatttttgtattttagtttcaccatgttggccaggattgtcttgatctcctgaccttgtgatcggcccacctcggcctcccaaagtactgagattacagacgtgagccaccacgcccagcctagagaggtttttttaaacaaaacgaatatgtaactgatatcttgtattttaaatttaagagggcatatgaaattgaatgcattctgtgagaggagagtcagagtattgataaatttggacttattaaaattcctggagtaatgacttaacctacaaactattaaagagaaaattggaatagtaatacatcaatccaacataaagaaaggagagaaaaaggaaacatgcaacaaaaagaaaacaaattaaaatgccaggagctaatgcctgtaatcccagcactttgggaggcagaggcgggaggatcgtttgaacccaggagttcaaggccagcctgggcaacatagggagaccctgtttttaaaaagtaataaataaggctccgaagcagggaatgggg

SEQ ID NO: 387377 - DNA, 548 bp, Homo sapiens
tgatgaatatttactttgatgaaataaatgacaaacagatgtcatttatttcaacaaagtaacatgtttgtcctttggacctcgtttctatatatactttcaccttaggtaatttcatcccatccagcagaatgaagttaccatctctatgatgatggttcccaaatttatgtttatcctgaaactattctttgaactccaaacacacatgtacaactgtttgtacaacatttcaactttgtcatctcacaagaatctcaaacatgactcgatttttttccccctcaaaaactatactactagttcttgttattctgcagtttattaaatggcactaccatccaaccaccgcaagccttgacatcatcatcctttgactgttctgttttatccctaccttcaagatctccctcattagtccaagccaccatcatcttttgtctggacaattgcattcttttctgaagagttctctcatttccgctcttactctcctatggttttcacagagcagccagattgatctcttaaaatcagatcacactacc

SEQ ID NO: 387378 - DNA, 397 bp, Homo sapiens
tccaaaaaaatgtgattcctcgtattggtaaaatgtgttgtcattccctgatgaaatagaaagctgtagtttctaggtaaatgtggaaaataattcttactaaagaaatgaatataaaaatatgcggactgtataacaatgttactttaatctatttagttatgtagaagagttctcaaaacaagagctttgaaatgcagatgtgctaataaatattttctctccttaagcaggaactcaatttgtaaaataattattcagaattcatggtagccaaaaatcccaaatttggtagtgctataatgtcttaaattttttaagtaaagtaggctttttagatcttttaaaaatctagaatatcatttaatttgttagtatggcaaaatacaggaactaa

SEQ ID NO: 387379 - DNA, 1933 bp, Homo sapiens
aacaaccccgaggtcttatttttatagaatatcaagaacaaaatcttccaaaaggcacacgatgccaaactaaaaataaagagcgaaaacccaaaaagtcgcgctcaattccttctgaaacctattcgcctcctacccctgtcccatcctctggcgctggcgggtcctcgtccccgttttccccaccgcaagtcctggaacctccgcttaactcttttctcggcggctccgccccggccccgccccagccatgccttggccccgccccgttcgccgtttattggcttctcccaacccctgccggtgggtgacaagccgggaagcttggaggggtctattgcgtacgcccaaggcgctgggcctggagcaggagaaagggagtggaggcgcgtcggagactatgaagcgcggcattcggcgggatcctttccggaagcggaagctcggcgggcgggccaagaaggtccgggagcccacggcggttaattctttttaccgtgaggcttcacttccctcggtctgggcttctctgaggcggcgagagatggtcaggtctggagctcgaccgggccaggtgagggctgaggacctgaggagtccgctgtggggatggagagggacaggggggttttcgggccaggaacttgtaaaactctgctcgaaaaaagacaaagacaatgcggcgacattaaagtgctgggacagaggtgcagggaacacctaatcttcccgtcgtaacacggccgctcggtctctagatgtttctgtttaaatcgtcgtagccctagtctagagcgccggctttggggtcaggcccgggttcgagtcccagccttcgccgctgcgtcgagtgacttaacctctcctagcttcagtcacctgcagattgagagtctactactttttactgctcagaacttcctattccttagctgcaaaataggcagaaataagcataaaatcctgtctcaaagaattgagaaggttaaataagagaacccggtaaaaacatcgatcacacagttgttgtagacatacaacaaaatttagttccctttaaaacacgtagtttgccaccatcttaatgataacagcagccaacatttagataggacttatgtggcagatgctactgtaagtgcttttatgtattacatagaataactcatttaatagtcacgatatccttatgaggtaagtactattatccctattttatatatgaggaaatcgagggctggaggattcaaataacttggcagttacacagctgtggaaacaagattcagactcacaaaactgatgccagagtccattcttcttttaaacattttacctagtagatgtatgactttgaacaaaccacttttctgaaatttaggttcccacctcacaaataataactcacagggtatggattaagtgaaaatgaaagaccttagcacactgtaagtcattctacaaaggcagtattatcttgtacttgttggtaggagatatgactactaagaaatgcttatatgattctcaaatagcaaaattaaaagtttaatgataataacctcgtagaagtaagtgtaaaataaagcaaactgattctcctgtattgtgattaggacactccttttggagagcagctttgcagtttgtatcaagggttattaaattgctaataacctttcaccaaataattttctttttaatcctaaatataaaaaggctgttttcagtagatagaaaggcttattccaggtttgttttttttaattgtgaaaaatatgaagcaaaccaagaccattattatattacttccactgaaggaaatattatacaaccattaaaaatttatgaatatgaaaaagatttaaaagtagaaaacacaggatttaaaattgcaaatatctaggtattatgactaagtaaaaaatgcata

SEQ ID NO: 387380 - DNA, 752 bp, Homo sapiens
aacaaccccgaggtcttatttttatagaatatcaagaacaaaatcttccaaaaggcacacgatgccaaactaaaaataaagagcgaaaacccaaaaagtcgcgctcaattccttctgaaacctattcgcctcctacccctgtcccatcctctggcgctggcgggtcctcgtccccgttttccccaccgcaagtcctggaacctccgcttaactcttttctcggcggctccgccccggccccgccccagccatgccttggccccgccccgttcgccgtttattggcttctcccaacccctgccggtgggtgacaagccgggaagcttggaggggtctattgcgtacgcccaaggcgctgggcctggagcaggagaaagggagtggaggcgcgtcggagactatgaagcgcggcattcggcgggatcctttccggaagcggaagctcggcgggcgggccaagaaggtccgggagcccacggcggttaattctttttaccgtgaggcttcacttccctcggtctgggcttctctgaggcggcgagagatggtcaggtctggagctcgaccgggccaggtgttatcttcaggaaggcacactggacctgctaaattaacaaatggaaagaaagctaagtacttgaagacgtttacaacttcagatttcaaggaatttttcaggtctttgggctggatgacatgtcgtctaccccagaaaattaggtaggcctctaccatcacaagctctgaggaac

SEQ ID NO: 387381 - DNA, 4091 bp, Homo sapiens
aacaaccccgaggtcttatttttatagaatatcaagaacaaaatcttccaaaaggcacacgatgccaaactaaaaataaagagcgaaaacccaaaaagtcgcgctcaattccttctgaaacctattcgcctcctacccctgtcccatcctctggcgctggcgggtcctcgtccccgttttccccaccgcaagtcctggaacctccgcttaactcttttctcggcggctccgccccggccccgccccagccatgccttggccccgccccgttcgccgtttattggcttctcccaacccctgccggtgggtgacaagccgggaagcttggaggggtctattgcgtacgcccaaggcgctgggcctggagcaggagaaagggagtggaggcgcgtcggagactatgaagcgcggcattcggcgggatcctttccggaagcggaagctcggcgggcgggccaagaaggtccgggagcccacggcggttaattctttttaccgtgaggcttcacttccctcggtctgggcttctctgaggcggcgagagatggtcaggtctggagctcgaccgggccaggacctatttaagaaaaataccacgttttaatgcagattctggctattccatccattctgattcagaaagtcaggctgaaactgtacacgggcttgatggttgtgcttctttgctgagggacattttgagaaatgaagattcaggttcagaaacagcatatttagaaaacagatctaattctagacctttagaaagcaaaagatacggatcaaaaaagaaaagacatgaaaaacatactattcctttggtagtccagaaagaaacatcatcttcagataataagaaacagatacctaatgaagcttctgctagaagtgaaagagacacatcagacctagagcaaaactggtcattgcaagatcattatagaatgtattcacccataatataccaagccctctgtgagcacgtgcagactcagatgtcactgatgaatgacttgacttcaaagaacatccctaatggaattcctgctgtaccatgccatgctccctctcattctgaatctcaggcaactcctcattctagttatggcttatgtacctccaccccagtctggtcacttcagcggccaccctgccctccaaaggttcattctgaagttcaaactgatggcaacagtcagtttgcatcacaagaggattcagaaattcagaggttgattacagaaatggaggcatgtatatctgtacttccaacagtaagtggaaacacagatattcaagttgagatagcactggccatgcaaccattaagaagtgagaatgctcagttacgaaggcagttgagaattttgaaccagcaactcagagaacaacagaaaactcaaaaaccatctggtgctgtggattgcaaccttgaattgttttctcttcagtcattgaatatgtcactgcaaaatcaattggaggagtcactaaagagccaggaattactgcagagtaaaaatgaagagctgttaaaagtgattgaaaatcagaaagatgaaaacaaaaaatttagtagtatatttaaagacaaagatcaaactatacttgaaaataaacagcaatatgatattgagataacaagaataaaaattgaattggaggaagccctagtcaatgtgaaaagctcccagtttaagttagaaactgctgaaaaggaaaaccagatattggggataacattacgtcagcgtgatgctgaggtgactcgactaagagaattaaccagaactttacagactagcatggcaaagcttctctccgatcttagtgtggacagtgctcgctgcaagcctgggaataaccttaccaaatcactcttgaacattcatgataaacaacttcaacatgacccagctcctgctcacacttccataatgagctatctaaataagttagaaacaaattacagttttacacattcagagccactttctacaattaaaaatgaggaaaccatagagccagacaaaacctatgaaaatgttctgtcctccagaggccctcaaaatagtaacactaggggcatggaggaagcatctgcacctggaattatttctgccctttcaaaacaggattctgatgaagggagtgaaactatggctttaatagaagatgagcataatttggataatacaatttacattccttttgctagaagcactcctgaaaagaaatcaccactttctaagagactatcccctcagccacaaataagagcagctacaacacagctagtcagcaacagtggacttgctgtctctggaaaagaaaataaactgtgtacacctgtaatctgttcctcttcaacaaaggaagcagaagatgcacctgaaaaactttccagagcatctgatatgaaggacacacagctcctcaagaaaataaaggaagcaattggtaagatccctgctgccaccaaggagccagaggaacaaactgcatgtcatggcccatcaggttgtcttagcaacagccttcaagtgaaaggcaatactgtctgtgatggtagtgttttcacttctgacttgatgtctgactggagcatctcttcgttttcaacgttcacttctcgtgatgaacaagacttcagaaatggccttgcggcattagatgccaacatagctagactccagaagtctttaaggactggtcttctggagaaatgaattcagaagaaaattcatcaggtgcttctttttaaaactagaacttggctatattgaatgtgtatttttctttagtgaaatgatgttttatgttattatgtgtgaagtaatatattgtacaagtaataaatgtattgttgagatatattgacactgaggagcttataaaaacaagtcatcttaagttcacaattgctacaagaagaaagttgtggataactaggaaattattgtaagtaatgttttatttcagtacttagcaattagagttcttttattaagatgtatctgctggattaagggtacaggttgaaatagttctgtggctgtcctaagaaataatgggaaaagaatctctggatgtaagtttttctgttgaaactagagggttttttttttctgtttacatatacttttttttaatagcaatgtgtttttattaaacatgctgtgtgccacaggccagtgttgttggtgaaatatataaacatttatttaaagagaaaagttaccagtatctacacctcttaaaaaacattgattggtctaaaaaatatatagataacatcctaagttaacatatggcttcttaaaacttgggcacttttatttgtttttatcccaaattcatgttttaaggcctttaaagaatagtcagactgataaagaagtgctaacagataagctatagttggggaaatttgtgggttttttttaaataagaaatgtttatttttgtccttatatttaaacatgatggaatttgtaaatcttggcattgattgtaattctgcctttttggaagaattttttctcccagcatgttagctgagaatattctctattttataaataatatgaagtaggttggtctctctgcttctctataccaggacttcttagctcagtatcatctcccttcatgtaagcagcacgttttaactcttaggaagctgaatgttgtgttatcactaatactttgtacaggtcacctgcctactctaattgtccttagtacttggacaggctttatcattaaagagtgttctcctaatcccagaacctcctcgtgttttttgtttttttggtggttttttttttttttttaggtgttagtgctacagcgtttgaaggagccagctgtagtctctttgatatgttcagattttccagatagagatttaagtctaaaaatttattaagtgaattctaaactatttcacacaagagtccattagcatctttaattttatttagtattcatgaattaatttattggcatcttatttggaggtaataggccacaactctttaacaaataagttcagaaataaaaaataataaaaaaggaaaaaaaaaatg

SEQ ID NO: 387382 - DNA, 4624 bp, Homo sapiens
aacaaccccgaggtcttatttttatagaatatcaagaacaaaatcttccaaaaggcacacgatgccaaactaaaaataaagagcgaaaacccaaaaagtcgcgctcaattccttctgaaacctattcgcctcctacccctgtcccatcctctggcgctggcgggtcctcgtccccgttttccccaccgcaagtcctggaacctccgcttaactcttttctcggcggctccgccccggccccgccccagccatgccttggccccgccccgttcgccgtttattggcttctcccaacccctgccggtgggtgacaagccgggaagcttggaggggtctattgcgtacgcccaaggcgctgggcctggagcaggagaaagggagtggaggcgcgtcggagactatgaagcgcggcattcggcgggatcctttccggaagcggaagctcggcgggcgggccaagaaggtccgggagcccacggcggttaattctttttaccgtgaggcttcacttccctcggtctgggcttctctgaggcggcgagagatggtcaggtctggagctcgaccgggccaggtgttatcttcaggaaggcacactggacctgctaaattaacaaatggaaagaaagcgacctatttaagaaaaataccacgttttaatgcagattctggctattccatccattctgattcagaaagtcaggctgaaactgtacacgggcttgatggttgtgcttctttgctgagggacattttgagaaatgaagattcaggttcagaaacagcatatttagaaaacagatctaattctagacctttagaaagcaaaagatacggatcaaaaaagaaaagacatgaaaaacatactattcctttggtagtccagaaagaaacatcatcttcagataataagaaacagatacctaatgaagcttctgctagaagtgaaagagacacatcagacctagagcaaaactggtcattgcaagatcattatagaatgtattcacccataatataccaagccctctgtgagcacgtgcagactcagatgtcactgatgaatgacttgacttcaaagaacatccctaatggaattcctgctgtaccatgccatgctccctctcattctgaatctcaggcaactcctcattctagttatggcttatgtacctccaccccagtctggtcacttcagcggccaccctgccctccaaaggttcattctgaagttcaaactgatggcaacagtcagtttgcatcacaaggtaaaacagtttctgcaacctgtactgatgttctacggaattcatttaataccagtcctggagttccatgtagcctgcccaaaactgacatatcagctattccaacattgcagcaactgggccttgttaatggaattctgccacaacaaggaattcataaggaaacagacctactaaaatgtattcaaacatatttgtctctttttcgatctcatggaaaagaaacgcatctggacagtcagacacaccgaagccctactcagtcacaaccagctttcttggccactaatgaagaaaaatgtgccagagagcaaattagagaggccacaagtgaaagaaaggatttaaacatacatgtgcgagatacaaaaacagtgaaggatgtacagaaggcaaaaaatgtgaacaagacagctgaaaaagttagaattataaaatatttgttgggagagctcaaggccctggtagcagaacaagaggattcagaaattcagaggttgattacagaaatggaggcatgtatatctgtacttccaacagtaagtggaaacacagatattcaagttgagatagcactggccatgcaaccattaagaagtgagaatgctcagttacgaaggcagttgagaattttgaaccagcaactcagagaacaacagaaaactcaaaaaccatctggtgctgtggattgcaaccttgaattgttttctcttcagtcattgaatatgtcactgcaaaatcaattggaggagtcactaaagagccaggaattactgcagagtaaaaatgaagagctgttaaaagtgattgaaaatcagaaagatgaaaacaaaaaatttagtagtatatttaaagacaaagatcaaactatacttgaaaataaacagcaatatgatattgagataacaagaataaaaattgaattggaggaagccctagtcaatgtgaaaagctcccagtttaagttagaaactgctgaaaaggaaaaccagatattggggataacattacgtcagcgtgatgctgaggtgactcgactaagagaattaaccagaactttacagactagcatggcaaagcttctctccgatcttagtgtggacagtgctcgctgcaagcctgggaataaccttaccaaatcactcttgaacattcatgataaacaacttcaacatgacccagctcctgctcacacttccataatgagctatctaaataagttagaaacaaattacagttttacacattcagagccactttctacaattaaaaatgaggaaaccatagagccagacaaaacctatgaaaatgttctgtcctccagaggccctcaaaatagtaacactaggggcatggaggaagcatctgcacctggaattatttctgccctttcaaaacaggattctgatgaagggagtgaaactatggctttaatagaagatgagcataatttggataatacaatttacattccttttgctagaagcactcctgaaaagaaatcaccactttctaagagactatcccctcagccacaaataagagcagctacaacacagctagtcagcaacagtggacttgctgtctctggaaaagaaaataaactgtgtacacctgtaatctgttcctcttcaacaaaggaagcagaagatgcacctgaaaaactttccagagcatctgatatgaaggacacacagctcctcaagaaaataaaggaagcaattggtaagatccctgctgccaccaaggagccagaggaacaaactgcatgtcatggcccatcaggttgtcttagcaacagccttcaagtgaaaggcaatactgtctgtgatggtagtgttttcacttctgacttgatgtctgactggagcatctcttcgttttcaacgttcacttctcgtgatgaacaagacttcagaaatggccttgcggcattagatgccaacatagctagactccagaagtctttaaggactggtcttctggagaaatgaattcagaagaaaattcatcaggtgcttctttttaaaactagaacttggctatattgaatgtgtatttttctttagtgaaatgatgttttatgttattatgtgtgaagtaatatattgtacaagtaataaatgtattgttgagatatattgacactgaggagcttataaaaacaagtcatcttaagttcacaattgctacaagaagaaagttgtggataactaggaaattattgtaagtaatgttttatttcagtacttagcaattagagttcttttattaagatgtatctgctggattaagggtacaggttgaaatagttctgtggctgtcctaagaaataatgggaaaagaatctctggatgtaagtttttctgttgaaactagagggttttttttttctgtttacatatacttttttttaatagcaatgtgtttttattaaacatgctgtgtgccacaggccagtgttgttggtgaaatatataaacatttatttaaagagaaaagttaccagtatctacacctcttaaaaaacattgattggtctaaaaaatatatagataacatcctaagttaacatatggcttcttaaaacttgggcacttttatttgtttttatcccaaattcatgttttaaggcctttaaagaatagtcagactgataaagaagtgctaacagataagctatagttggggaaatttgtgggttttttttaaataagaaatgtttatttttgtccttatatttaaacatgatggaatttgtaaatcttggcattgattgtaattctgcctttttggaagaattttttctcccagcatgttagctgagaatattctctattttataaataatatgaagtaggttggtctctctgcttctctataccaggacttcttagctcagtatcatctcccttcatgtaagcagcacgttttaactcttaggaagctgaatgttgtgttatcactaatactttgtacaggtcacctgcctactctaattgtccttagtacttggacaggctttatcattaaagagtgttctcctaatcccagaacctcctcgtgttttttgtttttttggtggttttttttttttttttaggtgttagtgctacagcgtttgaaggagccagctgtagtctctttgatatgttcagattttccagatagagatttaagtctaaaaatttattaagtgaattctaaactatttcacacaagagtccattagcatctttaattttatttagtattcatgaattaatttattggcatcttatttggaggtaataggccacaactctttaacaaataagttcagaaataaaaaataataaaaaaggaaaaaaaaaatg

SEQ ID NO: 387383 - DNA, 4354 bp, Homo sapiens
gttcatagactaatactaggttctgtaagagaaaacaatgaagtacagccctgcttagagaaacttgtggtttagtcagaaaggcaggaggatgaaagataagcaatataaggcagtgtgtcagtggcatatgatttctatagacaatatgtgctctagggtggtgaagagtagtcactagactggaatgattggattggaaaaggcttcatggaagaagaaaactcagatgagccttggtgagtgggtagaattggattggtaggaatggttcatgaacaatgttattggaaggtgagaaaagcttgttgggtaactaaattggcctgcctgaaatgaaaaattggagttgggagtgatggggcgatagttggaaaagtagcttgtggtcaagctttggaaactttaaatgccaggccaagattttgtttgtttggttggttttgttttgttttgtttttgaggacccaaagcatcagaattgtacaaactattctctttcctattgcattttcccttgagaacatgaactgacaaggaacaaggtgaaggagtttgactggactttagggataatataactcccttaaaagaagtgttaaaatgaaggagagattttacaaatgcatcttcagataataagaaacagatacctaatgaagcttctgctagaagtgaaagagacacatcagacctagagcaaaactggtcattgcaagatcattatagaatgtattcacccataatataccaagccctctgtgagcacgtgcagactcagatgtcactgatgaatgacttgacttcaaagaacatccctaatggaattcctgctgtaccatgccatgctccctctcattctgaatctcaggcaactcctcattctagttatggcttatgtacctccaccccagtctggtcacttcagcggccaccctgccctccaaaggttcattctgaagttcaaactgatggcaacagtcagtttgcatcacaaggtaaaacagtttctgcaacctgtactgatgttctacggaattcatttaataccagtcctggagttccatgtagcctgcccaaaactgacatatcagctattccaacattgcagcaactgggccttgttaatggaattctgccacaacaaggaattcataaggaaacagacctactaaaatgtattcaaacatatttgtctctttttcgatctcatggaaaagaaacgcatctggacagtcagacacaccgaagccctactcagtcacaaccagctttcttggccactaatgaagaaaaatgtgccagagagcaaattagagaggccacaagtgaaagaaaggatttaaacatacatgtgcgagatacaaaaacagtgaaggatgtacagaaggcaaaaaatgtgaacaagacagctgaaaaagttagaattataaaatatttgttgggagagctcaaggccctggtagcagaacaagaggattcagaaattcagaggttgattacagaaatggaggcatgtatatctgtacttccaacagtaagtggaaacacagatattcaagttgagatagcactggccatgcaaccattaagaagtgagaatgctcagttacgaaggcagttgagaattttgaaccagcaactcagagaacaacagaaaactcaaaaaccatctggtgctgtggattgcaaccttgaattgttttctcttcagtcattgaatatgtcactgcaaaatcaattggaggagtcactaaagagccaggaattactgcagagtaaaaatgaagagctgttaaaagtgattgaaaatcagaaagatgaaaacaaaaaatttagtagtatatttaaagacaaagatcaaactatacttgaaaataaacagcaatatgatattgagataacaagaataaaaattgaattggaggaagccctagtcaatgtgaaaagctcccagtttaagttagaaactgctgaaaaggaaaaccagatattggggataacattacgtcagcgtgatgctgaggtgactcgactaagagaattaaccagaactttacagactagcatggcaaagcttctctccgatcttagtgtggacagtgctcgctgcaagcctgggaataaccttaccaaatcactcttgaacattcatgataaacaacttcaacatgacccagctcctgctcacacttccataatgagctatctaaataagttagaaacaaattacagttttacacattcagagccactttctacaattaaaaatgaggaaaccatagagccagacaaaacctatgaaaatgttctgtcctccagaggccctcaaaatagtaacactaggggcatggaggaagcatctgcacctggaattatttctgccctttcaaaacaggattctgatgaagggagtgaaactatggctttaatagaagatgagcataatttggataatacaatttacattccttttgctagaagcactcctgaaaagaaatcaccactttctaagagactatcccctcagccacaaataagagcagctacaacacagctagtcagcaacagtggacttgctgtctctggaaaagaaaataaactgtgtacacctgtaatctgttcctcttcaacaaaggaagcagaagatgcacctgaaaaactttccagagcatctgatatgaaggacacacagctcctcaagaaaataaaggaagcaattggtaagatccctgctgccaccaaggagccagaggaacaaactgcatgtcatggcccatcaggttgtcttagcaacagccttcaagtgaaaggcaatactgtctgtgatggtagtgttttcacttctgacttgatgtctgactggagcatctcttcgttttcaacgttcacttctcgtgatgaacaagacttcagaaatggccttgcggcattagatgccaacatagctagactccagaagtctttaaggactggtcttctggagaaatgaattcagaagaaaattcatcaggtgcttctttttaaaactagaacttggctatattgaatgtgtatttttctttagtgaaatgatgttttatgttattatgtgtgaagtaatatattgtacaagtaataaatgtattgttgagatatattgacactgaggagcttataaaaacaagtcatcttaagttcacaattgctacaagaagaaagttgtggataactaggaaattattgtaagtaatgttttatttcagtacttagcaattagagttcttttattaagatgtatctgctggattaagggtacaggttgaaatagttctgtggctgtcctaagaaataatgggaaaagaatctctggatgtaagtttttctgttgaaactagagggttttttttttctgtttacatatacttttttttaatagcaatgtgtttttattaaacatgctgtgtgccacaggccagtgttgttggtgaaatatataaacatttatttaaagagaaaagttaccagtatctacacctcttaaaaaacattgattggtctaaaaaatatatagataacatcctaagttaacatatggcttcttaaaacttgggcacttttatttgtttttatcccaaattcatgttttaaggcctttaaagaatagtcagactgataaagaagtgctaacagataagctatagttggggaaatttgtgggttttttttaaataagaaatgtttatttttgtccttatatttaaacatgatggaatttgtaaatcttggcattgattgtaattctgcctttttggaagaattttttctcccagcatgttagctgagaatattctctattttataaataatatgaagtaggttggtctctctgcttctctataccaggacttcttagctcagtatcatctcccttcatgtaagcagcacgttttaactcttaggaagctgaatgttgtgttatcactaatactttgtacaggtcacctgcctactctaattgtccttagtacttggacaggctttatcattaaagagtgttctcctaatcccagaacctcctcgtgttttttgtttttttggtggttttttttttttttttaggtgttagtgctacagcgtttgaaggagccagctgtagtctctttgatatgttcagattttccagatagagatttaagtctaaaaatttattaagtgaattctaaactatttcacacaagagtccattagcatctttaattttatttagtattcatgaattaatttattggcatcttatttggaggtaataggccacaactctttaacaaataagttcagaaataaaaaataataaaaaaggaaaaaaaaaatg

SEQ ID NO: 387384 - DNA, 4431 bp, Homo sapiens
aacaaccccgaggtcttatttttatagaatatcaagaacaaaatcttccaaaaggcacacgatgccaaactaaaaataaagagcgaaaacccaaaaagtcgcgctcaattccttctgaaacctattcgcctcctacccctgtcccatcctctggcgctggcgggtcctcgtccccgttttccccaccgcaagtcctggaacctccgcttaactcttttctcggcggctccgccccggccccgccccagccatgccttggccccgccccgttcgccgtttattggcttctcccaacccctgccggtgggtgacaagccgggaagcttggaggggtctattgcgtacgcccaaggcgctgggcctggagcaggagaaagggagtggaggcgcgtcggagactatgaagcgcggcattcggcgggatcctttccggaagcggaagctcggcgggcgggccaagaaggtccgggagcccacggcggttaattctttttaccgtgaggcttcacttccctcggtctgggcttctctgaggcggcgagagatggtcaggtctggagctcgaccgggccaggtgttatcttcaggaaggcacactggacctgctaaattaacaaatggaaagaaagcgacctatttaagaaaaataccacgttttaatgcagattctggctattccatccattctgattcagaaagtcagcatcttcagataataagaaacagatacctaatgaagcttctgctagaagtgaaagagacacatcagacctagagcaaaactggtcattgcaagatcattatagaatgtattcacccataatataccaagccctctgtgagcacgtgcagactcagatgtcactgatgaatgacttgacttcaaagaacatccctaatggaattcctgctgtaccatgccatgctccctctcattctgaatctcaggcaactcctcattctagttatggcttatgtacctccaccccagtctggtcacttcagcggccaccctgccctccaaaggttcattctgaagttcaaactgatggcaacagtcagtttgcatcacaaggtaaaacagtttctgcaacctgtactgatgttctacggaattcatttaataccagtcctggagttccatgtagcctgcccaaaactgacatatcagctattccaacattgcagcaactgggccttgttaatggaattctgccacaacaaggaattcataaggaaacagacctactaaaatgtattcaaacatatttgtctctttttcgatctcatggaaaagaaacgcatctggacagtcagacacaccgaagccctactcagtcacaaccagctttcttggccactaatgaagaaaaatgtgccagagagcaaattagagaggccacaagtgaaagaaaggatttaaacatacatgtgcgagatacaaaaacagtgaaggatgtacagaaggcaaaaaatgtgaacaagacagctgaaaaagttagaattataaaatatttgttgggagagctcaaggccctggtagcagaacaagaggattcagaaattcagaggttgattacagaaatggaggcatgtatatctgtacttccaacagtaagtggaaacacagatattcaagttgagatagcactggccatgcaaccattaagaagtgagaatgctcagttacgaaggcagttgagaattttgaaccagcaactcagagaacaacagaaaactcaaaaaccatctggtgctgtggattgcaaccttgaattgttttctcttcagtcattgaatatgtcactgcaaaatcaattggaggagtcactaaagagccaggaattactgcagagtaaaaatgaagagctgttaaaagtgattgaaaatcagaaagatgaaaacaaaaaatttagtagtatatttaaagacaaagatcaaactatacttgaaaataaacagcaatatgatattgagataacaagaataaaaattgaattggaggaagccctagtcaatgtgaaaagctcccagtttaagttagaaactgctgaaaaggaaaaccagatattggggataacattacgtcagcgtgatgctgaggtgactcgactaagagaattaaccagaactttacagactagcatggcaaagcttctctccgatcttagtgtggacagtgctcgctgcaagcctgggaataaccttaccaaatcactcttgaacattcatgataaacaacttcaacatgacccagctcctgctcacacttccataatgagctatctaaataagttagaaacaaattacagttttacacattcagagccactttctacaattaaaaatgaggaaaccatagagccagacaaaacctatgaaaatgttctgtcctccagaggccctcaaaatagtaacactaggggcatggaggaagcatctgcacctggaattatttctgccctttcaaaacaggattctgatgaagggagtgaaactatggctttaatagaagatgagcataatttggataatacaatttacattccttttgctagaagcactcctgaaaagaaatcaccactttctaagagactatcccctcagccacaaataagagcagctacaacacagctagtcagcaacagtggacttgctgtctctggaaaagaaaataaactgtgtacacctgtaatctgttcctcttcaacaaaggaagcagaagatgcacctgaaaaactttccagagcatctgatatgaaggacacacagctcctcaagaaaataaaggaagcaattggtaagatccctgctgccaccaaggagccagaggaacaaactgcatgtcatggcccatcaggttgtcttagcaacagccttcaagtgaaaggcaatactgtctgtgatggtagtgttttcacttctgacttgatgtctgactggagcatctcttcgttttcaacgttcacttctcgtgatgaacaagacttcagaaatggccttgcggcattagatgccaacatagctagactccagaagtctttaaggactggtcttctggagaaatgaattcagaagaaaattcatcaggtgcttctttttaaaactagaacttggctatattgaatgtgtatttttctttagtgaaatgatgttttatgttattatgtgtgaagtaatatattgtacaagtaataaatgtattgttgagatatattgacactgaggagcttataaaaacaagtcatcttaagttcacaattgctacaagaagaaagttgtggataactaggaaattattgtaagtaatgttttatttcagtacttagcaattagagttcttttattaagatgtatctgctggattaagggtacaggttgaaatagttctgtggctgtcctaagaaataatgggaaaagaatctctggatgtaagtttttctgttgaaactagagggttttttttttctgtttacatatacttttttttaatagcaatgtgtttttattaaacatgctgtgtgccacaggccagtgttgttggtgaaatatataaacatttatttaaagagaaaagttaccagtatctacacctcttaaaaaacattgattggtctaaaaaatatatagataacatcctaagttaacatatggcttcttaaaacttgggcacttttatttgtttttatcccaaattcatgttttaaggcctttaaagaatagtcagactgataaagaagtgctaacagataagctatagttggggaaatttgtgggttttttttaaataagaaatgtttatttttgtccttatatttaaacatgatggaatttgtaaatcttggcattgattgtaattctgcctttttggaagaattttttctcccagcatgttagctgagaatattctctattttataaataatatgaagtaggttggtctctctgcttctctataccaggacttcttagctcagtatcatctcccttcatgtaagcagcacgttttaactcttaggaagctgaatgttgtgttatcactaatactttgtacaggtcacctgcctactctaattgtccttagtacttggacaggctttatcattaaagagtgttctcctaatcccagaacctcctcgtgttttttgtttttttggtggttttttttttttttttaggtgttagtgctacagcgtttgaaggagccagctgtagtctctttgatatgttcagattttccagatagagatttaagtctaaaaatttattaagtgaattctaaactatttcacacaagagtccattagcatctttaattttatttagtattcatgaattaatttattggcatcttatttggaggtaataggccacaactctttaacaaataagttcagaaataaaaaataataaaaaaggaaaaaaaaaatg

SEQ ID NO: 387385 - DNA, 4888 bp, Homo sapiens
aacaaccccgaggtcttatttttatagaatatcaagaacaaaatcttccaaaaggcacacgatgccaaactaaaaataaagagcgaaaacccaaaaagtcgcgctcaattccttctgaaacctattcgcctcctacccctgtcccatcctctggcgctggcgggtcctcgtccccgttttccccaccgcaagtcctggaacctccgcttaactcttttctcggcggctccgccccggccccgccccagccatgccttggccccgccccgttcgccgtttattggcttctcccaacccctgccggtgggtgacaagccgggaagcttggaggggtctattgcgtacgcccaaggcgctgggcctggagcaggagaaagggagtggaggcgcgtcggagactatgaagcgcggcattcggcgggatcctttccggaagcggaagctcggcgggcgggccaagaaggtccgggagcccacggcggttaattctttttaccgtgaggcttcacttccctcggtctgggcttctctgaggcggcgagagatggtcaggtctggagctcgaccgggccaggtgttatcttcaggaaggcacactggacctgctaaattaacaaatggaaagaaagcgacctatttaagaaaaataccacgttttaatgcagattctggctattccatccattctgattcagaaagtcaggtaagattgaatagatacaatacacactattttaattagttttcaaatagtagctaaaaagtaggaataaaatgcaaagtattaattgctctaaggaagtatgaagtctgttgctttaaaacatcttttctaccaataatagtttgtaaataaacaaattttaaaactacataatttatattttttcctacactaacagtcatatacaaatgtattctaaatgactttatttcttacagctgaaactgtacacgggcttgatggttgtgcttctttgctgagggacattttgagaaatgaagattcaggttttttttttttaattctttgctgatcaccttatctcaagtcattattttgatgtaacaaatttttgttttattaataggttcagaaacagcatatttagaaaacagatctaattctagacctttagaaagcaaaagatacggatcaaaaaagaaaagacatgaaaaacatactattcctttggtagtccagaaagaaacatcatcttcagataataagaaacagatacctaatgaagcttctgctagaagtgaaagagacacatcagacctagagcccctctgtgagcacgtgcagactcagatgtcactgatgaatgacttgacttcaaagaacatccctaatggaattcctgctgtaccatgccatgctccctctcattctgaatctcaggcaactcctcattctagttatggcttatgtacctccaccccagtctggtcacttcagcggccaccctgccctccaaaggttcattctgaagttcaaactgatggcaacagtcagtttgcatcacaaggtaaaacagtttctgcaacctgtactgatgttctacggaattcatttaataccagtcctggagttccatgtagcctgcccaaaactgacatatcagctattccaacattgcagcaactgggccttgttaatggaattctgccacaacaaggaattcataaggaaacagacctactaaaatgtattcaaacatatttgtctctttttcgatctcatggaaaagaaacgcatctggacagtcagacacaccgaagccctactcagtcacaaccagctttcttggccactaatgaagaaaaatgtgccagagagcaaattagagaggccacaagtgaaagaaaggatttaaacatacatgtgcgagatacaaaaacagtgaaggatgtacagaaggcaaaaaatgtgaacaagacagctgaaaaagttagaattataaaatatttgttgggagagctcaaggccctggtagcagaacaagaggattcagaaattcagaggttgattacagaaatggaggcatgtatatctgtacttccaacagtaagtggaaacacagatattcaagttgagatagcactggccatgcaaccattaagaagtgagaatgctcagttacgaaggcagttgagaattttgaaccagcaactcagagaacaacagaaaactcaaaaaccatctggtgctgtggattgcaaccttgaattgttttctcttcagtcattgaatatgtcactgcaaaatcaattggaggagtcactaaagagccaggaattactgcagagtaaaaatgaagagctgttaaaagtgattgaaaatcagaaagatgaaaacaaaaaatttagtagtatatttaaagacaaagatcaaactatacttgaaaataaacagcaatatgatattgagataacaagaataaaaattgaattggaggaagccctagtcaatgtgaaaagctcccagtttaagttagaaactgctgaaaaggaaaaccagatattggggataacattacgtcagcgtgatgctgaggtgactcgactaagagaattaaccagaactttacagactagcatggcaaagcttctctccgatcttagtgtggacagtgctcgctgcaagcctgggaataaccttaccaaatcactcttgaacattcatgataaacaacttcaacatgacccagctcctgctcacacttccataatgagctatctaaataagttagaaacaaattacagttttacacattcagagccactttctacaattaaaaatgaggaaaccatagagccagacaaaacctatgaaaatgttctgtcctccagaggccctcaaaatagtaacactaggggcatggaggaagcatctgcacctggaattatttctgccctttcaaaacaggattctgatgaagggagtgaaactatggctttaatagaagatgagcataatttggataatacaatttacattccttttgctagaagcactcctgaaaagaaatcaccactttctaagagactatcccctcagccacaaataagagcagctacaacacagctagtcagcaacagtggacttgctgtctctggaaaagaaaataaactgtgtacacctgtaatctgttcctcttcaacaaaggaagcagaagatgcacctgaaaaactttccagagcatctgatatgaaggacacacagctcctcaagaaaataaaggaagcaattggtaagatccctgctgccaccaaggagccagaggaacaaactgcatgtcatggcccatcaggttgtcttagcaacagccttcaagtgaaaggcaatactgtctgtgatggtagtgttttcacttctgacttgatgtctgactggagcatctcttcgttttcaacgttcacttctcgtgatgaacaagacttcagaaatggccttgcggcattagatgccaacatagctagactccagaagtctttaaggactggtcttctggagaaatgaattcagaagaaaattcatcaggtgcttctttttaaaactagaacttggctatattgaatgtgtatttttctttagtgaaatgatgttttatgttattatgtgtgaagtaatatattgtacaagtaataaatgtattgttgagatatattgacactgaggagcttataaaaacaagtcatcttaagttcacaattgctacaagaagaaagttgtggataactaggaaattattgtaagtaatgttttatttcagtacttagcaattagagttcttttattaagatgtatctgctggattaagggtacaggttgaaatagttctgtggctgtcctaagaaataatgggaaaagaatctctggatgtaagtttttctgttgaaactagagggttttttttttctgtttacatatacttttttttaatagcaatgtgtttttattaaacatgctgtgtgccacaggccagtgttgttggtgaaatatataaacatttatttaaagagaaaagttaccagtatctacacctcttaaaaaacattgattggtctaaaaaatatatagataacatcctaagttaacatatggcttcttaaaacttgggcacttttatttgtttttatcccaaattcatgttttaaggcctttaaagaatagtcagactgataaagaagtgctaacagataagctatagttggggaaatttgtgggttttttttaaataagaaatgtttatttttgtccttatatttaaacatgatggaatttgtaaatcttggcattgattgtaattctgcctttttggaagaattttttctcccagcatgttagctgagaatattctctattttataaataatatgaagtaggttggtctctctgcttctctataccaggacttcttagctcagtatcatctcccttcatgtaagcagcacgttttaactcttaggaagctgaatgttgtgttatcactaatactttgtacaggtcacctgcctactctaattgtccttagtacttggacaggctttatcattaaagagtgttctcctaatcccagaacctcctcgtgttttttgtttttttggtggttttttttttttttttaggtgttagtgctacagcgtttgaaggagccagctgtagtctctttgatatgttcagattttccagatagagatttaagtctaaaaatttattaagtgaattctaaactatttcacacaagagtccattagcatctttaattttatttagtattcatgaattaatttattggcatcttatttggaggtaataggccacaactctttaacaaataagttcagaaataaaaaataataaaaaaggaaaaaaaaaatg

SEQ ID NO: 387386 - DNA, 3570 bp, Homo sapiens
gtgactcgactaagagaattaaccagaactttacagactagcatggcaaagcttctctccgatcttagtgtggacagtgctcgctgcaagcctgggaataaccttaccaaatcactcttgaacattcatgataaacaacttcaacatgacccagctcctgctcacacttccataatgagctatctaaataagttagaaacaaattacagttttacacattcagagccactttctacaattaaaaatgaggaaaccatagagccagacaaaacctatgaaaatgttctgtcctccagaggccctcaaaatagtaacactaggggcatggaggaagcatctgcacctggaattctgccacaacaaggaattcataaggaaacagacctactaaaatgtattcaaacatatttgtctctttttcgatctcatggaaaagaaacgcatctggacagtcagacacaccgaagccctactcagtcacaaccagctttcttggccactaatgaagaaaaatgtgccagagagcaaattagagaggccacaagtgaaagaaaggatttaaacatacatgtgcgagatacaaaaacagtgaaggatgtacagaaggcaaaaaatgtgaacaagacagctgaaaaagttagaattataaaatatttgttgggagagctcaaggccctggtagcagaacaagaggattcagaaattcagaggttgattacagaaatggaggcatgtatatctgtacttccaacagtaagtggaaacacagatattcaagttgagatagcactggccatgcaaccattaagaagtgagaatgctcagttacgaaggcagttgagaattttgaaccagcaactcagagaacaacagaaaactcaaaaaccatctggtgctgtggattgcaaccttgaattgttttctcttcagtcattgaatatgtcactgcaaaatcaattggaggagtcactaaagagccaggaattactgcagagtaaaaatgaagagctgttaaaagtgattgaaaatcagaaagatgaaaacaaaaaatttagtagtatatttaaagacaaagatcaaactatacttgaaaataaacagcaatatgatattgagataacaagaataaaaattgaattggaggaagccctagtcaatgtgaaaagctcccagtttaagttagaaactgctgaaaaggaaaaccagatattggggataacattacgtcagcgtgatgctgaggtgactcgactaagagaattaaccagaactttacagactagcatggcaaagcttctctccgatcttagtgtggacagtgctcgctgcaagcctgggaataaccttaccaaatcactcttgaacattcatgataaacaacttcaacatgacccagctcctgctcacacttccataatgagctatctaaataagttagaaacaaattacagttttacacattcagagccactttctacaattaaaaatgaggaaaccatagagccagacaaaacctatgaaaatgttctgtcctccagaggccctcaaaatagtaacactaggggcatggaggaagcatctgcacctggaattatttctgccctttcaaaacaggattctgatgaagggagtgaaactatggctttaatagaagatgagcataatttggataatacaatttacattccttttgctagaagcactcctgaaaagaaatcaccactttctaagagactatcccctcagccacaaataagagcagctacaacacagctagtcagcaacagtggacttgctgtctctggaaaagaaaataaactgtgtacacctgtaatctgttcctcttcaacaaaggaagcagaagatgcacctgaaaaactttccagagcatctgatatgaaggacacacagctcctcaagaaaataaaggaagcaattggtaagatccctgctgccaccaaggagccagaggaacaaactgcatgtcatggcccatcaggttgtcttagcaacagccttcaagtgaaaggcaatactgtctgtgatggtagtgttttcacttctgacttgatgtctgactggagcatctcttcgttttcaacgttcacttctcgtgatgaacaagacttcagaaatggccttgcggcattagatgccaacatagctagactccagaagtctttaaggactggtcttctggagaaatgaattcagaagaaaattcatcaggtgcttctttttaaaactagaacttggctatattgaatgtgtatttttctttagtgaaatgatgttttatgttattatgtgtgaagtaatatattgtacaagtaataaatgtattgttgagatatattgacactgaggagcttataaaaacaagtcatcttaagttcacaattgctacaagaagaaagttgtggataactaggaaattattgtaagtaatgttttatttcagtacttagcaattagagttcttttattaagatgtatctgctggattaagggtacaggttgaaatagttctgtggctgtcctaagaaataatgggaaaagaatctctggatgtaagtttttctgttgaaactagagggttttttttttctgtttacatatacttttttttaatagcaatgtgtttttattaaacatgctgtgtgccacaggccagtgttgttggtgaaatatataaacatttatttaaagagaaaagttaccagtatctacacctcttaaaaaacattgattggtctaaaaaatatatagataacatcctaagttaacatatggcttcttaaaacttgggcacttttatttgtttttatcccaaattcatgttttaaggcctttaaagaatagtcagactgataaagaagtgctaacagataagctatagttggggaaatttgtgggttttttttaaataagaaatgtttatttttgtccttatatttaaacatgatggaatttgtaaatcttggcattgattgtaattctgcctttttggaagaattttttctcccagcatgttagctgagaatattctctattttataaataatatgaagtaggttggtctctctgcttctctataccaggacttcttagctcagtatcatctcccttcatgtaagcagcacgttttaactcttaggaagctgaatgttgtgttatcactaatactttgtacaggtcacctgcctactctaattgtccttagtacttggacaggctttatcattaaagagtgttctcctaatcccagaacctcctcgtgttttttgtttttttggtggttttttttttttttttaggtgttagtgctacagcgtttgaaggagccagctgtagtctctttgatatgttcagattttccagatagagatttaagtctaaaaatttattaagtgaattctaaactatttcacacaagagtccattagcatctttaattttatttagtattcatgaattaatttattggcatcttatttggaggtaataggccacaactctttaacaaataagttcagaaataaaaaataataaaaaaggaaaaaaaaaatg

SEQ ID NO: 387387 - DNA, 4315 bp, Homo sapiens
aacaaccccgaggtcttatttttatagaatatcaagaacaaaatcttccaaaaggcacacgatgccaaactaaaaataaagagcgaaaacccaaaaagtcgcgctcaattccttctgaaacctattcgcctcctacccctgtcccatcctctggcgctggcgggtcctcgtccccgttttccccaccgcaagtcctggaacctccgcttaactcttttctcggcggctccgccccggccccgccccagccatgccttggccccgccccgttcgccgtttattggcttctcccaacccctgccggtgggtgacaagccgggaagcttggaggggtctattgcgtacgcccaaggcgctgggcctggagcaggagaaagggagtggaggcgcgtcggagactatgaagcgcggcattcggcgggatcctttccggaagcggaagctcggcgggcgggccaagaaggtccgggagcccacggcggttaattctttttaccgtgaggcttcacttccctcggtctgggcttctctgaggcggcgagagatggtcaggtctggagctcgaccgggccaggtgttatcttcaggaaggcacactggacctgctaaattaacaaatggaaagaaagcgacctatttaagaaaaataccacgttttaatgcagattctggctattccatccattctgattcagaaagtcaggctgaaactgtacacgggcttgatggttgtgcttctttgctgagggacattttgagaaatgaagattcaggttcagaaacagcatatttagaaaacagatctaattctagacctttagaaagcaaaagatacggatcaaaaaagaaaagacatgaaaaacatactattcctttggtagtccagaaagaaacatcatcttcagataataagaaacagatacctaatgaagcttctgctagaagtgaaagagacacatcagacctagagcaaaactggtcattgcaagatcattatagaatgtattcacccataatataccaagccctctgtgagcacgtgcagactcagatgtcactgatgaatgacttgacttcaaagaacatccctaatggaattcctgctgtaccatgccatgctccctctcattctgaatctcaggcaactcctcattctagttatggcttatgtacctccaccccagtctggtcacttcagcggccaccctgccctccaaaggttcattctgaagttcaaactgatggcaacagtcagtttgcatcacaaggtaaaacagtttctgcaacctgtactgatgttctacggaattcatttaataccagtcctggagttccatgtagcctgcccaaaactgacatatcagctattccaacattgcagcaactgggccttgttaatggaattctgccacaacaaggaattcataaggaaacagacctactaaaatgtattcaaacatatttgtctctttttcgatctcatggaaaagaaacgcatctggacagtcagacacaccgaagccctactcagtcacaaccagctttcttggccactaatgaagaaaaatgtgccagagagcaaattagagaggccacaagtgaaagaaaggatttaaacatacatgtgcgagatacaaaaacagtgaaggatgtacagaaggcaaaaaatgtgaacaagacagctgaaaaagttagaattataaaatatttgttgggagagctcaaggccctggtagcagaacaagaggattcagaaattcagaggttgattacagaaatggaggcatgtatatctgtacttccaacagtaagtggaaacacagatattcaagttgagatagcactggccatgcaaccattaagaagtgagaatgctcagttacgaaggcagttgagaattttgaaccagcaactcagagaacaacagaaaactcaaaaaccatctggtgctgtggattgcaaccttgaattgttttctcttcagtcattgaatatgtcactgcaaaatcaattggaggagtcactaaagagccaggaattactgcagagtaaaaatgaagagctgttaaaagtgattgaaaatcagaaagatgaaaacaaaaaatttagtagtatatttaaagacaaagatcaaactatacttgaaaataaacagcaatatgatattgagataacaagaataaaaattgaattggaggaagccctagtcaatgtgaaaagctcccagtttaagttagaaactgctgaaaaggaaaaccagatattggggataacattacgtcagcgtgatgctgaggtgactcgactaagagaattaaccagaactttacagactagcatggcaaagcttctctccgatcttagtgtggacagtgctcgctgcaagcctgggaataaccttaccaaatcactcttgaacattcatgataaacaacttcaacatgacccagctcctgctcacacttccataatgagctatctaaataagttagaaacaaattacagttttacacattcagagccactttctacaattaaaaatgaggaaaccatagagccagacaaaacctatgaaaatgttctgtcctccagaggccctcaaaatagtaacactaggggcatggaggaagcatctgcacctggaattatttctgccctttcaaaacaggattctgatgaagggagtgaaactatggctttaatagaagatgagcataatttggataatacaatttacattccttttgctagaagcactcctgaaaagaaatcaccactttctaagagactatcccctcagccacaaataagagcagctacaacacagctagtcagcaacagtggacttgctgtctctggaaaagaaaataaactgtgtacacctgtaatctgttcctcttcaacaaaggaagcagaagatgcacctgaaaaactttccagagcatctgatatgaaggacacacagctcctcaagaaaataaaggaagcaattggtaagatccctgctgccaccaaggagccagaggaacaaactgcatgtcatggcccatcaggttgtcttagcaacagccttcaagtgaaaggcaatactgtctgtgatggtagtgttttcacttctgacttgatgtctgactggagcatctcttcgttttcaacgttcacttctcgtgatgaacaagacttcagaaatggccttgcggcattagatgccaacatagctagactccagaagtctttaaggactggtcttctggagaaatgaattcagaagaaaattcatcaggtgcttctttttaaaactagaacttggctatattgaatgtgtatttttctttagtgaaatgatgttttatgttattatgtgtgaagtaatatattgtacaagtaataaatgtattgttgagatatattgacactgaggagcttataaaaacaagtcatcttaagttcacaattgctacaagaagaaagttgtggataactaggaaattattgtaagtaatgttttatttcagtacttagcaattagagttcttttattaagatgtatctgctggattaagggtacaggttgaaatagttctgtggctgtcctaagaaataatgggaaaagaatctctggatgtaagtttttctgttgaaactagagggttttttttttctgtttacatatacttttttttaatagcaatgtgtttttattaaacatgctgtgtgccacaggccagtgttgttggtgaaatatataaacatttatttaaagagaaaagttaccagtatctacacctcttaaaaaacattgattggtctaaaaaatatatagataacatcctaagttaacatatggcttcttaaaacttgggcacttttatttgtttttatcccaaattcatgttttaaggcctttaaagaatagtcagactgataaagaagtgctaacagataagctatagttggggaaatttgtgggttttttttaaataagaaatgtttatttttgtccttatatttaaacatgatggaatttgtaaatcttggcattgattgtaattctgcctttttggaagaattttttctcccagcatgttagctgagaatattctctattttataaataatatgaagtaggttggtctctctgcttctctataccaggacttcttagctcagtatcatctcccttcatgtaagcagcacgttttaactcttaggaagctgaatgttgtgttatcactaatactttgtacaggtcacctgcctactctaattgtccttagtacttggacaggctttatcattaaagagtgttctccta

SEQ ID NO: 387388 - DNA, 4573 bp, Homo sapiens
aacaaccccgaggtcttatttttatagaatatcaagaacaaaatcttccaaaaggcacacgatgccaaactaaaaataaagagcgaaaacccaaaaagtcgcgctcaattccttctgaaacctattcgcctcctacccctgtcccatcctctggcgctggcgggtcctcgtccccgttttccccaccgcaagtcctggaacctccgcttaactcttttctcggcggctccgccccggccccgccccagccatgccttggccccgccccgttcgccgtttattggcttctcccaacccctgccggtgggtgacaagccgggaagcttggaggggtctattgcgtacgcccaaggcgctgggcctggagcaggagaaagggagtggaggcgcgtcggagactatgaagcgcggcattcggcgggatcctttccggaagcggaagctcggcgggcgggccaagaaggtccgggagcccacggcggttaattctttttaccgtgaggcttcacttccctcggtctgggcttctctgaggcggcgagagatggtcaggtctggagctcgaccgggccaggtgttatcttcaggaaggcacactggacctgctaaattaacaaatggaaagaaagcgacctatttaagaaaaataccacgttttaatgcagattctggctattccatccattctgattcagaaagtcaggctgaaactgtacacgggcttgatggttgtgcttctttgctgagggacattttgagaaatgaagattcaggttcagaaacagcatatttagaaaacagatctaattctagacctttagaaagcaaaagatacggatcaaaaaagaaaagacatgaaaaacatactattcctttggtagtccagaaagaaacatcatcttcagataataagaaacagatacctaatgaagcttctgctagaagtgaaagagacacatcagacctagagcaaaactggtcattgcaagatcattatagaatgtattcacccataatataccaagccctctgtgagcacgtgcagactcagatgtcactgatgaatgacttgacttcaaagaacatccctaatggaattcctgctgtaccatgccatgctccctctcattctgaatctcaggcaactcctcattctagttatggcttatgtacctccaccccagtctggtcacttcagcggccaccctgccctccaaaggttcattctgaagttcaaactgatggcaacagtcagtttgcatcacaaggtaaaacagtttctgcaacctgtactgatgttctacggaattcatttaataccagtcctggagttccatgtagcctgcccaaaactgacatatcagctattccaacattgcagcaactgggccttgttaatggaattctgccacaacaaggaattcataaggaaacagacctactaaaatgtattcaaacatatttgtctctttttcgatctcatggaaaagaaacgcatctggacagtcagacacaccgaagccctactcagtcacaaccagctttcttggccactaatgaagaaaaatgtgccagagagcaaattagagaggccacaagtgaaagaaaggatttaaacatacatgtgcgagatacaaaaacagtgaaggatgtacagaaggcaaaaaatgtgaacaagacagctgaaaaagttagaattataaaatatttgttgggagagctcaaggccctggtagcagaacaagaggattcagaaattcagaggttgattacagaaatggaggcatgtatatctgtacttccaacagtaagtggaaacacagatattcaagttgagatagcactggccatgcaaccattaagaagtgagaatgctcagttacgaaggcagttgagaattttgaaccagcaactcagagaacaacagaaaactcaaaaaccatctggtgctgtggattgcaaccttgaattgttttctcttcagtcattgaatatgtcactgcaaaatcaattggaggagtcactaaagagccaggaattactgcagagtaaaaatgaagagctgttaaaagtgattgaaaatcagaaagatgaaaacaaaaaatttagtagtatatttaaagacaaagatcaaactatacttgaaaataaacagcaatatgatattgagataacaagaataaaaattgaattggaggaagccctagtcaatgtgaaaagctcccagtttaagttagaaactgctgaaaaggaaaaccagatattggggataacattacgtcagcgtgatgctgaggtgactcgactaagagaattaaccagaactttacagactagcatggcaaagcttctctccgatcttagtgtggacagtgctcgctgcaagcctgggaataaccttaccaaatcactcttgaacattcatgataaacaacttcaacatgacccagctcctgctcacacttccataatgagctatctaaataagttagaaacaaattacagttttacacattcagagccactttctacaattaaaaatgaggaaaccatagagccagacaaaacctatgaaaatgttctgtcctccagaggccctcaaaatagtaacactaggggcatggaggaagcatctgcacctggaattatttctgccctttcaaaacaggattctgatgaagggagtgaaactatggctttaatagaagatgagcataatttggataatacaatttacattccttttgctagaagcactcctgaaaagaaatcaccactttctaagagactatcccctcagccacaaataagagcagctacaacacagctagtcagcaacagtggacttgctgtctctggaaaagaaaataaactgtgtacacctgtaatctgttcctcttcaacaaaggaagcagaagatgcacctgaaaaagaagcaattggtaagatccctgctgccaccaaggagccagaggaacaaactgcatgtcatggcccatcaggttgtcttagcaacagccttcaagtgaaaggcaatactgtctgtgatggtagtgttttcacttctgacttgatgtctgactggagcatctcttcgttttcaacgttcacttctcgtgatgaacaagacttcagaaatggccttgcggcattagatgccaacatagctagactccagaagtctttaaggactggtcttctggagaaatgaattcagaagaaaattcatcaggtgcttctttttaaaactagaacttggctatattgaatgtgtatttttctttagtgaaatgatgttttatgttattatgtgtgaagtaatatattgtacaagtaataaatgtattgttgagatatattgacactgaggagcttataaaaacaagtcatcttaagttcacaattgctacaagaagaaagttgtggataactaggaaattattgtaagtaatgttttatttcagtacttagcaattagagttcttttattaagatgtatctgctggattaagggtacaggttgaaatagttctgtggctgtcctaagaaataatgggaaaagaatctctggatgtaagtttttctgttgaaactagagggttttttttttctgtttacatatacttttttttaatagcaatgtgtttttattaaacatgctgtgtgccacaggccagtgttgttggtgaaatatataaacatttatttaaagagaaaagttaccagtatctacacctcttaaaaaacattgattggtctaaaaaatatatagataacatcctaagttaacatatggcttcttaaaacttgggcacttttatttgtttttatcccaaattcatgttttaaggcctttaaagaatagtcagactgataaagaagtgctaacagataagctatagttggggaaatttgtgggttttttttaaataagaaatgtttatttttgtccttatatttaaacatgatggaatttgtaaatcttggcattgattgtaattctgcctttttggaagaattttttctcccagcatgttagctgagaatattctctattttataaataatatgaagtaggttggtctctctgcttctctataccaggacttcttagctcagtatcatctcccttcatgtaagcagcacgttttaactcttaggaagctgaatgttgtgttatcactaatactttgtacaggtcacctgcctactctaattgtccttagtacttggacaggctttatcattaaagagtgttctcctaatcccagaacctcctcgtgttttttgtttttttggtggttttttttttttttttaggtgttagtgctacagcgtttgaaggagccagctgtagtctctttgatatgttcagattttccagatagagatttaagtctaaaaatttattaagtgaattctaaactatttcacacaagagtccattagcatctttaattttatttagtattcatgaattaatttattggcatcttatttggaggtaataggccacaactctttaacaaataagttcagaaataaaaaataataaaaaaggaaaaaaaaaatg

SEQ ID NO: 387389 - DNA, 2858 bp, Homo sapiens
aacaaccccgaggtcttatttttatagaatatcaagaacaaaatcttccaaaaggcacacgatgccaaactaaaaataaagagcgaaaacccaaaaagtcgcgctcaattccttctgaaacctattcgcctcctacccctgtcccatcctctggcgctggcgggtcctcgtccccgttttccccaccgcaagtcctggaacctccgcttaactcttttctcggcggctccgccccggccccgccccagccatgccttggccccgccccgttcgccgtttattggcttctcccaacccctgccggtgggtgacaagccgggaagcttggaggggtctattgcgtacgcccaaggcgctgggcctggagcaggagaaagggagtggaggcgcgtcggagactatgaagcgcggcattcggcgggatcctttccggaagcggaagctcggcgggcgggccaagaaggtccgggagcccacggcggttaattctttttaccgtgaggcttcacttccctcggtctgggcttctctgaggcggcgagagatggtcaggtctggagctcgaccgggccaggtgttatcttcaggaaggcacactggacctgctaaattaacaaatggaaagaaagcgacctatttaagaaaaataccacgttttaatgcagattctggctattccatccattctgattcagaaagtcaggctgaaactgtacacgggcttgatggttgtgcttctttgctgagggacattttgagaaatgaagattcaggttcagaaacagcatatttagaaaacagatctaattctagacctttagaaagcaaaagatacggatcaaaaaagaaaagacatgaaaaacatactattcctttggtagtccagaaagaaacatcatcttcagataataagaaacagatacctaatgaagcttctgctagaagtgaaagagacacatcagacctagagcaaaactggtcattgcaagatcattatagaatgtattcacccataatataccaagccctctgtgagcacgtgcagactcagatgtcactgatgaatgacttgacttcaaagaacatccctaatggaattcctgctgtaccatgccatgctccctctcattctgaatctcaggcaactcctcattctagttatggcttatgtacctccaccccagtctggtcacttcagcggccaccctgccctccaaaggttcattctgaagttcaaactgatggcaacagtcagtttgcatcacaaggtaaaacagtttctgcaacctgtactgatgttctacggaattcatttaataccagtcctggagttccatgtagcctgcccaaaactgacatatcagctattccaacattgcagcaactgggccttgttaatggaattctgccacaacaaggaattcataaggaaacagacctactaaaatgtattcaaacatatttgtctctttttcgatctcatggaaaagaaacgcatctggacagtcagacacaccgaagccctactcagtcacaaccagctttcttggccactaatgaagaaaaatgtgccagagagcaaattagagaggccacaagtgaaagaaaggatttaaacatacatgtgcgagatacaaaaacagtgaaggatgtacagaaggcaaaaaatgtgaacaagacagctgaaaaagttagaattataaaatatttgttgggagagctcaaggccctggtagcagaacaagaggattcagaaattcagaggttgattacagaaatggaggcatgtatatctgtacttccaacagtaagtggaaacacagatattcaagttgagatagcactggccatgcaaccattaagaagtgagaatgctcagttacgaaggcagttgagaattttgaaccagcaactcagagaacaacagaaaactcaaaaaccatctggtgctgtggattgcaaccttgaattgttttctcttcagtcattgaatatgtcactgcaaaatcaattggaggagtcactaaagagccaggaattactgcagagtaaaaatgaagagctgttaaaagtgattgaaaatcagaaagatgaaaacaaaaaatttagtagtatatttaaagacaaagatcaaactatacttgaaaataaacagcaatatgatattgagataacaagaataaaaattgaattggaggaagccctagtcaatgtgaaaagctcccagtttaagttagaaactgctgaaaaggaaaaccagatattggggataacattacgtcagcgtgatgctgaggtgactcgactaagagaattaaccagaactttacagactagcatggcaaagcttctctccgatcttagtgtggacagtgctcgctgcaagcctgggaataaccttaccaaatcactcttgaacattcatgataaacaacttcaacatgacccagctcctgctcacacttccataatgagctatctaaataagttagaaacaaattacagttttacacattcagagccactttctacaattaaaaatgaggaaaccatagagccagacaaaacctatgaaaatgttctgtcctccagaggccctcaaaatagtaacactaggggcatggaggaagcatctgcacctggaattatttctgccctttcaaaacaggattctgatgaagggagtgaaactatggctttaatagaagatgagcataatttggataatacaatttacattccttttgctagaagcactcctgaaaagaaatcaccactttctaagagactatcccctcagcaccactggctaaggatggcgacaccacaccacggttgctgaagtactctacgtctga

SEQ ID NO: 387390 - DNA, 2213 bp, Homo sapiens
aacaaccccgaggtcttatttttatagaatatcaagaacaaaatcttccaaaaggcacacgatgccaaactaaaaataaagagcgaaaacccaaaaagtcgcgctcaattccttctgaaacctattcgcctcctacccctgtcccatcctctggcgctggcgggtcctcgtccccgttttccccaccgcaagtcctggaacctccgcttaactcttttctcggcggctccgccccggccccgccccagccatgccttggccccgccccgttcgccgtttattggcttctcccaacccctgccggtgggtgacaagccgggaagcttggaggggtctattgcgtacgcccaaggcgctgggcctggagcaggagaaagggagtggaggcgcgtcggagactatgaagcgcggcattcggcgggatcctttccggaagcggaagctcggcgggcgggccaagaaggtccgggagcccacggcggttaattctttttaccgtgaggcttcacttccctcggtctgggcttctctgaggcggcgagagatggtcaggtctggagctcgaccgggccaggtgttatcttcaggaaggcacactggacctgctaaattaacaaatggaaagaaagcgacctatttaagaaaaataccacgttttaatgcagattctggctattccatccattctgattcagaaagtcaggctgaaactgtacacgggcttgatggttgtgcttctttgctgagggacattttgagaaatgaagattcaggttcagaaacagcatatttagaaaacagatctaattctagacctttagaaagcaaaagatacggatcaaaaaagaaaagacatgaaaaacatactattcctttggtagtccagaaagaaacatcatcttcagataataagaaacagatacctaatgaagcttctgctagaagtgaaagagacacatcagacctagagcaaaactggtcattgcaagatcattatagaatgtattcacccataatataccaagccctctgtgagcacgtgcagactcagatgtcactgatgaatgacttgacttcaaagaacatccctaatggaattcctgctgtaccatgccatgctccctctcattctgaatctcaggcaactcctcattctagttatggcttatgtacctccaccccagtctggtcacttcagcggccaccctgccctccaaaggttcattctgaagttcaaactgatggcaacagtcagtttgcatcacaaggtaaaacagtttctgcaacctgtactgatgttctacggaattcatttaataccagtcctggagttccatgtagcctgcccaaaactgacatatcagctattccaacattgcagcaactgggccttgttaatggaattctgccacaacaaggaattcataaggaaacagacctactaaaatgtattcaaacatatttgtctctttttcgatctcatggaaaagaaacgcatctggacagtcagacacaccgaagccctactcagtcacaaccagctttcttggccactaatgaagaaaaatgtgccagagagcaaattagagaggccacaagtgaaagaaaggatttaaacatacatgtgcgagatacaaaaacagtgaaggatgtacagaaggcaaaaaatgtgaacaagacagctgaaaaagttagaattataaaatatttgttgggagagctcaaggccctggtagcagaacaagaggattcagaaattcagaggttgattacagaaatggaggcatgtatatctgtacttccaacagtaagtggaaacacagatattcaagttgagatagcactggccatgcaaccattaagaagtgagaatgctcagttacgaaggcagttgagaattttgaaccagcaactcagagaacaacagaaaactcaaaaaccatctggtgctgtggattgcaaccttgaattgttttctcttcagtcattgaatatgtcactgcaaaatcaattggaggagtcactaaagagccaggaattactgcagagtaaaaatgaagagctgttaaaagtgattgaaaatcagaaagatgaaaacaaaaaatttagtagtatatttaaagacaaagatcaaactatacttgaaaataaacagcaatatgatattgagataacaagaataaaaattggtacgtatttagacagtagttatg

SEQ ID NO: 387391 - DNA, 2122 bp, Homo sapiens
aacaaccccgaggtcttatttttatagaatatcaagaacaaaatcttccaaaaggcacacgatgccaaactaaaaataaagagcgaaaacccaaaaagtcgcgctcaattccttctgaaacctattcgcctcctacccctgtcccatcctctggcgctggcgggtcctcgtccccgttttccccaccgcaagtcctggaacctccgcttaactcttttctcggcggctccgccccggccccgccccagccatgccttggccccgccccgttcgccgtttattggcttctcccaacccctgccggtgggtgacaagccgggaagcttggaggggtctattgcgtacgcccaaggcgctgggcctggagcaggagaaagggagtggaggcgcgtcggagactatgaagcgcggcattcggcgggatcctttccggaagcggaagctcggcgggcgggccaagaaggtccgggagcccacggcggttaattctttttaccgtgaggcttcacttccctcggtctgggcttctctgaggcggcgagagatggtcaggtctggagctcgaccgggccaggtgttatcttcaggaaggcacactggacctgctaaattaacaaatggaaagaaagcgacctatttaagaaaaataccacgttttaatgcagattctggctattccatccattctgattcagaaagtcaggctgaaactgtacacgggcttgatggttgtgcttctttgctgagggacattttgagaaatgaagattcaggttcagaaacagcatatttagaaaacagatctaattctagacctttagaaagcaaaagatacggatcaaaaaagaaaagacatgaaaaacatactattcctttggtagtccagaaagaaacatcatcttcagataataagaaacagatacctaatgaagcttctgctagaagtgaaagagacacatcagacctagagcaaaactggtcattgcaagatcattatagaatgtattcacccataatataccaagccctctgtgagcacgtgcagactcagatgtcactgatgaatgacttgacttcaaagaacatccctaatggaattcctgctgtaccatgccatgctccctctcattctgaatctcaggcaactcctcattctagttatggcttatgtacctccaccccagtctggtcacttcagcggccaccctgccctccaaaggttcattctgaagttcaaactgatggcaacagtcagtttgcatcacaaggtaaaacagtttctgcaacctgtactgatgttctacggaattcatttaataccagtcctggagttccatgtagcctgcccaaaactgacatatcagctattccaacattgcagcaactgggccttgttaatggaattctgccacaacaaggaattcataaggaaacagacctactaaaatgtattcaaacatatttgtctctttttcgatctcatggaaaagaaacgcatctggacagtcagacacaccgaagccctactcagtcacaaccagctttcttggccactaatgaagaaaaatgtgccagagagcaaattagagaggccacaagtgaaagaaaggatttaaacatacatgtgcgagatacaaaaacagtgaaggatgtacagaaggcaaaaaatgtgaacaagacagctgaaaaagttagaattataaaatatttgttgggagagctcaaggccctggtagcagaacaagaggattcagaaattcagaggttgattacagaaatggaggcatgtatatctgtacttccaacagtaagtggaaacacagatattcaagttgagatagcactggccatgcaaccattaagaagtgagaatgctcagttacgaaggcagttgagaattttgaaccagcaactcagagaacaacagaaaactcaaaaaccatctggtgctgtggattgcaaccttgaatgtaggtaaaagaactttaaggattgataaattatttgtggctctggaaatgttgataaagaattgagcttttgtaattactttgaggggataaatttaaaatattgtagaaacataagaaaataaaagatgctgtcacttcccaataatata

SEQ ID NO: 387392 - DNA, 1099 bp, Homo sapiens
aacaaccccgaggtcttatttttatagaatatcaagaacaaaatcttccaaaaggcacacgatgccaaactaaaaataaagagcgaaaacccaaaaagtcgcgctcaattccttctgaaacctattcgcctcctacccctgtcccatcctctggcgctggcgggtcctcgtccccgttttccccaccgcaagtcctggaacctccgcttaactcttttctcggcggctccgccccggccccgccccagccatgccttggccccgccccgttcgccgtttattggcttctcccaacccctgccggtgggtgacaagccgggaagcttggaggggtctattgcgtacgcccaaggcgctgggcctggagcaggagaaagggagtggaggcgcgtcggagactatgaagcgcggcattcggcgggatcctttccggaagcggaagctcggcgggcgggccaagaaggtccgggagcccacggcggttaattctttttaccgtgaggcttcacttccctcggtctgggcttctctgaggcggcgagagatggtcaggtctggagctcgaccgggccaggtgttatcttcaggaaggcacactggacctgctaaattaacaaatggaaagaaagcgacctatttaagaaaaataccacgttttaatgcagattctggctattccatccattctgattcagaaagtcaggctgaaactgtacacgggcttgatggttgtgcttctttgctgagggacattttgagaaatgaagattcaggttcagaaacagcatatttagaaaacagatctaattctagacctttagaaagcaaaagatacggatcaaaaaagaaaagacatgaaaaacatactattcctttggtagtccagaaagaaacatgtaagccttttttctcttagttatttaaagataatccttaattgtgggtattttgatcaattgtcaggattatacagttgattttcattttaataatcagtattagttaggtttatgtgtgcttatgcctttctgtattcagcttctaatcactgagtagtccactttgcttgctatcattttctcaagaagaaaaatagaaa

SEQ ID NO: 387393 - DNA, 887 bp, Homo sapiens
aacaaccccgaggtcttatttttatagaatatcaagaacaaaatcttccaaaaggcacacgatgccaaactaaaaataaagagcgaaaacccaaaaagtcgcgctcaattccttctgaaacctattcgcctcctacccctgtcccatcctctggcgctggcgggtcctcgtccccgttttccccaccgcaagtcctggaacctccgcttaactcttttctcggcggctccgccccggccccgccccagccatgccttggccccgccccgttcgccgtttattggcttctcccaacccctgccggtgggtgacaagccgggaagcttggaggggtctattgcgtacgcccaaggcgctgggcctggagcaggagaaagggagtggaggcgcgtcggagactatgaagcgcggcattcggcgggatcctttccggaagcggaagctcggcgggcgggccaagaaggtccgggagcccacggcggttaattctttttaccgtgaggcttcacttccctcggtctgggcttctctgaggcggcgagagatggtcaggtctggagctcgaccgggccagactttttaaaactgtggacttaaatgttctgcaaagtcttacacaaaagcccaatacagtacatgaactacggaaaagcagaactgctctgaacaaggaagaggtgggagatctgagtcctggccccagcacccacttcaacttcagtcacctccttggaatctggggttctgcagcttgaaataatcagtttggattttaaacttatttgtaacataataataatcctaggaactttaaaataatattttgtactaaattttagaattattataataagtgatctaataaaacagtcttttcctgaaagatg

SEQ ID NO: 387394 - DNA, 4147 bp, Homo sapiens
aacaaccccgaggtcttatttttatagaatatcaagaacaaaatcttccaaaaggcacacgatgccaaactaaaaataaagagcgaaaacccaaaaagtcgcgctcaattccttctgaaacctattcgcctcctacccctgtcccatcctctggcgctggcgggtcctcgtccccgttttccccaccgcaagtcctggaacctccgcttaactcttttctcggcggctccgccccggccccgccccagccatgccttggccccgccccgttcgccgtttattggcttctcccaacccctgccggtgggtgacaagccgggaagcttggaggggtctattgcgtacgcccaaggcgctgggcctggagcaggagaaagggagtggaggcgcgtcggagactatgaagcgcggcattcggcgggatcctttccggaagcggaagctcggcgggcgggccaagaaggtccgggagcccacggcggttaattctttttaccgtgaggcttcacttccctcggtctgggcttctctgaggcggcgagagatggtcaggtctggagctcgaccgggccaggtgttatcttcaggaaggcacactggacctgctaaattaacaaatggaaagaaagcgacctatttaagaaaaataccacgttttaatgcagattctggctattccatccattctgattcagaaagtcaggctgaaactgtacacgggcttgatggttgtgcttctttgctgagggacattttgagaaatgaagattcaggttcagaaacagcatatttagaaaacagatctaattctagacctttagaaagcaaaagatacggatcaaaaaagaaaagacatgaaaaacatactattcctttggtagtccagaaagaaacatcatcttcagataataagaaacagatacctaatgaagcttctgctagaagtgaaagagacacatcagacctagagcaaaactggtcattgcaagatcattatagaatgtattcacccataatataccaagccctctgtgagcacgtgcagactcagatgtcactgatgaatgacttgacttcaaagaacatccctaatggaattcctgctgtaccatgccatgctccctctcattctgaatctcaggcaactcctcattctagttatggcttatgtacctccaccccagtctggtcacttcagcggccaccctgccctccaaaggttcattctgaagttcaaactgatggcaacagtcagtttgcatcacaagaggattcagaaattcagaggttgattacagaaatggaggcatgtatatctgtacttccaacagtaagtggaaacacagatattcaagttgagatagcactggccatgcaaccattaagaagtgagaatgctcagttacgaaggcagttgagaattttgaaccagcaactcagagaacaacagaaaactcaaaaaccatctggtgctgtggattgcaaccttgaattgttttctcttcagtcattgaatatgtcactgcaaaatcaattggaggagtcactaaagagccaggaattactgcagagtaaaaatgaagagctgttaaaagtgattgaaaatcagaaagatgaaaacaaaaaatttagtagtatatttaaagacaaagatcaaactatacttgaaaataaacagcaatatgatattgagataacaagaataaaaattgaattggaggaagccctagtcaatgtgaaaagctcccagtttaagttagaaactgctgaaaaggaaaaccagatattggggataacattacgtcagcgtgatgctgaggtgactcgactaagagaattaaccagaactttacagactagcatggcaaagcttctctccgatcttagtgtggacagtgctcgctgcaagcctgggaataaccttaccaaatcactcttgaacattcatgataaacaacttcaacatgacccagctcctgctcacacttccataatgagctatctaaataagttagaaacaaattacagttttacacattcagagccactttctacaattaaaaatgaggaaaccatagagccagacaaaacctatgaaaatgttctgtcctccagaggccctcaaaatagtaacactaggggcatggaggaagcatctgcacctggaattatttctgccctttcaaaacaggattctgatgaagggagtgaaactatggctttaatagaagatgagcataatttggataatacaatttacattccttttgctagaagcactcctgaaaagaaatcaccactttctaagagactatcccctcagccacaaataagagcagctacaacacagctagtcagcaacagtggacttgctgtctctggaaaagaaaataaactgtgtacacctgtaatctgttcctcttcaacaaaggaagcagaagatgcacctgaaaaactttccagagcatctgatatgaaggacacacagctcctcaagaaaataaaggaagcaattggtaagatccctgctgccaccaaggagccagaggaacaaactgcatgtcatggcccatcaggttgtcttagcaacagccttcaagtgaaaggcaatactgtctgtgatggtagtgttttcacttctgacttgatgtctgactggagcatctcttcgttttcaacgttcacttctcgtgatgaacaagacttcagaaatggccttgcggcattagatgccaacatagctagactccagaagtctttaaggactggtcttctggagaaatgaattcagaagaaaattcatcaggtgcttctttttaaaactagaacttggctatattgaatgtgtatttttctttagtgaaatgatgttttatgttattatgtgtgaagtaatatattgtacaagtaataaatgtattgttgagatatattgacactgaggagcttataaaaacaagtcatcttaagttcacaattgctacaagaagaaagttgtggataactaggaaattattgtaagtaatgttttatttcagtacttagcaattagagttcttttattaagatgtatctgctggattaagggtacaggttgaaatagttctgtggctgtcctaagaaataatgggaaaagaatctctggatgtaagtttttctgttgaaactagagggttttttttttctgtttacatatacttttttttaatagcaatgtgtttttattaaacatgctgtgtgccacaggccagtgttgttggtgaaatatataaacatttatttaaagagaaaagttaccagtatctacacctcttaaaaaacattgattggtctaaaaaatatatagataacatcctaagttaacatatggcttcttaaaacttgggcacttttatttgtttttatcccaaattcatgttttaaggcctttaaagaatagtcagactgataaagaagtgctaacagataagctatagttggggaaatttgtgggttttttttaaataagaaatgtttatttttgtccttatatttaaacatgatggaatttgtaaatcttggcattgattgtaattctgcctttttggaagaattttttctcccagcatgttagctgagaatattctctattttataaataatatgaagtaggttggtctctctgcttctctataccaggacttcttagctcagtatcatctcccttcatgtaagcagcacgttttaactcttaggaagctgaatgttgtgttatcactaatactttgtacaggtcacctgcctactctaattgtccttagtacttggacaggctttatcattaaagagtgttctcctaatcccagaacctcctcgtgttttttgtttttttggtggttttttttttttttttaggtgttagtgctacagcgtttgaaggagccagctgtagtctctttgatatgttcagattttccagatagagatttaagtctaaaaatttattaagtgaattctaaactatttcacacaagagtccattagcatctttaattttatttagtattcatgaattaatttattggcatcttatttggaggtaataggccacaactctttaacaaataagttcagaaataaaaaataataaaaaaggaaaaaaaaaatg

SEQ ID NO: 387395 - DNA, 3872 bp, Homo sapiens
aaatatttgtaagaatattaataagcttgttttccaggacctatttaagaaaaataccacgttttaatgcagattctggctattccatccattctgattcagaaagtcaggtaagattgaatagatacaatacacactattttaattagttttcaaatagtagctaaaaagtaggaataaaatgcaaagtattaattgctctaaggaagtatgaagtctgttgctttaaaacatcttttctaccaataatagtttgtaaataaacaaattttaaaactacataatttatattttttcctacactaacagtcatatacaaatgtattctaaatgactttatttcttacagctgaaactgtacacgggcttgatggttgtgcttctttgctgagggacattttgagaaatgaagattcaggttttttttttttaattctttgctgatcaccttatctcaagtcattattttgatgtaacaaatttttgttttattaataggttcagaaacagcatatttagaaaacagatctaattctagacctttagaaagcaaaagatacggatcaaaaaagaaaagacatgaaaaacatactattcctttggtagtccagaaagaaacatcatcttcagataataagaaacagatacctaatgaagcttctgctagaagtgaaagagacacatcagacctagagcaaaactggtcattgcaagatcattatagaatgtattcacccataatataccaagccctctgtgagcacgtgcagactcagatgtcactgatgaatgacttgacttcaaagaacatccctaatggaattcctgctgtaccatgccatgctccctctcattctgaatctcaggcaactcctcattctagttatggcttatgtacctccaccccagtctggtcacttcagcggccaccctgccctccaaaggttcattctgaagttcaaactgatggcaacagtcagtttgcatcacaagaggattcagaaattcagaggttgattacagaaatggaggcatgtatatctgtacttccaacagtaagtggaaacacagatattcaagttgagatagcactggccatgcaaccattaagaagtgagaatgctcagttacgaaggcagttgagaattttgaaccagcaactcagagaacaacagaaaactcaaaaaccatctggtgctgtggattgcaaccttgaattgttttctcttcagtcattgaatatgtcactgcaaaatcaattggaggagtcactaaagagccaggaattactgcagagtaaaaatgaagagctgttaaaagtgattgaaaatcagaaagatgaaaacaaaaaatttagtagtatatttaaagacaaagatcaaactatacttgaaaataaacagcaatatgatattgagataacaagaataaaaattgaattggaggaagccctagtcaatgtgaaaagctcccagtttaagttagaaactgctgaaaaggaaaaccagatattggggataacattacgtcagcgtgatgctgaggtgactcgactaagagaattaaccagaactttacagactagcatggcaaagcttctctccgatcttagtgtggacagtgctcgctgcaagcctgggaataaccttaccaaatcactcttgaacattcatgataaacaacttcaacatgacccagctcctgctcacacttccataatgagctatctaaataagttagaaacaaattacagttttacacattcagagccactttctacaattaaaaatgaggaaaccatagagccagacaaaacctatgaaaatgttctgtcctccagaggccctcaaaatagtaacactaggggcatggaggaagcatctgcacctggaattatttctgccctttcaaaacaggattctgatgaagggagtgaaactatggctttaatagaagatgagcataatttggataatacaatttacattccttttgctagaagcactcctgaaaagaaatcaccactttctaagagactatcccctcagccacaaataagagcagctacaacacagctagtcagcaacagtggacttgctgtctctggaaaagaaaataaactgtgtacacctgtaatctgttcctcttcaacaaaggaagcagaagatgcacctgaaaaactttccagagcatctgatatgaaggacacacagctcctcaagaaaataaaggaagcaattggtaagatccctgctgccaccaaggagccagaggaacaaactgcatgtcatggcccatcaggttgtcttagcaacagccttcaagtgaaaggcaatactgtctgtgatggtagtgttttcacttctgacttgatgtctgactggagcatctcttcgttttcaacgttcacttctcgtgatgaacaagacttcagaaatggccttgcggcattagatgccaacatagctagactccagaagtctttaaggactggtcttctggagaaatgaattcagaagaaaattcatcaggtgcttctttttaaaactagaacttggctatattgaatgtgtatttttctttagtgaaatgatgttttatgttattatgtgtgaagtaatatattgtacaagtaataaatgtattgttgagatatattgacactgaggagcttataaaaacaagtcatcttaagttcacaattgctacaagaagaaagttgtggataactaggaaattattgtaagtaatgttttatttcagtacttagcaattagagttcttttattaagatgtatctgctggattaagggtacaggttgaaatagttctgtggctgtcctaagaaataatgggaaaagaatctctggatgtaagtttttctgttgaaactagagggttttttttttctgtttacatatacttttttttaatagcaatgtgtttttattaaacatgctgtgtgccacaggccagtgttgttggtgaaatatataaacatttatttaaagagaaaagttaccagtatctacacctcttaaaaaacattgattggtctaaaaaatatatagataacatcctaagttaacatatggcttcttaaaacttgggcacttttatttgtttttatcccaaattcatgttttaaggcctttaaagaatagtcagactgataaagaagtgctaacagataagctatagttggggaaatttgtgggttttttttaaataagaaatgtttatttttgtccttatatttaaacatgatggaatttgtaaatcttggcattgattgtaattctgcctttttggaagaattttttctcccagcatgttagctgagaatattctctattttataaataatatgaagtaggttggtctctctgcttctctataccaggacttcttagctcagtatcatctcccttcatgtaagcagcacgttttaactcttaggaagctgaatgttgtgttatcactaatactttgtacaggtcacctgcctactctaattgtccttagtacttggacaggctttatcattaaagagtgttctcctaatcccagaacctcctcgtgttttttgtttttttggtggttttttttttttttttaggtgttagtgctacagcgtttgaaggagccagctgtagtctctttgatatgttcagattttccagatagagatttaagtctaaaaatttattaagtgaattctaaactatttcacacaagagtccattagcatctttaattttatttagtattcatgaattaatttattggcatcttatttggaggtaataggccacaactctttaacaaataagttcagaaataaaaaataataaaaaaggaaaaaaaaaatg

SEQ ID NO: 387396 - DNA, 4501 bp, Homo sapiens
aacaaccccgaggtcttatttttatagaatatcaagaacaaaatcttccaaaaggcacacgatgccaaactaaaaataaagagcgaaaacccaaaaagtcgcgctcaattccttctgaaacctattcgcctcctacccctgtcccatcctctggcgctggcgggtcctcgtccccgttttccccaccgcaagtcctggaacctccgcttaactcttttctcggcggctccgccccggccccgccccagccatgccttggccccgccccgttcgccgtttattggcttctcccaacccctgccggtgggtgacaagccgggaagcttggaggggtctattgcgtacgcccaaggcgctgggcctggagcaggagaaagggagtggaggcgcgtcggagactatgaagcgcggcattcggcgggatcctttccggaagcggaagctcggcgggcgggccaagaaggtccgggagcccacggcggttaattctttttaccgtgaggcttcacttccctcggtctgggcttctctgaggcggcgagagatggtcaggtctggagctcgaccgggccaggtgttatcttcaggaaggcacactggacctgctaaattaacaaatggaaagaaagcgacctatttaagaaaaataccacgttttaatgcagattctggctattccatccattctgattcagaaagtcaggctgaaactgtacacgggcttgatggttgtgcttctttgctgagggacattttgagaaatgaagattcagcatcttcagataataagaaacagatacctaatgaagcttctgctagaagtgaaagagacacatcagacctagagcaaaactggtcattgcaagatcattatagaatgtattcacccataatataccaagccctctgtgagcacgtgcagactcagatgtcactgatgaatgacttgacttcaaagaacatccctaatggaattcctgctgtaccatgccatgctccctctcattctgaatctcaggcaactcctcattctagttatggcttatgtacctccaccccagtctggtcacttcagcggccaccctgccctccaaaggttcattctgaagttcaaactgatggcaacagtcagtttgcatcacaaggtaaaacagtttctgcaacctgtactgatgttctacggaattcatttaataccagtcctggagttccatgtagcctgcccaaaactgacatatcagctattccaacattgcagcaactgggccttgttaatggaattctgccacaacaaggaattcataaggaaacagacctactaaaatgtattcaaacatatttgtctctttttcgatctcatggaaaagaaacgcatctggacagtcagacacaccgaagccctactcagtcacaaccagctttcttggccactaatgaagaaaaatgtgccagagagcaaattagagaggccacaagtgaaagaaaggatttaaacatacatgtgcgagatacaaaaacagtgaaggatgtacagaaggcaaaaaatgtgaacaagacagctgaaaaagttagaattataaaatatttgttgggagagctcaaggccctggtagcagaacaagaggattcagaaattcagaggttgattacagaaatggaggcatgtatatctgtacttccaacagtaagtggaaacacagatattcaagttgagatagcactggccatgcaaccattaagaagtgagaatgctcagttacgaaggcagttgagaattttgaaccagcaactcagagaacaacagaaaactcaaaaaccatctggtgctgtggattgcaaccttgaattgttttctcttcagtcattgaatatgtcactgcaaaatcaattggaggagtcactaaagagccaggaattactgcagagtaaaaatgaagagctgttaaaagtgattgaaaatcagaaagatgaaaacaaaaaatttagtagtatatttaaagacaaagatcaaactatacttgaaaataaacagcaatatgatattgagataacaagaataaaaattgaattggaggaagccctagtcaatgtgaaaagctcccagtttaagttagaaactgctgaaaaggaaaaccagatattggggataacattacgtcagcgtgatgctgaggtgactcgactaagagaattaaccagaactttacagactagcatggcaaagcttctctccgatcttagtgtggacagtgctcgctgcaagcctgggaataaccttaccaaatcactcttgaacattcatgataaacaacttcaacatgacccagctcctgctcacacttccataatgagctatctaaataagttagaaacaaattacagttttacacattcagagccactttctacaattaaaaatgaggaaaccatagagccagacaaaacctatgaaaatgttctgtcctccagaggccctcaaaatagtaacactaggggcatggaggaagcatctgcacctggaattatttctgccctttcaaaacaggattctgatgaagggagtgaaactatggctttaatagaagatgagcataatttggataatacaatttacattccttttgctagaagcactcctgaaaagaaatcaccactttctaagagactatcccctcagccacaaataagagcagctacaacacagctagtcagcaacagtggacttgctgtctctggaaaagaaaataaactgtgtacacctgtaatctgttcctcttcaacaaaggaagcagaagatgcacctgaaaaactttccagagcatctgatatgaaggacacacagctcctcaagaaaataaaggaagcaattggtaagatccctgctgccaccaaggagccagaggaacaaactgcatgtcatggcccatcaggttgtcttagcaacagccttcaagtgaaaggcaatactgtctgtgatggtagtgttttcacttctgacttgatgtctgactggagcatctcttcgttttcaacgttcacttctcgtgatgaacaagacttcagaaatggccttgcggcattagatgccaacatagctagactccagaagtctttaaggactggtcttctggagaaatgaattcagaagaaaattcatcaggtgcttctttttaaaactagaacttggctatattgaatgtgtatttttctttagtgaaatgatgttttatgttattatgtgtgaagtaatatattgtacaagtaataaatgtattgttgagatatattgacactgaggagcttataaaaacaagtcatcttaagttcacaattgctacaagaagaaagttgtggataactaggaaattattgtaagtaatgttttatttcagtacttagcaattagagttcttttattaagatgtatctgctggattaagggtacaggttgaaatagttctgtggctgtcctaagaaataatgggaaaagaatctctggatgtaagtttttctgttgaaactagagggttttttttttctgtttacatatacttttttttaatagcaatgtgtttttattaaacatgctgtgtgccacaggccagtgttgttggtgaaatatataaacatttatttaaagagaaaagttaccagtatctacacctcttaaaaaacattgattggtctaaaaaatatatagataacatcctaagttaacatatggcttcttaaaacttgggcacttttatttgtttttatcccaaattcatgttttaaggcctttaaagaatagtcagactgataaagaagtgctaacagataagctatagttggggaaatttgtgggttttttttaaataagaaatgtttatttttgtccttatatttaaacatgatggaatttgtaaatcttggcattgattgtaattctgcctttttggaagaattttttctcccagcatgttagctgagaatattctctattttataaataatatgaagtaggttggtctctctgcttctctataccaggacttcttagctcagtatcatctcccttcatgtaagcagcacgttttaactcttaggaagctgaatgttgtgttatcactaatactttgtacaggtcacctgcctactctaattgtccttagtacttggacaggctttatcattaaagagtgttctcctaatcccagaacctcctcgtgttttttgtttttttggtggttttttttttttttttaggtgttagtgctacagcgtttgaaggagccagctgtagtctctttgatatgttcagattttccagatagagatttaagtctaaaaatttattaagtgaattctaaactatttcacacaagagtccattagcatctttaattttatttagtattcatgaattaatttattggcatcttatttggaggtaataggccacaactctttaacaaataagttcagaaataaaaaataataaaaaaggaaaaaaaaaatg

SEQ ID NO: 387397 - DNA, 4428 bp, Homo sapiens
aacaaccccgaggtcttatttttatagaatatcaagaacaaaatcttccaaaaggcacacgatgccaaactaaaaataaagagcgaaaacccaaaaagtcgcgctcaattccttctgaaacctattcgcctcctacccctgtcccatcctctggcgctggcgggtcctcgtccccgttttccccaccgcaagtcctggaacctccgcttaactcttttctcggcggctccgccccggccccgccccagccatgccttggccccgccccgttcgccgtttattggcttctcccaacccctgccggtgggtgacaagccgggaagcttggaggggtctattgcgtacgcccaaggcgctgggcctggagcaggagaaagggagtggaggcgcgtcggagactatgaagcgcggcattcggcgggatcctttccggaagcggaagctcggcgggcgggccaagaaggtccgggagcccacggcggttaattctttttaccgtgaggcttcacttccctcggtctgggcttctctgaggcggcgagagatggtcaggtctggagctcgaccgggccaggtgttatcttcaggaaggcacactggacctgctaaattaacaaatggaaagaaagcgctgaaactgtacacgggcttgatggttgtgcttctttgctgagggacattttgagaaatgaagattcagcatcttcagataataagaaacagatacctaatgaagcttctgctagaagtgaaagagacacatcagacctagagcaaaactggtcattgcaagatcattatagaatgtattcacccataatataccaagccctctgtgagcacgtgcagactcagatgtcactgatgaatgacttgacttcaaagaacatccctaatggaattcctgctgtaccatgccatgctccctctcattctgaatctcaggcaactcctcattctagttatggcttatgtacctccaccccagtctggtcacttcagcggccaccctgccctccaaaggttcattctgaagttcaaactgatggcaacagtcagtttgcatcacaaggtaaaacagtttctgcaacctgtactgatgttctacggaattcatttaataccagtcctggagttccatgtagcctgcccaaaactgacatatcagctattccaacattgcagcaactgggccttgttaatggaattctgccacaacaaggaattcataaggaaacagacctactaaaatgtattcaaacatatttgtctctttttcgatctcatggaaaagaaacgcatctggacagtcagacacaccgaagccctactcagtcacaaccagctttcttggccactaatgaagaaaaatgtgccagagagcaaattagagaggccacaagtgaaagaaaggatttaaacatacatgtgcgagatacaaaaacagtgaaggatgtacagaaggcaaaaaatgtgaacaagacagctgaaaaagttagaattataaaatatttgttgggagagctcaaggccctggtagcagaacaagaggattcagaaattcagaggttgattacagaaatggaggcatgtatatctgtacttccaacagtaagtggaaacacagatattcaagttgagatagcactggccatgcaaccattaagaagtgagaatgctcagttacgaaggcagttgagaattttgaaccagcaactcagagaacaacagaaaactcaaaaaccatctggtgctgtggattgcaaccttgaattgttttctcttcagtcattgaatatgtcactgcaaaatcaattggaggagtcactaaagagccaggaattactgcagagtaaaaatgaagagctgttaaaagtgattgaaaatcagaaagatgaaaacaaaaaatttagtagtatatttaaagacaaagatcaaactatacttgaaaataaacagcaatatgatattgagataacaagaataaaaattgaattggaggaagccctagtcaatgtgaaaagctcccagtttaagttagaaactgctgaaaaggaaaaccagatattggggataacattacgtcagcgtgatgctgaggtgactcgactaagagaattaaccagaactttacagactagcatggcaaagcttctctccgatcttagtgtggacagtgctcgctgcaagcctgggaataaccttaccaaatcactcttgaacattcatgataaacaacttcaacatgacccagctcctgctcacacttccataatgagctatctaaataagttagaaacaaattacagttttacacattcagagccactttctacaattaaaaatgaggaaaccatagagccagacaaaacctatgaaaatgttctgtcctccagaggccctcaaaatagtaacactaggggcatggaggaagcatctgcacctggaattatttctgccctttcaaaacaggattctgatgaagggagtgaaactatggctttaatagaagatgagcataatttggataatacaatttacattccttttgctagaagcactcctgaaaagaaatcaccactttctaagagactatcccctcagccacaaataagagcagctacaacacagctagtcagcaacagtggacttgctgtctctggaaaagaaaataaactgtgtacacctgtaatctgttcctcttcaacaaaggaagcagaagatgcacctgaaaaactttccagagcatctgatatgaaggacacacagctcctcaagaaaataaaggaagcaattggtaagatccctgctgccaccaaggagccagaggaacaaactgcatgtcatggcccatcaggttgtcttagcaacagccttcaagtgaaaggcaatactgtctgtgatggtagtgttttcacttctgacttgatgtctgactggagcatctcttcgttttcaacgttcacttctcgtgatgaacaagacttcagaaatggccttgcggcattagatgccaacatagctagactccagaagtctttaaggactggtcttctggagaaatgaattcagaagaaaattcatcaggtgcttctttttaaaactagaacttggctatattgaatgtgtatttttctttagtgaaatgatgttttatgttattatgtgtgaagtaatatattgtacaagtaataaatgtattgttgagatatattgacactgaggagcttataaaaacaagtcatcttaagttcacaattgctacaagaagaaagttgtggataactaggaaattattgtaagtaatgttttatttcagtacttagcaattagagttcttttattaagatgtatctgctggattaagggtacaggttgaaatagttctgtggctgtcctaagaaataatgggaaaagaatctctggatgtaagtttttctgttgaaactagagggttttttttttctgtttacatatacttttttttaatagcaatgtgtttttattaaacatgctgtgtgccacaggccagtgttgttggtgaaatatataaacatttatttaaagagaaaagttaccagtatctacacctcttaaaaaacattgattggtctaaaaaatatatagataacatcctaagttaacatatggcttcttaaaacttgggcacttttatttgtttttatcccaaattcatgttttaaggcctttaaagaatagtcagactgataaagaagtgctaacagataagctatagttggggaaatttgtgggttttttttaaataagaaatgtttatttttgtccttatatttaaacatgatggaatttgtaaatcttggcattgattgtaattctgcctttttggaagaattttttctcccagcatgttagctgagaatattctctattttataaataatatgaagtaggttggtctctctgcttctctataccaggacttcttagctcagtatcatctcccttcatgtaagcagcacgttttaactcttaggaagctgaatgttgtgttatcactaatactttgtacaggtcacctgcctactctaattgtccttagtacttggacaggctttatcattaaagagtgttctcctaatcccagaacctcctcgtgttttttgtttttttggtggttttttttttttttttaggtgttagtgctacagcgtttgaaggagccagctgtagtctctttgatatgttcagattttccagatagagatttaagtctaaaaatttattaagtgaattctaaactatttcacacaagagtccattagcatctttaattttatttagtattcatgaattaatttattggcatcttatttggaggtaataggccacaactctttaacaaataagttcagaaataaaaaataataaaaaaggaaaaaaaaaatg

SEQ ID NO: 387398 - DNA, 4621 bp, Homo sapiens
aacaaccccgaggtcttatttttatagaatatcaagaacaaaatcttccaaaaggcacacgatgccaaactaaaaataaagagcgaaaacccaaaaagtcgcgctcaattccttctgaaacctattcgcctcctacccctgtcccatcctctggcgctggcgggtcctcgtccccgttttccccaccgcaagtcctggaacctccgcttaactcttttctcggcggctccgccccggccccgccccagccatgccttggccccgccccgttcgccgtttattggcttctcccaacccctgccggtgggtgacaagccgggaagcttggaggggtctattgcgtacgcccaaggcgctgggcctggagcaggagaaagggagtggaggcgcgtcggagactatgaagcgcggcattcggcgggatcctttccggaagcggaagctcggcgggcgggccaagaaggtccgggagcccacggcggttaattctttttaccgtgaggcttcacttccctcggtctgggcttctctgaggcggcgagagatggtcaggtctggagctcgaccgggccaggtgttatcttcaggaaggcacactggacctgctaaattaacaaatggaaagaaagcgacctatttaagaaaaataccacgttttaatgcagattctggctattccatccattctgattcagaaagtcaggtaagattgaatagatacaatacacactattttaattagttttcaaatagtagctaaaaagtaggaataaaatgcaaagtattaattgctctaaggaagtatgaagtctgttgctttaaaacatcttttctaccaataatagtttgtaaataaacaaattttaaaactacataatttatattttttcctacactaacagtcatatacaaatgtattctaaatgactttatttcttacagctgaaactgtacacgggcttgatggttgtgcttctttgctgagggacattttgagaaatgaagattcagaacatgaactgacaaggaacaaggtgaaggagtttgactggactttagggataatataactcccttaaaagaagtgttaaaatgaaggagagattttacaaatgcatcttcagataataagaaacagatacctaatgaagcttctgctagaagtgaaagagacacatcagacctagagcaaaactggtcattgcaagatcattatagaatgtattcacccataatataccaagccctctgtgagcacgtgcagactcagatgtcactgatgaatgacttgacttcaaagaacatccctaatggaattcctgctgtaccatgccatgctccctctcattctgaatctcaggcaactcctcattctagttatggcttatgtacctccaccccagtctggtcacttcagcggccaccctgccctccaaaggttcattctgaagttcaaactgatggcaacagtcagtttgcatcacaagaaacgcatctggacagtcagacacaccgaagccctactcagtcacaaccagctttcttggccactaatgaagaaaaatgtgccagagagcaaattagagaggccacaagtgaaagaaaggatttaaacatacatgtgcgagatacaaaaacagtgaaggatgtacagaaggcaaaaaatgtgaacaagacagctgaaaaagttagaattataaaatatttgttgggagagctcaaggccctggtagcagaacaagaggattcagaaattcagaggttgattacagaaatggaggcatgtatatctgtacttccaacagtaagtggaaacacagatattcaagttgagatagcactggccatgcaaccattaagaagtgagaatgctcagttacgaaggcagttgagaattttgaaccagcaactcagagaacaacagaaaactcaaaaaccatctggtgctgtggattgcaaccttgaattgttttctcttcagtcattgaatatgtcactgcaaaatcaattggaggagtcactaaagagccaggaattactgcagagtaaaaatgaagagctgttaaaagtgattgaaaatcagaaagatgaaaacaaaaaatttagtagtatatttaaagacaaagatcaaactatacttgaaaataaacagcaatatgatattgagataacaagaataaaaattgaattggaggaagccctagtcaatgtgaaaagctcccagtttaagttagaaactgctgaaaaggaaaaccagatattggggataacattacgtcagcgtgatgctgaggtgactcgactaagagaattaaccagaactttacagactagcatggcaaagcttctctccgatcttagtgtggacagtgctcgctgcaagcctgggaataaccttaccaaatcactcttgaacattcatgataaacaacttcaacatgacccagctcctgctcacacttccataatgagctatctaaataagttagaaacaaattacagttttacacattcagagccactttctacaattaaaaatgaggaaaccatagagccagacaaaacctatgaaaatgttctgtcctccagaggccctcaaaatagtaacactaggggcatggaggaagcatctgcacctggaattatttctgccctttcaaaacaggattctgatgaagggagtgaaactatggctttaatagaagatgagcataatttggataatacaatttacattccttttgctagaagcactcctgaaaagaaatcaccactttctaagagactatcccctcagccacaaataagagcagctacaacacagctagtcagcaacagtggacttgctgtctctggaaaagaaaataaactgtgtacacctgtaatctgttcctcttcaacaaaggaagcagaagatgcacctgaaaaactttccagagcatctgatatgaaggacacacagctcctcaagaaaataaaggaagcaattggtaagatccctgctgccaccaaggagccagaggaacaaactgcatgtcatggcccatcaggttgtcttagcaacagccttcaagtgaaaggcaatactgtctgtgatggtagtgttttcacttctgacttgatgtctgactggagcatctcttcgttttcaacgttcacttctcgtgatgaacaagacttcagaaatggccttgcggcattagatgccaacatagctagactccagaagtctttaaggactggtcttctggagaaatgaattcagaagaaaattcatcaggtgcttctttttaaaactagaacttggctatattgaatgtgtatttttctttagtgaaatgatgttttatgttattatgtgtgaagtaatatattgtacaagtaataaatgtattgttgagatatattgacactgaggagcttataaaaacaagtcatcttaagttcacaattgctacaagaagaaagttgtggataactaggaaattattgtaagtaatgttttatttcagtacttagcaattagagttcttttattaagatgtatctgctggattaagggtacaggttgaaatagttctgtggctgtcctaagaaataatgggaaaagaatctctggatgtaagtttttctgttgaaactagagggttttttttttctgtttacatatacttttttttaatagcaatgtgtttttattaaacatgctgtgtgccacaggccagtgttgttggtgaaatatataaacatttatttaaagagaaaagttaccagtatctacacctcttaaaaaacattgattggtctaaaaaatatatagataacatcctaagttaacatatggcttcttaaaacttgggcacttttatttgtttttatcccaaattcatgttttaaggcctttaaagaatagtcagactgataaagaagtgctaacagataagctatagttggggaaatttgtgggttttttttaaataagaaatgtttatttttgtccttatatttaaacatgatggaatttgtaaatcttggcattgattgtaattctgcctttttggaagaattttttctcccagcatgttagctgagaatattctctattttataaataatatgaagtaggttggtctctctgcttctctataccaggacttcttagctcagtatcatctcccttcatgtaagcagcacgttttaactcttaggaagctgaatgttgtgttatcactaatactttgtacaggtcacctgcctactctaattgtccttagtacttggacaggctttatcattaaagagtgttctcctaatcccagaacctcctcgtgttttttgtttttttggtggttttttttttttttttaggtgttagtgctacagcgtttgaaggagccagctgtagtctctttgatatgttcagattttccagatagagatttaagtctaaaaatttattaagtgaattctaaactatttcacacaagagtccattagcatctttaattttatttagtattcatgaattaatttattggcatcttatttggaggtaataggccacaactctttaacaaataagttcagaaataaaaaataataaaaaaggaaaaaaaaaatg

SEQ ID NO: 387399 - DNA, 4405 bp, Homo sapiens
aacaaccccgaggtcttatttttatagaatatcaagaacaaaatcttccaaaaggcacacgatgccaaactaaaaataaagagcgaaaacccaaaaagtcgcgctcaattccttctgaaacctattcgcctcctacccctgtcccatcctctggcgctggcgggtcctcgtccccgttttccccaccgcaagtcctggaacctccgcttaactcttttctcggcggctccgccccggccccgccccagccatgccttggccccgccccgttcgccgtttattggcttctcccaacccctgccggtgggtgacaagccgggaagcttggaggggtctattgcgtacgcccaaggcgctgggcctggagcaggagaaagggagtggaggcgcgtcggagactatgaagcgcggcattcggcgggatcctttccggaagcggaagctcggcgggcgggccaagaaggtccgggagcccacggcggttaattctttttaccgtgaggcttcacttccctcggtctgggcttctctgaggcggcgagagatggtcaggtctggagctcgaccgggccaggtgttatcttcaggaaggcacactggacctgctaaattaacaaatggaaagaaagcgacctatttaagaaaaataccacgttttaatgcagattctggctattccatccattctgattcagaaagtcaggctgaaactgtacacgggcttgatggttgtgcttctttgctgagggacattttgagaaatgaagattcaggttcagaaacagcatatttagaaaacagatctaattctagacctttagaaagcaaaagatacggatcaaaaaagaaaagacatgaaaaacatactattcctttggtagtccagaaagaaacatcatcttcagataataagaaacagatacctaatgaagcttctgctagaagtgaaagagacacatcagacctagagcaaaactggtcattgcaagatcattatagaatgtattcacccataatataccaagccctctgtgagcacgtgcagactcagatgtcactgatgaatgacttgacttcaaagaacatccctaatggaattcctgctgtaccatgccatgctccctctcattctgaatctcaggcaactcctcattctagttatggcttatgtacctccaccccagtctggtcacttcagcggccaccctgccctccaaaggttcattctgaagttcaaactgatggcaacagtcagtttgcatcacaaggtaaaacagtttctgcaacctgtactgatgttctacggaattcatttaataccagtcctggagttccatgtagcctgcccaaaactgacatatcagctattccaacattgcagcaactgggccttgttaatggaattctgccacaacaaggaattcataaggaaacagacctactaaaatgtattcaaacatatttgtctctttttcgatctcatggaaaagaaacgcatctggacagtcagacacaccgaagccctactcagtcacaaccagctttcttggccactaatgaagaaaaatgtgccagagagcaaattagagaggccacaagtgaaagaaaggatttaaacatacatgtgcgagatacaaaaacagtgaaggatgtacagaaggcaaaaaatgtgaacaagacagctgaaaaagttagaattataaaatatttgttgggagagctcaaggccctggtagcagaacaagaggattcagaaattcagaggttgattacagaaatggaggcatgtatatctgtacttccaacagtaagtggaaacacagatattcaagttgagatagcactggccatgcaaccattaagaagtgagaatgctcagttacgaaggcagttgagaattttgaaccagcaactcagagaacaacagaaaactcaaaaaccatctggtgctgtggattgcaaccttgaataattggaggaagccctagtcaatgtgaaaagctcccagtttaagttagaaactgctgaaaaggaaaaccagatattggggataacattacgtcagcgtgatgctgaggtgactcgactaagagaattaaccagaactttacagactagcatggcaaagcttctctccgatcttagtgtggacagtgctcgctgcaagcctgggaataaccttaccaaatcactcttgaacattcatgataaacaacttcaacatgacccagctcctgctcacacttccataatgagctatctaaataagttagaaacaaattacagttttacacattcagagccactttctacaattaaaaatgaggaaaccatagagccagacaaaacctatgaaaatgttctgtcctccagaggccctcaaaatagtaacactaggggcatggaggaagcatctgcacctggaattatttctgccctttcaaaacaggattctgatgaagggagtgaaactatggctttaatagaagatgagcataatttggataatacaatttacattccttttgctagaagcactcctgaaaagaaatcaccactttctaagagactatcccctcagccacaaataagagcagctacaacacagctagtcagcaacagtggacttgctgtctctggaaaagaaaataaactgtgtacacctgtaatctgttcctcttcaacaaaggaagcagaagatgcacctgaaaaactttccagagcatctgatatgaaggacacacagctcctcaagaaaataaaggaagcaattggtaagatccctgctgccaccaaggagccagaggaacaaactgcatgtcatggcccatcaggttgtcttagcaacagccttcaagtgaaaggcaatactgtctgtgatggtagtgttttcacttctgacttgatgtctgactggagcatctcttcgttttcaacgttcacttctcgtgatgaacaagacttcagaaatggccttgcggcattagatgccaacatagctagactccagaagtctttaaggactggtcttctggagaaatgaattcagaagaaaattcatcaggtgcttctttttaaaactagaacttggctatattgaatgtgtatttttctttagtgaaatgatgttttatgttattatgtgtgaagtaatatattgtacaagtaataaatgtattgttgagatatattgacactgaggagcttataaaaacaagtcatcttaagttcacaattgctacaagaagaaagttgtggataactaggaaattattgtaagtaatgttttatttcagtacttagcaattagagttcttttattaagatgtatctgctggattaagggtacaggttgaaatagttctgtggctgtcctaagaaataatgggaaaagaatctctggatgtaagtttttctgttgaaactagagggttttttttttctgtttacatatacttttttttaatagcaatgtgtttttattaaacatgctgtgtgccacaggccagtgttgttggtgaaatatataaacatttatttaaagagaaaagttaccagtatctacacctcttaaaaaacattgattggtctaaaaaatatatagataacatcctaagttaacatatggcttcttaaaacttgggcacttttatttgtttttatcccaaattcatgttttaaggcctttaaagaatagtcagactgataaagaagtgctaacagataagctatagttggggaaatttgtgggttttttttaaataagaaatgtttatttttgtccttatatttaaacatgatggaatttgtaaatcttggcattgattgtaattctgcctttttggaagaattttttctcccagcatgttagctgagaatattctctattttataaataatatgaagtaggttggtctctctgcttctctataccaggacttcttagctcagtatcatctcccttcatgtaagcagcacgttttaactcttaggaagctgaatgttgtgttatcactaatactttgtacaggtcacctgcctactctaattgtccttagtacttggacaggctttatcattaaagagtgttctcctaatcccagaacctcctcgtgttttttgtttttttggtggttttttttttttttttaggtgttagtgctacagcgtttgaaggagccagctgtagtctctttgatatgttcagattttccagatagagatttaagtctaaaaatttattaagtgaattctaaactatttcacacaagagtccattagcatctttaattttatttagtattcatgaattaatttattggcatcttatttggaggtaataggccacaactctttaacaaataagttcagaaataaaaaataataaaaaaggaaaaaaaaaatg

SEQ ID NO: 387400 - DNA, 3989 bp, Homo sapiens
aacaaccccgaggtcttatttttatagaatatcaagaacaaaatcttccaaaaggcacacgatgccaaactaaaaataaagagcgaaaacccaaaaagtcgcgctcaattccttctgaaacctattcgcctcctacccctgtcccatcctctggcgctggcgggtcctcgtccccgttttccccaccgcaagtcctggaacctccgcttaactcttttctcggcggctccgccccggccccgccccagccatgccttggccccgccccgttcgccgtttattggcttctcccaacccctgccggtgggtgacaagccgggaagcttggaggggtctattgcgtacgcccaaggcgctgggcctggagcaggagaaagggagtggaggcgcgtcggagactatgaagcgcggcattcggcgggatcctttccggaagcggaagctcggcgggcgggccaagaaggtccgggagcccacggcggttaattctttttaccgtgaggcttcacttccctcggtctgggcttctctgaggcggcgagagatggtcaggtctggagctcgaccgggccaggtgttatcttcaggaaggcacactggacctgctaaattaacaaatggaaagaaagcgacctatttaagaaaaataccacgttttaatgcagattctggctattccatccattctgattcagaaagtcaggctgaaactgtacacgggcttgatggttgtgcttctttgctgagggacattttgagaaatgaagattcaggttcagaaacagcatatttagaaaacagatctaattctagacctttagaaagcaaaagatacggatcaaaaaagaaaagacatgaaaaacatactattcctttggtagtccagaaagaaacatcatcttcagataataagaaacagatacctaatgaagcttctgctagaagtgaaagagacacatcagacctagagcaaaactggtcattgcaagatcattatagaatgtattcacccataatataccaagccctctgtgagcacgtgcagactcagatgtcactgatgaatgacttgacttcaaagaacatccctaatggaattcctgctgtaccatgccatgctccctctcattctgaatctcaggcaactcctcattctagttatggcttatgtacctccaccccagtctggtcacttcagcggccaccctgccctccaaaggttcattctgaagttcaaactgatggcaacagtcagtttgcatcacaaggtaaaacagtttctgcaacctgtactgatgttctacggaattcatttaataccagtcctggagttccatgtagcctgcccaaaactgacatatcagctattccaacattgcagcaactgggccttgttaatggaattctgccacaacaaggaattcataaggaaacagacctactaaaatgtattcaaacatatttgtctctttttcgatctcatggaaaagaaacgcatctggacagtcagacacaccgaagccctactcagtcacaaccagctttcttggccactaatgaagaaaaatgtgccagagagcaaattagagaggccacaagtgaaagaaaggatttaaacatacatgtgcgagatacaaaaacagtgaaggatgtacagaaggcaaaaaatgtgaacaagacagctgaaaaagttagaattataaaatatttgttgggagagctcaaggccctggtagcagaacaagaggattcagaaattcagaggttgattacagaaatggaggcatgtatatctgtacttccaacagtaagtggaaacacagatattcaagttgagatagcactggccatgcaaccattaagaagtgagaatgctcagttacgaaggcagttgagaattttgaaccagcaactcagagaacaacagaaaactcaaaaaccatctggtgctgtggattgcaaccttgaattgttttctcttcagtcattgaatatgtcactgcaaaatcaattggaggagtcactaaagagccaggaattactgcagagtaaaaatgaagagctgttaaaagtgattgaaaatcagaaagatgaaaacaaaaaatttagtagtatatttaaagacaaagatcaaactatacttgaaaataaacagcaatatgatattgagataacaagaataaaaattgaattggaggaagccctagtcaatgtgaaaagctcccagtttaagttagaaactgctgaaaaggaaaaccagatattggggataacattacgtcagcgtgatgctgaggtgactcgactaagagaattaaccagaactttacagactagcatggcaaagcttctctccgatcttagtgtggacagtgctcgctgcaagcctgggaataaccttaccaaatcactcttgaacattcatgataaacaacttcaacatgacccagctcctgctcacacttccataatgagctatctaaataagttagaaacaaattacagttttacacattcagagccactttctacaattaaaaatgaggaaaccatagagccagacaaaacctatgaaaatgttctgtcctccagaggccctcaaaatagtaacactaggggcatggaggaagcatctgcacctggaattatttctgccctttcaaaacaggattctgatgaagggagtgaaactatggctttaatagaagatgagcataatttggataatacaatttacattccttttgctagaagcactcctgaaaagaaatcaccactttctaagagactatcccctcagccacaaataagagcagctacaacacagctagtcagcaacagtggacttgctgtctctggaaaagaaaataaactgtgtacacctgtaatctgttcctcttcaacaaaggaagcagaagatgcacctgaaaaactttccagagcatctgatatgaaggacacacagctcctcaagaaaataaaggaagcaattggtaagatccctgctgccaccaaggagccagaggaacaaactgcatgtcatggcccatcaggttgtcttagcaacagccttcaagtgaaaggcaatactgtctgtgatggtagtgttttcacttctgacttgatgtctgactggagcatctcttcgttttcaacgttcacttctcgtgatgaacaagacttcagaaatggccttgcggcattagatgccaacatagctagactccagaagtctttaaggactggtcttctggagaaatgaattcagaagaaaattcatcaggtgcttctttttaaaactagaacttggctatattgaatgtgtatttttctttagtgaaatgatgttttatgttattatgtgtgaagtaatatattgtacaagtaataaatgtattgttgagatatattgacactgaggagcttataaaaacaagtcatcttaagttcacaattgctacaagaagaaagttgtggataactaggaaattattgtaagtaatgttttatttcagtacttagcaattagagttcttttattaagatgtatctgctggattaagggtacaggttgaaatagttctgtggctgtcctaagaaataatgggaaaagaatctctggatgtaagtttttctgttgaaactagagggttttttttttctgtttacatatacttttttttaatagcaatgtgtttttattaaacatgctgtgtgccacaggccagtgttgttggtgaaatatataaacatttatttaaagagaaaagttaccagtatctacacctcttaaaaaacattgattggtctaaaaaatatatagataacatcctaagttaacatatggcttcttaaaacttgggcacttttatttgtttttatcccaaattcatgttttaaggcctttaaagaatagtcagactgataaagaagtgctaacagataagctatagcggtggttggctttagtttccctctggagcagctat

SEQ ID NO: 387401 - DNA, 2635 bp, Homo sapiens
aacaaccccgaggtcttatttttatagaatatcaagaacaaaatcttccaaaaggcacacgatgccaaactaaaaataaagagcgaaaacccaaaaagtcgcgctcaattccttctgaaacctattcgcctcctacccctgtcccatcctctggcgctggcgggtcctcgtccccgttttccccaccgcaagtcctggaacctccgcttaactcttttctcggcggctccgccccggccccgccccagccatgccttggccccgccccgttcgccgtttattggcttctcccaacccctgccggtgggtgacaagccgggaagcttggaggggtctattgcgtacgcccaaggcgctgggcctggagcaggagaaagggagtggaggcgcgtcggagactatgaagcgcggcattcggcgggatcctttccggaagcggaagctcggcgggcgggccaagaaggtccgggagcccacggcggttaattctttttaccgtgaggcttcacttccctcggtctgggcttctctgaggcggcgagagatggtcaggtctggagctcgaccgggccaggtgttatcttcaggaaggcacactggacctgctaaattaacaaatggaaagaaagcgacctatttaagaaaaataccacgttttaatgcagattctggctattccatccattctgattcagaaagtcaggctgaaactgtacacgggcttgatggttgtgcttctttgctgagggacattttgagaaatgaagattcaggttcagaaacagcatatttagaaaacagatctaattctagacctttagaaagcaaaagatacggatcaaaaaagaaaagacatgaaaaacatactattcctttggtagtccagaaagaaacatcatcttcagataataagaaacagatacctaatgaagcttctgctagaagtgaaagagacacatcagacctagagcaaaactggtcattgcaagatcattatagaatgtattcacccataatataccaagccctctgtgagcacgtgcagactcagatgtcactgatgaatgacttgacttcaaagaacatccctaatggaattcctgctgtaccatgccatgctccctctcattctgaatctcaggcaactcctcattctagttatggcttatgtacctccaccccagtctggtcacttcagcggccaccctgccctccaaaggttcattctgaagttcaaactgatggcaacagtcagtttgcatcacaaggtaaaacagtttctgcaacctgtactgatgttctacggaattcatttaataccagtcctggagttccatgtagcctgcccaaaactgacatatcagctattccaacattgcagcaactgggccttgttaatggaattctgccacaacaaggaattcataaggaaacagacctactaaaatgtattcaaacatatttgtctctttttcgatctcatggaaaagaaacgcatctggacagtcagacacaccgaagccctactcagtcacaaccagctttcttggccactaatgaagaaaaatgtgccagagagcaaattagagaggccacaagtgaaagaaaggatttaaacatacatgtgcgagatacaaaaacagtgaaggatgtacagaaggcaaaaaatgtgaacaagacagctgaaaaagttagaattataaaatatttgttgggagagctcaaggccctggtagcagaacaagaggattcagaaattcagaggttgattacagaaatggaggcatgtatatctgtacttccaacagtaagtggaaacacagatattcaagttgagatagcactggccatgcaaccattaagaagtgagaatgctcagttacgaaggcagttgagaattttgaaccagcaactcagagaacaacagaaaactcaaaaaccatctggtgctgtggattgcaaccttgaattgttttctcttcagtcattgaatatgtcactgcaaaatcaattggaggagtcactaaagagccaggaattactgcagagtaaaaatgaagagctgttaaaagtgattgaaaatcagaaagatgaaaacaaaaaatttagtagtatatttaaagacaaagatcaaactatacttgaaaataaacagcaatatgatattgagataacaagaataaaaattgaattggaggaagccctagtcaatgtgaaaagctcccagtttaagttagaaactgctgaaaaggaaaaccagatattggggataacattacgtcagcgtgatgctgaggtgactcgactaagagaattaaccagactttttaaaactgtggacttaaatgttctgcaaagtcttacacaaaagcccaatacagtacatgaactacggaaaagcagaactgctctgaacaaggaagaggtgggagatctgagtcctggccccagcacccacttcaacttcagtcacctccttggaatctggggttctgcagcttgaaataatcagtttggattttaaacttatttgtaacataataataatcctaggaactttaaaataatattttgtactaaattttagaattattataataagtgatctaataaaacagtcttttcctgaaagatg

SEQ ID NO: 387402 - DNA, 2126 bp, Homo sapiens
aacaaccccgaggtcttatttttatagaatatcaagaacaaaatcttccaaaaggcacacgatgccaaactaaaaataaagagcgaaaacccaaaaagtcgcgctcaattccttctgaaacctattcgcctcctacccctgtcccatcctctggcgctggcgggtcctcgtccccgttttccccaccgcaagtcctggaacctccgcttaactcttttctcggcggctccgccccggccccgccccagccatgccttggccccgccccgttcgccgtttattggcttctcccaacccctgccggtgggtgacaagccgggaagcttggaggggtctattgcgtacgcccaaggcgctgggcctggagcaggagaaagggagtggaggcgcgtcggagactatgaagcgcggcattcggcgggatcctttccggaagcggaagctcggcgggcgggccaagaaggtccgggagcccacggcggttaattctttttaccgtgaggcttcacttccctcggtctgggcttctctgaggcggcgagagatggtcaggtctggagctcgaccgggccaggtgttatcttcaggaaggcacactggacctgctaaattaacaaatggaaagaaagcgacctatttaagaaaaataccacgttttaatgcagattctggctattccatccattctgattcagaaagtcaggctgaaactgtacacgggcttgatggttgtgcttctttgctgagggacattttgagaaatgaagattcaggttcagaaacagcatatttagaaaacagatctaattctagacctttagaaagcaaaagatacggatcaaaaaagaaaagacatgaaaaacatactattcctttggtagtccagaaagaaacatcatcttcagataataagaaacagatacctaatgaagcttctgctagaagtgaaagagacacatcagacctagagcaaaactggtcattgcaagatcattatagaatgtattcacccataatataccaagccctctgtgagcacgtgcagactcagatgtcactgatgaatgacttgacttcaaagaacatccctaatggaattcctgctgtaccatgccatgctccctctcattctgaatctcaggcaactcctcattctagttatggcttatgtacctccaccccagtctggtcacttcagcggccaccctgccctccaaaggttcattctgaagttcaaactgatggcaacagtcagtttgcatcacaaggtaaaacagtttctgcaacctgtactgatgttctacggaattcatttaataccagtcctggagttccatgtagcctgcccaaaactgacatatcagctattccaacattgcagcaactgggccttgttaatggaattctgccacaacaaggaattcataaggaaacagacctactaaaatgtattcaaacatatttgtctctttttcgatctcatggaaaagaaacgcatctggacagtcagacacaccgaagccctactcagtcacaaccagctttcttggccactaatgaagaaaaatgtgccagagagcaaattagagaggccacaagtgaaagaaaggatttaaacatacatgtgcgagatacaaaaacagtgaaggatgtacagaaggcaaaaaatgtgaacaagacagctgaaaaagttagaattataaaatatttgttgggagagctcaaggccctggtagcagaacaagggtagatgggacttataactttctgtagtatggtgttatactaaatagcaatgtcatgttatttagctatcatttaaatggagtttgtggtattttccatagaactgtgttttgagctaataagaaaatgagttctacttattgtattattttttaagttttgatcccttctttcctgtggatttaaaatgcgtttgagaatatcaaacattcagtcttttgcttgcaagtgtgtatttattctgcttgataatagaccttgaaaagagtcaaccaaagagaatttggacagataaaaattttaattagagaatgcctataaatgattaactccctgagtagactgattattcttcctgttttaaaaagatgcagagaatt

SEQ ID NO: 387403 - DNA, 750 bp, Homo sapiens
ctgaatggatgtcatgactatatatctaataattacttaggaaatcctctcaatctctgggcatggggtattaggctatgaaaaccagaattttccattttaatcataacaactctgaacatttttatgctaatggtgaaagcagaaactttgttcttgtcctcaaatcaaatttaagctttcctgttgattacacatatccttgacgagtaagattcactctctttcacctgcctggttattgatcagctcatgagcagatggaagatctaagcataaatcactcatgaagatgatgaataagctgaaagtttattcatatgtataccctttcttatccagtgatagtagaagcttcatatttaagaaggggattaatgacataatttattattgtttcttgttcttttcgttaaagggaataaacaatataagtgaataattaattgaattttgtaggaagggttcagaaaagacctgccagatacagacaggaacccttgtcattaaacccaaggccagcagacattgcacgggtgtgtgttagaagcaaaggcaaagggctctgggaaagagagtaagaaagtgttccttttagatctgagaaatagtaagctttaagaggctggctttattgatttatttattgagacaaggcctcactccatcacccaggctacagttgcagtgagctgagattgcgccactgcactccagcctgggtgacagagcaagacttcctctcaggaa

SEQ ID NO: 387404 - DNA, 344 bp, Homo sapiens
ctaaaaacctcagaagtttgcctaacagccctcggaaggaacctcagtttataggaggtctgtgtacctggaggagggtgggctgggatgagagggagtcagacctctgcaatttccagtattttatttgaagacagtccagaggcttaaagggtctgaaggatgcattattactgggaatccagggtctggtgaaagctagaaagctgttatctaagcaaaggggagtttaagattagaaactgaatttcccagccttgcctgtgctctagaaacaatggggctgggtgcggtggctcactcctgtaatccgagaactttgggaggtcgaggcgggcagatct

SEQ ID NO: 387405 - DNA, 385 bp, Homo sapiens
tggaaacggagtctcgctctttcgcccaggctggagtgcaaatctcacctcactgcaacctccacctccctggttcaagcgattctcctgcctcaatctcctgagtagctgggactataggtgcatgccaccacgcccagctaattttttggtatttttagtagaaatggggtttcaccatgctgggccaggatggtctcaatctcctgacctcgtgatcctcctgcctcggtctcccaaagtgctggaattacaggcatgagccactgcgcccagcccatatacggctaatttaaaaaaaatttttttttgtagagatgaggttgttgcctaggctggtgtcaaactcctggactcaagcaatcctcctgcctcggcctttcaa

SEQ ID NO: 387406 - DNA, 287 bp, Homo sapiens
cttgccccttcctccatctttcaagtgcatcatcccaatctttacttgtattcatcacaccgccttttcatctgtgagaagtcaagttctagtgatgattcagaggtgacttttaagcagataagagcaaagggacacaagcaggaacctgccagacatagtggtgtgtacatgtagtcccagctacttgggaggctgagaaggaaggattgcatgagcccaggggttcaagtccagcctcagcaacatagaccccatctctaaaataaatgaataaataaataaat

SEQ ID NO: 387407 - DNA, 412 bp, Homo sapiens
ggttggagtgtagtggaatgatctcagctcactgcaacctcctcctcccaggttcaagtgattctcctgccttgcctcctgaatagctgagattacaggcatgcaccaccacgcccagctaatttttgtatttttcgtagcgagagagtgggtttcactatgttggccaggctgatgtcaaacttctgaccttgagtgatccacctgcctcttcctcccaaagtgctgggattagaggcctgagccaccgcgcccagccggtggtttctttctaggtagacggtgatatcatcttcgaattatgacaattttctctcatcttccaatccttacatcttttctttatttttctttccttagggcattgaccaggagaatgcagttctgtgttaaaccacaggggattactgag

SEQ ID NO: 387408 - DNA, 404 bp, Homo sapiens
aacctgtagtcccagctacttgggaggctgaggcaggagaatcacttgaacctgggagatggaggttgtagtgaaccgagatcataccattgtactccagcagcctgggtgacagagtgagacagtgtctaaaaaaataaataaataaaagaaaagaaaagaaaaaaagaagaaagagagagagaaaaaaattatatgcaaagtttcagctgcatgggggggtcagtgtccctaatccttacattgttcagggtcaactatatagaggacacatgaggattctgcaggtgtgacaagatattctcctatgagaagaaggaagaggaaagactagaaaagggaggatgaatttagcaaaaaccaacttagtccactttataagtttgcataaggctcgccctgga

SEQ ID NO: 387409 - DNA, 891 bp, Homo sapiens
gcctgctgctgactctatcacttggagcaataatgtggggttatggtggtggaatcttgtatatttttgtcaaaaataaaaccttgagttaaggggatagatatagatggaaaaatacacaaataaatacggtatgaaaacacatggaaatgtgtctttgtcaaatctgaatcattattaccatcacaaaaattcttctcttggccaatatctcatttccctatatagtatacaagcaccatttcttctcaatttttaagaagagaaattagtccattaccacaggggttcttgtcactactaattatacaacaatcttttcccaacaaaaagatgtcctccacaacctttgttttcaaagcagacagcatctatgtggccaaatatactttgggttgttcttgaggatactggttttgggctgatgactatggtgggcagcatggatccattgggctccttctgctaaacagccacattgaaatggtttaaaagcaagtcagatcaggtgatttgtaaaattgtatttatctgtacatgtatgggcttttaattcccaccaagaaagagagaaattatctttttagttaaaaccaaatttcacttttcaaaatatcttccaacttatttattggttgtcactcaattgcctatatatatatatatatgtgtgtgtgtgtgtgtgcgcgtgagcgcacgtgtgtgtatgcgtgcgcatgtgtgtgtatgtgtattatcagacataggtttctaacttttagatagaagaggagcaacatctatgccaaatactgtgcattctacaatggtgctaatctcagacctaaatgatactccatttaatttaaaaaagagttttaaataattatctatgtgcctgtatttcccttt

SEQ ID NO: 387410 - DNA, 462 bp, Homo sapiens
ccagtcgcggctcatccacccggccgagggcctgcccaccttcgacactggaggagggggtactggagcggcccctaccccacgctgcttccagacgccgggctgagtgggaacctctctgacctctgccgtgtactcattgcacctttcaaccctggccacttttcccaagtacataaagactcgggggaaaaagaacacccgcggtggtccatgaaggccatgtgaaggcatggactgtgacgttttttgctctgcatggaatccctagcgcctaggacagtgcctactacgttgatagatgagtgaatataaacgtcctttaaaaaaattaagtgatgatggtcgcttaacattgtgaatgtaattaataccactcacttgtatgcatagaaatagttaaactgtcgaattcatgttttatataccttactgcaataaaaacatttttaaagttaaaaa

SEQ ID NO: 387411 - DNA, 587 bp, Homo sapiens
aacctcaaaacatttactcaatccccaatacacctaaaaagtcccagaagtgctatgtccatatcactatgaaaagtaaacctaatagaatgagttcaagagttgcctgcaacccgtctctttcaactctacccaagctgacggtatatggttatagttatagcaccatgttattagtaataaattacttagatttactctttgttccctcaatgggggtacaatactaatttaaaatacattcaggttcatttgtttcagtggattaggattctccccatttccgtccttattttgaatactgaaaaaaacacactatgaaaagccaaaactatattttttaaaaaaaggtttactttgaagtgtcattgcctcccataaacctctggccccattacctctcactaccccttctttttgtaaagtcaagcatatatatgtatgtgttattttcccttttttcttacataaaagatagcacactatatattcttgtttatactaaccagcacaatccagattgaagaaagctcttcccaaagccttttataagatacaatatcctgatatcaaaaccagacaaagag

SEQ ID NO: 387412 - DNA, 586 bp, Homo sapiens
ccagtctaggtgacagagcgagactccatctcaacaacaacaacaacaaaagacaaccaaaaccaaaaaaaaacaaaaaacaaaaaaccaatcctatactcattgctcccagtccactaaagcagaaagaaaactggactgggcgttaggtgacatgaaccccagtcccagctccgcaggcctccaaggctctctggcctctgtttcctttcctataaaatggggtaacatagtggctggcctggttatttcaagaagagagtgtgagattgcagagagagggtgggctttctggtgtcagaacaagtttctaatgaggaaaaatgacttgccttcttggagcctcactgtcttcatctgttaagttacaggggaaaagaaaatatgggatatgtaagtgtgcaatgcctgtcagctgccagaagtgcagcaaatgttaaatcccttctctgctcaaaaggctatgatggaaattcaaaagccccttctcagtaaggccctctggacacccaatctgaaatgtcgggcccctcccccttttctctttattgcggatcactgtctaacatttgacttctttatctgg

SEQ ID NO: 387413 - DNA, 325 bp, Homo sapiens
cgacatggtggccaggctggtctcaaactcttggcctcaagtgatctgcctgcctcagcctcccaaagttctgggattacaggtgtgagtcactgtgcccggcctcttggtgtcttttgctgtacctggaccaatccaccccgccttctcttggcctatggcagccccgggacatcacaggccacagacttatcacaggcaattatgccaactctcctctaacagaaagaaacagcagcacctccaacccaaagctggtggcccagagagtgcagtaggctgctgcctgctgaggctgtgatcctgtggccagcgaggcttggca

SEQ ID NO: 387414 - DNA, 302 bp, Homo sapiens
ggtttttataaaaatcagaatttttcaaatgcattggtcattttcagatgcattggtcacatttcattattccatatcaaaaaactgcatttgttaatgtcacacaaatctcattggaaaggtcttcaagtattgtgaagttgtccaggtcacaaagatgaatgctagtttttcaaaattctactttttacttgaatgctcaaatcttataattggtaacccggtcagtttttctttagttgataggcttactgcttttatgtgttgagaatacttgtctgtgaaacatccaaatctggaag

SEQ ID NO: 387415 - DNA, 694 bp, Homo sapiens
tgactagttctttgaaacctcttttatactatagggggatgccgtcgggcattgtgagatgttatctacctgggcatgggggtacacccctctagtctcaactatttgggaggttgaggcaggaagatcgcttgagcccaggaatgagtccagcctgggcaatataatgagacactatctccaaggaaaaataatgtctgactgctttttgtaatgtgggagtcagcatttagaatctgtatggagcccaagaaaaaaaatctctaataacaaggataaaagtttatgtaaagtgtccatgttgaatccaaattagttattcatgtttggcaattggggcattttttccttaagttcttgatagataactaatcagcagactttacaaatatctcatgaaagacgggaaatactagtatttgtatacttgttatagtttgaaaagaatcagtgtatagagtgagatttttctatttttggtacatcataattttgttgtttttagggagtaaaggatatctgttttgtttttgctgtgtccttgctgcacacccaatttatagaaaaggagccaggtgcagctgctcatgcttgtaattccagcactttgggagaccagggtgggtggagctcttgaacccagagaaaccagcctgggcaagatggtgaaaccccttctctaccaaaaaaaaaa

SEQ ID NO: 387416 - DNA, 223 bp, Homo sapiens
cttctcacaagcctgtctgaaccccagttctgtggtctgtggtgtactgaagaggggacaggatacaagctggctgagctttgctctagctgccccgcccgggcaaagctgcaggaacacccagctggcctgactccgcctggctccttctcaccacaagcccttctctgccctttcctcactcagtcactgctcctgaccttgggcctatgtatcaaacaag

SEQ ID NO: 387417 - DNA, 355 bp, Homo sapiens
ccccagggcctccatttcttcatctgctttcagagacaaggatgtccccaaactgtgtggcccaagcagccggcaggacttggcaaacccagagggctgaggtcgggcctcggtgggatttgtagggagtgttgggagctctggctcaaggctggccacgttggcccctcatgcgctgacaggtgtgtctgactcgggccacacagcactggccagggctgcagagggagctcagagggccagcacagcgactggtggaggaagcctggtatgggagcatcgctaggcgaggctgtcagcacttggtgtctgtgcgttctgtctttaataaagtctcatggtgacccagctctgg

SEQ ID NO: 387418 - DNA, 231 bp, Homo sapiens
agcctcctctgacatccccagtccctaaatgagaacgtttcaccccggagtgcacgctggaaaatcttgtgacctgaaacatgagcactctgaccacgcgctcagtgaggtgggtgggatcacagggatctcccagtcaggcctcctcctatacagaagtctgaggtggccgggagagaaagaaagaaagaaaagaaagaaagaaataaggaaagaaagaaataaggaaag

SEQ ID NO: 387419 - DNA, 777 bp, Homo sapiens
caaatcctttgtctacaaacagactagttgctgttacactaaagaaaagcaagccatgggaggaggagaacatgaaaaaatagctaaataaacaacgcccagattgctgcatgggtccaagcctgcccaagaaagccaaaccaagcaaagcttctggcagagttgcggcagccaaatctgaatggtcccatctgtgcttctaccctagcttctcctcgcagagctaacagatgtttgcaaagctggaatgtccaccatctcatggataacagctgaaaattcacaccagtggaaagcacttctgcagaacaccaacgtcagcaaagacctcaagtctaacagaatggtcttcttcatgtaaagcaaagggaacagagggaggccaccattgattgggaaccactctgtgcctggtcctgtgctagcagcttccacgtgtactttatttaacacccgcaacaggcccaggaggagctgaagctccacgcagtcgtgagcagactcctggaatctcacatatgcctgatgtgagatgcatagcagcttccagacaaactctttagaatttctcaacattgatgctgtgggccacaatggttggagagaacttcccagagattttcgcctttgcagcagcttctgaactgtctctagaacttccttgggtctattggctgagacctttggccaaggtgtccctgattttctctctgcttgccctaccaatagtaagcctcaatcctgtttctaaaaaatggtttcatacttggaatatac

SEQ ID NO: 387420 - DNA, 425 bp, Homo sapiens
tctaggctcattcaggtacggtgctagaggaaagccaccttggggcggcaccgcatatgggagacccacagtccactgcacactctttcagtgggccaggcgctgcggtgcatcctacatagggacaagcctcacaaaatcacagctgggcaggctgcagcatttgacactggtacagtatagcaatggcaaattatcataaataatgtggcataagtaaaatataatttacatagaactacatatttgggtcctttacctaattgctggcaacagtgtctttgtatagttgtcatgccttacattttcctcatgcccatgctctatccagaccctctctgctctggtagagcacaaatgatattctccttaatactcttcccaccatatctggaactaatttatcttttcccctgagctgcagg

SEQ ID NO: 387421 - DNA, 337 bp, Homo sapiens
taaatgaaaacatgtctcatcctgttaatggtggtaggtcactctgacttgaaactttgaaattgctctggactttttcctctctctctccttccacctctaggggattctcctatacaattccatctccttgtaatttcacctttaaaacagctgttgaaaggctggttcacctccagtcttactctttcaacgcatctgtcccgctgctgtcacatcactgtcccaagataaagcttcagtcatgtcattcctgaactcagaaaccttaaatagctcctcactacttattaacaaaggtccaaaccattaacttggcatttagaggcccttactg

SEQ ID NO: 387422 - DNA, 263 bp, Homo sapiens
acctgggtctccacctcccccgagaagctctatgcccctattcattctgtaacctcaggataatataaaaacctcaaccatctggtccctcctgtgagtctcacacttcggatatggctcgtgtgtccatgtgcatgttaataaatttgtatacctttttttttttttttttttttttttttttttttttttttttttttttttttttcacaaacgcgttgtattcagagaggaggagaggaaaagagggggggggggagggg

SEQ ID NO: 387423 - DNA, 705 bp, Homo sapiens
taaagtgctttcaaattgattatagatattccttaaatagcattttctaacattacctgtcttagtaaatatcgctataactttttctctcccggtttctctttcagtaaattagaaatcactttacttaagtttaataagtgcctttcacatcctcattttgaggaaaatgatttctgccatcctaacataataaactgggaaaggtacaccgaggtgacatgctgtgcctgggccagcttagtcaatgaggcagcagcagcaaggactgagtttagcatcctgatgtttgtttcttcaagcaagaattaaacgcaaaattaaacactgactcagattttaagaaataacttttgagaaatagaacaaatgaaatcagtttctccaccacttaagtatatctcttagagatctacagcctccctttaggggacatacaaagtcagttgtgttgcctttgttgagtcccaccttatattcaagtaggtatgactacaaattttgaaaatagattgtcacacaataaactggagtttatggaaacatcagtagaaggaaatacaacattccatccctttacagagatcatttacttgcaactcaggataatttgtcatgtgtattatctacttatgcttgccactcacatgcagagaacttttataagaaggctggaaaaagaggggtgtagaggctttatgttga

SEQ ID NO: 387424 - DNA, 272 bp, Homo sapiens
aatacttacttggtttgtgttagtgcttgtaattcgcccccagaatgtgtacacgttctggatgcattaaagtctggcctgtatccttaaagggccatcgctgtgctgcctgccctcagcaaggacacactttgcagacccacagaggctccgcctccacctcacaccaaagaaagggaggagtccaaagggcatcagtgccattactcacaaaatgataaatacacccttattctgaaccacgtggagtcatatggtttgtgatccctgtc

SEQ ID NO: 387425 - DNA, 336 bp, Homo sapiens
ctctgctgtcatcctaggtacccagacgcccagacttgaagaagcaggggatacatctagactagagttccttcctagagaaggagatgctgccaactggccaggggacagatctcagagaagtgttgtgtatgcaggaacctcaacctggggccagggctgtttgcacatggactgggtgggtatccctttgcaggggcaggctctcttctttcctcctccagcaagaaggggcctggtttcatggtttaccaacaagagtggtgcttttgtgctgttcataagccgtggcagccagtctcctctttccttcttctgtgaacaagtgatttctgc

SEQ ID NO: 387426 - DNA, 308 bp, Homo sapiens
tggctttagataagttacagagtagtttaggcccacatgatttaagctcacccacagttctttgttgatacttgaggatttcatctgaaaagcatcctgttcatactctgaaaatatttctttcatcttagtactcccactcattttgtgtgtgtatatgtgtatagattattttattgttccacatatatgtatatttattttttgtccacttgctagggaacctcattttttttaacaagaaaatacttgtgtgataaggtcataaaacccaagagttgggaggaatattagagacctactttatt

SEQ ID NO: 387427 - DNA, 529 bp, Homo sapiens
ctgtagctgggattacaggcacgtgccaccacgcccggctaatttttgtatttttaatagagatggggttttgccatgttggccaggctggtctcgaactcctgacctcaggtgatccacccgccttggcctcccaaagtgctgggattacaggcatgagccaccgcacccagcccctatctctatttaaaatgagaaaaaaggaatctatttctgggagtctctctgaaccctctagtttaggaggctgcccaattaaaaaaatatatttaaaaacagaatatatttccaaaaagatgaaactgacacatactcagagaaaatgtgaacattctaaaaagacaaagaaaaaacaaaaattacttgtcttatgactaaaaagaaatagtaacattttgttgtccttccaggattgtttttctttgttcatattacctaaaaattttaaaaaagctgaaacccagcacggtactgtgtggccaccatgccatgtctagagccaggctcccgttgttggccatgccttgct

SEQ ID NO: 387428 - DNA, 769 bp, Homo sapiens
tgcctaggaatgaaaaactcataacagcaaacagaagcagaaatataattataattttatgaaaccttaacaacattgaggccacatgacatgacataatggcattaaagaactacagatctttaaggaaacaggtgttaagttaaagctgcctccaaagatagtgaactgtaacctaatttaatgtataaacaaactgtaacttaacataagagttaggttacaagtgtaacaaatagctgagtctcagccaatcatagcagctgaaacctccagccaattggaggctaaagcctgccaaaacatgaccaaataaggcaaacacataactgtagccaatcaggctatttctgtatctcatttccttttctctgactataaatatagcctgcacaacctccactatggggtggaacattctgcaccacttttggtcctgagtgttccctgaacctttttctactggattaaactctgttaaatttaacttgtctaaggttttctcctcttaacacaggcaacacttctaaataaaaaagacaatagcagtcccatttctccactctacaattacaatatgaatcctagacagtccattcttccgcatactttcctttggagcactggttctcagaggtgattctgcccctgggagaacatcagataatgtctggtgacatttttggttgtcacactgcggggaggggggatactggcatctggtgagcagaaaccagggatgctgctaaacattctgtgacacacagga

SEQ ID NO: 387429 - DNA, 618 bp, Homo sapiens
cacccagctaattttttgtacttttagtagagacggggtttcaccgtgttagccaggatggtctcgatctcctgacctcatgatccgcccgccttggcctcccaaagtgctgggattacaggcgtgagccaccatgcccggcctgtattagttatgtcaagaccaaatgctgtcaggctagagaactggggaaagctgatgttgcagttccagtctgaaaggcatcggctggggaattccctcttactcaggagagctcagtcttctgatctattcagaccttcagctgatgggatgaagcccatcatatgggatgaagctcccctatgttatggggagcaatctgctttactcgaagtccgcccatgtaaatgtcaatctcatccaaaaacaccttcacaaaatcatccaaactatggtttgaccaccaatctgtcaaaccgtggtccagccaagttgacacataaaattcaccaatacaggacccataccctcacgagggttcaagtctgttgcgggcctgggtgatacaaaagtacacaaatgaaacaagtgcagattgtggaaatggtatgaaggaaagcaagttgttaagagaggaaacagaggggaacctgt

SEQ ID NO: 387430 - DNA, 701 bp, Homo sapiens
catgtgaggagaaggagagagaactgcggctttttggggtagccagatctcgtggctccctgagccaggtttgtgactccctctttggggctctgtggttcctggcatcactaaacttccaggcatcaccgtgctccccttgtccagacacggtacccgcagcctgcatgctgtacatctggtccagcctcagtctttcacggagctggcacctctgctggctcctggagctacccacccgccacagcagctggcgagcctggctgtgtgcagcggatggacccagcacttgcttgcccacgcatttttcaccacttcgtgcctggcttgtttttggcaggtgtgggatcccggccagtagcaaaagccaagtgcagcctgccagacccagtaggcagaacaagcccagcaggccagagcaaaaacttgggcgaaggtaccaccagccacagaggtttccagctggtgaagtaacaccccaaagatcttgtgatataactggatgtattctcagaaatacggaacatatttattcagatatggctaagcaaaccgggaaacaaaacaagaacatgattaaaacattttattctcaaaattctgaggtctcagcagacaacatgcatacttgaaactatcatggttcaaataaatacacaaataaataaatcattatggtgtctgacaatactctcaactgt

SEQ ID NO: 387431 - DNA, 493 bp, Homo sapiens
  misc_feature (491)..(491): n is a, c, g, or t
ccgggactggggaatctgtagggtcaatggaggagttcagagaaggtgcaacatttctgaccccctacaaggtgcttgctacctgccaggcaccctttccataccttgtctcagttcagctccccaccttggataaacaagaaaccttggttgcagaggaaaaaagaggctggaaacaaaggggtagaaatggggtagcgggggagattgcctgatcaactgccaaatggtacccagttctggaaaagcacaaaaaatgtgcacacacgggttcttcccactttaacccctgaggaatctgaggcctgctcctgaaacagactgggcagtggctagtgactctaggtataggagtatccagccctgctcacccaggctagagctttggggaccaagaggaaagaggtgcctgtgggggtagaggacagagtctattttatattgggtttaatttaagcgggcgaagcttatttcccttagttaaggttaantt

SEQ ID NO: 387432 - DNA, 284 bp, Homo sapiens
ctgtgtgtgtgtgtgtgtgtgtgtgtgtgtgtgtgtgtgtgtgtgtgtgtgtcacaaagtctttcccagactggagtgtagtggcgcaatctcaacttactgcaaccacctcctcctgggctcaagcgatcctctcgcctctgcctcccggaatgtttgagattacaggcgtaagccagtgtgcccagcctatcctcagttcttagtggtactgtttgtattgcttctgttttctttgcccttctctggtgtctgttcttttctgccatgagtgtttctgtcct

SEQ ID NO: 387433 - DNA, 335 bp, Homo sapiens
accagaggtgcacacaaatatacctgcaataaagcatattctagctattttatattagttaaaattttgatagcaataaagtatctattaatatgccagttatttatttcttatatctagctaatctcattaataagcaaaacaacccctgaagcaggtattattactctttttttacagagaaggtaactgaggcttaaagaggataattaccaaattgcccggtgacaaacagttaggtagtatgtactgaatatggtgactgcaatctaacccgtctgtgtgattataatgcctttttgtaacttggtaaatgttaacaagtttttatactt

SEQ ID NO: 387434 - DNA, 426 bp, Homo sapiens
ctcactgcaacctctgcctcccaggtttaagcgattctcctgcctcagtctcccgagtcactgggactacagatgtgcgccaccacacccggctaatttttgtgttttcagtagagacggggtttcgccatgttgtccaggttggtctcaaactcctgacctcaggtaattcactcgcctcagcctcccaaagtgctggaattaacaggcgtgagccactgcgcctggccagaaaaacttttttattctctggatagtttagtttcactactaagatgtggccttctgtcaggaattgctagtgaatatatcccaaggaaccgatgagcacaatttccaccctccaagaacttatgactgtgacaaatccataaactcttctatttggtagtggattccaggccacatgtgagttctgggaactgt

SEQ ID NO: 387435 - DNA, 274 bp, Homo sapiens
cacatatccctcccccagccactcagttctctttctcatagacacttaacattattaacttctagcacagtgtcttaatacattatgaaccggaaagtctttagatggggcaaactcactccagtggccacattccccaccatttccctataatattataccagactgtatcatgattatgttatctgcctggccattgtaggaattgtgtctgtgatccagttggtgtggactggagtgtttggaaccttatggaacgggagggggatgggga

SEQ ID NO: 387436 - DNA, 348 bp, Homo sapiens
tgtgtccatattgcagacggcaactccaaactaacatggcagtcagactgtgtgatgtggcttctctgcttagaagtggttcgtgggcagcagagccttggaccggggtctgtgggatttttcttaaattctgtaggctacttttttttagcatgttggaggagtgctgaggccataccaaacacttgaatctttcatttgtcctaaagtatcagttttcaattttgcccactagctatggcagactgatttttcataatgagtttgcaccttgtctttctattttccccatcctcactataagactagcatgttggtcctccgagtattgcgtcccggtattgcggt

SEQ ID NO: 387437 - DNA, 661 bp, Homo sapiens
gggtcccacaccctacacgttctcccttatccttggacaaaagcatgaacacacccagaattttataaggctgtgctcaccgttgtcttcaggagacacaatccaaaaatataagtccataagatacttgaaacatttcaaacatattattcagatgaaccacgaggattacgaaaccattgaagcccattggaaatgagaaaagtgagtctatttagacactagcatgcccaaatgtgtgctcattgctgtggcacccctgaaatgagtgagatcttagaatctgaaaatgagcacatgcctagattctcaacaagaaagtgccgggttagcaaatgaatgaatggttggtgggaactcattcatttattcacttattcatacattcagcacatttactgagcacctactatatgccaggcactgttctgggcactgaaggcatgcagggagcaaagcagatgaaaatccccacccatgtagtgagagctggcattttagtaagagagacagataaaaagcaagatcaatagaacagtacattctcatgcctgtaatcccagcactttaggaggctaaggcaggcggaacacttgaggtcaggagttcaagaccagcttgacccaacatggtgaaaccctccttctctactaataataca

SEQ ID NO: 387438 - DNA, 281 bp, Homo sapiens
aggaaccatgttcataaagaaataggtcataaagtgaaatatgtaagtgcatatcacttacaattgtgtgcatctgagtttataattttggttatctgaaataccatggcagataactcaagttttctgatgagatcaatgaaaacccacaatgggtcacaacttcatatgcagtcactcttagagctgaggtggagaaattttatctttcacaaatatagatgtacaaagaggacatctcttcatttattaagtttcagtgtttacacatactaattaca

SEQ ID NO: 387439 - DNA, 2303 bp, Homo sapiens
tctggggcaaccctggcagggcccatccctgcctggtcccgctgagctcgggcacagaccgggcaccaggctcggtgtggagtgtgatggggagtggtgtccccggaggtgtttctgggaggtgctttttactcgtgttgaataataacaataacaagaacaagatggaaagccttgttgtcacctgaagcacgccaggtccagattgaccaatggttttctcacttcaggggccaacccacgccccctttctgctgaggtttgggtgccatctagtggtgggatgggacttggttgactacatttaaggtaaggtggacccagcaactcccagaaacaactccggggacaccactccccatcacactccacaccgagcctggtgcccggtctgtgcccgagctcagcgggaccaggaagggatgggccctgccagggttgcccctgcactgtgcattctcgcctgggaggcacaagttctttcatctgcttttccttcagaggtgctgagcccacgccatagcccctgtgggatggtgggggagggggcgacccgaacaacagtgcagtcggtatcgagattggggagaggagcgagtccaaggagaaggtcatgagtttctttttactcgtgttgaataataacaataacaataacaatatggaaaccaccgcaaacttggagaaaagttgtaagcacagtaaagagaagcttccttctgagtcacttgagtggttgccgttctggccctgcaccctctgtgctttgggacggcgtccaacccgcattcatgtcaggagtgagtcgcacgtggctttgtggtcatggcgacttaatccgcctggacggtggctccgtctccctgggcttagacgaccttggcacttctggagataagcccatggctcccaggttgtgttcatgtgacgtttccttgtggtaggttctgggtctgcgttttgtctaggagtgtcacaggatggacactgcctcctggcaggggctgcccaatgcagttagcctcctgctggtgttctctcttgttgcttggtgaaggtggccctggtcagcttctccactgcccagtgaacgacccctttgtaatgaatgagtggggaggtagtgtgaagcgatgccaatatcccatccctgtcaaactgcctttactttttccttccttccttgctcccacctgtgtggatcctggtcccttcttgtattcagggctgtggtctgttatgacatttactctcaggctcaggtcctgcttgtttggcccgtgggagccccttcttctgccttttgtgttttttttgttatgtacctacagttctttagctgtttctttactttctggtgcaaaaagatgttcaagccttattttatacttgcctgcccctttctctttcatttattggagtgagctgcagctctaagaagacctgttcttttgaatggagagtagcatcaggaaccaggatgtgggtgcgaggcgtgctcctggctgttgcagattgctgcacccgggagctcttagtggacagagctagaggatatgtgcacgtacttccatctctctctctgtctccgattttagcccagcaccacagggtacgttccagtttttctctctttccatagctgtaaggccctttctgggaatggttctcattctccttaatctattattgggtcagttttcctgcatgtccccagcctcccatcactgccacccactccccacagagatgccctgctcatccgactggggctttgactcccacactgtgtacccctcttgtgtggacgccctgctgccaaaaccttcagcaaacagctttccaaatggaagttgtcactgtcagggcctttacaatcagcaacagcaaaatctacatgctgctgagggtcctgcctcattaagatgcaataaatatgtaagtacataaaaacagcaatagaagaaacgtaatgctttattctcaaatatgatgtctacatagaaaagccaaaattattaagaatagtaagaattcacccagcactttgggaggccgaggcgggtggatcatgaggtcaggagatcgagaccatcctggctaacaaggtgaaaccccgtctctactaaaaatacaaaaaattagccgggcgtggtggcgggcgcctgtagtcccagctactggggaggctgaggcaggagaatggcgtgaacccgggaagcggagcttgcagtgagccgagattgcgccactgcagtccgcagtccagcctgggcgacagagcgagactccgtctcaaaaaa

SEQ ID NO: 387440 - DNA, 1828 bp, Homo sapiens
tccgaggatccgatagcattcagcaggcgtgctgagcccacgccatagcccctgtgggatggtgggggagggggcgacccgaacaacagtgcagtcggtatcgagattggggagaggagcgagtccaaggagaaggtcatgagtttctttttactcgtgttgaataataacaataacaataacaatatggaaaccaccgcaaacttggagaaaagttgtaagcacagtaaagagaagcttccttctgagtcacttgagtggttgccgttctggccctgcaccctctgtgctttgggacggcgtccaacccgcattcatgtcaggagtgagtcgcacgtggctttgtggtcatggcgacttaatccgcctggacggtggctccgtctccctgggcttagacgaccttggcacttctggagataagcccatggctcccaggttgtgttcatgtgacgtttccttgtggtaggttctgggtctgcgttttgtctaggagtgtcacaggatggacactgcctcctggcaggggctgcccaatgcagttagcctcctgctggtgttctctcttgttgcttggtgaaggtggccctggtcagcttctccactgcccagtgaacgacccctttgtaatgaatgagtggggaggtagtgtgaagcgatgccaatatcccatccctgtcaaactgcctttactttttccttccttccttgctcccacctgtgtggatcctggtcccttcttgtattcagggctgtggtctgttatgacatttactctcaggctcaggtcctgcttgtttggcccgtgggagccccttcttctgccttttgtgttttttttgttatgtacctacagttctttagctgtttctttactttctggtgcaaaaagatgttcaagccttattttatacttgcctgcccctttctctttcatttattggagtgagctgcagctctaagaagacctgttcttttgaatggagagtagcatcaggaaccaggatgtgggtgcgaggcgtgctcctggctgttgcagattgctgcacccgggagctcttagtggacagagctagaggatatgtgcacgtacttccatctctctctctgtctccgattttagcccagcaccacagggtacgttccagtttttctctctttccatagctgtaaggccctttctgggaatggttctcattctccttaatctattattgggtcagttttcctgcatgtccccagcctcccatcactgccacccactccccacagagatgccctgctcatccgactggggctttgactcccacactgtgtacccctcttgtgtggacgccctgctgccaaaaccttcagcaaacagctttccaaatggaagttgtcactgtcagggcctttacaatcagcaacagcaaaatctacatgctgctgagggtcctgcctcattaagatgcaataaatatgtaagtacataaaaacagcaatagaagaaacgtaatgctttattctcaaatatgatgtctacatagaaaagccaaaattattaagaatagtaagaattcacccagcactttgggaggccgaggcgggtggatcatgaggtcaggagatcgagaccatcctggctaacaaggtgaaaccccgtctctactaaaaatacaaaaaattagccgggcgtggtggcgggcgcctgtagtcccagctactggggaggctgaggcaggagaatggcgtgaacccgggaagcggagcttgcagtgagccgagattgcgccactgcagtccgcagtccagcctgggcgacagagcgagactccgtctcaaaaaa

SEQ ID NO: 387441 - DNA, 2337 bp, Homo sapiens
tctggggcaaccctggcagggcccatccctgcctggtcccgctgagctcgggcacagaccgggcaccaggctcggtgtggagtgtgatggggagtggtgtccccggaggtgtttctgggaggtgctttttactcgtgttgaataataacaataacaagaacaagatggaaagccttgttgtcacctgaagcacgccaggtccagattgaccaatggttttctcacttcaggggccaacccacgccccctttctgctgaggtttgggtgccatctagtggtgggatgggacttggttgactacatttaaggtaaggtggacccagcaactcccagaaacaactccggggacaccactccccatcacactccacaccgagcctggtgcccggtctgtgcccgagctcagcgggaccaggaagggatgggccctgccagggttgcccctgcactgtgcattctcgcctgggaggcacaagttctttcatctgcttttccttcagaggtgctgagcccacgccatagcccctgtgggatggtgggggagggggcgacccgaacaacagtgcagtcggtatcgagattggggagaggagcgagtccaaggagaaggtcatgagtttctttttactcgtgttgaataataacaataacaataacaatatggaaaccaccgcaaacttggagaaaagttgtaagcacagtaaagagaagcttccttctgagtcacttgagtggttgccgttctggccctgcaccctctgtgctttgggacggcgtccaacccgcattcatgtcaggagtgagtcgcacgtggctttgtggtcatggcgacttaatccgcctggacggtggctccgtctccctgggcttagacgaccttggcacttctggagataagcccatggctcccaggttgtgttcatgtgacgtttccttgtggtaggttctgggtctgcgttttgtctaggagtgtcacaggatggacactgcctcctggcaggggctgcccaatgcagttagcctcctgctggtgttctctcttgttgcttggtgaaggtggccctggtcagcttctccactgcccagtgaacgacccctttgtaatgaatgagtggggaggtagtgtgaagcgatgccaatatcccatccctgtcaaactgcctttactttttccttccttccttgctcccacctgtgtggatcctggtcccttcttgtattcagggctgtggtctgttatgacatttactctcaggctcaggtcctgcttgtttggcccgtgggagccccttcttctgccttttgtgttttttttgttatgtacctacagttctttagctgtttctttactttctggtgcaaaaagatgttcaagccttattttatacttgcctgcccctttctctttcatttattggagtgagctgcagctctaagaagacctgttcttttgaatggagagtagcatcaggaaccaggatgtgggtgcgaggcgtgctcctggctgttgcagattgctgcacccgggagctcttagtggacagagctagaggatatgtgcacgtacttccatctctctctctgtctcatctattcacagctgggaatgatactaatacctccgattttagcccagcaccacagggtacgttccagtttttctctctttccatagctgtaaggccctttctgggaatggttctcattctccttaatctattattgggtcagttttcctgcatgtccccagcctcccatcactgccacccactccccacagagatgccctgctcatccgactggggctttgactcccacactgtgtacccctcttgtgtggacgccctgctgccaaaaccttcagcaaacagctttccaaatggaagttgtcactgtcagggcctttacaatcagcaacagcaaaatctacatgctgctgagggtcctgcctcattaagatgcaataaatatgtaagtacataaaaacagcaatagaagaaacgtaatgctttattctcaaatatgatgtctacatagaaaagccaaaattattaagaatagtaagaattcacccagcactttgggaggccgaggcgggtggatcatgaggtcaggagatcgagaccatcctggctaacaaggtgaaaccccgtctctactaaaaatacaaaaaattagccgggcgtggtggcgggcgcctgtagtcccagctactggggaggctgaggcaggagaatggcgtgaacccgggaagcggagcttgcagtgagccgagattgcgccactgcagtccgcagtccagcctgggcgacagagcgagactccgtctcaaaaaa

SEQ ID NO: 387442 - DNA, 255 bp, Homo sapiens
tcaggaacgctagacattctcccagcctggcccagggaccccctttggacttaatttcctttcatcctctgcaggcacaaaagcatcaccaagggtcacatattttttccagtttgtcatcttggcaagctgaatctgagaacatgtttgttgaatttctatcctcaaatctttccaggtttgcgtcaaagaggaaaagcttacagcatttccttccgtctagcttgctaagccaaatctaacagagaataatga

SEQ ID NO: 387443 - DNA, 345 bp, Homo sapiens
ctaagatcaaatgcaggcaaaagtggtgaattttaccacctgtttgtaagtctgggtttataactttaccgtaaatcacctagaacacaggctagccgaatcggggtgtctggtatggcaatatcccgagagctaacctggggctggggcaatgttctgtggctgctgcacttgcctctaacaggccagtttaaaacgtccaggtctcagggccacattctccaggacacagcagggagctcacagtagctcaagacccggcccagcctccatccccagccttggagctgtcagtgctcccaaaggctgaaagcattcggtcttggctgagtggacagccccctt

SEQ ID NO: 387444 - DNA, 400 bp, Homo sapiens
tgtcagaaaaagtacccctccttttgtcacaaggcaaacctgagataaaagatttagatggcctgtaattccagcactaagggaggccaatgcatgcagattatttgagtctaaaaaagaagcctaagcaacttagggaaactgcatctctcaaacaaatacaaaccattagcctagcatggtggtgtggtggcacatgcctgtagtcccagctactcagggtggggagcactgaggtgggaggatcacctgagctggaaggttgtggctgcagtgagccgtgatcacgtcactgcactccagccagggtaacagatattttttaaaggatcttctctgttaaaaataatcaaataaacaggtggccatgaggctgaggtggctgcagtgcactcaattc

SEQ ID NO: 387445 - DNA, 358 bp, Homo sapiens
ggctcattatttttcagtaattctgctgacatgtatcatgttcacgggcactgcttcctcagcgggacaggaccaggaatacaggggcagcagacctggagtcggcagcaagctgggggctgagctgcaaagggctcgggtaccaggagaccctaatcgcttttgtcttcagcaaacatgctgcagtgcgccctcacagcacacacctgatgcagaaacccggcctttaccctgtctgccatgtgcttggtacttgcaaggtactgagaacagagctgtaggaatgaaaagtggcacgtggagggcaaggggtcggcctcggagctattgaggaaagggcaccgcaaaattctaacag

SEQ ID NO: 387446 - DNA, 214 bp, Homo sapiens
gtgatgaatacatccagttttccaaccacattccaccaggtgggtgtttggctgtgggacgcattatgtaatcttcgttgccaggaaatttaccttcctaattacattttgcaaatgttcatttgaagccgccttcttggagctcacagtaactaggaggtggctgctggaagccccagggcaccgtgggagggacaggggaacgtcccagacc

SEQ ID NO: 387447 - DNA, 760 bp, Homo sapiens
taggaaagggaaaaaacctgtgaaaaaacggatgatgcagtttttacgaataagcagcttaatgtatcttggcacccacagtaagccttgtaggagctcaaagtgcctcaggcaatctgtgagcagaatagcaattttattactttgtcattaaaccaatttcacagcagtattgtttgttaatgagcagcggcaaacgagcgaagatgtcacacactggaatagcagagagatttgtgacccaagctcacagcactaagatggaaagaccacggctataaaaaaggaaatactttgggatgaaatgcaaagtctatacagcagagcttgtgtttatgagctaccattttgctaagagctgtgagagaaataaaggtctggaaatatgcagttaaaacagggcctataaaattaaaaccaaattaaagtatagcagaggattactgcacagactgtactcgacaaaatatattttaagtgacgaggtgaaatctaaatcagttttgtttgaatttggttggtatttatgaaattcaataaaaaaaaatgaaaaaatatccaaacaaagcagccgcctcacccttgtgtggtctctgagccataaacgtgcatcactttgaggaaattcaacttgccaatccttaaataattagcaacttcttgattcacagggtgcgcccctccatcttcatgaaagccttctctgttactttatctcttcgtaaggacgttgcccatgtataataaacactcaggcgga

SEQ ID NO: 387448 - DNA, 544 bp, Homo sapiens
gtatcaacgcagagtggtcattatggccggggagtttgatctcagactgctgtgctagcagtcagcgagactctgtgtgcgtaggaccctccgagccagtgagatgaacccggtacctcagatggaaatgcagaaatcacccgtcttctgcgtcgctcacgctgggagctgtggaccggagctgttcctattcggccatcttggctcctgcatctccacattgaagtttcatgctggtgtgtctgacttggtggagtctaagtcacataactacaccttggctgcgaagaatgcttgggaaggagctcctggcttttaactttggaagataggatttatgaaatgggaaattatccaaacagagaacgacactgggcagtcaaaacagcttgccaaatggccagtgcagaggtcaagttgaatgaggtacaatggtgttctcattttacagatgggaaaactgaggtgcactgagtagctacagttggctgtactatgctctcttctccaatatttttgccatgcctcttagaagcattttgat

SEQ ID NO: 387449 - DNA, 393 bp, Homo sapiens
  misc_feature (6)..(6): n is a, c, g, or t
cgttantggcattgcaatgaatctcacatgctttttctgtaatttgaatatgagatcgtctctctcaaatcagaatataagaagccccttgaagactacatcaagtgttattcattcctagtaccctcccttccttccgaatgttgtccttctttctcctactcccaccccacaagacacatacacagacacacacacacacacacacacacacacacacacactcgtagacagggaggtatgatggcattctagatgcttggtggaaaacaatttggagaatgaaaagacaagccacgaacttggagaaaattttgcaaaacacattatctgataaaagacttctgtccaaaagatacaaagaacttttaaaagtcaacacccaatttttag

SEQ ID NO: 387450 - DNA, 626 bp, Homo sapiens
gactggccagtcctaccgggggcggggcttgtggaagactgggcgggattttgaagacctaggtcttgtggatggtgaactcacttggggcggggagggaggtggggctaccctggggtcttgggcaaagtcctcgcctggccggcttcgctacccttgtgcttgcgttgcccacaagcttgtagtcagaagaactcgcctgggagggatcgctcctgggagatccgaacgcgggagggcctggagcgcggcggcagctggatagcattcgggcccatccgaataagcgctacttgagaggctgaggcagaaggatcgcttgagaccaggagtttgagggtgcagtgaactatgatggcgccaccacactccagcctgggagacagagtgagaccctgtctctaaaagaaaaaagaaaattcaagatacagagccagacaggagcctggatggccatctttcttctgatagcaataagctggatgctgggatagaagcctgatacctcctccaaccctagtccttggcctctagtttactcgcctgaggcaagggtagagtggaggaagatttagggaaagcaagtagtccgttttattgttacggaccagagaggttgggggtgc

SEQ ID NO: 387451 - DNA, 447 bp, Homo sapiens
cacatgctgttttaattatgaagaaatctggaaaccatattccagattgtgtcggttttcagaaagatcacctacaaggcaatcaaagctgataaattttgaaagatgatgactgaagcaagggatgtagaaagaaaagaaattttagcctctggatcaaatgaggtacccattgctaatactctcaggcccacaaaactagctggaaacatatctttctgtttctttaaccctgatcaaaactgcagggcacagctgcttcacatcctagtaatctttgtggactaactgcattttgttggcacagtatatttttaaaggttatatttattgttacgtaagagtctggggattttagttctcattttactttttcttataggtcacacttaaatactataattttgaatcaattataaggaaaacaaacataagcttagatccact

SEQ ID NO: 387452 - DNA, 251 bp, Homo sapiens
gtgggacacgaggaagcaaagagaggattgggaagtcataaatacaaggagatgagttaccacggtcagaagctaagaaaactgtcttcattaaaccaccactgacacagggaaagtgggaggaaaaatgaaaatatagctatgcaaaatgactcaggagcacaaaaagagtacaagggcaatccaggagatctgtttatttagatattagtaaaagcaggacctgggtgtagagagtcagggataggctg

SEQ ID NO: 387453 - DNA, 386 bp, Homo sapiens
aagctcccacagggaacgtcaagattttaaaggacttgagtaaaaagaatactggagagagatccagaaaaagcctgcaaagaccctaaggcaagagaatgcctgtgaagtccaaggaacagcaaggcacccaacatgcatggaatagagggatcaaaggagagagtaagggcaggtaaagtcagatagggagccagatcatggatgatcttgagggctctcataaggcgtttagcttcacctggtaaggagtgggaagccattggagggttttgagcagaggagtgagattatctaccttataccttaacagagtcactctggttgctgtatttaggaacaagggcagaagcaagaaggtaagttgggagcacattgccatttgc

SEQ ID NO: 387454 - DNA, 222 bp, Homo sapiens
  misc_feature (112)..(112): n is a, c, g, or t
  misc_feature (134)..(134): n is a, c, g, or t
  misc_feature (201)..(202): n is a, c, g, or t
aaaaaaacaaaacaaaaaaacaaaaaaaactttgactacttcacctaccctcttaattcttcattaaagaatgaggcttaattaaggcatacttagtcgtttagatgggttnatggaagtcaactgcttagttntgcctgaagaaagtttcgggttttcttttttctgtttttgttttttttcttttttggtctttcttgnnggactgggctaaaactgtag

SEQ ID NO: 387455 - DNA, 709 bp, Homo sapiens
taagaaatttttgcccaccttttctagttgttcccagaggaagagttcagtttgataccagctaccatgtcatgccctgaagcagaactcaactccttttgaaagcggatggcatataaagcaatcagtattttaaaaactcaacattcaacacttaatttgccaaaaaaaatgaccataaaaaaataaaaacagcctttcactgcctgactgccgccgtcacgggtcacattcatgtgcccgggaagggcctgtcccagtcggctttgctctatcaccacagcgtccccacttggctgaagttgacatctgacaatgtgaaggagcagatttacaaactgaccaagaagggcctgactcctccacaaatcggtgtgatcctgagagactgacatggtgctgcaaaagtgcgttttgtgacaggcataagaattcttaagtctaagggacttgctcctgatctccctgaagatctctaccacttaattaagaaagcagtcgctgttcaaaagcatcttgagaggagcagaaaagacaaggatgctaaattccttctgattctgatagagagccggattcaccgtctggctcgatattataaaaccaagcgagtcctccctcccagctggaaatatgaaccatctacagcttcgccctggttgcataaatttgtctatgtactcaagcaataaagtgattaaaaagaaaa

SEQ ID NO: 387456 - DNA, 804 bp, Homo sapiens
agcgggtctctgagtctctgtctctctctgtctcctcacagtctgttactacttaatacagtgcttattggcctgagattggacattatttaaaagcaatttggagagttttctccatttcaggcaagaaaacatgcactatttttctgatatggcatgggacatcgaaaaatagttttgaacaaaattttgaaatttttggcccaaagaaagcaaataccccctgcaacaaacaagatgtgtcacaataagtcatgatttacaatccctttcaagactgcctgttgcccttagcaatccctaaagcaaaaacaaacaaaacaaatcttttcagcatatcttcatgaaactgtctgggatgtgacaaaactttgagaaacagttttgtgataatggttttgcactttattggtacttctccacaggaggtggtgaatggctactttcaaatacatagagctatcaaaggctaaagtcaataaaaaacctccatagaataattggagaggaaagaaaagggggaaaaaaagaacataaaacgaatgaaaaggcaagtaggacctataaatataaaagcctaaggagtatattttgggagaacagatgatgcaaagcaaaattgggaatagttattggaggatcaaggaaggcaaataaaacaataagatatatgatgcctgtcctcctgcctcaagtctagctcatcagacagtttttcattccattttgtatatatgagtttcatctgactactgccaacagaaagtgcttggatttcctgacttttttcactgtcaaaagaaa

SEQ ID NO: 387457 - DNA, 752 bp, Homo sapiens
agccctgtcagtccctggggaaatcgttacttaacctcccccacccagcccagcagaaacatcacccatctacagcatcccctccacctgtggggggattctgtggaaccctagactttcaggccagtctaacccagtgggttacaaaatgggaaactgaggcccaagaggggcaggattctacctggccacacgcattcagtgagaagcacagtggttgcaagcctgggctctggagttggacagatctggtgcaaatcctgacaaatcacttgtaagctgtgtgagcttaggcaagtggcttaacctctctgaacctgtgtctttaccagtcaaaataaggattataaacgtatccacctcaaagggttgttgtgaaggaagtgcacagcttggtgctgcggtaagaggtcaagaactattcgcaatcttttcctgggttgtttctgccgggtgggggtgtggggcaaatgctgtctgcctgggtacagccactcactgcttccacgatggaaagatggccagtccgctcccaggggcagggccaaccacggtcgcccaggcccaggtcttctacctcccagcctccgggagaacacagcccaggtctgggcctctcctgcattccaccctgtaggggtggccaccagccctcttagaagccaaggcactgtgtgactcccgtgatctcgtgtgacccccagctcttgctgatgctgtcttcatatcctgatgaaagactctgacctctg

SEQ ID NO: 387458 - DNA, 354 bp, Homo sapiens
ttttttagcattgaattctgttgtgtgaatatcagacaattaatcactccgtgctgatgcacatatgcatgtgttttagttgagggtattaggaacagggctgctatgtaaattccagaaaatgtattggtattggtgaaacatgtacaaatttctgttgggaacatgtgtaataatcacattgttgtgttgtatgtttacgtctcttcagctgtaggtgatattaccagttttccaaaattgtaccactttttacttgtaacacttttcatgccaacaagtaacgtgtgaatttcctagggtacccacatccttgccaacacatggtttttttttttttttttgagacggagt

SEQ ID NO: 387459 - DNA, 1178 bp, Homo sapiens
agcggtaaaagttattagttctaaagggagaggtagattccgatacgataatagttagggaatttaacaccctactctcaggattgaacaaataatctagacagaaaatcaaccaaaaaaaatagatttaaactgtattttagaccaaatgaacctaacacacatctacagaacattttacctgacagatgcagaatatatattcttctcatcagcacatggatcgttctccaggacagatcatatgttacgccacagacaagcctcaaaatatttaaaaagtcaaaatcaatcacatatcttatcagacaacattggaatgaaactagaagtcaataacaagaggaactttgggaactatataaactcatgtaaattaaacaccatgctcctgaatgaccactgggtcaatgaggaaattaagataaaaatccaaaaatttcttaaaacaaatgaaaacaggaacacaacataccaaaacctatgggatacagcaaaagcagtgtgaagagagaagtttatagcaataaaagcctatattaaaaaatagaaagatttcaaataaataagttgatgatgtacctcaaggaactggaaaagcaaaatcaaataaaacccaaaatcaaccaaaggaaagaaataaaatcagaacagaactaaacaaaataaagatgaagaatcaatacaaaggatcaacaaaacaaaaagttagtttttaaaaaatacaagaaaaattgatgaaccactagctatactaacaaaaaaaatagaagacccaaataaaatcagaaatgacaaaggagacattacaatgaacacacagaaatacaaaggatcattagagactgttatgaacaactatacactaataaattggaaaacctagaggaaataaagtcctgaatatatatatcctactaagattgaaccaggaagaaacagaaaacctgaacagacaaataatgagtaatgagattgaatcagtaatgaaacatcttccaacaaagaaaagccgaggaccaaatggttttactgctgaattttactaaaattataaagaacaggtaacgtcaattcttctcaaactattccaaaaagtggaagaggaaggaattcttcctaactcattctatgaagccagaattaccctgatatcaaaaataagacaaggacatgac

SEQ ID NO: 387460 - DNA, 390 bp, Homo sapiens
acttttgaaaagtggtttctctttcttctgaatgatcctgacatgtacatttacctctatcatggcaaaaggccgtcctctgaaagtcacagctgtattagagtgttagcttttggagacaaagacttcagtttattaacctgtgcagttcccacagcatatgtcctctgtggaatctgtcattcatcttttgtctctgtgctctgcctccttaattggagactatcattcttaatggtctgtcggactaggctgtctgagtcttcctttcagaattctgttgctttggtgtctctctacactattagtctcaggaagcaccctacattatgctgctgccctgaggtttgggctgttctagaagcatatccttttctatcagggactgcc

SEQ ID NO: 387461 - DNA, 432 bp, Homo sapiens
gatggggaacctaagaatgtaaagactcagtttcctgctctgcaaaatggggagaataattggagccactttagtgggaagttatgaaaattaaataaggtatacctataacctctttgaacacctcctggcatagaagatgccattcttggctattttcctgttacttttattagtggagttgggtcaggtgggaatggattagaagaattgcatgtggtggttaaaggggatttttatctttaaacttaatgcttttaattttttcaagaaaatatgagtatattatctgtgtgctttaaaattgatttttaaaaagggagataacaataataaaagtccaatattgactacttgggaatctgcaagtagaattatgacattttctctttatctgacatgtcctcagtttttagtcatctctgaagtctg

SEQ ID NO: 387462 - DNA, 484 bp, Homo sapiens
gtcctggtaatacctctttctttcactctctcattgcactttccccaccctcttccccactttgtatgtcctttcctaatctaacctgttagttttgcataattttgtcagctgcagaaatgatcaggtgctctttaggatatgtacagtggtagtgtttaaaaagtagttttaagagacatccttgttaagagtgaagaaaaattgggccaggcgcagtggcacacacctgtaatcccagccctttgggaggccgaggcaggtggatcacgaagtaaggagatcgagaccatgctggctaacacggtgaaaccccgtctctactaaaaatacaaaaaaattagccagacgtggtggtaggtgcctgtagccccagctactcaggaggctgaggcaggagaatggcgtgaacctgggaggcagagcttgcagtgagctgagattgtgtcactgcgctccagcctgggcgacagagtgagactcc

SEQ ID NO: 387463 - DNA, 276 bp, Homo sapiens
ggaggcagctgttctaatggaaagaatgtggttgctgaatcgagaactgtggcccaaggcttggtcccaaactcttctatagctgcatgaccttgataatgagttagcttcactgagctttggtttcctcatctgcatgagataaagcaatgcacttccacatccaacagcagtgcctggcacacagggagtgcaccgcaatggccgcttttatttgctcttccagttggcccccttcctagaggatgggccaaaagatgccaaaaaagaggacac

SEQ ID NO: 387464 - DNA, 472 bp, Homo sapiens
gtatgaatcacatcactgcattgtatgattccagggctctcttgcccatggctcgtgcatgaactaggaagtgatcatagttcctgttcttgttttatgaaaacaatagtataccttcccccaacctaggcaggccattcaggacgactaccctggaggtgctctgggtggcttaaagcaccgtctttgcacagtgtgttagagagcactgtgccctgaggacttcgggagagctgcagaatgagtgttcagaataatcggcactcacctttgccctcatgttgtgagatggagatattttaacctggccataatatgctttaaaagttggggggtgtttgtctgcttttgcttttatttccttcctgtgctggactgggactcccccttatctaactggtacataccactctgcccaagcagtgcgtgtgcacacacacatcccctacagctccctgctggcatctccttc

SEQ ID NO: 387465 - DNA, 1491 bp, Homo sapiens
agaggggggagcgcgccgggcgcagggagctgagtggacggctcgagacggcggcgcgtgcagcagctccagaaagcagcgagttggcagagcagggctgcatttccagcaggagctgcgagcacagtgctggctcacaacaagatgctcaaggtgtcagccgtactgtgtgtgtgtgcagccgcttggtgcagtcagtctctcgcagctgccgcggcggtggctgcagccggggggcggtcggacggcggtaattttctggatgataaacaatggctcaccacaatctctcagtatgacaaggaagtcggacagtggaacaaattccgagacgatgattatttccgcacttggagtccaggaaaacccttcgatcaggctttagatccagctaaggatccatgcttaaagatgaaatgtagtcgccataaagtatgcattgctcaagattctcagactgcagtctgcattagtcaccggaggcttacacacaggatgaaagaagcaggagtagaccataggcagtggaggggtcccatattatccacctgcaagcagtgcccagtggtctatcccagccctgtttgtggttcagatggtcatacctactcttttcagtgcaaactagaatatcaggcatgtgtcttaggaaaacagatctcagtcaaatgtgaaggacattgcccatgtccttcagataagcccaccagtacaagcagaaatgttaagagagcatgcagtgacctggagttcagggaagtggcaaacagattgcgggactggttcaaggcccttcatgaaagtggaagtcaaaacaagaagacaaaaacattgctgaggcctgagagaagcagattcgataccagcatcttgccaatttgcaaggactcacttggctggatgtttaacagacttgatacaaactatgacctgctattggaccagtcagagctcagaagcatttaccttgataagaatgaacagtgtaccaaggcattcttcaattcttgtgacacatacaaggacagtttaatatctaataatgagtggtgctactgcttccagagacagcaagacccaccttgccagactgagctcagcaatattcagaagcggcaaggggtaaagaagctcctaggacagtatatccccctgtgtgatgaagatggttactacaagccaacacaatgtcatggcagtgttggacagtgctggtgtgttgacagatatggaaatgaagtcatgggatccagaataaatggtgttgcagattgtgctatagattttgagatctccggagattttgctagtggcgattttcatgaatggactgatgatgaggatgatgaagacgatattatgaatgatgaagatgaaattgaagatgatgatgaagatgaaggggatgatgatgatggtggtgatgaccatgatgtatacatttgattgatgacagttgaaatcaataaattctacatttctaatatttac

SEQ ID NO: 387466 - DNA, 2984 bp, Homo sapiens
agaggggggagcgcgccgggcgcagggagctgagtggacggctcgagacggcggcgcgtgcagcagctccagaaagcagcgagttggcagagcagggctgcatttccagcaggagctgcgagcacagtgctggctcacaacaagatgctcaaggtgtcagccgtactgtgtgtgtgtgcagccgcttggtgcagtcagtctctcgcagctgccgcggcggtggctgcagccggggggcggtcggacggcggtaattttctggatgataaacaatggctcaccacaatctctcagtatgacaaggaagtcggacagtggaacaaattccgagacgatgattatttccgcacttggagtccaggaaaacccttcgatcaggctttagatccagctaaggatccatgcttaaagatgaaatgtagtcgccataaagtatgcattgctcaagattctcagactgcagtctgcattagtcaccggaggcttacacacaggatgaaagaagcaggagtagaccataggcagtggaggggtcccatattatccacctgcaagcagtgcccagtggtctatcccagccctgtttgtggttcagatggtcatacctactcttttcagtgcaaactagaatatcaggcatgtgtcttaggaaaacagatctcagtcaaatgtgaaggacattgcccatgtccttcagataagcccaccagtacaagcagaaatgttaagagagcatgcagtgacctggagttcagggaagtggcaaacagattgcgggactggttcaaggcccttcatgaaagtggaagtcaaaacaagaagacaaaaacattgctgaggcctgagagaagcagattcgataccagcatcttgccaatttgcaaggactcacttggctggatgtttaacagacttgatacaaactatgacctgctattggaccagtcagagctcagaagcatttaccttgataagaatgaacagtgtaccaaggcattcttcaattcttgtgacacatacaaggacagtttaatatctaataatgagtggtgctactgcttccagagacagcaagacccaccttgccagactgagctcagcaatattcagaagcggcaaggggtaaagaagctcctaggacagtatatccccctgtgtgatgaagatggttactacaagccaacacaatgtcatggcagtgttggacagtgctggtgtgttgacagatatggaaatgaagtcatgggatccagaataaatggtgttgcagattgtgctatagattttgagatctccggagattttgctagtggcgattttcatgaatggactgatgatgaggatgatgaagacgatattatgaatgatgaagatgaaattgaagatgatgatgaagatgaaggggatgatgatgatggtggtgatgaccatgatgtatacatttgattgatgacagttgaaatcaataaattctacatttctaatatttacaaaaatgatagcctatttaaaattatcttcttccccaataacaaaatgattctaaacctcacatatattttgtataattatttgaaaaattgcagctaaagttatagaactttatgtttaaataagaatcatttgctttgagtttttatattccttacacaaaaagaaaatacatatgcagtctagtcagacaaaataaagttttgaagtgctactataataagtttttcacgagaacaaactttgtaaatcttccataagcaaaatgacagctagtgcttgggatcgtacatgttaattttctgaaagataattctaagtgaaatttaaaataaataaatttttaatgacctgggtcttaaggatttaggaaaaatatgcatgctttaattgcatttccaaagtagcatcttgctagacctagatgagtcaggataacagagagataccacatggcaagaaaaacaaagtgacaattgtagagtcctcaattgtgtttacattaatagtggtgtttttacctatgaaattattctggatctaataggacattttacaaaatggcaagtatggaaaaccatggattctgaaagttaaaaatttagttgttctccccaatgtgtattttaatttggatggcagtctcatgcagattttttaaaagattctttaataacatgatttgtttgcctttctagatttctttatctttctgaccagcaacttagggagcagaatttaaattaggaagacaaagggaaagattcatttaaaccatatttttacaaagtttgtcatttgccccaaggtcaaattttaaattcttaattttcattttatttcccattttaggtaaaagtttgcatttaatcttagaattatgttatttttgttagtagtgtggaaacttagagaacttattgtatggtgccttgcaaaaatagagatagaaagattttagcatgcataccaatatagtatattacgcaatatataagcacacctaattaacagattaatatcagtaaaggtattgctgctggaatgaagaaaatgggatacgtttgtttctttttttctattgttacataattgccatgtggacttgtttatgattattgtgtagagtagcatttaagatttaactgtagcaaaaattactttaaccgctgtatttaagttagcatgttaattaattgtgtagacattttggcacaccatcacttttaactatatcataccaatggttttgtgcccataataaaaatggaaaaacctgttgaatgttacgtattggtatctttaatttcaacagtgggtaaactggtttcccagtatacaattcattgaaagcaaaattgattaattatttccatttaatttatacacactcaatacaaaatttaatgttgactttacgtaataaagtataatgcattttcttttttactgtttatgtatagtttacaaaataaagaatcttgtaaccaaat

SEQ ID NO: 387467 - DNA, 2864 bp, Homo sapiens
agaggggggagcgcgccgggcgcagggagctgagtggacggctcgagacggcggcgcgtgcagcagctccagaaagcagcgagttggcagagcagggctgcatttccagcaggagctgcgagcacagtgctggctcacaacaagatgctcaaggtgtcagccgtactgtgtgtgtgtgcagccgcttggtgcagtcagtctctcgcagctgccgcggcggtggctgcagccggggggcggtcggacggcggtaattttctggatgataaacaatggctcaccacaatctctcagtatgacaaggaagtcggacagtggaacaaattccgagacgatgattatttccgcacttggagtccaggaaaacccttcgatcaggctttagatccagctaaggatccatgcttaaagatgaaatgtagtcgccataaagtatgcattgctcaagattctcagactgcagtctgcattagtcaccggaggcttacacacaggatgaaagaagcaggagtagaccataggcagtggaggggtcccatattatccacctgcaagcagtgcccagtggtctatcccagccctgtttgtggttcagatggtcatacctactcttttcagtgcaaactagaatatcaggcatgtgtcttaggaaaacagatctcagtcaaatgtgaaggacattgcccatgtccttcagataagcccaccagtacaagcagaaatgttaagagaggattcgataccagcatcttgccaatttgcaaggactcacttggctggatgtttaacagacttgatacaaactatgacctgctattggaccagtcagagctcagaagcatttaccttgataagaatgaacagtgtaccaaggcattcttcaattcttgtgacacatacaaggacagtttaatatctaataatgagtggtgctactgcttccagagacagcaagacccaccttgccagactgagctcagcaatattcagaagcggcaaggggtaaagaagctcctaggacagtatatccccctgtgtgatgaagatggttactacaagccaacacaatgtcatggcagtgttggacagtgctggtgtgttgacagatatggaaatgaagtcatgggatccagaataaatggtgttgcagattgtgctatagattttgagatctccggagattttgctagtggcgattttcatgaatggactgatgatgaggatgatgaagacgatattatgaatgatgaagatgaaattgaagatgatgatgaagatgaaggggatgatgatgatggtggtgatgaccatgatgtatacatttgattgatgacagttgaaatcaataaattctacatttctaatatttacaaaaatgatagcctatttaaaattatcttcttccccaataacaaaatgattctaaacctcacatatattttgtataattatttgaaaaattgcagctaaagttatagaactttatgtttaaataagaatcatttgctttgagtttttatattccttacacaaaaagaaaatacatatgcagtctagtcagacaaaataaagttttgaagtgctactataataagtttttcacgagaacaaactttgtaaatcttccataagcaaaatgacagctagtgcttgggatcgtacatgttaattttctgaaagataattctaagtgaaatttaaaataaataaatttttaatgacctgggtcttaaggatttaggaaaaatatgcatgctttaattgcatttccaaagtagcatcttgctagacctagatgagtcaggataacagagagataccacatggcaagaaaaacaaagtgacaattgtagagtcctcaattgtgtttacattaatagtggtgtttttacctatgaaattattctggatctaataggacattttacaaaatggcaagtatggaaaaccatggattctgaaagttaaaaatttagttgttctccccaatgtgtattttaatttggatggcagtctcatgcagattttttaaaagattctttaataacatgatttgtttgcctttctagatttctttatctttctgaccagcaacttagggagcagaatttaaattaggaagacaaagggaaagattcatttaaaccatatttttacaaagtttgtcatttgccccaaggtcaaattttaaattcttaattttcattttatttcccattttaggtaaaagtttgcatttaatcttagaattatgttatttttgttagtagtgtggaaacttagagaacttattgtatggtgccttgcaaaaatagagatagaaagattttagcatgcataccaatatagtatattacgcaatatataagcacacctaattaacagattaatatcagtaaaggtattgctgctggaatgaagaaaatgggatacgtttgtttctttttttctattgttacataattgccatgtggacttgtttatgattattgtgtagagtagcatttaagatttaactgtagcaaaaattactttaaccgctgtatttaagttagcatgttaattaattgtgtagacattttggcacaccatcacttttaactatatcataccaatggttttgtgcccataataaaaatggaaaaacctgttgaatgttacgtattggtatctttaatttcaacagtgggtaaactggtttcccagtatacaattcattgaaagcaaaattgattaattatttccatttaatttatacacactcaatacaaaatttaatgttgactttacgtaataaagtataatgcattttcttttttactgtttatgtatagtttacaaaataaagaatcttgtaaccaaat

SEQ ID NO: 387468 - DNA, 2261 bp, Homo sapiens
agcggagcgggagcacgagtgagcgcgggcttgagacctgctgagcagcgggacctggcggctggcgttctggtgtggggccgagaacagacccttcttctgaaaagccactggccccttgttctatgaagattcgataccagcatcttgccaatttgcaaggactcacttggctggatgtttaacagacttgatacaaactatgacctgctattggaccagtcagagctcagaagcatttaccttgataagaatgaacagtgtaccaaggcattcttcaattcttgtgacacatacaaggacagtttaatatctaataatgagtggtgctactgcttccagagacagcaagacccaccttgccagactgagctcagcaatattcagaagcggcaaggggtaaagaagctcctaggacagtatatccccctgtgtgatgaagatggttactacaagccaacacaatgtcatggcagtgttggacagtgctggtgtgttgacagatatggaaatgaagtcatgggatccagaataaatggtgttgcagattgtgctatagattttgagatctccggagattttgctagtggcgattttcatgaatggactgatgatgaggatgatgaagacgatattatgaatgatgaagatgaaattgaagatgatgatgaagatgaaggggatgatgatgatggtggtgatgaccatgatgtatacatttgattgatgacagttgaaatcaataaattctacatttctaatatttacaaaaatgatagcctatttaaaattatcttcttccccaataacaaaatgattctaaacctcacatatattttgtataattatttgaaaaattgcagctaaagttatagaactttatgtttaaataagaatcatttgctttgagtttttatattccttacacaaaaagaaaatacatatgcagtctagtcagacaaaataaagttttgaagtgctactataataagtttttcacgagaacaaactttgtaaatcttccataagcaaaatgacagctagtgcttgggatcgtacatgttaattttctgaaagataattctaagtgaaatttaaaataaataaatttttaatgacctgggtcttaaggatttaggaaaaatatgcatgctttaattgcatttccaaagtagcatcttgctagacctagatgagtcaggataacagagagataccacatggcaagaaaaacaaagtgacaattgtagagtcctcaattgtgtttacattaatagtggtgtttttacctatgaaattattctggatctaataggacattttacaaaatggcaagtatggaaaaccatggattctgaaagttaaaaatttagttgttctccccaatgtgtattttaatttggatggcagtctcatgcagattttttaaaagattctttaataacatgatttgtttgcctttctagatttctttatctttctgaccagcaacttagggagcagaatttaaattaggaagacaaagggaaagattcatttaaaccatatttttacaaagtttgtcatttgccccaaggtcaaattttaaattcttaattttcattttatttcccattttaggtaaaagtttgcatttaatcttagaattatgttatttttgttagtagtgtggaaacttagagaacttattgtatggtgccttgcaaaaatagagatagaaagattttagcatgcataccaatatagtatattacgcaatatataagcacacctaattaacagattaatatcagtaaaggtattgctgctggaatgaagaaaatgggatacgtttgtttctttttttctattgttacataattgccatgtggacttgtttatgattattgtgtagagtagcatttaagatttaactgtagcaaaaattactttaaccgctgtatttaagttagcatgttaattaattgtgtagacattttggcacaccatcacttttaactatatcataccaatggttttgtgcccataataaaaatggaaaaacctgttgaatgttacgtattggtatctttaatttcaacagtgggtaaactggtttcccagtatacaattcattgaaagcaaaattgattaattatttccatttaatttatacacactcaatacaaaatttaatgttgactttacgtaataaagtataatgcattttcttttttactgtttatgtatagtttacaaaataaagaatcttgtaaccaaat

SEQ ID NO: 387469 - DNA, 1495 bp, Homo sapiens
  misc_feature (1447)..(1447): n is a, c, g, or t
agaggggggagcgcgccgggcgcagggagctgagtggacggctcgagacggcggcgcgtgcagcagctccagaaagcagcgagttggcagagcagggctgcatttccagcaggagctgcgagcacagtgctggctcacaacaagatgctcaaggtgtcagccgtactgtgtgtgtgtgcagccgcttggtgcagtcagtctctcgcagctgccgcggcggtggctgcagccggggggcggtcggacggcggtaattttctggatgataaacaatggctcaccacaatctctcagtatgacaaggaagtcggacagtggaacaaattccgagacgatgattatttccgcacttggagtccaggaaaacccttcgatcaggctttagatccagctaaggatccatgcttaaagatgaaatgtagtcgccataaagtatgcattgctcaagattctcagactgcagtctgcattagtcaccggaggcttacacacaggatgaaagaagcaggagtagaccataggcagtggaggggtcccatattatccacctgcaagcagtgcccagtggtctatcccagccctgtttgtggttcagatggtcatacctactcttttcagtgcaaactagaatatcaggcatgtgtcttaggaaaacagatctcagtcaaatgtgaaggacattgcccatgtccttcagataagcccaccagtacaagcagaaatgttaagagagcatgcagtgacctggagttcagggaagtggcaaacagattgcgggactggttcaaggcccttcatgaaagtggaagtcaaaacaagaagacaaaaacattgctgaggcctgagagaagcagattcgataccagcatcttgccaatttgcaaggactcacttggctggatgtttaacagacttgatacaaactatgacctgctattggaccagtcagagctcagaagcatttaccttgataagaatgaacagtgtaccaaggcattcttcaattcttgtgacacatacaaggacagtttaatatctaataatgagtggtgctactgcttccagagacagcaaggtaaaagatgagacccttacagacgcaaatagttgacctgcatgtcaaattttacttattttttaagaaaataaaacagtacactatgctcattcattttgtgtatgtttttgtaattcaagtgttgaataaaagagcaaataagaagcatgttgaacaaataactctgccagagatacaacacatgctaaataagatgaaaaatagtaattaatattttgtattaatgccactacattatagtttccattatgagccaccaagaagcacacagaaatattaagaacttagatactgaaagtaatcattaaaattaatttgctatctgctttgcccacaatgtaaaataaatggattttttatcactatacngtggagttttaatgttctattttgtgatcttattaaatgagttgaatg

SEQ ID NO: 387470 - DNA, 1721 bp, Homo sapiens
agaggggggagcgcgccgggcgcagggagctgagtggacggctcgagacggcggcgcgtgcagcagctccagaaagcagcgagttggcagagcagggctgcatttccagcaggagctgcgagcacagtgctggctcacaacaagatgctcaaggtgtcagccgtactgtgtgtgtgtgcagccgcttggtgcagtcagtctctcgcagctgccgcggcggtggctgcagccggggggcggtcggacggcggtaattttctggatgataaacaatggctcaccacaatctctcagtatgacaaggaagtcggacagtggaacaaattccgagacgatgattatttccgcacttggagtccaggaaaacccttcgatcaggctttagatccagctaaggatccatgcttaaagatgaaatgtagtcgccataaagtatgcattgctcaagattctcagactgcagtctgcattagtcaccggaggcttacacacaggatgaaagaagcaggagtagaccataggcagtggaggggtcccatattatccacctgcaagcagtgcccagtggtctatcccagccctgtttgtggttcagatggtcatacctactcttttcagtgcaaactagaatatcaggcatgtgtcttaggaaaacagatctcagtcaaatgtgaaggacattgcccatgtccttcagataagcccaccagtacaagcagaaatgttaagagagcatgcagtgacctggagttcagggaagtggcaaacagattgcgggactggttcaaggcccttcatgaaagtggaagtcaaaacaagaagacaaaaacattgctgaggcctgagagaagcagattcgataccagcatcttgccaatttgcaaggactcacttggctggatgtttaacagacttgatacaaactatgacctgctattggaccagtcagagctcagaagcatttaccttgataagaatgaacagtgtaccaaggcattcttcaattcttgtgacacatacaaggacagtttaatatctaataatgagtggtgctactgcttccagagacagcaagacccaccttgccagactgagctcagcaatattcagaagcggcaaggggtaaagaagctcctaggacagtatatccccctgtgtgatgaagatggttactacaagccaacacaatgtcatggcagtgttggacagtgctggtgtgttgacagatatggaaatgaagtcatgggatccagaataaatggtgttgcagattgtgctatagattttgagatctccggagattttgctagtggcgattttcatgaatggactgatgatgaggatgatgaagacgatattatgaatgatgaagatgaaattgaagatgatgatgaagatgaaggggatgatgatgatggtggtgatgaccatgatgtatacatttgattgatgacagttgaaatcaataaattctacatttctaatatttacaaaaatgatagcctatttaaaattatcttcttccccaataacaaaatgattctaaacctcacatatattttgtataattatttgaaaaattgcagctaaagttatagaactttatgtttaaataagaatcatttgctttgagtttttatattccttacacaaaaagtttttacaagaccaaccttggaaactttcttaaccaaaggccagttgtgcttggataccacatt

SEQ ID NO: 387471 - DNA, 2729 bp, Homo sapiens
gtgactctacaggatctcccaaacaccgcaatctctcagtatgacaaggaagtcggacagtggaacaaattccgagacgatgattatttccgcacttggagtccaggaaaacccttcgatcaggctttagatccagctaaggatccatgcttaaagatgaaatgtagtcgccataaagtatgcattgctcaagattctcagactgcagtctgcattagtcaccggaggcttacacacaggatgaaagaagcaggagtagaccataggcagtggaggggtcccatattatccacctgcaagcagtgcccagtggtctatcccagccctgtttgtggttcagatggtcatacctactcttttcagtgcaaactagaatatcaggcatgtgtcttaggaaaacagatctcagtcaaatgtgaaggacattgcccatgtccttcagataagcccaccagtacaagcagaaatgttaagagagcatgcagtgacctggagttcagggaagtggcaaacagattgcgggactggttcaaggcccttcatgaaagtggaagtcaaaacaagaagacaaaaacattgctgaggcctgagagaagcagattcgataccagcatcttgccaatttgcaaggactcacttggctggatgtttaacagacttgatacaaactatgacctgctattggaccagtcagagctcagaagcatttaccttgataagaatgaacagtgtaccaaggcattcttcaattcttgtgacacatacaaggacagtttaatatctaataatgagtggtgctactgcttccagagacagcaagacccaccttgccagactgagctcagcaatattcagaagcggcaaggggtaaagaagctcctaggacagtatatccccctgtgtgatgaagatggttactacaagccaacacaatgtcatggcagtgttggacagtgctggtgtgttgacagatatggaaatgaagtcatgggatccagaataaatggtgttgcagattgtgctatagattttgagatctccggagattttgctagtggcgattttcatgaatggactgatgatgaggatgatgaagacgatattatgaatgatgaagatgaaattgaagatgatgatgaagatgaaggggatgatgatgatggtggtgatgaccatgatgtatacatttgattgatgacagttgaaatcaataaattctacatttctaatatttacaaaaatgatagcctatttaaaattatcttcttccccaataacaaaatgattctaaacctcacatatattttgtataattatttgaaaaattgcagctaaagttatagaactttatgtttaaataagaatcatttgctttgagtttttatattccttacacaaaaagaaaatacatatgcagtctagtcagacaaaataaagttttgaagtgctactataataagtttttcacgagaacaaactttgtaaatcttccataagcaaaatgacagctagtgcttgggatcgtacatgttaattttctgaaagataattctaagtgaaatttaaaataaataaatttttaatgacctgggtcttaaggatttaggaaaaatatgcatgctttaattgcatttccaaagtagcatcttgctagacctagatgagtcaggataacagagagataccacatggcaagaaaaacaaagtgacaattgtagagtcctcaattgtgtttacattaatagtggtgtttttacctatgaaattattctggatctaataggacattttacaaaatggcaagtatggaaaaccatggattctgaaagttaaaaatttagttgttctccccaatgtgtattttaatttggatggcagtctcatgcagattttttaaaagattctttaataacatgatttgtttgcctttctagatttctttatctttctgaccagcaacttagggagcagaatttaaattaggaagacaaagggaaagattcatttaaaccatatttttacaaagtttgtcatttgccccaaggtcaaattttaaattcttaattttcattttatttcccattttaggtaaaagtttgcatttaatcttagaattatgttatttttgttagtagtgtggaaacttagagaacttattgtatggtgccttgcaaaaatagagatagaaagattttagcatgcataccaatatagtatattacgcaatatataagcacacctaattaacagattaatatcagtaaaggtattgctgctggaatgaagaaaatgggatacgtttgtttctttttttctattgttacataattgccatgtggacttgtttatgattattgtgtagagtagcatttaagatttaactgtagcaaaaattactttaaccgctgtatttaagttagcatgttaattaattgtgtagacattttggcacaccatcacttttaactatatcataccaatggttttgtgcccataataaaaatggaaaaacctgttgaatgttacgtattggtatctttaatttcaacagtgggtaaactggtttcccagtatacaattcattgaaagcaaaattgattaattatttccatttaatttatacacactcaatacaaaatttaatgttgactttacgtaataaagtataatgcattttcttttttactgtttatgtatagtttacaaaataaagaatcttgtaaccaaat

SEQ ID NO: 387472 - DNA, 1118 bp, Homo sapiens
gagatggctgcactccagcccgagtgacagagctagactccatctcaaaaaaaaaaaaacaaaaaacagaaaaaaaaccatttggtaggaaaggagtttgaaacaattaaagtatatattttagtggcagatgctgccgtcattctctattcctgtagtaagcagtgtcttaggcctgaggaagtaataacttctgttttatctctctggaccttctttacaggcgggatggttaaataagtagatgaaaaaagtagaaacattaacatctagaagtaatttgcacagtgatcagcaaattatcctggcagtgatttaaaactctaatggtctccttggcttttgccatcatctccagggcaggtctggctgtggacactgtgtgaattcagagatgtaactgttttgtcctcacaggaacagtggaggccatgtgtcttttggcagtcagtccagatgggaattggctagctgcatcaggtaccagtgctggagtccatgtctacaacgtaaaacagctaaagcttcactgcacggtgcctgcttacaatttcccagtgactgctatggctattgcccccaataccaacaaccttgtcatcgctcattcggaccagcaggtatttgagtacagcatcccagacaaacagtatacagattggagccggactgtccagaagcagggctttcaccacctttggctccaaagggatactcctatcacacacatcagttttcatcccaagagaccgatgcacatccttctccatgatgcctacatgttctgcatcattgacaagtcattgccccttccaaatgacaaaaccttactctacaatccatttcctcccacgaatgaatcagatgtcatccggaggcgcacagctcatgcttttaaaatttctaagatatataagcctctactcttcatggatcttttggatgaaagaacactcgtggcagtagaacggcctctggatgacatcattgctcagctcccaccacccattaaaaagaagaaatttggaacctaaaacagggcactgtctgtgtccttccttgaactgtctaccctgttgcttttcacaaatcatggtaataaaacaagttattcttga

SEQ ID NO: 387473 - DNA, 2322 bp, Homo sapiens
gcggccaacgggcgacaaccgaacctcccgccgccgtcgccgccgccgcgagcactgcctgcgcacttccgactatgcgccaggagcacttccggggcagagcctgagagcgcgcgcgcacgtggggccggggcggagagaggcgagcaccgggaaggggagcgtggggccgctggaatgggtgaatttaaggtccatcgagtacgtttctttaattatgttccatcaggaatccgctgtgtggcttacaataaccagtcaaacagattggctgtttcacgaacagatggcactgtggaaatttataacttgtcagcaaactactttcaggagaaatttttcccaggtcatgagtctcgggctacagaagctttgtgctgggcagaaggacagcgactctttagtgctgggctcaatggcgagattatggagtatgatttacaggcgttaaacatcaagtatgctatggatgcctttggaggacctatttggagcatggctgccagccccagtggctctcaacttttggttggttgtgaagatggatctgtgaaactatttcaaattaccccagacaaaatccagtttgaaagaaattttgatcggcagaaaagtcgcatcctgagtctcagctggcatccctctggtacccacattgcagctggttccatagactacattagtgtgtttgatgtcaaatcaggcagcgctgttcataagatgattgtggacaggcagtatatgggcgtgtctaagcggaagtgcatcgtgtggggtgtcgccttcttgtccgatggcactatcataagtgtggactctgctgggaaggtgcagttctgggactcagccactgggacgcttgtgaagagccatctcatcgctaatgctgacgtgcagtccattgctgtagctgaccaagaagacagtttcgtggtgggcacagccgagggaacagtcttccattttcagctggtccctgtgacatctaacagcagtgagaagcagtgggtgcggacaaaaccgttccagcatcacactcatgacgtgcgcactgtggcccacagcccaacagcgctgatatctggaggcactgacacccacttagtctttcgtcctctcatggagaaggtggaagtaaagaattacgatgccgctctccgaaaaatcacctttccccaccgatgtctcatctcctgttctaaaaagaggcagcttctcctcttccagtttgctcatcacttagaactttggcgactgggatccacagttgcaacaggcaagaatggggatactcttccactctctaaaaatgcagatcatttactgcacctaaagacaaagggtcctgagaacattatctgtagctgtatctccccatgtggaagttggatagcctattctacagtttctcggttttttctctatcggctgaattatgaacatgacaacataagcctcaaaagggtttccaaaatgccagcattccttcgctctgcccttcagattttgttttctgaagattcaacaaagctctttgtagcatcaaatcaaggagctctgcatattgttcagctgtcaggaggaagcttcaagcacctgcatgctttccagcctcagtcaggaacagtggaggccatgtgtcttttggcagtcagtccagatgggaattggctagctgcatcaggtaccagtgctggagtccatgtctacaacgtaaaacagctaaagcttcactgcacggtgcctgcttacaatttcccagtgactgctatggctattgcccccaataccaacaaccttgtcatcgctcattcggaccagcaggtatttgagtacagcatcccagacaaacagtatacagattggagccggactgtccagaagcagggctttcaccacctttggctccaaagggatactcctatcacacacatcagttttcatcccaagagaccgatgcacatccttctccatgatgcctacatgttctgcatcattgacaagtcattgccccttccaaatgacaaaaccttactctacaatccatttcctcccacgaatgaatcagatgtcatccggaggcgcacagctcatgcttttaaaatttctaagatatataagcctctactcttcatggatcttttggatgaaagaacactcgtggcagtagaacggcctctggatgacatcattgctcagctcccaccacccattaaaaagaagaaatttggaacctaaaacagggcactgtctgtgtccttccttgaactgtctaccctgttgcttttcacaaatcatggtaataaaacaagttattcttga

SEQ ID NO: 387474 - DNA, 2198 bp, Homo sapiens
ggctggtacggtccgagtcttaggatcgggaaggggagcgtggggccgctggaatgggtgaatttaaggtccatcgagtacgtttctttaattatgttccatcaggaatccgctgtgtggcttacaataaccagtcaaacagattggctgtttcacgaacagatggcactgtggaaatttataacttgtcagcaaactactttcaggagaaatttttcccaggtcatgagtctcgggctacagaagctttgtgctgggcagaaggacagcgactctttagtgctgggctcaatggcgagattatggagtatgatttacaggcgttaaacatcaagtatgctatggatgcctttggaggacctatttggagcatggctgccagccccagtggctctcaacttttggttggttgtgaagatggatctgtgaaactatttcaaattaccccagacaaaatccagtttgaaagaaattttgatcggcagaaaagtcgcatcctgagtctcagctggcatccctctggtacccacattgcagctggttccatagactacattagtgtgtttgatgtcaaatcaggcagcgctgttcataagatgattgtggacaggcagtatatgggcgtgtctaagcggaagtgcatcgtgtggggtgtcgccttcttgtccgatggcactatcataagtgtggactctgctgggaaggtgcagttctgggactcagccactgggacgcttgtgaagagccatctcatcgctaatgctgacgtgcagtccattgctgtagctgaccaagaagacagtttcgtggtgggcacagccgagggaacagtcttccattttcagctggtccctgtgacatctaacagcagtgagaagcagtgggtgcggacaaaaccgttccagcatcacactcatgacgtgcgcactgtggcccacagcccaacagcgctgatatctggaggcactgacacccacttagtctttcgtcctctcatggagaaggtggaagtaaagaattacgatgccgctctccgaaaaatcacctttccccaccgatgtctcatctcctgttctaaaaagaggcagcttctcctcttccagtttgctcatcacttagaactttggcgactgggatccacagttgcaacaggcaagaatggggatactcttccactctctaaaaatgcagatcatttactgcacctaaagacaaagggtcctgagaacattatctgtagctgtatctccccatgtggaagttggatagcctattctacagtttctcggttttttctctatcggctgaattatgaacatgacaacataagcctcaaaagggtttccaaaatgccagcattccttcgctctgcccttcagattttgttttctgaagattcaacaaagctctttgtagcatcaaatcaaggagctctgcatattgttcagctgtcaggaggaagcttcaagcacctgcatgctttccagcctcagtcaggaacagtggaggccatgtgtcttttggcagtcagtccagatgggaattggctagctgcatcaggtaccagtgctggagtccatgtctacaacgtaaaacagctaaagcttcactgcacggtgcctgcttacaatttcccagtgactgctatggctattgcccccaataccaacaaccttgtcatcgctcattcggaccagcaggtatttgagtacagcatcccagacaaacagtatacagattggagccggactgtccagaagcagggctttcaccacctttggctccaaagggatactcctatcacacacatcagttttcatcccaagagaccgatgcacatccttctccatgatgcctacatgttctgcatcattgacaagtcattgccccttccaaatgacaaaaccttactctacaatccatttcctcccacgaatgaatcagatgtcatccggaggcgcacagctcatgcttttaaaatttctaagatatataagcctctactcttcatggatcttttggatgaaagaacactcgtggcagtagaacggcctctggatgacatcattgctcagctcccaccacccattaaaaagaagaaatttggaacctaaaacagggcactgtctgtgtccttccttgaactgtctaccctgttgcttttcacaaatcatggtaataaaacaagttattcttga

SEQ ID NO: 387475 - DNA, 1812 bp, Homo sapiens
tacctctttctcaaataggttggttgtgaagatggatctgtgaaactatttcaaattaccccagacaaaatccagtttgaaagaaattttgatcggcagaaaagtcgcatcctgagtctcagctggcatccctctggtacccacattgcagctggttccatagactacattagtgtgtttgatgtcaaatcaggcagcgctgttcataagatgattgtggacaggcagtatatgggcgtgtctaagcggaagtgcatcgtgtggggtgtcgccttcttgtccgatggcactatcataagtgtggactctgctgggaaggtgcagttctgggactcagccactgggacgcttgtgaagagccatctcatcgctaatgctgacgtgcagtccattgctgtagctgaccaagaagacagtttcgtggtgggcacagccgagggaacagtcttccattttcagctggtccctgtgacatctaacagcagtgagaagcagtgggtgcggacaaaaccgttccagcatcacactcatgacgtgcgcactgtggcccacagcccaacagcgctgatatctggaggcactgacacccacttagtctttcgtcctctcatggagaaggtggaagtaaagaattacgatgccgctctccgaaaaatcacctttccccaccgatgtctcatctcctgttctaaaaagaggcagcttctcctcttccagtttgctcatcacttagaactttggcgactgggatccacagttgcaacaggcaagaatggggatactcttccactctctaaaaatgcagatcatttactgcacctaaagacaaagggtcctgagaacattatctgtagctgtatctccccatgtggaagttggatagcctattctacagtttctcggttttttctctatcggctgaattatgaacatgacaacataagcctcaaaagggtttccaaaatgccagcattccttcgctctgcccttcagattttgttttctgaagattcaacaaagctctttgtagcatcaaatcaaggagctctgcatattgttcagctgtcaggaggaagcttcaagcacctgcatgctttccagcctcagtcaggaacagtggaggccatgtgtcttttggcagtcagtccagatgggaattggctagctgcatcaggtaccagtgctggagtccatgtctacaacgtaaaacagctaaagcttcactgcacggtgcctgcttacaatttcccagtgactgctatggctattgcccccaataccaacaaccttgtcatcgctcattcggaccagcaggtatttgagtacagcatcccagacaaacagtatacagattggagccggactgtccagaagcagggctttcaccacctttggctccaaagggatactcctatcacacacatcagttttcatcccaagagaccgatgcacatccttctccatgatgcctacatgttctgcatcattgacaagtcattgccccttccaaatgacaaaaccttactctacaatccatttcctcccacgaatgaatcagatgtcatccggaggcgcacagctcatgcttttaaaatttctaagatatataagcctctactcttcatggatcttttggatgaaagaacactcgtggcagtagaacggcctctggatgacatcattgctcagctcccaccacccattaaaaagaagaaatttggaacctaaaacagggcactgtctgtgtccttccttgaactgtctaccctgttgcttttcacaaatcatggtaataaaacaagttattcttga

SEQ ID NO: 387476 - DNA, 431 bp, Homo sapiens
cgaggccacacaaactccacctgtgtccctggctatggactagagcttcagggaattagtgatgtatcagaggatagaagcaaaagaagtactcactgctttctcttcatatacccctcaaaaattgtgagcttactcagtgagcttgtatttttctgatttcccactgatagagattccatttttcgaaggagtaactttttagaagaaaaatgtacaaatactctttctttcataagaaaaatctcagggaagtttcttgtttcaggcaagaatggggatactcttccactctctaaaaatgcagatcatttactgcacctaaagacaaaggtaaggaagtttgtttaggctctgaattctagagcctgaattctaggctcataattcccattctgaattttgaggttacttagtttgcatcataaatt

SEQ ID NO: 387477 - DNA, 4842 bp, Homo sapiens
gcggccaacgggcgacaaccgaacctcccgccgccgtcgccgccgccgcgagcactgcctgcgcacttccgactatgcgccaggagcacttccggggcagagcctgagagcgcgcgcgcacgtggggccggggcggagagaggcgagcaccgggaaggggagcgtggggccgctggaatgggtgaatttaaggtccatcgagtacgtttctttaattatgttccatcaggaatccgctgtgtggcttacaataaccagtcaaacagattggctgtttcacgaacagatggcactgtggaaatttataacttgtcagcaaactactttcaggagaaatttttcccaggtcatgagtctcgggctacagaagctttgtgctgggcagaaggacagcgactctttagtgctgggctcaatggcgagattatggagtatgatttacaggcgttaaacatcaagtatgctatggatgcctttggaggacctatttggagcatggctgccagccccagtggctctcaacttttggttggttgtgaagatggatctgtgaaactatttcaaattaccccagacaaaatccagtttgaaagaaattttgatcggcagaaaagtcgcatcctgagtctcagctggcatccctctggtacccacattgcagctggttccatagactacattagtgtgtttgatgtcaaatcaggcagcgctgttcataagatgattgtggacaggcagtatatgggcgtgtctaagcggaagtgcatcgtgtggggtgtcgccttcttgtccgatggcactatcataagtgtggactctgctgggaaggtgcagttctgggactcagccactgggacgcttgtgaagagccatctcatcgctaatgctgacgtgcagtccattgctgtagctgaccaagaagacagtttcgtggtgggcacagccgagggaacagtcttccattttcagctggtccctgtgacatctaacagcagtgagaagcagtgggtgcggacaaaaccgttccagcatcacactcatgacgtgcgcactgtggcccacagcccaacagcgctgatatctggaggcactgacacccacttagtctttcgtcctctcatggagaaggtggaagtaaagaattacgatgccgctctccgaaaaatcacctttccccaccgatgtctcatctcctgttctaaaaagaggcagcttctcctcttccagtttgctcatcacttagaactttggcgactgggatccacagttgcaacaggcaagaatggggatactcttccactctctaaaaatgcagatcatttactgcacctaaagacaaagggtcctgagaacattatctgtagctgtatctccccatgtggaagttggatagcctattctacagtttctcggttttttctctatcggctgaattatgaacatgacaacataagcctcaaaagggtttccaaaatgccagcattccttcgctctgcccttcagattttgttttctgaagattcaacaaagctctttgtagcatcaaatcaaggagctctgcatattgttcagctgtcaggaggaagcttcaagcacctgcatgctttccagcctcagtcaggaacagtggaggccatgtgtcttttggcagtcagtccagatgggaattggctagctgcatcaggtaccagtgctggagtccatgtctacaacgtaaaacagctaaagcttcactgcacggtgcctgcttacaatttcccagtgactgctatggctattgcccccaataccaacaaccttgtcatcgctcattcggaccagcaggtatttgagtacagcatcccagacaaacagtatacagattggagccggactgtccagaagcagggctttcaccacctttggctccaaagggatactcctatcacacacatcagttttcatcccaagagaccgatgcacatccttctccatgatgcctacatgttctgcatcattgacaagtcattggtgagttcttcactgctacctcccaaatcttcttctgaatcttaaagttctaaaagcaacaagtacaataaggtaagaggacagagactcagaataaaggtagctagtaaatcagaatacaggtagctagtacatttcttggaggagaggggcttttgttttacagattccctggtttgtgttcccacagttcttcgggaggctctcggggaaggggctggcctttgtatactggcttttgctgatttgactatttgtctactttgcgagtaagcacataaatcttacacagaaaagtgattaggccagtattcggaaggtgaccctcatccggaagtatcattgatttggctaacttgctttcaactttgaactctggggtatctgaataacctggtttcattaaaggaggtacaggctgaggttttgacctctgtgccccttcgctaaagctactaaaacgctgtctgcaggcttgaggaactggtcttaacatcttcgaaaaacccagctaggaaaattcttcatggctgtgatttacatgggatacgagcattttcttcagttttagattctgtcctctttgccagctgctgttttgattcaccctgaatttgtatggcttttctgggcaggtgctttgtttcctaggagcattgtggccatgcctgtcctgcactttgggcttagattacaaccatcacacggtgttttggtgtgtttgtgaaggtgggggtggaaggaacatgggggaaagcagcagatggctctaaaggaggtgtgcacggggatgtgtcactggaatcatctcgtgggccctgcgacctctgggtgtgggaagcagagctggctgacaagtgccttctgcaagatgagtgatacaggaagggcccctcccactctcttgcctctttgtaattgagcccagatcattttttccaaagcattggctttaagttcatcgcttccttacagtaggcatagctatttcccaggaagtcagagacaaaatatcatttctttggccagaggccacctcgaggtgtcagtgacatcagcacaggtggtttgtgttgaggtttcgcctggggagaactccagtcacttgtccagtctgtgatctggttgggggagagtctagaaagcacagaccctgtgtgggctgagctcctgcacttgccagtttgttccattctgacaaagtgatactgatgagacaggccagaagccgcagaagggccctttgatcttgctgcatggagttaacaagctctctttgcctcatacacccaccctctacagtgtggctgcaagagtagcttcagctctttctccctctctctccttttcttctttttttcccccctagtttttctgaatagaggtattatggctacagctgttttcccgaattaacgaatgtcagggaggtactgaatatatatgatggttagaagatgatgttgggctcaaaatgcactacagatctttggtctgcagaagcccaataaaagtaaccatttaaacaatgtgtctttgtttttttagccccttccaaatgacaaaaccttactctacaatccatttcctcccacgaatgaatcagatgtcatccggaggcgcacagctcatgcttttaaaatttctaagatatataaggtaaaacatcttgtgttgttattctggatagttggttcctttgtgataccaaaatgtaataaactccacaatcggaagataagagcaccttcagtttccatgcagagaacctggcttgtgggagacaagtcacctttttgaggctggctgtcccttgtatatgttttattgttcttgccttagtaggttagaggcaggcacatcatacttaaccaaaatgaaatgcgtaagtagtgagaaatgttggcgctgagggtagagtctttgttgtcatgagagctggctttaaattttacttgttggagtgttccataggataaatgtcaagcaggctgggcttggtagctcatacctgtaatcccagcactttgggaggccaaggcaggtggatctcctcagcccaggaattcaaaaccagcctgggcaccatggtgaaaccccatcactattaacaaaaaatctgatttaattcttttatttatcataaggggtttaattcctgaagtaaaggtttgcacctattaaacttaaaactgccaaatgatttttgttcttttatgtgcgtgataaaaatacaaagaatggtgtggccacctcctccctttcaagctagggcagcaggtagctcttcccagcccctgagcccagccccttcccaagtggtgccggacaaaaaactacatggccctttcgtgtcttgggggtggaaagggagggatgaattggggtgatagaaccctggtgaattcagagtaatctttctttagaaaactggtgttttctaaagaaacaggataggagtttagagaaggcaccaaagctttcactttggtttggcaccagtttctaaccatctgttttttctaccctagctatcttttattggtaaaatataaatgtataattatgtttgtagagctttaccaaggagtttccctccttttttgtttgttgattagcaaatttttgattctccattttccaaaagtaagagactccagcatggccttctgtttgccccgcagtaaagtaacttccatataaaatggtatttgaaagtgagagttcatgacaacagaccgttttccatttcatctgtattttatctccgtgactccaacttgtgggtttgttctgtttttccatgagaataaaatactggcggtttttttc

SEQ ID NO: 387478 - DNA, 2212 bp, Homo sapiens
aactaggctagtagaggccgcggttaatcggacgagggcacgggaaggggagcgtggggccgctggaatgggtgaatttaaggtccatcgagtacgtttctttaattatgttccatcaggaatccgctgtgtggcttacaataaccagtcaaacagattggctgtttcacgaacagatggcactgtggaaatttataacttgtcagcaaactactttcaggagaaatttttcccaggtcatgagtctcgggctacagaagctttgtgctgggcagaaggacagcgactctttagtgctgggctcaatggcgagattatggagtatgatttacaggcgttaaacatcaagtatgctatggatgcctttggaggacctatttggagcatggctgccagccccagtggctctcaacttttggttggttgtgaagatggatctgtgaaactatttcaaattaccccagacaaaatccagtttgaaagaaattttgatcggcagaaaagtcgcatcctgagtctcagctggcatccctctggtacccacattgcagctggttccatagactacattagtgtgtttgatgtcaaatcaggcagcgctgttcataagatgattgtggacaggcagtatatgggcgtgtctaagcggaagtgcatcgtgtggggtgtcgccttcttgtccgatggcactatcataagtgtggactctgctgggaaggtgcagttctgggactcagccactgggacgcttgtgaagagccatctcatcgctaatgctgacgtgcagtccattgctgtagctgaccaagaagacagtttcgtggtgggcacagccgagggaacagtcttccattttcagctggtccctgtgacatctaacagcagtgagaagcagtgggtgcggacaaaaccgttccagcatcacactcatgacgtgcgcactgtggcccacagcccaacagcgctgatatctggaggcactgacacccacttagtctttcgtcctctcatggagaaggtggaagtaaagaattacgatgccgctctccgaaaaatcacctttccccaccgatgtctcatctcctgttctaaaaagaggcagcttctcctcttccagtttgctcatcacttagaactttggcgactgggatccacagttgcaacaggcaagaatggggatactcttccactctctaaaaatgcagatcatttactgcacctaaagacaaagggtcctgagaacattatctgtagctgtatctccccatgtggaagttggatagcctattctacagtttctcggttttttctctatcggctgaattatgaacatgacaacataagcctcaaaagggtttccaaaatgccagcattccttcgctctgcccttcagattttgttttctgaagattcaacaaagctctttgtagcatcaaatcaaggagctctgcatattgttcagctgtcaggaggaagcttcaagcacctgcatgctttccagcctcagtcaggaacagtggaggccatgtgtcttttggcagtcagtccagatgggaattggctagctgcatcaggtaccagtgctggagtccatgtctacaacgtaaaacagctaaagcttcactgcacggtgcctgcttacaatttcccagtgactgctatggctattgcccccaataccaacaaccttgtcatcgctcattcggaccagcaggtatttgagtacagcatcccagacaaacagtatacagattggagccggactgtccagaagcagggctttcaccacctttggctccaaagggatactcctatcacacacatcagttttcatcccaagagaccgatgcacatccttctccatgatgcctacatgttctgcatcattgacaagtcattgccccttccaaatgacaaaaccttactctacaatccatttcctcccacgaatgaatcagatgtcatccggaggcgcacagctcatgcttttaaaatttctaagatatataagcctctactcttcatggatcttttggatgaaagaacactcgtggcagtagaacggcctctggatgacatcattgctcagctcccaccacccattaaaaagaagaaatttggaacctaaaacagggcactgtctgtgtccttccttgaactgtctaccctgttgcttttcacaaatcatggtaataaaacaagttattcttga

SEQ ID NO: 387479 - DNA, 2268 bp, Homo sapiens
gcggccaacgggcgacaaccgaacctcccgccgccgtcgccgccgccgcgagcactgcctgcgcacttccgactatgcgccaggagcacttccggggcagagcctgagagcgcgcgcgcacgtggggccggggcggagagaggcgagcaccgggaaggggagcgtggggccgctggaatccgctgtgtggcttacaataaccagtcaaacagattggctgtttcacgaacagatggcactgtggaaatttataacttgtcagcaaactactttcaggagaaatttttcccaggtcatgagtctcgggctacagaagctttgtgctgggcagaaggacagcgactctttagtgctgggctcaatggcgagattatggagtatgatttacaggcgttaaacatcaagtatgctatggatgcctttggaggacctatttggagcatggctgccagccccagtggctctcaacttttggttggttgtgaagatggatctgtgaaactatttcaaattaccccagacaaaatccagtttgaaagaaattttgatcggcagaaaagtcgcatcctgagtctcagctggcatccctctggtacccacattgcagctggttccatagactacattagtgtgtttgatgtcaaatcaggcagcgctgttcataagatgattgtggacaggcagtatatgggcgtgtctaagcggaagtgcatcgtgtggggtgtcgccttcttgtccgatggcactatcataagtgtggactctgctgggaaggtgcagttctgggactcagccactgggacgcttgtgaagagccatctcatcgctaatgctgacgtgcagtccattgctgtagctgaccaagaagacagtttcgtggtgggcacagccgagggaacagtcttccattttcagctggtccctgtgacatctaacagcagtgagaagcagtgggtgcggacaaaaccgttccagcatcacactcatgacgtgcgcactgtggcccacagcccaacagcgctgatatctggaggcactgacacccacttagtctttcgtcctctcatggagaaggtggaagtaaagaattacgatgccgctctccgaaaaatcacctttccccaccgatgtctcatctcctgttctaaaaagaggcagcttctcctcttccagtttgctcatcacttagaactttggcgactgggatccacagttgcaacaggcaagaatggggatactcttccactctctaaaaatgcagatcatttactgcacctaaagacaaagggtcctgagaacattatctgtagctgtatctccccatgtggaagttggatagcctattctacagtttctcggttttttctctatcggctgaattatgaacatgacaacataagcctcaaaagggtttccaaaatgccagcattccttcgctctgcccttcagattttgttttctgaagattcaacaaagctctttgtagcatcaaatcaaggagctctgcatattgttcagctgtcaggaggaagcttcaagcacctgcatgctttccagcctcagtcaggaacagtggaggccatgtgtcttttggcagtcagtccagatgggaattggctagctgcatcaggtaccagtgctggagtccatgtctacaacgtaaaacagctaaagcttcactgcacggtgcctgcttacaatttcccagtgactgctatggctattgcccccaataccaacaaccttgtcatcgctcattcggaccagcaggtatttgagtacagcatcccagacaaacagtatacagattggagccggactgtccagaagcagggctttcaccacctttggctccaaagggatactcctatcacacacatcagttttcatcccaagagaccgatgcacatccttctccatgatgcctacatgttctgcatcattgacaagtcattgccccttccaaatgacaaaaccttactctacaatccatttcctcccacgaatgaatcagatgtcatccggaggcgcacagctcatgcttttaaaatttctaagatatataagcctctactcttcatggatcttttggatgaaagaacactcgtggcagtagaacggcctctggatgacatcattgctcagctcccaccacccattaaaaagaagaaatttggaacctaaaacagggcactgtctgtgtccttccttgaactgtctaccctgttgcttttcacaaatcatggtaataaaacaagttattcttga

SEQ ID NO: 387480 - DNA, 4878 bp, Homo sapiens
gcggccaacgggcgacaaccgaacctcccgccgccgtcgccgccgccgcgagcactgcctgcgcacttccgactatgcgccaggagcacttccggggcagagcctgagagcgcgcgcgcacgtggggccggggcggagagaggcgagcaccgggaaggggagcgtggggccgctggaatgggtgaatttaaggtccatcgagtacgtttctttaattatgttccatcaggaatccgctgtgtggcttacaataaccagtcaaacagattggctgtttcacgaacagatggcactgtggaaatttataacttgtcagcaaactactttcaggagaaatttttcccaggtcatgagtctcgggctacagaagctttgtgctgggcagaaggacagcgactctttagtgctgggctcaatggcgagattatggagtatgatttacaggcgttaaacatcaagtatgctatggatgcctttggaggacctatttggagcatggctgccagccccagtggctctcaacttttggttggttgtgaagatggatctgtgaaactatttcaaattaccccagacaaaatccagtttgaaagaaattttgatcggcagaaaagtcgcatcctgagtctcagctggcatccctctggtacccacattgcagctggttccatagactacattagtgtgtttgatgtcaaatcaggcagcgctgttcataagatgattgtggacaggcagtatatgggcgtgtctaagcggaagtgcatcgtgtggggtgtcgccttcttgtccgatggcactatcataagtgtggactctgctgggaaggtgcagttctgggactcagccactgggacgcttgtgaagagccatctcatcgctaatgctgacgtgcagtccattgctgtagctgaccaagaagacagtttcgtggtgggcacagccgagggaacagtcttccattttcagctggtccctgtgacatctaacagcagtgagaagcagtgggtgcggacaaaaccgttccagcatcacactcatgacgtgcgcactgtggcccacagcccaacagcgctgatatctggaggcactgacacccacttagtctttcgtcctctcatggagaaggtggaagtaaagaattacgatgccgctctccgaaaaatcacctttccccaccgatgtctcatctcctgttctaaaaagaggcagcttctcctcttccagtttgctcatcacttagaactttggcgactgggatccacagttgcaacaggcaagaatggggatactcttccactctctaaaaatgcagatcatttactgcacctaaagacaaagggtcctgagaacattatctgtagctgtatctccccatgtggaagttggatagcctattctacagtttctcggttttttctctatcggctgaattatgaacatgacaacataagcctcaaaagggtttccaaaatgccagcattccttcgctctgcccttcagattttgttttctgaagattcaacaaagctctttgtagcatcaaatcaaggagctctgcatattgttcagctgtcaggaggaagcttcaagcacctgcatgctttccagcctcagtcaggaacagtggaggccatgtgtcttttggcagtcagtccagatgggaattggctagctgcatcaggtaccagtgctggagtccatgtctacaacgtaaaacagctaaagcttcactgcacggtgcctgcttacaatttcccagtgactgctatggctattgcccccaataccaacaaccttgtcatcgctcattcggaccagcaggtatttgagtacagcatcccagacaaacagtatacagattggagccggactgtccagaagcagggctttcaccacctttggctccaaagggatactcctatcacacacatcagttttcatcccaagagaccgatgcacatccttctccatgatgcctacatgttctgcatcattgacaagtcattggtgagttcttcactgctacctcccaaatcttcttctgaatcttaaagttctaaaagcaacaagtacaataaggtaagaggacagagactcagaataaaggtagctagtaaatcagaatacaggtagctagtacatttcttggaggagaggggcttttgttttacagattccctggtttgtgttcccacagttcttcgggaggctctcggggaaggggctggcctttgtatactggcttttgctgatttgactatttgtctactttgcgagtaagcacataaatcttacacagaaaagtgattaggccagtattcggaaggtgaccctcatccggaagtatcattgatttggctaacttgctttcaactttgaactctggggtatctgaataacctggtttcattaaaggaggtacaggctgaggttttgacctctgtgccccttcgctaaagctactaaaacgctgtctgcaggcttgaggaactggtcttaacatcttcgaaaaacccagctaggaaaattcttcatggctgtgatttacatgggatacgagcattttcttcagttttagattctgtcctctttgccagctgctgttttgattcaccctgaatttgtatggcttttctgggcaggtgctttgtttcctaggagcattgtggccatgcctgtcctgcactttgggcttagattacaaccatcacacggtgttttggtgtgtttgtgaaggtgggggtggaaggaacatgggggaaagcagcagatggctctaaaggaggtgtgcacggggatgtgtcactggaatcatctcgtgggccctgcgacctctgggtgtgggaagcagagctggctgacaagtgccttctgcaagatgagtgatacaggaagggcccctcccactctcttgcctctttgtaattgagcccagatcattttttccaaagcattggctttaagttcatcgcttccttacagtaggcatagctatttcccaggaagtcagagacaaaatatcatttctttggccagaggccacctcgaggtgtcagtgacatcagcacaggtggtttgtgttgaggtttcgcctggggagaactccagtcacttgtccagtctgtgatctggttgggggagagtctagaaagcacagaccctgtgtgggctgagctcctgcacttgccagtttgttccattctgacaaagtgatactgatgagacaggccagaagccgcagaagggccctttgatcttgctgcatggagttaacaagctctctttgcctcatacacccaccctctacagtgtggctgcaagagtagcttcagctctttctccctctctctccttttcttctttttttcccccctagtttttctgaatagaggtattatggctacagctgttttcccgaattaacgaatgtcagggaggtactgaatatatatgatggttagaagatgatgttgggctcaaaatgcactacagatctttggtctgcagaagcccaataaaagtaaccatttaaacaatgtgtctttgtttttttagccccttccaaatgacaaaaccttactctacaatccatttcctcccacgaatgaatcagatgtcatccggaggcgcacagctcatgcttttaaaatttctaagatatataaggtaaaacatcttgtgttgttattctggatagttggttcctttgtgataccaaaatgtaataaactccacaatcggaagataagagcaccttcagtttccatgcagagaacctggcttgtgggagacaagtcacctttttgaggctggctgtcccttgtatatgttttattgttcttgccttagtaggttagaggcaggcacatcatacttaaccaaaatgaaatgcgtaagtagtgagaaatgttggcgctgagggtagagtctttgttgtcatgagagctggctttaaattttacttgttggagtgttccataggataaatgtcaagcaggctgggcttggtagctcatacctgtaatcccagcactttgggaggccaaggcaggtggatctcctcagcccaggaattcaaaaccagcctgggcaccatggtgaaaccccatcactattaacaaaaaatctgatttaattcttttatttatcataaggggtttaattcctgaagtaaaggtttgcacctattaaacttaaaactgccaaatgatttttgttcttttatgtgcgtgataaaaatacaaagaatggtgtggccacctcctccctttcaagctagggcagcaggtagctcttcccagcccctgagcccagccccttcccaagtggtgccggacaaaaaactacatggccctttcgtgtcttgggggtggaaagggagggatgaattggggtgatagaaccctggtgaattcagagtaatctttctttagaaaactggtgttttctaaagaaacaggataggagtttagagaaggcaccaaagctttcactttggtttggcaccagtttctaaccatctgttttttctaccctagctatcttttattggtaaaatataaatgtataattatgtttgtagagctttaccaaggagtttccctccttttttgtttgttgattagcaaatttttgattctccattttccaaaagtaagagactccagcatggccttctgtttgccccgcagtaaagtaacttccatataaaatggtatttgaaagtgagagttcatgacaacagaccgttttccatttcatctgtattttatctccgtgactccaacttgtgggtttgttctgtttttccatgagaataaaatactggcggtttttttcaaaactaatttgattctgattatgtctttctgttca

SEQ ID NO: 387481 - DNA, 2206 bp, Homo sapiens
gcggccaacgggcgacaaccgaacctcccgccgccgtcgccgccgccgcgagcactgcctgcgcacttccgactatgcgccaggagcacttccggggcagagcctgagagcgcgcgcgcacgtggggccggggcggagagaggcgagcaccgggaaggggagcgtggggccgctggaatgggtgaatttaaggtccatcgagtacgtttctttaattatgttccatcaggaatccgctgtgtggcttacaataaccagtcaaacagattggctgtttcacgaacagatggcactgtggaaatttataacttgtcagcaaactactttcaggagaaatttttcccaggtcatgagtctcgggctacagaagctttgtgctgggcagaaggacagcgactctttagtgctgggctcaatggcgagattatggagtatgatttacaggcgttaaacatcaagtatgctatggatgcctttggaggacctatttggagcatggctgccagccccagtggctctcaacttttggttggttgtgaagatggatctgtgaaactatttcaaattaccccagacaaaatccagtttgaaagaaattttgatcggcagaaaagtcgcatcctgagtctcagctggcatccctctggtacccacattgcagctggttccatagactacattagtgtgtttgatgtcaaatcaggcagcgctgttcataagatgattgtggacaggcagtatatgggcgtgtctaagcggaagtgcatcgtgtggggtgtcgccttcttgtccgatggcactatcataagtgtggactctgctgggaaggtgcagttctgggactcagccactgggacgcttgtgaagagccatctcatcgctaatgctgacgtgcagtccattgctgtagctgaccaagaagacagtttcgtggtgggcacagccgagggaacagtcttccattttcagctggtccctgtgacatctaacagcagtgagaagcagtgggtgcggacaaaaccgttccagcatcacactcatgacgtgcgcactgtggcccacagcccaacagcgctgatatctggaggcactgacacccacttagtctttcgtcctctcatggagaaggtggaagtaaagaattacgatgccgctctccgaaaaatcacctttccccaccgatgtctcatctcctgttctaaaaagaggcagcttctcctcttccagtttgctcatcacttagaactttggcgactgggatccacagttgcaacaggcaagaatggggatactcttccactctctaaaaatgcagatcatttactgcacctaaagacaaagggtcctgagaacattatctgtagctgtatctccccatgtggaagttggatagcctattctacagtttctcggttttttctctatcggctgaattatgaacatgacaacataagcctcaaaagggtttccaaaatgccagcattccttcgctctgcccttcagattttgttttctgaagattcaacaaagctctttgtagcatcaaatcaaggagctctgcatattgttcagctgtcaggaggaagcttcaagcacctgcatgctttccagcctcagtcaggaacagtggaggccatgtgtcttttggcagtcagtccagatgggaattggctagctgcatcaggtaccagtgctggagtccatgtctacaacgtaaaacagctaaagcttcactgcacggtgcctgcttacaatttcccagtgactgctatggctattgcccccaataccaacaaccttgtcatcgctcattcggaccagcaggtatttgagtacagcatcccagacaaacagtatacagattggagccggactgtccagaagcagggctttcaccacctttggctccaaagggatactcctatcacacacatcagttttcatcccaagagaccgatgcacatccttctccatgatgcctacatgttctgcatcattgacaagtcattgccccttccaaatgacaaaaccttactctacaatccatttcctcccacgaatgaatgatgacatcattgctcagctcccaccacccattaaaaagaagaaatttggaacctaaaacagggcactgtctgtgtccttccttgaactgtctaccctgttgcttttcacaaatcatggtaataaaacaagttattcttga

SEQ ID NO: 387482 - DNA, 2267 bp, Homo sapiens
gcggccaacgggcgacaaccgaacctcccgccgccgtcgccgccgccgcgagcactgcctgcgcacttccgactatgcgccaggagcacttccggggcagagcctgagagcgcgcgcgcacgtggggccggggcggagagaggcgagcaccgggaaggggagcgtggggccgctggaatgggtgaatttaaggtccatcgagtacgtttctttaattatgttccatcaggaatccgctgtgtggcttacaataaccagtcaaacagattggctgtttcacgaacagatggcactgtggaaatttataacttgtcagcaaactactttcaggagaaatttttcccaggtcatgagtctcgggctacagaagctttgtgctgggcagaaggacagcgactctttagtgctgggctcaatggcgagattatggagtatgatttacaggcgttaaacatcaagtatgctatggatgcctttggaggacctatttggagcatggctgccagccccagtggctctcaacttttggttggttgtgaagatggatctgtgaaactatttcaaattaccccagacaaaatccagtttgaaagaaattttgatcggcagaaaagtcgcatcctgagtctcagctggcatccctctggtacccacattgcagctggttccatagactacattagtgtgtttgatgtcaaatcaggcagcgctgttcataagatgattgtggacaggcagtatatgggcgtgtctaagcggaagtgcatcgtgtggggtgtcgccttcttgtccgatggcactatcataagtgtggactctgctgggaaggtgcagttctgggactcagccactgggacgcttgtgaagagccatctcatcgctaatgctgacgtgcagtccattgctgtagctgaccaagaagacagtttcgtggtgggcacagccgagggaacagtcttccattttcagctggtccctgtgacatctaacagcagtgagaagcagtgggtgcggacaaaaccgttccagcatcacactcatgacgtgcgcactgtggcccacagcccaacagcgctgatatctggaggcactgacacccacttagtctttcgtcctctcatggagaaggtggaagtaaagaattacgatgccgctctccgaaaaatcacctttccccaccgatgtctcatctcctgttctaaaaagaggcagcttctcctcttccagtttgctcatcacttagaactttggcgactgggatccacagttgcaacaggcaagaatggggatactcttccactctctaaaaatgcagatcatttactgcacctaaagacaaagggtcctgagaacattatctgtagctgtatctccccatgtggaagttggatagcctattctacagtttctcggttttttctctatcggctgaattatgaacatgacaacataagcctcaaaagggtttccaaaatgccagcattccttcgctctgcccttcagattttgttttctgaagattcaacaaagctctttgtagcatcaaatcaaggagctctgcatattgttcagctgtcaggaggaagcttcaagcacctgcatgctttccagcctcagtcaggaacagtggaggccatgtgtcttttggcagtcagtccagatgggaattggctagctgcatcaggtaccagtgctggagtccatgtctacaacgtaaaacagctaaagcttcactgcacggtgcctgcttacaatttcccagtgactgctatggctattgcccccaataccaacaaccttgtcatcgctcattcggaccagcaggtatttgagtacagcatcccagacaaacagtatacagattggagccggactgtccagaagcagggctttcaccacctttggctccaaagggatactcctatcacacacatcagttttcatcccaagagaccgatgcacatccttctccatgatgcctacatgttctgcatcattgacaagtcattgcagatgtcatccggaggcgcacagctcatgcttttaaaatttctaagatatataagcctctactcttcatggatcttttggatgaaagaacactcgtggcagtagaacggcctctggatgacatcattgctcagctcccaccacccattaaaaagaagaaatttggaacctaaaacagggcactgtctgtgtccttccttgaactgtctaccctgttgcttttcacaaatcatggtaataaaacaagttattcttga

SEQ ID NO: 387483 - DNA, 2151 bp, Homo sapiens
gcggccaacgggcgacaaccgaacctcccgccgccgtcgccgccgccgcgagcactgcctgcgcacttccgactatgcgccaggagcacttccggggcagagcctgagagcgcgcgcgcacgtggggccggggcggagagaggcgagcaccgggaaggggagcgtggggccgctggaatgggtgaatttaaggtccatcgagtacgtttctttaattatgttccatcaggaatccgctgtgtggcttacaataaccagtcaaacagattggctgtttcacgaacagatggcactgtggaaatttataacttgtcagcaaactactttcaggagaaatttttcccaggtcatgagtctcgggctacagaagctttgtgctgggcagaaggacagcgactctttagtgctgggctcaatggcgagattatggagtatgatttacaggcgttaaacatcaagtatgctatggatgcctttggaggacctatttggagcatggctgccagccccagtggctctcaacttttggttggttgtgaagatggatctgtgaaactatttcaaattaccccagacaaaatccagtttgaaagaaattttgatcggcagaaaagtcgcatcctgagtctcagctggcatccctctggtacccacattgcagctggttccatagactacattagtgtgtttgatgtcaaatcaggcagcgctgttcataagatgattgtggacaggcagtatatgggcgtgtctaagcggaagtgcatcgtgtggggtgtcgccttcttgtccgatggcactatcataagtgtggactctgctgggaaggtgcagttctgggactcagccactgggacgcttgtgaagagccatctcatcgctaatgctgacgtgcagtccattgctgtagctgaccaagaagacagtttcgtggtgggcacagccgagggaacagtcttccattttcagctggtccctgtgacatctaacagcagtgagaagcagtgggtgcggacaaaaccgttccagcatcacactcatgacgtgcgcactgtggcccacagcccaacagcgctgatatctggaggcactgacacccacttagtctttcgtcctctcatggagaaggtggaagtaaagaattacgatgccgctctccgaaaaatcacctttccccaccgatgtctcatctcctgttctaaaaagaggcagcttctcctcttccagtttgctcatcacttagaactttggcgactgggatccacagttgcaacaggcaagaatggggatactcttccactctctaaaaatgcagatcatttactgcacctaaagacaaagggtcctgagaacattatctgtagctgtatctccccatgtggaagttggatagcctattctacagtttctcggttttttctctatcggctgaattatgaacatgacaacataagcctcaaaagggtttccaaaatgccagcattccttcgctctgcccttcagattttgttttctgaagattcaacaaagctctttgtagcatcaaatcaaggagctctgcatattgttcagctgtcaggaggaagcttcaagcacctgcatgctttccagcctcagtcaggaacagtggaggccatgtgtcttttggcagtcagtccagatgggaattggctagctgcatcaggtaccagtgctggagtccatgtctacaacgtaaaacagctaaagcttcactgcacggtgcctgcttacaatttcccagtgactgctatggctattgcccccaataccaacaaccttgtcatcgctcattcggaccagcaggtatttgagtacagcatcccagacaaacagtatacagattggagccggactgtccagaagcagggctttcaccacctttggctccaaagggatactcctatcacacacatcagttttcatcccaagagaccgatgcacatccttctccatgatgcctacatgttctgcatcattgacaagtcattggatgacatcattgctcagctcccaccacccattaaaaagaagaaatttggaacctaaaacagggcactgtctgtgtccttccttgaactgtctaccctgttgcttttcacaaatcatggtaataaaacaagttattcttga

SEQ ID NO: 387484 - DNA, 2055 bp, Homo sapiens
gcggccaacgggcgacaaccgaacctcccgccgccgtcgccgccgccgcgagcactgcctgcgcacttccgactatgcgccaggagcacttccggggcagagcctgagagcgcgcgcgcacgtggggccggggcggagagaggcgagcaccgggaaggggagcgtggggccgctggaatgggtgaatttaaggtccatcgagtacgtttctttaattatgttccatcaggaatccgctgtgtggcttacaataaccagtcaaacagattggctgtttcacgaacagatggcactgtggaaatttataacttgtcagcaaactactttcaggagaaatttttcccaggtcatgagtctcgggctacagaagctttgtgctgggcagaaggacagcgactctttagtgctgggctcaatggcgagattatggagtatgatttacaggcgttaaacatcaagtatgctatggatgcctttggaggacctatttggagcatggctgccagccccagtggctctcaacttttggttggttgtgaagatggatctgtgaaactatttcaaattaccccagacaaaatccagtttgaaagaaattttgatcggcagaaaagtcgcatcctgagtctcagctggcatccctctggtacccacattgcagctggttccatagactacattagtgtgtttgatgtcaaatcaggcagcgctgttcataagatgattgtggacaggcagtatatgggcgtgtctaagcggaagtgcatcgtgtggggtgtcgccttcttgtccgatggcactatcataagtgtggactctgctgggaaggtgcagttctgggactcagccactgggacgcttgtgaagagccatctcatcgctaatgctgacgtgcagtccattgctgtagctgaccaagaagacagtttcgtggtgggcacagccgagggaacagtcttccattttcagctggtccctgtgacatctaacagcagtgagaagcagtgggtgcggacaaaaccgttccagcatcacactcatgacgtgcgcactgtggcccacagcccaacagcgctgatatctggaggcactgacacccacttagtctttcgtcctctcatggagaaggtggaagtaaagaattacgatgccgctctccgaaaaatcacctttccccaccgatgtctcatctcctgttctaaaaagaggcagcttctcctcttccagtttgctcatcacttagaactttggcgactgggatccacagttgcaacaggcaagaatggggatactcttccactctctaaaaatgcagatcatttactgcacctaaagacaaagggtcctgagaacattatctgtagctgtatctccccatgtggaagttggatagcctattctacagtttctcggttttttctctatcggctgaattatgaacatgacaacataagcctcaaaagggtttccaaaatgccagcattccttcgctctgcccttcagattttgttttctgaagattcaacaaagctctttgtagcatcaaatcaaggagctctgcatattgttcagctgtcaggaggaagcttcaagcacctgcatgctttccagcctcagtcaggaacagtggaggccatgtgtcttttggcagtcagtccagatgggaattggctagctgcatcaggtaccagtgctggagtccatgtctacaacgtaaaacagctaaaggtatttgagtacagcatcccagacaaacagtatacagattggagccggactgtccagaagcagggctttcaccacctttggctccaaagggatactcctatcacacacatcagttttcatcccaagagaccgatgcacatccttctccatgatgcctacatgttctgcatcattgacaagtcattggatgacatcattgctcagctcccaccacccattaaaaagaagaaatttggaacctaaaacagggcactgtctgtgtccttccttgaactgtctaccctgttgcttttcacaaatcatggtaataaaacaagttattcttga

SEQ ID NO: 387485 - DNA, 264 bp, Homo sapiens
ggcaggtctggctgtggacactgtgtgaattcagagatgtaactgttttgtcctcacaggaacagtggaggccatgtgtcttttggcagtcagtccagatgggaattggctagctgcatcaggtaccagtgctggagtccatgtctacaacgtaaaacagctaaaggtgagcatagggtttcatggcagcagtttgaatcattgtacaggagccagttcaccctgcagttacaagattcaaggcagattggcatgacctggaaa

SEQ ID NO: 387486 - DNA, 344 bp, Homo sapiens
agtgtgtgttggggggtgtgtgtgtgtgtttagtcctataaaatgtttactattgattttttctgtttactacctctttctcaaataggttggttgtgaagatggatctgtgaaactatttcaaattaccccagacaaaatccagtttgaaagaaattttgatcggcagaaaagtaagcgtcatttttcatggggcggtaaatagccttaacaagaaattaagtttctgtgccactggggatgggatattttcccatgaatccaggtaatattttatctctactgggtacagggagggtatgtgctagaagccatccccagcccaggctttacccattgtatag

SEQ ID NO: 387487 - DNA, 341 bp, Homo sapiens
caagcaggctgggcttggtagctcatacctgtaatcccagcactttgggaggccaaggcaggtggatctcctcagcccaggaattcaaaaccagcctgggcaccatggtgaaaccccatcactattaacaaaaaaaaaaaaaggagagttctgtaaattactgattactcaaatgactcaaatgtgattagcttcttgatgcatttgtagcttgccagttgtcagttgccttaggctgggtatggtgattcacgcctgtaatctcagtactttaggaggttgaggctggagttcaagaccagtctgggcaacatagtgagaccctgtctctacaaaaaaaa

SEQ ID NO: 387488 - DNA, 1977 bp, Homo sapiens
gcggccaacgggcgacaaccgaacctcccgccgccgtcgccgccgccgcgagcactgcctgcgcacttccgactatgcgccaggagcacttccggggcagagcctgagagcgcgcgcgcacgtggggccggggcggagagaggcgagcaccgggaaggggagcgtggggccgctggaatgggtgaatttaaggtccatcgagtacgtttctttaattatgttccatcaggaatccgctgtgtggcttacaataaccagtcaaacagattggctgtttcacgaacagatggcactgtggaaatttataacttgtcagcaaactactttcaggagaaatttttcccaggtcatgagtctcgggctacagaagctttgtgctgggcagaaggacagcgactctttagtgctgggctcaatggcgagattatggagtatgatttacaggcgttaaacatcaagtatgctatggatgcctttggaggacctatttggagcatggctgccagccccagtggctctcaacttttggttggttgtgaagatggatctgtgaaactatttcaaattaccccagacaaaatccagtttgaaagaaattttgatcggcagaaaagtcgcatcctgagtctcagctggcatccctctggtacccacattgcagctggttccatagactacattagtgtgtttgatgtcaaatcaggcagcgctgttcataagatgattgtggacaggcagtatatgggcgtgtctaagcggaagtgcatcgtgtggggtgtcgccttcttgtccgatggcactatcataagtgtggactctgctgggaaggtgcagttctgggactcagccactgggacgcttgtgaagagccatctcatcgctaatgctgacgtgcagtccattgctgtagctgaccaagaagacagtttcgtggtgggcacagccgagggaacagtcttccattttcagctggtccctgtgacatctaacagcagtgagaagcagtgggtgcggacaaaaccgttccagcatcacactcatgacgtgcgcactgtggcccacagcccaacagcgctgatatctggaggcactgacacccacttagtctttcgtcctctcatggagaaggtggaagtaaagaattacgatgccgctctccgaaaaatcacctttccccaccgatgtctcatctcctgttctaaaaagaggcagcttctcctcttccagtttgctcatcacttagaactttggcgactgggatccacagttgcaacaggaacagtggaggccatgtgtcttttggcagtcagtccagatgggaattggctagctgcatcaggtaccagtgctggagtccatgtctacaacgtaaaacagctaaagcttcactgcacggtgcctgcttacaatttcccagtgactgctatggctattgcccccaataccaacaaccttgtcatcgctcattcggaccagcaggtatttgagtacagcatcccagacaaacagtatacagattggagccggactgtccagaagcagggctttcaccacctttggctccaaagggatactcctatcacacacatcagttttcatcccaagagaccgatgcacatccttctccatgatgcctacatgttctgcatcattgacaagtcattgccccttccaaatgacaaaaccttactctacaatccatttcctcccacgaatgaatcagatgtcatccggaggcgcacagctcatgcttttaaaatttctaagatatataagcctctactcttcatggatcttttggatgaaagaacactcgtggcagtagaacggcctctggatgacatcattgctcagctcccaccacccattaaaaagaagaaatttggaacctaaaacagggcactgtctgtgtccttccttgaactgtctaccctgttgcttttcacaaatcatggtaataaaacaagttattcttga

SEQ ID NO: 387489 - DNA, 2363 bp, Homo sapiens
gcggccaacgggcgacaaccgaacctcccgccgccgtcgccgccgccgcgagcactgcctgcgcacttccgactatgcgccaggagcacttccggggcagagcctgagagcgcgcgcgcacgtggggccggggcggagagaggcgagcaccgggaaggggagcgtggggccgctggaatgggtgaatttaaggtccatcgagtacgtttctttaattatgttccatcaggaatccgctgtgtggcttacaataaccagtcaaacagattggctgtttcacgaacagatggcactgtggaaatttataacttgtcagcaaactactttcaggagaaatttttcccaggtcatgagtctcgggctacagaagctttgtgctgggcagaaggacagcgactctttagtgctgggctcaatggcgagattatggagtatgatttacaggcgttaaacatcaagtatgctatggatgcctttggaggacctatttggagcatggctgccagccccagtggctctcaacttttggttggttgtgaagatggatctgtgaaactatttcaaattaccccagacaaaatccagtttgaaagaaattttgatcggcagaaaagtcgcatcctgagtctcagctggcatccctctggtacccacattgcagctggttccatagactacattagtgtgtttgatgtcaaatcaggcagcgctgttcataagatgattgtggacaggcagtatatgggcgtgtctaagcggaagtgcatcgtgtggggtgtcgccttcttgtccgatggcactatcataagtgtggactctgctgggaaggtgcagttctgggactcagccactgggacgcttgtgaagagccatctcatcgctaatgctgacgtgcagtccattgctgtagctgaccaagaagacagtttcgtggtgggcacagccgagggaacagtcttccattttcagctggtccctgtgacatctaacagcagtgagaagcagtgggtgcggacaaaaccgttccagcatcacactcatgacgtgcgcactgtggcccacagcccaacagcgctgatatctggaggcactgacacccacttagtctttcgtcctctcatggagaaggtggaagtaaagaattacgatgccgctctccgaaaaatcacctttccccaccgatgtctcatctcctgttctaaaaagaggcagcttctcctcttccagtttgctcatcacttagaactttggcgactgggatccacagttgcaacaggcaagaatggggatactcttccactctctaaaaatgcagatcatttactgcacctaaagacaaagggtcctgagaacattatctgtagctgtatctccccatgtggaagttggatagcctattctacagtttctcggttttttctctatcggctgaattatgaacatgacaacataagcctcaaaagggtttccaaaatgccagcattccttcgctctgcccttcagattttgttttctgaagattcaacaaagctctttgtagcatcaaatcaaggagctctgcatattgttcagctgtcaggaggaagcttcaagcacctgcatgctttccagcctcagtcaggaacagtggaggccatgtgtcttttggcagtcagtccagatgggaattggctagctgcatcaggtaccagtgctggagtccatgtctacaacgtaaaacagctaaagcttcactgcacggtgcctgcttacaatttcccagtgactgctatggctattgcccccaataccaacaaccttgtcatcgctcattcggaccagcaggtatttgagtacagcatcccagacaaacagtatacagattggagccggactgtccagaagcagggctttcaccacctttggctccaaagggatactcctatcacacacatcagttttcatcccaagagaccgatgcacatccttctccatgatgcctacatgttctgcatcattgacaagtcattgccccttccaaatgacaaaaccttactctacaatccatttcctcccacgaatgaatcagatgtcatccggaggcgcacagctcatgcttttaaaatttctaagatatataagcctctactcttcatggatcttttggatgaaagaacactcgtggcagtagaacggcctctggatgacatcattgctcagctcccaccacccattaaaaagaagaaatttggaacctaaaacagggcactgtctgtgtccttccttgaactgtctaccctgttgcttttcacaaatcatggtaataaaacaagttattcttgaaaaaacaaaaaaacaaacccaaaaacacacaccaaacaagg

SEQ ID NO: 387490 - DNA, 1456 bp, Homo sapiens
agagaagattagaggcgtgtactcgtttgtaatttcagtccgcgggacgaggcgtttagtgtgtaaattacatggtgccgtgggctgccaatccatcattcagctggtccctgtgacatctaacagcagtgagaagcagtgggtgcggacaaaaccgttccagcatcacactcatgacgtgcgcactgtggcccacagcccaacagcgctgatatctggaggcactgacacccacttagtctttcgtcctctcatggagaaggtggaagtaaagaattacgatgccgctctccgaaaaatcacctttccccaccgatgtctcatctcctgttctaaaaagaggcagcttctcctcttccagtttgctcatcacttagaactttggcgactgggatccacagttgcaacaggcaagaatggggatactcttccactctctaaaaatgcagatcatttactgcacctaaagacaaagggtcctgagaacattatctgtagctgtatctccccatgtggaagttggatagcctattctacagtttctcggttttttctctatcggctgaattatgaacatgacaacataagcctcaaaagggtttccaaaatgccagcattccttcgctctgcccttcagattttgttttctgaagattcaacaaagctctttgtagcatcaaatcaaggagctctgcatattgttcagctgtcaggaggaagcttcaagcacctgcatgctttccagcctcagtcaggaacagtggaggccatgtgtcttttggcagtcagtccagatgggaattggctagctgcatcaggtaccagtgctggagtccatgtctacaacgtaaaacagctaaagcttcactgcacggtgcctgcttacaatttcccagtgactgctatggctattgcccccaataccaacaaccttgtcatcgctcattcggaccagcaggtatttgagtacagcatcccagacaaacagtatacagattggagccggactgtccagaagcagggctttcaccacctttggctccaaagggatactcctatcacacacatcagttttcatcccaagagaccgatgcacatccttctccatgatgcctacatgttctgcatcattgacaagtcattgccccttccaaatgacaaaaccttactctacaatccatttcctcccacgaatgaatcagatgtcatccggaggcgcacagctcatgcttttaaaatttctaagatatataagcctctactcttcatggatcttttggatgaaagaacactcgtggcagtagaacggcctctggatgacatcattgctcagctcccaccacccattaaaaagaagaaatttggaacctaaaacagggcactgtctgtgtccttccttgaactgtctaccctgttgcttttcacaaatcatggtaataaaacaagttattcttga

SEQ ID NO: 387491 - DNA, 1587 bp, Homo sapiens
gcggccaacgggcgacaaccgaacctcccgccgccgtcgccgccgccgcgagcactgcctgcgcacttccgactatgcgccaggagcacttccggggcagagcctgagagcgcgcgcgcacgtggggccggggcggagagaggcgagcaccgggaaggggagcgtggggccgctggaatgggtgaatttaaggtccatcgagtacgtttctttaattatgttccatcaggaatccgctgtgtggcttacaataaccagtcaaacagattggctgtttcacgaacagatggcactgtggaaatttataacttgtcagcaaactactttcaggagaaatttttcccaggtcatgagtctcgggctacagaagctttgtgctgggcagaaggacagcgactctttagtgctgggctcaatggcgagattatggagtatgatttacaggcgttaaacatcaagtatgctatggatgcctttggaggacctatttggagcatggctgccagccccagtggctctcaacttttggttggttgtgaagatggatctgtgaaactatttcaaattaccccagacaaaatccagtttgaaagaaattttgatcggcagaaaagtcgcatcctgagtctcagctggcatccctctggtacccacattgcagctggttccatagactacattagtgtgtttgatgtcaaatcaggcagcgctgttcataagatgattgtggacaggcagtatatgggcgtgtctaagcggaagtgcatcgtgtggggtgtcgccttcttgtccgatggcactatcataagtgtggactctgctgggaaggtgcagttctgggactcagccactgggacgcttgtgaagagccatctcatcgctaatgctgacgtgcagtccattgctgtagctgaccaagaagacagtttcgtggtgggcacagccgagggaacagtcttccattttcagctggtccctgtgacatctaacagcagtgagaagcagtgggtgcggacaaaaccgttccagcatcacactcatgacgtgcgcactgtggcccacagcccaacagcgctgatatctggaggcactgacacccacttagtctttcgtcctctcatggagaaggtggaagtaaagaattacgatgccgctctccgaaaaatcacctttccccaccgatgtctcatctcctgttctaaaaagaggcagcttctcctcttccagtttgctcatcacttagaactttggcgactgggatccacagttgcaacaggcaagaatggggatactcttccactctctaaaaatgcagatcatttactgcacctaaagacaaagggtcctgagaacattatctgtagctgtatctccccatgtggaagttggatagcctattctacagtttctcggttttttctctatcggctgaattatgaacatgacgatgacatcattgctcagctcccaccacccattaaaaagaagaaatttggaacctaaaacagggcactgtctgtgtccttccttgaactgtctaccctgttgcttttcacaaatcatggtaataaaacaagttattcttga

SEQ ID NO: 387492 - DNA, 4050 bp, Homo sapiens
  misc_feature (531)..(531): n is a, c, g, or t
atggcggcggcggcggcagctggtgcggcctccgggctgccgggtccagtggcacaaggattaaaggaagcgttagtggatacgctcaccgggatcctatccccagtacaggaggtgcgggcggctgctgaagaacagattaaggtgctggaggtgacggaggaatttggtgttcacttggcagaactgactgtagatccccagggggcactggcaatccgtcagctggcatcagtcatcttgaaacaatatgtggagactcactggtgtgcccaatcagagaaatttaggcctcctgaaactacagaaagggcaaaaattgttatccgggagctattgcctaatgggttgagagaatcgataagcaaagtgcgctccagtgtggcctatgcagtgtcagccattgcccactgggactggcctgaagcttggccccaactcttcaacctgctcatggagatgttggtgagcggagacttaaatgccgtccatggagccatgcgtgtgctgacagaattcactcgtgaagtnacagacacacagatgccacttgttgctcctgtcattctcccagagatgtataagatcttcaccatggctgaggtgtatggtattcgaacccgttcccgagccgtggagatttttaccacttgtgcccatatgatctgtaacatggaggagctggaaaagggtgcagccaaagtcctgatctttcccgtggtacagcagttcacagaggcctttgttcaggccctccagataccagatggccccacatctgacagtgggtttaagatggaggtcctaaaggcagtgacagccctagtgaaaaacttcccaaagcacatggtgtcctccatgcagcagattctgcctattgtttggaacaccctaaccgagagtgcagctttttatgtgaggacagaagtaaattacacagaagaagtagaagatcctgtggattctgatggtgaagtcctgggctttgaaaatctcgtctttagcatttttgaatttgtccatgctctactagaaaatagcaaattcaaaagcactgttaagaaagccttgcctgaattgatttattatattatcctgtacatgcaaatcactgaggagcagattaaagtatggacagccaacccccaacaatttgtagaagatgaagatgatgatacattctcctatactgttagaatagcagctcaagacttgttgctggctgtggccacagatttccagaatgaaagtgcagcagccctggctgctgcagccactcgacatttacaagaagctgagcaaaccaaaaacagtggcactgagcactggtggaagatccatgaggcatgcatgcttgccctaggctcagtgaaggccatcatcactgacagtgtgaaaaatggcaggattcattttgacatgcatgggttcctgaccaatgtcatccttgcagacctcaacctctcagtgtctcctttcctcttgggccgggcactttgggctgccagtcggttcactgttgctatgtcccctgaactgatccagcagttcctacaggcaacagttagtggtcttcacgagacacagcccccatcagttcgaatttctgcagtgagagccatctggggttattgtgaccaactgaaagtctcagagagtacccacgtgctccagcccttcctccccagcatccttgatggcttaattcacctagcagcccagttcagctcagaggtcctcaacctggtgatggagaccctgtgcatcgtttgtacagtagaccccgaattcacagcaagcatggaaagcaaaatctgccccttcaccatcgccattttcctaaagtacagtaatgatcccgtcgtcgcctcactggctcaggacatcttcaaggagctgtcccagattgaagcctgtcagggcccaatgcaaatgaggctgattcccactctggtcagcataatgcaggccccagcagacaagattcctgcagggctttgtgcgacagccattgatatcctgacaacagtagtacgaaatacaaagcctcccctttcccagcttctcatctgccaagctttccctgctgtggcacagtgtacccttcacacagatgacaatgccaccatgcagaatggcggagagtgcttgcgggcctatgtgtcagtgaccctggaacaagtagcccagtggcatgatgagcagggccacaatggactgtggtatgtgatgcaagtggtgagccagctcctggacccccgcacctcagagttcactgcggcctttgtgggccgccttgtttccaccctcatctccaaggcagggcgggaactcggggagaatctagaccagattcttcgtgccatcctcagtaagatgcagcaggcagagacgctcagtgtcatgcagtccctgatcatggtgttcgctcatctggtgcacactcagctagaacctctcttggagttcctgtgtagcctcccaggacctactggcaaacctgctctagagtttgtgatggctgagtggacaagccgacagcacctgttctatggacagtatgaaggcaaagtcagctctgtggcactctgtaagctgctccagcatggcatcaatgcagatgacaaacggctacaggatatccgtgtgaagggagaggagatctacagcatggatgagggcatccgcacccgctctaagtcagccaaaaacccagaacgctggacaaacattcctttgctggtcaagatcctaaagctgatcatcaacgagctctccaacgtcatggaggctaatgccgctcgccaggccactcctgcagagtggagtcaagatgactccaatgatatgtgggaggaccaggaggaggaagaggaggaggaggaggatggtttagctggccaacttttatctgacattcttgctacaagtaaatatgaggaggattactacgaggatgatgaggaagatgaccctgatgccctgaaggatcctctctatcagattgatctgcaggcatatctcacagatttcctctgccagtttgctcagcagccctgctacataatgttttcaggccaccttaatgacaatgagaggcgagttctacagaccatcggcatctaaaaaggggagcctttctacatttgctccttctgggccagccgcaaaccattttgcagccctcactggccttgagatgcactttcttctcaacctaaagtggcatcttgacccttggcccttggcctcggcagtgacactgatgacaattcagaccaggctcaccggtgccgtcacttaggaatgctggaacaaaggacatttctcaaagttcccctgaagacatgccatctctagaaccttttttctccccgactctacccccacctctgttcctagagccctctgctggcgagtccagaaacattattgcccagaaggattatgtgtttatggattattttgccccgcctcaggagcgcaggaagtcactaccatttatattctaaaacagacctatctatgttcataggacttctgatgtgttcagataggaatcctcatgagagatcattatgctttgtgccctggaccactgctgctctgggttctcaggaggaacaggcaagagcagcttcattctaagcctttccagtgacctcagccttgcttctcttctacaacactaaggctcctctgtcagaggaggtcgtcttgtttttgcttcattgcatgacataacccttcccctcaagctgttcctatatatacatgcacacacaaaataagccagacagatggcaatttgatcttccttttttagaaaaaaaaaaaaaaaatggggaaaagggattttttttaaatccacctgacccaactatatttaatatgcctctcccacacattaccacagagtctgatattcaaaggttatcccctttccctcaggaagcctctaaagtgcttaagttgtagccctcaaatttgcaacatgtatttttctaggacagtaaagtaatctttacaaatgaatttagttgcatggta

SEQ ID NO: 387493 - DNA, 2665 bp, Homo sapiens
aagaaaaacactagctaggaggaggcccgggttaatcaggcagaggctgcacaatgtcatccttgcagagctcaacctctcagtgtctcctttcctcttgggccgggcactttgggctgccagtcggttcactgttgctatgtcccctgaactgatccagcagttcctacaggcaacagttagtggtcttcacgagacacagcccccatcagttcgaatttctgcagtgagagccatctggggttattgtgaccaactgaaagtctcagagagtacccacgtgctccagcccttcctccccagcatccttgatggcttaattcacctagcagcccagttcagctcagaggtcctcaacctggtgatggagaccctgtgcatcgtttgtacagtagaccccgaattcacagcaagcatggaaagcaaaatctgccccttcaccatcgccattttcctaaagtacagtaatgatcccgtcgtcgcctcactggctcaggacatcttcaaggagctgtcccagattgaagcctgtcagggcccaatgcaaatgaggctgattcccactctggtcagcataatgcaggccccagcagacaagattcctgcagggctttgtgcgacagccattgatatcctgacaacagtagtacgaaatacaaagcctcccctttcccagcttctcatctgccaagctttccctgctgtggcacagtgtacccttcacacagatgacaatgccaccatgcagaatggcggagagtgcttgcgggcctatgtgtcagtgaccctggaacaagtagcccagtggcatgatgagcagggccacaatggactgtggtatgtgatgcaagtggtgagccagctcctggacccccgcacctcagagttcactgcggcctttgtgggccgccttgtttccaccctcatctccaaggcagggcgggaactcggggagaatctagaccagattcttcgtgccatcctcagtaagatgcagcaggcagagacgctcagtgtcatgcagtccctgatcatggtgttcgctcatctggtgcacactcagctagaacctctcttggagttcctgtgtagcctcccaggacctactggcaaacctgctctagagtttgtgatggctgagtggacaagccgacagcacctgttctatggacagtatgaaggcaaagtcagctctgtggcactctgtaagctgctccagcatggcatcaatgcagatgacaaacggctacaggatatccgtgtgaagggagaggagatctacagcatggatgagggcatccgcacccgctctaagtcagccaaaaacccagaacgctggacaaacattcctttgctggtcaagatcctaaagctgatcatcaacgagctctccaacgtcatggaggctaatgccgctcgccaggccactcctgcagagtggagtcaagatgactccaatgatatgtgggaggaccaggaggaggaagaggaggaggaggaggatggtttagctggccaacttttatctgacattcttgctacaagtaaatatgaggaggattactacgaggatgatgaggaagatgaccctgatgccctgaaggatcctctctatcagattgatctgcaggcatatctcacagatttcctctgccagtttgctcagcagccctgctacataatgttttcaggccaccttaatgacaatgagaggcgagttctacagaccatcggcatctaaaaaggggagcctttctacatttgctccttctgggccagccgcaaaccattttgcagccctcactggccttgagatgcactttcttctcaacctaaagtggcatcttgacccttggcccttggcctcggcagtgacactgatgacaattcagaccaggctcaccggtgccgtcacttaggaatgctggaacaaaggacatttctcaaagttcccctgaagacatgccatctctagaaccttttttctccccgactctacccccacctctgttcctagagccctctgctggcgagtccagaaacattattgcccagaaggattatgtgtttatggattattttgccccgcctcaggagcgcaggaagtcactaccatttatattctaaaacagacctatctatgttcataggacttctgatgtgttcagataggaatcctcatgagagatcattatgctttgtgccctggaccactgctgctctgggttctcaggaggaacaggcaagagcagcttcattctaagcctttccagtgacctcagccttgcttctcttctacaacactaaggctcctctgtcagaggaggtcgtcttgtttttgcttcattgcatgacataacccttcccctcaagctgttcctatatatacatgcacacacaaaataagccagacagatggcaatttgatcttccttttttagaaaaaaaaaaaaaaaatggggaaaagggattttttttaaatccacctgacccaactatatttaatatgcctctcccacacattaccacagagtctgatattcaaaggttatcccctttccctcaggaagcctctaaagtgcttaagttgtagccctcaaatttgcaacatgtatttttctaggacagtaaagtaatctttacaaatgaatttagttgcatggta

SEQ ID NO: 387494 - DNA, 3996 bp, Homo sapiens
  misc_feature (531)..(531): n is a, c, g, or t
atggcggcggcggcggcagctggtgcggcctccgggctgccgggtccagtggcacaaggattaaaggaagcgttagtggatacgctcaccgggatcctatccccagtacaggaggtgcgggcggctgctgaagaacagattaaggtgctggaggtgacggaggaatttggtgttcacttggcagaactgactgtagatccccagggggcactggcaatccgtcagctggcatcagtcatcttgaaacaatatgtggagactcactggtgtgcccaatcagagaaatttaggcctcctgaaactacagaaagggcaaaaattgttatccgggagctattgcctaatgggttgagagaatcgataagcaaagtgcgctccagtgtggcctatgcagtgtcagccattgcccactgggactggcctgaagcttggccccaactcttcaacctgctcatggagatgttggtgagcggagacttaaatgccgtccatggagccatgcgtgtgctgacagaattcactcgtgaagtnacagacacacagatgccacttgttgctcctgtcattctcccagagatgtataagatcttcaccatggctgaggtgtatggtattcgaacccgttcccgagccgtggagatttttaccacttgtgcccatatgatctgtaacatggaggagctggaaaagggtgcagccaaagtcctgatctttcccgtggtacagcagttcacagaggcctttgttcaggccctccagataccagatggccccacatctgacagtgggtttaagatggaggtcctaaaggcagtgacagccctagtgaaaaacttcccaaagcacatggtgtcctccatgcagcagattctgcctattgtttggaacaccctaaccgagagtgcagctttttatgtgaggacagaagtaaattacacagaagaagtagaagatcctgtggattctgatggtgaagtcctgggctttgaaaatctcgtctttagcatttttgaatttgtccatgctctactagaaaatagcaaattcaaaagcactgttaagaaagccttgcctgaattgatttattatattatcctgtacatgcaaatcactgaggagcagattaaagtatggacagccaacccccaacaatttgtagaagatgaagatgatgatacattctcctatactgttagaatagcagctcaagacttgttgctggctgtggccacagatttccagaatgaaagtgcagcagccctggctgctgcagccactcgacatttacaagaagctgagcaaaccaaaaacagtggcactgagcactggtggaagatccatgaggcatgcatgcttgccctaggctcagtgaaggccatcatcactgacagtgtgaaaaatggcaggattcattttgacatgcatgggttcctgaccaatgtcatccttgcagacctcaacctctcagtgtctcctttcctcttgggccgggcactttgggctgccagtcggttcactgttgctatgtcccctgaactgatccagcagttcctacaggcaacagttagtggtcttcacgagacacagcccccatcagttcgaatttctgcagtgagagccatctggggttattgtgaccaactgaaagtctcagagagtacccacgtgctccagcccttcctccccagcatccttgatggcttaattcacctagcagcccagttcagctcagaggtcctcaacctggtgatggagaccctgtgcatcgtttgtacagtagaccccgaattcacagcaagcatggaaagcaaaatctgccccttcaccatcgccattttcctaaagtacagtaatgatcccgtcgtcgcctcactggctcaggacatcttcaaggagctgtcccagattgaagcctgtcagggcccaatgcaaatgaggctgattcccactctggtcagcataatgcaggccccagcagacaagattcctgcagggctttgtgcgacagccattgatatcctgacaacagtagtacgaaatacaaagcctcccctttcccagcttctcatctgccaagctttccctgctgtggcacagtgtacccttcacacagatgacaatgccaccatgcagaatggcggagagtgcttgcgggcctatgtgtcagtgaccctggaacaagtagcccagtggcatgatgagcagggccacaatggactgtggtatgtgatgcaagtggtgagccagctcctggacccccgcacctcagagttcactgcggcctttgtgggccgccttgtttccaccctcatctccaaggcagggcgggaactcggggagaatctagaccagattcttcgtgccatcctcagtaagatgcagcaggcagagacgctcagtgtcatgcagtccctgatcatggtgttcgctcatctggtgcacactcagctagaacctctcttggagttcctgtgtagcctcccaggacctactggcaaacctgctctagagtttgtgatggctgagtggacaagccgacagcacctgttctatggacagtatgaaggcaaagtcagctctgtggcactctgtaagctgctccagcatggcatcaatgcagatgacaaacggctacaggatatccgtgtgaagggagaggagatctacagcatggatgagggcatccgcacccgctctaagtcagccaaaaacccagaacgctggacaaacattcctttgctggtcaagatcctaaagctgatcatcaacgagctctccaacgtcatggaggctaatgccgctcgccaggccactcctgcagagtggagtcaagatgactccaatgatatgtgggaggaccaggaggaggaagaggaggaggaggaggatggtttagctggccaacttttatctgacattcttgctacaagtaaatatgaggaggattactacgaggatgatgaggaagatgaccctgatgccctgaaggatcctctctatcagattgatctgcaggcatatctcacagatttcctctgccagtttgctcagcagccctgctacataatgttttcaggccaccttaatgacaatgagaggcgagttctacagaccatcggcatctaaaaaggggagcctttctacatttgctccttctgggccagccgcaaaccattttgcagccctcactggccttgagatgcactttcttctcaacctaaagtggcatcttgacccttggcccttggcctcggcagtgacactgatgacaattcagaccaggctcaccggtgccgtcacttaggaatgctggaacaaaggacatttctcaaagttcccctgaagacatgccatctctagaaccttttttctccccgactctacccccacctctgttcctagagccctctgctggcgagtccagaaacattattgcccagaaggattatgtgtttatggattattttgccccgcctcaggagcgcaggaagtcactaccatttatattctcatgagagatcattatgctttgtgccctggaccactgctgctctgggttctcaggaggaacaggcaagagcagcttcattctaagcctttccagtgacctcagccttgcttctcttctacaacactaaggctcctctgtcagaggaggtcgtcttgtttttgcttcattgcatgacataacccttcccctcaagctgttcctatatatacatgcacacacaaaataagccagacagatggcaatttgatcttccttttttagaaaaaaaaaaaaaaaatggggaaaagggattttttttaaatccacctgacccaactatatttaatatgcctctcccacacattaccacagagtctgatattcaaaggttatcccctttccctcaggaagcctctaaagtgcttaagttgtagccctcaaatttgcaacatgtatttttctaggacagtaaagtaatctttacaaatgaatttagttgcatggta

SEQ ID NO: 387495 - DNA, 1535 bp, Homo sapiens
tcagctcggtaccgctgagcagctggcagcacctgttctatggacagtgaaggcaagtcagctctgtggcactctgtaagctgctccagcatggcatcaatgcagatgacaaacggctacaggatatccgtgtgaagggagaggagatctacagcatggatgagggcatccgcacccgctctaagtcagccaaaaacccagaacgctggacaaacattcctttgctggtcaagatcctaaagctgatcatcaacgagctctccaacgtcatggaggctaatgccgctcgccaggccactcctgcagagtggagtcaagatgactccaatgatatgtgggaggaccaggaggaggaagaggaggaggaggaggatggtttagctggccaacttttatctgacattcttgctacaagtaaatatgaggaggattactacgaggatgatgaggaagatgaccctgatgccctgaaggatcctctctatcagattgatctgcaggcatatctcacagatttcctctgccagtttgctcagcagccctgctacataatgttttcaggccaccttaatgacaatgagaggcgagttctacagaccatcggcatctaaaaaggggagcctttctacatttgctccttctgggccagccgcaaaccattttgcagccctcactggccttgagatgcactttcttctcaacctaaagtggcatcttgacccttggcccttggcctcggcagtgacactgatgacaattcagaccaggctcaccggtgccgtcacttaggaatgctggaacaaaggacatttctcaaagttcccctgaagacatgccatctctagaaccttttttctccccgactctacccccacctctgttcctagagccctctgctggcgagtccagaaacattattgcccagaaggattatgtgtttatggattattttgccccgcctcaggagcgcaggaagtcactaccatttatattctaaaacagacctatctatgttcataggacttctgatgtgttcagataggaatcctcatgagagatcattatgctttgtgccctggaccactgctgctctgggttctcaggaggaacaggcaagagcagcttcattctaagcctttccagtgacctcagccttgcttctcttctacaacactaaggctcctctgtcagaggaggtcgtcttgtttttgcttcattgcatgacataacccttcccctcaagctgttcctatatatacatgcacacacaaaataagccagacagatggcaatttgatcttccttttttagaaaaaaaaaaaaaaaatggggaaaagggattttttttaaatccacctgacccaactatatttaatatgcctctcccacacattaccacagagtctgatattcaaaggttatcccctttccctcaggaagcctctaaagtgcttaagttgtagccctcaaatttgcaacatgtatttttctaggacagtaaagtaatctttacaaatgaatttagttgcatggta

SEQ ID NO: 387496 - DNA, 2873 bp, Homo sapiens
  misc_feature (531)..(531): n is a, c, g, or t
atggcggcggcggcggcagctggtgcggcctccgggctgccgggtccagtggcacaaggattaaaggaagcgttagtggatacgctcaccgggatcctatccccagtacaggaggtgcgggcggctgctgaagaacagattaaggtgctggaggtgacggaggaatttggtgttcacttggcagaactgactgtagatccccagggggcactggcaatccgtcagctggcatcagtcatcttgaaacaatatgtggagactcactggtgtgcccaatcagagaaatttaggcctcctgaaactacagaaagggcaaaaattgttatccgggagctattgcctaatgggttgagagaatcgataagcaaagtgcgctccagtgtggcctatgcagtgtcagccattgcccactgggactggcctgaagcttggccccaactcttcaacctgctcatggagatgttggtgagcggagacttaaatgccgtccatggagccatgcgtgtgctgacagaattcactcgtgaagtnacagacacacagatgccacttgttgctcctgtcattctcccagagatgtataagatcttcaccatggctgaggtgtatggtattcgaacccgttcccgagccgtggagatttttaccacttgtgcccatatgatctgtaacatggaggagctggaaaagggtgcagccaaagtcctgatctttcccgtggtacagcagttcacagaggcctttgttcaggccctccagataccagatggccccacatctgacagtgggtttaagatggaggtcctaaaggcagtgacagccctagtgaaaaacttcccaaagcacatggtgtcctccatgcagcagattctgcctattgtttggaacaccctaaccgagagtgcagctttttatgtgaggacagaagtaaattacacagaagaagtagaagatcctgtggattctgatggtgaagtcctgggctttgaaaatctcgtctttagcatttttgaatttgtccatgctctactagaaaatagcaaattcaaaagcactgttaagaaagccttgcctgaattgatttattatattatcctgtacatgcaaatcactgaggagcagattaaagtatggacagccaacccccaacaatttgtagaagatgaagatgatgatacattctcctatactgttagaatagcagctcaagacttgttgctggctgtggccacagatttccagaatgaaagtgcagcagccctggctgctgcagccactcgacatttacaagaagctgagcaaaccaaaaacagtggcactgagcactggtggaagatccatgaggcatgcatgcttgccctaggctcagtgaaggccatcatcactgacagtgtgaaaaatggcaggattcattttgacatgcatgggttcctgaccaatgtcatccttgcagacctcaacctctcagtgtctcctttcctcttgggccgggcactttgggctgccagtcggttcactgttgctatgtcccctgaactgatccagcagttcctacaggcaacagttagtggtcttcacgagacacagcccccatcagttcgaatttctgcagtgagagccatctggggttattgtgaccaactgaaagtctcagagagtacccacgtgctccagcccttcctccccagcatccttgatggcttaattcacctagcagcccagttcagctcagaggtcctcaacctggtgatggagaccctgtgcatcgtttgtacagtagaccccgaattcacagcaagcatggaaagcaaaatctgccccttcaccatcgccattttcctaaagtacagtaatgatcccgtcgtcgcctcactggctcaggacatcttcaaggagctgtcccagattgaagcctgtcagggcccaatgcaaatgaggctgattcccactctggtcagcataatgcaggccccagcagacaagattcctgcagggctttgtgcgacagccattgatatcctgacaacagtagtacgaaatacaaagcctcccctttcccagcttctcatctgccaagctttccctgctgtggcacagtgtacccttcacacagatgacaatgccaccatgcagaatggcggagagtgcttgcgggcctatgtgtcagtgaccctggaacaagtagcccagtggcatgatgagcagggccacaatggactgtggtatgtgatgcaagtggtgagccagctcctggacccccgcacctcagagttcactgcggcctttgtgggccgccttgtttccaccctcatctccaaggcagggcgggaactcggggagaatctagaccagattcttcgtgccatcctcagtaagatgcagcaggcagagacgctcagtgtcatgcagtccctgatcatggtgttcgctcatctggtgcacactcagctagaacctctcttggagttcctgtgtagcctcccaggacctactggcaaacctgctctagagtttgtgatggctgagtggacaagccgacagcacctgttctatggacagtatgaaggcaaagtcagctctgtggcactctgtaagctgctccagcatggcatcaatgcagatgacaaacggctacaggatatccgtgtgaagggagaggagatctacagcatggatgagggcatccgcacccgctctaagtcagccaaaaacccagaacgctggacaaacattccacagagtctgatattcaaaggttatcccctttccctcaggaagcctctaaagtgcttaagttgtagccctcaaatttgcaacatgtatttttctaggacagtaaagtaatctttacaaatgaatttagttgcatggta

SEQ ID NO: 387497 - DNA, 1167 bp, Homo sapiens
ggacgcgtgggtcgacccacgcgtcggacccacgcgtccgctacaagtaaatatgaggaggattactacgaggatgatgaggaagatgaccctgatgccctgaaggatcctctctatcagattgatctgcaggcatatctcacagatttcctctgccagtttgctcagcagccctgctacataatgttttcaggccaccttaatgacaatgagaggcgagttctacagaccatcggcatctaaaaaggggagcctttctacatttgctccttctgggccagccgcaaaccattttgcagccctcactggccttgagatgcactttcttctcaacctaaagtggcatcttgacccttggcccttggcctcggcagtgacactgatgacaattcagaccaggctcaccggtgccgtcacttaggaatgctggaacaaaggacatttctcaaagttcccctgaagacatgccatctctagaaccttttttctccccgactctacccccacctctgttcctagagccctctgctggcgagtccagaaacattattgcccagaaggattatgtgtttatggattattttgccccgcctcaggagcgcaggaagtcactaccatttatattctaaaacagacctatctatgttcataggacttctgatgtgttcagataggaatcctcatgagagatcattatgctttgtgccctggaccactgctgctctgggttctcaggaggaacaggcaagagcagcttcattctaagcctttccagtgacctcagccttgcttctcttctacaacactaaggctcctctgtcagaggaggtcgtcttgtttttgcttcattgcatgacataacccttcccctcaagctgttcctatatatacatgcacacacaaaataagccagacagatggcaatttgatcttccttttttagaaaaaaaaaaaaaaaatggggaaaagggattttttttaaatccacctgacccaactatatttaatatgcctctcccacacattaccacagagtctgatattcaaaggttatcccctttccctcaggaagcctctaaagtgcttaagttgtagccctcaaatttgcaacatgtatttttctaggacagtaaagtaatctttacaaatgaatttagttgcatggta

SEQ ID NO: 387498 - DNA, 2770 bp, Homo sapiens
  misc_feature (531)..(531): n is a, c, g, or t
atggcggcggcggcggcagctggtgcggcctccgggctgccgggtccagtggcacaaggattaaaggaagcgttagtggatacgctcaccgggatcctatccccagtacaggaggtgcgggcggctgctgaagaacagattaaggtgctggaggtgacggaggaatttggtgttcacttggcagaactgactgtagatccccagggggcactggcaatccgtcagctggcatcagtcatcttgaaacaatatgtggagactcactggtgtgcccaatcagagaaatttaggcctcctgaaactacagaaagggcaaaaattgttatccgggagctattgcctaatgggttgagagaatcgataagcaaagtgcgctccagtgtggcctatgcagtgtcagccattgcccactgggactggcctgaagcttggccccaactcttcaacctgctcatggagatgttggtgagcggagacttaaatgccgtccatggagccatgcgtgtgctgacagaattcactcgtgaagtnacagacacacagatgccacttgttgctcctgtcattctcccagagatgtataagatcttcaccatggctgaggtgtatggtattcgaacccgttcccgagccgtggagatttttaccacttgtgcccatatgatctgtaacatggaggagctggaaaagggtgcagccaaagtcctgatctttcccgtggtacagcagttcacagaggcctttgttcaggccctccagataccagatggccccacatctgacagtgggtttaagatggaggtcctaaaggcagtgacagccctagtgaaaaacttcccaaagcacatggtgtcctccatgcagcagattctgcctattgtttggaacaccctaaccgagagtgcagctttttatgtgaggacagaagtaaattacacagaagaagtagaagatcctgtggattctgatggtgaagtcctgggctttgaaaatctcgtctttagcatttttgaatttgtccatgctctactagaaaatagcaaattcaaaagcactgttaagaaagccttgcctgaattgatttattatattatcctgtacatgcaaatcactgaggagcagattaaagtatggacagccaacccccaacaatttgtagaagatgaagatgatgatacattctcctatactgttagaatagcagctcaagacttgttgctggctgtggccacagatttccagaatgaaagtgcagcagccctggctgctgcagccactcgacatttacaagaagctgagcaaaccaaaaacagtggcactgagcactggtggaagatccatgaggcatgcatgcttgccctaggctcagtgaaggccatcatcactgacagtgtgaaaaatggcaggattcattttgacatgcatgggttcctgaccaatgtcatccttgcagacctcaacctctcagtgtctcctttcctcttgggccgggcactttgggctgccagtcggttcactgttgctatgtcccctgaactgatccagcagttcctacaggcaacagttagtggtcttcacgagacacagcccccatcagttcgaatttctgcagtgagagccatctggggttattgtgaccaactgaaagtctcagagagtacccacgtgctccagcccttcctccccagcatccttgatggcttaattcacctagcagcccagttcagctcagaggtcctcaacctggtgatggagaccctgtgcatcgtttgtacagtagaccccgaattcacagcaagcatggaaagcaaaatctgccccttcaccatcgccattttcctaaagtacagtaatgatcccgtcgtcgcctcactggctcaggacatcttcaaggagctgtcccagattgaagcctgtcagggcccaatgcaaatgaggctgattcccactctggtcagcataatgcaggccccagcagacaagattcctgcagggctttgtgcgacagccattgatatcctgacaacagtagtacgaaatacaaagcctcccctttcccagcttctcatctgccaagctttccctgctgtggcacagtgtacccttcacacagatgacaatgccaccatgcagaatggcggagagtgcttgcgggcctatgtgtcagtgaccctggaacaagtagcccagtggcatgatgagcagggccacaatggactgtggtatgtgatgcaagtggtgagccagctcctggacccccgcacctcagagttcactgcggcctttgtgggccgccttgtttccaccctcatctccaaggcagggcgggaactcggggagaatctagaccagattcttcgtgccatcctcagtaagatgcagcaggcagagacgctcagtgtcatgcagtccctgatcatggtgttcgctcatctggtgcacactcagctagaacctctcttggagttcctgtgtagcctcccaggacctactggcaaacctgctctagagtttgtgatggctgagtggacaagccgacagcacctgttctatggacagtatgaaggcaaagtcagctctgtggcactctgtaagctgctccagcatggcatcaatgcagatgacaaacggctacaggatatccgtgtgaagggagaggagatctacagcatggatgagggcatccgcacccgctctaagtcagccaaaaacccagaagctggacaaacattcctgtgctggatcagcagatcgagtgagatcctgagag

SEQ ID NO: 387499 - DNA, 1311 bp, Homo sapiens
gggttttgggtgggctggaactttgcacttgatgtgttgtaattcatcttctagaggctatgttgtgaaggtccttggggtgatacagccttggaaaaatgttgtttccctgtggattacctaaactagatccaagaacatgaaagaccatccctcagggagctggcatttgtctaaaaaccagcattccctgtgccatttgattgtggttcttgctccactgcaaatgggtgacttgcaatgtctcactaatgccactcttgctctttcctccaggcatatctcacagatttcctctgccagtttgctcagcagccctgctacataatgttttcaggccaccttaatgacaatgagaggcgagttctacagaccatcggcatctaaaaaggggagcctttctacatttgctccttctgggccagccgcaaaccattttgcagccctcactggccttgagatgcactttcttctcaacctaaagtggcatcttgacccttggcccttggcctcggcagtgacactgatgacaattcagaccaggctcaccggtgccgtcacttaggaatgctggaacaaaggacatttctcaaagttcccctgaagacatgccatctctagaaccttttttctccccgactctacccccacctctgttcctagagccctctgctggcgagtccagaaacattattgcccagaaggattatgtgtttatggattattttgccccgcctcaggagcgcaggaagtcactaccatttatattctaaaacagacctatctatgttcataggacttctgatgtgttcagataggaatcctcatgagagatcattatgctttgtgccctggaccactgctgctctgggttctcaggaggaacaggcaagagcagcttcattctaagcctttccagtgacctcagccttgcttctcttctacaacactaaggctcctctgtcagaggaggtcgtcttgtttttgcttcattgcatgacataacccttcccctcaagctgttcctatatatacatgcacacacaaaataagccagacagatggcaatttgatcttccttttttagaaaaaaaaaaaaaaaatggggaaaagggattttttttaaatccacctgacccaactatatttaatatgcctctcccacacattaccacagagtctgatattcaaaggttatcccctttccctcaggaagcctctaaagtgcttaagttgtagccctcaaatttgcaacatgtatttttctaggacagtaaagtaatctttacaaatgaatttagttgcatggta

SEQ ID NO: 387500 - DNA, 1107 bp, Homo sapiens
acctgcggcctcacagtgagacattttacccttatgccgtggaagactcctcgcgtatcatattgatcagaagcatatctcacagatttcctctgccagtttgctcagcagccctgctacataatgttttcaggccaccttaatgacaatgagaggcgagttctacagaccatcggcatctaaaaaggggagcctttctacatttgctccttctgggccagccgcaaaccattttgcagccctcactggccttgagatgcactttcttctcaacctaaagtggcatcttgacccttggcccttggcctcggcagtgacactgatgacaattcagaccaggctcaccggtgccgtcacttaggaatgctggaacaaaggacatttctcaaagttcccctgaagacatgccatctctagaaccttttttctccccgactctacccccacctctgttcctagagccctctgctggcgagtccagaaacattattgcccagaaggattatgtgtttatggattattttgccccgcctcaggagcgcaggaagtcactaccatttatattctaaaacagacctatctatgttcataggacttctgatgtgttcagataggaatcctcatgagagatcattatgctttgtgccctggaccactgctgctctgggttctcaggaggaacaggcaagagcagcttcattctaagcctttccagtgacctcagccttgcttctcttctacaacactaaggctcctctgtcagaggaggtcgtcttgtttttgcttcattgcatgacataacccttcccctcaagctgttcctatatatacatgcacacacaaaataagccagacagatggcaatttgatcttccttttttagaaaaaaaaaaaaaaaatggggaaaagggattttttttaaatccacctgacccaactatatttaatatgcctctcccacacattaccacagagtctgatattcaaaggttatcccctttccctcaggaagcctctaaagtgcttaagttgtagccctcaaatttgcaacatgtatttttctaggacagtaaagtaatctttacaaatgaatttagttgcatggta

SEQ ID NO: 387501 - DNA, 825 bp, Homo sapiens
ctctgtgtggctcatggtggggctcttcgggtggcccattgcggggcgcgttgtgtggctcaccggtgccgtcacttaggaatgctggaacaaaggacatttctcaaagttcccctgaagacatgccatctctagaaccttttttctccccgactctacccccacctctgttcctagagccctctgctggcgagtccagaaacattattgcccagaaggattatgtgtttatggattattttgccccgcctcaggagcgcaggaagtcactaccatttatattctaaaacagacctatctatgttcataggacttctgatgtgttcagataggaatcctcatgagagatcattatgctttgtgccctggaccactgctgctctgggttctcaggaggaacaggcaagagcagcttcattctaagcctttccagtgacctcagccttgcttctcttctacaacactaaggctcctctgtcagaggaggtcgtcttgtttttgcttcattgcatgacataacccttcccctcaagctgttcctatatatacatgcacacacaaaataagccagacagatggcaatttgatcttccttttttagaaaaaaaaaaaaaaaatggggaaaagggattttttttaaatccacctgacccaactatatttaatatgcctctcccacacattaccacagagtctgatattcaaaggttatcccctttccctcaggaagcctctaaagtgcttaagttgtagccctcaaatttgcaacatgtatttttctaggacagtaaagtaatctttacaaatgaatttagttgcatggta

SEQ ID NO: 387502 - DNA, 734 bp, Homo sapiens
gggttttgggtgggctggaactttgcacttgatgtgttgtaattcatcttctagaggctatgttgtgaaggtccttggggtgatacagccttggaaaaatgttgtttccctgtggattacctaaactagatccaagaacatgaaagaccatccctcagggagctggcatttgtctaaaaaccagcattccctgtgccatttgattgtggttcttgctccactgcaaatgggtgacttgcaatgtctcactaatgccactcttgctctttcctccaggcatatctcacagatttcctctgccagtttgctcagcagccctgctacataatgttttcaggccaccttaatgacaatgagaggcgagttctacagaccatcggcatctgtcagaggaggtcgtcttgtttttgcttcattgcatgacataacccttcccctcaagctgttcctatatatacatgcacacacaaaataagccagacagatggcaatttgatcttccttttttagaaaaaaaaaaaaaaaatggggaaaagggattttttttaaatccacctgacccaactatatttaatatgcctctcccacacattaccacagagtctgatattcaaaggttatcccctttccctcaggaagcctctaaagtgcttaagttgtagccctcaaatttgcaacatgtatttttctaggacagtaaagtaatctttacaaatgaatttagttgcatggta

SEQ ID NO: 387503 - DNA, 3918 bp, Homo sapiens
  misc_feature (399)..(399): n is a, c, g, or t
ccgagcggaaggcggccacgctcggaaaaagaatttggtgttcacttggcagaactgactgtagatccccagggggcactggcaatccgtcagctggcatcagtcatcttgaaacaatatgtggagactcactggtgtgcccaatcagagaaatttaggcctcctgaaactacagaaagggcaaaaattgttatccgggagctattgcctaatgggttgagagaatcgataagcaaagtgcgctccagtgtggcctatgcagtgtcagccattgcccactgggactggcctgaagcttggccccaactcttcaacctgctcatggagatgttggtgagcggagacttaaatgccgtccatggagccatgcgtgtgctgacagaattcactcgtgaagtnacagacacacagatgccacttgttgctcctgtcattctcccagagatgtataagatcttcaccatggctgaggtgtatggtattcgaacccgttcccgagccgtggagatttttaccacttgtgcccatatgatctgtaacatggaggagctggaaaagggtgcagccaaagtcctgatctttcccgtggtacagcagttcacagaggcctttgttcaggccctccagataccagatggccccacatctgacagtgggtttaagatggaggtcctaaaggcagtgacagccctagtgaaaaacttcccaaagcacatggtgtcctccatgcagcagattctgcctattgtttggaacaccctaaccgagagtgcagctttttatgtgaggacagaagtaaattacacagaagaagtagaagatcctgtggattctgatggtgaagtcctgggctttgaaaatctcgtctttagcatttttgaatttgtccatgctctactagaaaatagcaaattcaaaagcactgttaagaaagccttgcctgaattgatttattatattatcctgtacatgcaaatcactgaggagcagattaaagtatggacagccaacccccaacaatttgtagaagatgaagatgatgatacattctcctatactgttagaatagcagctcaagacttgttgctggctgtggccacagatttccagaatgaaagtgcagcagccctggctgctgcagccactcgacatttacaagaagctgagcaaaccaaaaacagtggcactgagcactggtggaagatccatgaggcatgcatgcttgccctaggctcagtgaaggccatcatcactgacagtgtgaaaaatggcaggattcattttgacatgcatgggttcctgaccaatgtcatccttgcagacctcaacctctcagtgtctcctttcctcttgggccgggcactttgggctgccagtcggttcactgttgctatgtcccctgaactgatccagcagttcctacaggcaacagttagtggtcttcacgagacacagcccccatcagttcgaatttctgcagtgagagccatctggggttattgtgaccaactgaaagtctcagagagtacccacgtgctccagcccttcctccccagcatccttgatggcttaattcacctagcagcccagttcagctcagaggtcctcaacctggtgatggagaccctgtgcatcgtttgtacagtagaccccgaattcacagcaagcatggaaagcaaaatctgccccttcaccatcgccattttcctaaagtacagtaatgatcccgtcgtcgcctcactggctcaggacatcttcaaggagctgtcccagattgaagcctgtcagggcccaatgcaaatgaggctgattcccactctggtcagcataatgcaggccccagcagacaagattcctgcagggctttgtgcgacagccattgatatcctgacaacagtagtacgaaatacaaagcctcccctttcccagcttctcatctgccaagctttccctgctgtggcacagtgtacccttcacacagatgacaatgccaccatgcagaatggcggagagtgcttgcgggcctatgtgtcagtgaccctggaacaagtagcccagtggcatgatgagcagggccacaatggactgtggtatgtgatgcaagtggtgagccagctcctggacccccgcacctcagagttcactgcggcctttgtgggccgccttgtttccaccctcatctccaaggcagggcgggaactcggggagaatctagaccagattcttcgtgccatcctcagtaagatgcagcaggcagagacgctcagtgtcatgcagtccctgatcatggtgttcgctcatctggtgcacactcagctagaacctctcttggagttcctgtgtagcctcccaggacctactggcaaacctgctctagagtttgtgatggctgagtggacaagccgacagcacctgttctatggacagtatgaaggcaaagtcagctctgtggcactctgtaagctgctccagcatggcatcaatgcagatgacaaacggctacaggatatccgtgtgaagggagaggagatctacagcatggatgagggcatccgcacccgctctaagtcagccaaaaacccagaacgctggacaaacattcctttgctggtcaagatcctaaagctgatcatcaacgagctctccaacgtcatggaggctaatgccgctcgccaggccactcctgcagagtggagtcaagatgactccaatgatatgtgggaggaccaggaggaggaagaggaggaggaggaggatggtttagctggccaacttttatctgacattcttgctacaagtaaatatgaggaggattactacgaggatgatgaggaagatgaccctgatgccctgaaggatcctctctatcagattgatctgcaggcatatctcacagatttcctctgccagtttgctcagcagccctgctacataatgttttcaggccaccttaatgacaatgagaggcgagttctacagaccatcggcatctaaaaaggggagcctttctacatttgctccttctgggccagccgcaaaccattttgcagccctcactggccttgagatgcactttcttctcaacctaaagtggcatcttgacccttggcccttggcctcggcagtgacactgatgacaattcagaccaggctcaccggtgccgtcacttaggaatgctggaacaaaggacatttctcaaagttcccctgaagacatgccatctctagaaccttttttctccccgactctacccccacctctgttcctagagccctctgctggcgagtccagaaacattattgcccagaaggattatgtgtttatggattattttgccccgcctcaggagcgcaggaagtcactaccatttatattctaaaacagacctatctatgttcataggacttctgatgtgttcagataggaatcctcatgagagatcattatgctttgtgccctggaccactgctgctctgggttctcaggaggaacaggcaagagcagcttcattctaagcctttccagtgacctcagccttgcttctcttctacaacactaaggctcctctgtcagaggaggtcgtcttgtttttgcttcattgcatgacataacccttcccctcaagctgttcctatatatacatgcacacacaaaataagccagacagatggcaatttgatcttccttttttagaaaaaaaaaaaaaaaatggggaaaagggattttttttaaatccacctgacccaactatatttaatatgcctctcccacacattaccacagagtctgatattcaaaggttatcccctttccctcaggaagcctctaaagtgcttaagttgtagccctcaaatttgcaacatgtatttttctaggacagtaaagtaatctttacaaatgaatttagttgcatggta

SEQ ID NO: 387504 - DNA, 3425 bp, Homo sapiens
actcagaggatcctaaaagtgcactcttctatattacgatctgtaacatggaggagctggaaaaaggtgcagccaaagtcctgatctttcccgtggtacagcagttcacagaggcctttgttcaggccctccagataccagatggccccacatctgacagtgggtttaagatggaggtcctaaaggcagtgacagccctagtgaaaaacttcccaaagcacatggtgtcctccatgcagcagattctgcctattgtttggaacaccctaaccgagagtgcagctttttatgtgaggacagaagtaaattacacagaagaagtagaagatcctgtggattctgatggtgaagtcctgggctttgaaaatctcgtctttagcatttttgaatttgtccatgctctactagaaaatagcaaattcaaaagcactgttaagaaagccttgcctgaattgatttattatattatcctgtacatgcaaatcactgaggagcagattaaagtatggacagccaacccccaacaatttgtagaagatgaagatgatgatacattctcctatactgttagaatagcagctcaagacttgttgctggctgtggccacagatttccagaatgaaagtgcagcagccctggctgctgcagccactcgacatttacaagaagctgagcaaaccaaaaacagtggcactgagcactggtggaagatccatgaggcatgcatgcttgccctaggctcagtgaaggccatcatcactgacagtgtgaaaaatggcaggattcattttgacatgcatgggttcctgaccaatgtcatccttgcagacctcaacctctcagtgtctcctttcctcttgggccgggcactttgggctgccagtcggttcactgttgctatgtcccctgaactgatccagcagttcctacaggcaacagttagtggtcttcacgagacacagcccccatcagttcgaatttctgcagtgagagccatctggggttattgtgaccaactgaaagtctcagagagtacccacgtgctccagcccttcctccccagcatccttgatggcttaattcacctagcagcccagttcagctcagaggtcctcaacctggtgatggagaccctgtgcatcgtttgtacagtagaccccgaattcacagcaagcatggaaagcaaaatctgccccttcaccatcgccattttcctaaagtacagtaatgatcccgtcgtcgcctcactggctcaggacatcttcaaggagctgtcccagattgaagcctgtcagggcccaatgcaaatgaggctgattcccactctggtcagcataatgcaggccccagcagacaagattcctgcagggctttgtgcgacagccattgatatcctgacaacagtagtacgaaatacaaagcctcccctttcccagcttctcatctgccaagctttccctgctgtggcacagtgtacccttcacacagatgacaatgccaccatgcagaatggcggagagtgcttgcgggcctatgtgtcagtgaccctggaacaagtagcccagtggcatgatgagcagggccacaatggactgtggtatgtgatgcaagtggtgagccagctcctggacccccgcacctcagagttcactgcggcctttgtgggccgccttgtttccaccctcatctccaaggcagggcgggaactcggggagaatctagaccagattcttcgtgccatcctcagtaagatgcagcaggcagagacgctcagtgtcatgcagtccctgatcatggtgttcgctcatctggtgcacactcagctagaacctctcttggagttcctgtgtagcctcccaggacctactggcaaacctgctctagagtttgtgatggctgagtggacaagccgacagcacctgttctatggacagtatgaaggcaaagtcagctctgtggcactctgtaagctgctccagcatggcatcaatgcagatgacaaacggctacaggatatccgtgtgaagggagaggagatctacagcatggatgagggcatccgcacccgctctaagtcagccaaaaacccagaacgctggacaaacattcctttgctggtcaagatcctaaagctgatcatcaacgagctctccaacgtcatggaggctaatgccgctcgccaggccactcctgcagagtggagtcaagatgactccaatgatatgtgggaggaccaggaggaggaagaggaggaggaggaggatggtttagctggccaacttttatctgacattcttgctacaagtaaatatgaggaggattactacgaggatgatgaggaagatgaccctgatgccctgaaggatcctctctatcagattgatctgcaggcatatctcacagatttcctctgccagtttgctcagcagccctgctacataatgttttcaggccaccttaatgacaatgagaggcgagttctacagaccatcggcatctaaaaaggggagcctttctacatttgctccttctgggccagccgcaaaccattttgcagccctcactggccttgagatgcactttcttctcaacctaaagtggcatcttgacccttggcccttggcctcggcagtgacactgatgacaattcagaccaggctcaccggtgccgtcacttaggaatgctggaacaaaggacatttctcaaagttcccctgaagacatgccatctctagaaccttttttctccccgactctacccccacctctgttcctagagccctctgctggcgagtccagaaacattattgcccagaaggattatgtgtttatggattattttgccccgcctcaggagcgcaggaagtcactaccatttatattctaaaacagacctatctatgttcataggacttctgatgtgttcagataggaatcctcatgagagatcattatgctttgtgccctggaccactgctgctctgggttctcaggaggaacaggcaagagcagcttcattctaagcctttccagtgacctcagccttgcttctcttctacaacactaaggctcctctgtcagaggaggtcgtcttgtttttgcttcattgcatgacataacccttcccctcaagctgttcctatatatacatgcacacacaaaataagccagacagatggcaatttgatcttccttttttagaaaaaaaaaaaaaaaatggggaaaagggattttttttaaatccacctgacccaactatatttaatatgcctctcccacacattaccacagagtctgatattcaaaggttatcccctttccctcaggaagcctctaaagtgcttaagttgtagccctcaaatttgcaacatgtatttttctaggacagtaaagtaatctttacaaatgaatttagttgcatggta

SEQ ID NO: 387505 - DNA, 3796 bp, Homo sapiens
  misc_feature (531)..(531): n is a, c, g, or t
atggcggcggcggcggcagctggtgcggcctccgggctgccgggtccagtggcacaaggattaaaggaagcgttagtggatacgctcaccgggatcctatccccagtacaggaggtgcgggcggctgctgaagaacagattaaggtgctggaggtgacggaggaatttggtgttcacttggcagaactgactgtagatccccagggggcactggcaatccgtcagctggcatcagtcatcttgaaacaatatgtggagactcactggtgtgcccaatcagagaaatttaggcctcctgaaactacagaaagggcaaaaattgttatccgggagctattgcctaatgggttgagagaatcgataagcaaagtgcgctccagtgtggcctatgcagtgtcagccattgcccactgggactggcctgaagcttggccccaactcttcaacctgctcatggagatgttggtgagcggagacttaaatgccgtccatggagccatgcgtgtgctgacagaattcactcgtgaagtnacagacacacagatgccacttgttgctcctgtcattctcccagagatgtataagatcttcaccatggctgaggtgtatggtattcgaacccgttcccgagccgtggagatttttaccacttgtgcccatatgatctgtaacatggaggagctggaaaagggtgcagccaaagtcctgatctttcccgtggtacagcagttcacagaggcctttgttcaggccctccagataccagatggccccacatctgacagtgggtttaagatggaggtcctaaaggcagtgacagccctagtgaaaaacttcccaaagcacatggtgtcctccatgcagcagattctgcctattgtttggaacaccctaaccgagagtgcagctttttatgtgaggacagaagtaaattacacagaagaagtagaagatcctgtggattctgatggtgaagtcctgggctttgaaaatctcgtctttagcatttttgaatttgtccatgctctactagaaaatagcaaattcaaaagcactgttaagaaagccttgcctgaattgatttattatattatcctgtacatgcaaatcactgaggagcagattaaagtatggacagccaacccccaacaatttgtagaagatgaagatgatgatacattctcctatactgttagaatagcagctcaagacttgttgctggctgtggccacagatttccagaatgaaagtgcagcagccctggctgctgcagccactcgacatttacaagaagctgagcaaaccaaaaacagtggcactgagcactggtggaagatccatgaggcatgcatgcttgccctaggctcagtgaaggccatcatcactgacagtgtgaaaaatggcaggattcattttgacatgcatgggttcctgaccaatgtcatccttgcagacctcaacctctcagtgtctcctttcctcttgggccgggcactttgggctgccagtcggttcactgttgctatgtcccctgaactgatccagcagttcctacaggcaacagttagtggtcttcacgagacacagcccccatcagttcgaatttctgcagtgagagccatctggggttattgtgaccaactgaaagtctcagagagtacccacgtgctccagcccttcctccccagcatccttgatggcttaattcacctagcagcccagttcagctcagaggtcctcaacctggtgatggagaccctgtgcatcgtttgtacagtagaccccgaattcacagcaagcatggaaagcaaaatctgccccttcaccatcgccattttcctaaagtacagtaatgatcccgtcgtcgcctcactggctcaggacatcttcaaggagctgtcccagattgaagcctgtcagggcccaatgcaaatgaggctgattcccactctggtcagcataatgcaggccccagcagacaagattcctgcagggctttgtgcgacagccattgatatcctgacaacagtagtacgaaatacaaagcctcccctttcccagcttctcatctgccaagctttccctgctgtggcacagtgtacccttcacacagatgacaatgccaccatgcagaatggcggagagtgcttgcgggcctatgtgtcagtgaccctggaacaagtagcccagtggcatgatgagcagggccacaatggactgtggtatgtgatgcaagtggtgagccagctcctggacccccgcacctcagagttcactgcggcctttgtgggccgccttgtttccaccctcatctccaaggcagggcgggaactcggggagaatctagaccagattcttcgtgccatcctcagtaagatgcagcaggcagagacgctcagtgtcatgcagtccctgatcatggtgttcgctcatctggtgcacactcagctagaacctctcttggagttcctgtgtagcctcccaggacctactggcaaacctgctctagagtttgtgatggctgagtggacaagccgacagcacctgttctatggacagtatgaaggcaaagtcagctctgtggcactctgtaagctgctccagcatggcatcaatgcagatgacaaacggctacaggatatccgtgtgaagggagaggagatctacagcatggatgagggcatccgcacccgctctaagtcagccaaaaacccagaacgctggacaaacattcctttgctggtcaagatcctaaagctgatcatcaacgagctctccaacgtcatggaggctaatgccgctcgccaggccactcctgcagagtggagtcaagatgactccaatgatatgtgggaggaccaggaggaggaagaggaggaggaggaggatggtttagctggccaacttttatctgacattcttgctacaagtaaatatgaggaggattactacgaggatgatgaggaagatgaccctgatgccctgaaggatcctctctatcagattgatctgcaggcatatctcacagatttcctctgccagtttgctcagcagccctgctacataatgttttcaggccaccttaatgacaatgagaggcgagttctacagaccatcggcatctaaaaaggggagcctttctacatttgctccttctgggccagccgcaaaccattttgcagccctcactggccttgagatgcactttcttctcaacctaaagtggcatcttgacccttggcccttggcctcggcagtgacactgatgacaattcagaccaggctcaccggtgccgtcacttaggaatgctggaacaaaggacatttctcaaagttcccctgaagacatgccatctctagaaccttttttctccccgactctacccccacctctgttcctagagccctctgctggcgagtccagaaacattattgcccagaaggattatgtgtttatggattattttgccccgcctcaggagcgcaggaagtcactaccatttatattctaaaacagacctatctatgttcataggacttctgatgtgttcagataggaatcctcatgagagatcattatgctttgtgccctggaccactgctgctctgggttctcaggaggaacaggcaagagcagcttcattctaagcctttccagtgacctcagccttgcttctcttctacaacactaaggctcctctgtcagaggaggtcccttcgcccccccacaacagccctcttaaaactaattggctttttagatacaccccacaaaagctcagaaattggctttaaa

SEQ ID NO: 387506 - DNA, 3999 bp, Homo sapiens
  misc_feature (531)..(531): n is a, c, g, or t
atggcggcggcggcggcagctggtgcggcctccgggctgccgggtccagtggcacaaggattaaaggaagcgttagtggatacgctcaccgggatcctatccccagtacaggaggtgcgggcggctgctgaagaacagattaaggtgctggaggtgacggaggaatttggtgttcacttggcagaactgactgtagatccccagggggcactggcaatccgtcagctggcatcagtcatcttgaaacaatatgtggagactcactggtgtgcccaatcagagaaatttaggcctcctgaaactacagaaagggcaaaaattgttatccgggagctattgcctaatgggttgagagaatcgataagcaaagtgcgctccagtgtggcctatgcagtgtcagccattgcccactgggactggcctgaagcttggccccaactcttcaacctgctcatggagatgttggtgagcggagacttaaatgccgtccatggagccatgcgtgtgctgacagaattcactcgtgaagtnacagacacacagatgccacttgttgctcctgtcattctcccagagatgtataagatcttcaccatggctgaggtgtatggtattcgaacccgttcccgagccgtggagatttttaccacttgtgcccatatgatctgtaacatggaggagctggaaaagggtgcagccaaagtcctgatctttcccgtggtacagcagttcacagaggcctttgttcaggccctccagataccagatggccccacatctgacagtgggtttaagatggaggtcctaaaggcagtgacagccctagtgaaaaacttcccaaagcacatggtgtcctccatgcagcagattctgcctattgtttggaacaccctaaccgagagtgcagctttttatgtgaggacagaagtaaattacacagaagaagtagaagatcctgtggattctgatggtgaagtcctgggctttgaaaatctcgtctttagcatttttgaatttgtccatgctctactagaaaatagcaaattcaaaagcactgttaagaaagccttgcctgaattgatttattatattatcctgtacatgcaaatcactgaggagcagattaaagtatggacagccaacccccaacaatttgtagaagatgaagatgatgatacattctcctatactgttagaatagcagctcaagacttgttgctggctgtggccacagatttccagaatgaaagtgcagcagccctggctgctgcagccactcgacatttacaagaagctgagcaaaccaaaaacagtggcactgagcactggtggaagatccatgaggcatgcatgcttgccctaggctcagtgaaggccatcatcactgacagtgtgaaaaatggcaggattcattttgacatgcatgggttcctgaccaatgtcatccttgcagacctcaacctctcagtgtctcctttcctcttgggccgggcactttgggctgccagtcggttcactgttgctatgtcccctgaactgatccagcagttcctacaggcaacagttagtggtcttcacgagacacagcccccatcagttcgaatttctgcagtgagagccatctggggttattgtgaccaactgaaagtctcagagagtacccacgtgctccagcccttcctccccagcatccttgatggcttaattcacctagcagcccagttcagctcagaggtcctcaacctggtgatggagaccctgtgcatcgtttgtacagtagaccccgaattcacagcaagcatggatcccgtcgtcgcctcactggctcaggacatcttcaaggagctgtcccagattgaagcctgtcagggcccaatgcaaatgaggctgattcccactctggtcagcataatgcaggccccagcagacaagattcctgcagggctttgtgcgacagccattgatatcctgacaacagtagtacgaaatacaaagcctcccctttcccagcttctcatctgccaagctttccctgctgtggcacagtgtacccttcacacagatgacaatgccaccatgcagaatggcggagagtgcttgcgggcctatgtgtcagtgaccctggaacaagtagcccagtggcatgatgagcagggccacaatggactgtggtatgtgatgcaagtggtgagccagctcctggacccccgcacctcagagttcactgcggcctttgtgggccgccttgtttccaccctcatctccaaggcagggcgggaactcggggagaatctagaccagattcttcgtgccatcctcagtaagatgcagcaggcagagacgctcagtgtcatgcagtccctgatcatggtgttcgctcatctggtgcacactcagctagaacctctcttggagttcctgtgtagcctcccaggacctactggcaaacctgctctagagtttgtgatggctgagtggacaagccgacagcacctgttctatggacagtatgaaggcaaagtcagctctgtggcactctgtaagctgctccagcatggcatcaatgcagatgacaaacggctacaggatatccgtgtgaagggagaggagatctacagcatggatgagggcatccgcacccgctctaagtcagccaaaaacccagaacgctggacaaacattcctttgctggtcaagatcctaaagctgatcatcaacgagctctccaacgtcatggaggctaatgccgctcgccaggccactcctgcagagtggagtcaagatgactccaatgatatgtgggaggaccaggaggaggaagaggaggaggaggaggatggtttagctggccaacttttatctgacattcttgctacaagtaaatatgaggaggattactacgaggatgatgaggaagatgaccctgatgccctgaaggatcctctctatcagattgatctgcaggcatatctcacagatttcctctgccagtttgctcagcagccctgctacataatgttttcaggccaccttaatgacaatgagaggcgagttctacagaccatcggcatctaaaaaggggagcctttctacatttgctccttctgggccagccgcaaaccattttgcagccctcactggccttgagatgcactttcttctcaacctaaagtggcatcttgacccttggcccttggcctcggcagtgacactgatgacaattcagaccaggctcaccggtgccgtcacttaggaatgctggaacaaaggacatttctcaaagttcccctgaagacatgccatctctagaaccttttttctccccgactctacccccacctctgttcctagagccctctgctggcgagtccagaaacattattgcccagaaggattatgtgtttatggattattttgccccgcctcaggagcgcaggaagtcactaccatttatattctaaaacagacctatctatgttcataggacttctgatgtgttcagataggaatcctcatgagagatcattatgctttgtgccctggaccactgctgctctgggttctcaggaggaacaggcaagagcagcttcattctaagcctttccagtgacctcagccttgcttctcttctacaacactaaggctcctctgtcagaggaggtcgtcttgtttttgcttcattgcatgacataacccttcccctcaagctgttcctatatatacatgcacacacaaaataagccagacagatggcaatttgatcttccttttttagaaaaaaaaaaaaaaaatggggaaaagggattttttttaaatccacctgacccaactatatttaatatgcctctcccacacattaccacagagtctgatattcaaaggttatcccctttccctcaggaagcctctaaagtgcttaagttgtagccctcaaatttgcaacatgtatttttctaggacagtaaagtaatctttacaaatgaatttagttgcatggta

SEQ ID NO: 387507 - DNA, 4191 bp, Homo sapiens
  misc_feature (531)..(531): n is a, c, g, or t
  misc_feature (1748)..(1748): n is a, c, g, or t
atggcggcggcggcggcagctggtgcggcctccgggctgccgggtccagtggcacaaggattaaaggaagcgttagtggatacgctcaccgggatcctatccccagtacaggaggtgcgggcggctgctgaagaacagattaaggtgctggaggtgacggaggaatttggtgttcacttggcagaactgactgtagatccccagggggcactggcaatccgtcagctggcatcagtcatcttgaaacaatatgtggagactcactggtgtgcccaatcagagaaatttaggcctcctgaaactacagaaagggcaaaaattgttatccgggagctattgcctaatgggttgagagaatcgataagcaaagtgcgctccagtgtggcctatgcagtgtcagccattgcccactgggactggcctgaagcttggccccaactcttcaacctgctcatggagatgttggtgagcggagacttaaatgccgtccatggagccatgcgtgtgctgacagaattcactcgtgaagtnacagacacacagatgccacttgttgctcctgtcattctcccagagatgtataagatcttcaccatggctgaggtgtatggtattcgaacccgttcccgagccgtggagatttttaccacttgtgcccatatgatctgtaacatggaggagctggaaaagggtgcagccaaagtcctgatctttcccgtggtacagcagttcacagaggcctttgttcaggccctccagataccagatggccccacatctgacagtgggtttaagatggaggtcctaaaggcagtgacagccctagtgaaaaacttcccaaagcacatggtgtcctccatgcagcagattctgcctattgtttggaacaccctaaccgagagtgcagctttttatgtgaggacagaagtaaattacacagaagaagtagaagatcctgtggattctgatggtgaagtcctgggctttgaaaatctcgtctttagcatttttgaatttgtccatgctctactagaaaatagcaaattcaaaagcactgttaagaaagccttgcctgaattgatttattatattatcctgtacatgcaaatcactgaggagcagattaaagtatggacagccaacccccaacaatttgtagaagatgaagatgatgatacattctcctatactgttagaatagcagctcaagacttgttgctggctgtggccacagatttccagaatgaaagtgcagcagccctggctgctgcagccactcgacatttacaagaagctgagcaaaccaaaaacagtggcactgagcactggtggaagatccatgaggcatgcatgcttgccctaggctcagtgaaggccatcatcactgacagtgtgaaaaatggcaggattcattttgacatgcatgggttcctgaccaatgtcatccttgcagacctcaacctctcagtgtctcctttcctcttgggccgggcactttgggctgccagtcggttcactgttgctatgtcccctgaactgatccagcagttcctacaggcaacagttagtggtcttcacgagacacagcccccatcagttcgaatttctgcagtgagagccatctggggttattgtgaccaactgaaagtctcagagagtacccacgtgctccagcccttcctccccagcatccttgatggcttaattcacctagcagcccagttcgaggcatcatgacgtgtccttcnaatccgttggatgataggacgaccgcgttgtgcagtctgtatttgtagcatgtcaagacgcccagataattcgagccagcagagcactggacaaagccaagagatctatgcgcctcgttcgactcgagtcgctccatgttatccgtcaagagttaccagtaatttgactcgccctgatacgatcgctcttcgaacattgtggcctcacgtgagcgaatctgtcacatgtgacgccggtgttccccacgtatttgtgaaagcccgtggttaccagtgggcacccaaattgtcgagacagtgggagcggctcgatttgtccgcaaactgcttggtgtcagggcaaataaattggcagagctccacagcagacagagattcctgtcagggcttatgtgcgacagccattgatatcctgacaacagtagtacgaaatacaaagcctcccctttcccagcttctcatctgccaagctttccctgctgtggcacagtgtacccttcacacagatgacaatgccaccatgcagaatggcggagagtgcttgcgggcctatgtgtcagtgaccctggaacaagtagcccagtggcatgatgagcagggccacaatggactgtggtatgtgatgcaagtggtgagccagctcctggacccccgcacctcagagttcactgcggcctttgtgggccgccttgtttccaccctcatctccaaggcagggcgggaactcggggagaatctagaccagattcttcgtgccatcctcagtaagatgcagcaggcagagacgctcagtgtcatgcagtccctgatcatggtgttcgctcatctggtgcacactcagctagaacctctcttggagttcctgtgtagcctcccaggacctactggcaaacctgctctagagtttgtgatggctgagtggacaagccgacagcacctgttctatggacagtatgaaggcaaagtcagctctgtggcactctgtaagctgctccagcatggcatcaatgcagatgacaaacggctacaggatatccgtgtgaagggagaggagatctacagcatggatgagggcatccgcacccgctctaagtcagccaaaaacccagaacgctggacaaacattcctttgctggtcaagatcctaaagctgatcatcaacgagctctccaacgtcatggaggctaatgccgctcgccaggccactcctgcagagtggagtcaagatgactccaatgatatgtgggaggaccaggaggaggaagaggaggaggaggaggatggtttagctggccaacttttatctgacattcttgctacaagtaaatatgaggaggattactacgaggatgatgaggaagatgaccctgatgccctgaaggatcctctctatcagattgatctgcaggcatatctcacagatttcctctgccagtttgctcagcagccctgctacataatgttttcaggccaccttaatgacaatgagaggcgagttctacagaccatcggcatctaaaaaggggagcctttctacatttgctccttctgggccagccgcaaaccattttgcagccctcactggccttgagatgcactttcttctcaacctaaagtggcatcttgacccttggcccttggcctcggcagtgacactgatgacaattcagaccaggctcaccggtgccgtcacttaggaatgctggaacaaaggacatttctcaaagttcccctgaagacatgccatctctagaaccttttttctccccgactctacccccacctctgttcctagagccctctgctggcgagtccagaaacattattgcccagaaggattatgtgtttatggattattttgccccgcctcaggagcgcaggaagtcactaccatttatattctaaaacagacctatctatgttcataggacttctgatgtgttcagataggaatcctcatgagagatcattatgctttgtgccctggaccactgctgctctgggttctcaggaggaacaggcaagagcagcttcattctaagcctttccagtgacctcagccttgcttctcttctacaacactaaggctcctctgtcagaggaggtcgtcttgtttttgcttcattgcatgacataacccttcccctcaagctgttcctatatatacatgcacacacaaaataagccagacagatggcaatttgatcttccttttttagaaaaaaaaaaaaaaaatggggaaaagggattttttttaaatccacctgacccaactatatttaatatgcctctcccacacattaccacagagtctgatattcaaaggttatcccctttccctcaggaagcctctaaagtgcttaagttgtagccctcaaatttgcaacatgtatttttctaggacagtaaagtaatctttacaaatgaatttagttgcatggta

SEQ ID NO: 387508 - DNA, 4347 bp, Homo sapiens
  misc_feature (531)..(531): n is a, c, g, or t
atggcggcggcggcggcagctggtgcggcctccgggctgccgggtccagtggcacaaggattaaaggaagcgttagtggatacgctcaccgggatcctatccccagtacaggaggtgcgggcggctgctgaagaacagattaaggtgctggaggtgacggaggaatttggtgttcacttggcagaactgactgtagatccccagggggcactggcaatccgtcagctggcatcagtcatcttgaaacaatatgtggagactcactggtgtgcccaatcagagaaatttaggcctcctgaaactacagaaagggcaaaaattgttatccgggagctattgcctaatgggttgagagaatcgataagcaaagtgcgctccagtgtggcctatgcagtgtcagccattgcccactgggactggcctgaagcttggccccaactcttcaacctgctcatggagatgttggtgagcggagacttaaatgccgtccatggagccatgcgtgtgctgacagaattcactcgtgaagtnacagacacacagatgccacttgttgctcctgtcattctcccagagatgtataagatcttcaccatggctgaggtgtatggtattcgaacccgttcccgagccgtggagatttttaccacttgtgcccatatgatctgtaacatggaggagctggaaaagggtgcagccaaagtcctgatctttcccgtggtacagcagttcacagaggcctttgttcaggccctccagataccagatggccccacatctgacagtgggtttaagatggaggtcctaaaggcagtgacagccctagtgaaaaacttcccaaagcacatggtgtcctccatgcagcagattctgcctattgtttggaacaccctaaccgagagtgcagctttttatgtgaggacagaagtaaattacacagaagaagtagaagatcctgtggattctgatggtgaagtcctgggctttgaaaatctcgtctttagcatttttgaatttgtccatgctctactagaaaatagcaaattcaaaagcactgttaagaaagccttgcctgaattgatttattatattatcctgtacatgcaaatcactgaggagcagattaaagtatggacagccaacccccaacaatttgtagaagatgaagatgatgatacattctcctatactgttagaatagcagctcaagacttgttgctggctgtggccacagatttccagaatgaaagtgcagcagccctggctgctgcagccactcgacatttacaagaagctgagcaaaccaaaaacagtggcactgagcactggtggaagatccatgaggcatgcatgcttgccctaggctcagtgaaggccatcatcactgacagtgtgaaaaatggcaggattcattttgacatgcatgggttcctgaccaatgtcatccttgcagacctcaacctctcagtgtctcctttcctcttgggccgggcactttgggctgccagtcggttcactgttgctatgtcccctgaactgatccagcagttcctacaggcaacagttagtggtcttcacgagacacagcccccatcagttcgaatttctgcagtgagagccatctggggttattgtgaccaactgaaagtctcagagagtacccacgtgctccagcccttcctccccagcatccttgatggcttaattcacctagcagcccagttcagctcagaggtcctcaacctggtgatggagaccctgtgcatcgtttgtacagtagaccccgaattcacagcaagcatggaaagcaaaatctgccccttcaccatcgccattttcctaaagtacagtaatgatcccgtcgtcgcctcactggctcaggacatcttcaaggagctgtcccagattgaagcctgtcagggcccaatgcaaatgaggctgattcccactctggtcagcataatgcaggccccagcagacaagattcctgcagggctttgtgcgacagccattgatatcctgacaacagtagtacgaaatacaaagcctcccctttcccagcttctcatctgccaagctttccctgctgtggcacagtgtacccttcacacagatgacaatgccaccatgcagaatggcggagagtgcttgcgggcctatgtgtcagtgaccctggaacaagtagcccagtggcatgatgagcagggccacaatggactgtggtatgtgatgcaagtggtgagccagctcctggacccccgcacctcagagttcactgcggcctttgtgggccgccttgtttccaccctcatctccaaggcagggcgggaactcggggagaatctagaccagattcttcgtgccatcctcagtaagatgcagcaggcagagacgctcagtgtcatgcaggtaagagagcagtggggagtgggcttcctactccctggctgatagaaatgaaaattcgtattttggtcctgagttattttaccctcttactagccttgtaggacagttaagtaaaatgggacctgtctgatctgtttggcctaagaaacatggacaaggaaatctcccatgttttcttgtcctgtggataataccctcagtgtagactgtatttcttatctgactggccagttccctctcatctcctatgtctctgaaattgatttccctgaagcaaatgtccttattttctcctagtccctgatcatggtgttcgctcatctggtgcacactcagctagaacctctcttggagttcctgtgtagcctcccaggacctactggcaaacctgctctagagtttgtgatggctgagtggacaagccgacagcacctgttctatggacagtatgaaggcaaagtcagctctgtggcactctgtaagctgctccagcatggcatcaatgcagatgacaaacggctacaggatatccgtgtgaagggagaggagatctacagcatggatgagggcatccgcacccgctctaagtcagccaaaaacccagaacgctggacaaacattcctttgctggtcaagatcctaaagctgatcatcaacgagctctccaacgtcatggaggctaatgccgctcgccaggccactcctgcagagtggagtcaagatgactccaatgatatgtgggaggaccaggaggaggaagaggaggaggaggaggatggtttagctggccaacttttatctgacattcttgctacaagtaaatatgaggaggattactacgaggatgatgaggaagatgaccctgatgccctgaaggatcctctctatcagattgatctgcaggcatatctcacagatttcctctgccagtttgctcagcagccctgctacataatgttttcaggccaccttaatgacaatgagaggcgagttctacagaccatcggcatctaaaaaggggagcctttctacatttgctccttctgggccagccgcaaaccattttgcagccctcactggccttgagatgcactttcttctcaacctaaagtggcatcttgacccttggcccttggcctcggcagtgacactgatgacaattcagaccaggctcaccggtgccgtcacttaggaatgctggaacaaaggacatttctcaaagttcccctgaagacatgccatctctagaaccttttttctccccgactctacccccacctctgttcctagagccctctgctggcgagtccagaaacattattgcccagaaggattatgtgtttatggattattttgccccgcctcaggagcgcaggaagtcactaccatttatattctaaaacagacctatctatgttcataggacttctgatgtgttcagataggaatcctcatgagagatcattatgctttgtgccctggaccactgctgctctgggttctcaggaggaacaggcaagagcagcttcattctaagcctttccagtgacctcagccttgcttctcttctacaacactaaggctcctctgtcagaggaggtcgtcttgtttttgcttcattgcatgacataacccttcccctcaagctgttcctatatatacatgcacacacaaaataagccagacagatggcaatttgatcttccttttttagaaaaaaaaaaaaaaaatggggaaaagggattttttttaaatccacctgacccaactatatttaatatgcctctcccacacattaccacagagtctgatattcaaaggttatcccctttccctcaggaagcctctaaagtgcttaagttgtagccctcaaatttgcaacatgtatttttctaggacagtaaagtaatctttacaaatgaatttagttgcatggta

SEQ ID NO: 387509 - DNA, 4014 bp, Homo sapiens
  misc_feature (531)..(531): n is a, c, g, or t
atggcggcggcggcggcagctggtgcggcctccgggctgccgggtccagtggcacaaggattaaaggaagcgttagtggatacgctcaccgggatcctatccccagtacaggaggtgcgggcggctgctgaagaacagattaaggtgctggaggtgacggaggaatttggtgttcacttggcagaactgactgtagatccccagggggcactggcaatccgtcagctggcatcagtcatcttgaaacaatatgtggagactcactggtgtgcccaatcagagaaatttaggcctcctgaaactacagaaagggcaaaaattgttatccgggagctattgcctaatgggttgagagaatcgataagcaaagtgcgctccagtgtggcctatgcagtgtcagccattgcccactgggactggcctgaagcttggccccaactcttcaacctgctcatggagatgttggtgagcggagacttaaatgccgtccatggagccatgcgtgtgctgacagaattcactcgtgaagtnacagacacacagatgccacttgttgctcctgtcattctcccagagatgtataagatcttcaccatggctgaggtgtatggtattcgaacccgttcccgagccgtggagatttttaccacttgtgcccatatgatctgtaacatggaggagctggaaaagggtgcagccaaagtcctgatctttcccgtggtacagcagttcacagaggcctttgttcaggccctccagataccagatggccccacatctgacagtgggtttaagatggaggtcctaaaggcagtgacagccctagtgaaaaacttcccaaagcacatggtgtcctccatgcagcagattctgcctattgtttggaacaccctaaccgagagtgcagctttttatgtgaggacagaagtaaattacacagaagaagtagaagatcctgtggattctgatggtgaagtcctgggctttgaaaatctcgtctttagcatttttgaatttgtccatgctctactagaaaatagcaaattcaaaagcactgttaagaaagccttgcctgaattgatttattatattatcctgtacatgcaaatcactgaggagcagattaaagtatggacagccaacccccaacaatttgtagaagatgaagatgatgatacattctcctatactgttagaatagcagctcaagacttgttgctggctgtggccacagatttccagaatgaaagtgcagcagccctggctgctgcagccactcgacatttacaagaagctgagcaaaccaaaaacagtggcactgagcactggtggaagatccatgaggcatgcatgcttgccctaggctcagtgaaggccatcatcactgacagtgtgaaaaatggcaggattcattttgacatgcatgggttcctgaccaatgtcatccttgcagacctcaacctctcagtgtctcctttcctcttgggccgggcactttgggctgccagtcggttcactgttgctatgtcccctgaactgatccagcagttcctacaggcaacagttagtggtcttcacgagacacagcccccatcagttcgaatttctgcagtgagagccatctggggttattgtgaccaactgaaagtctcagagagtacccacgtgctccagcccttcctccccagcatccttgatggcttaattcacctagcagcccagttcagctcagaggtcctcaacctggtgatggagaccctgtgcatcgtttgtacagtagaccccgaattcacagcaagcatggaaagcaaaatctgccccttcaccatcgccattttcctaaagtacagtaatgatcccgtcgtcgcctcactggctcaggacatcttcaaggagctgtcccagattgaagcctgtcagggcccaatgcaaatgaggctgattcccactctggtcagcataatgcaggccccagcagacaagattcctgcagggctttgtgcgacagccattgatatcctgacaacagtagtacgaaatacaaagcctcccctttcccagcttctcatctgccaagctttccctgctgtggcacagtgtacccttcacacagatgacaatgccaccatgcagaatggcggagagtgcttgcgggcctatgtgtcagtgaccctggaacaagtagcccagtggcatgatgagcagggccacaatggactgtggtatgtgatgcaagtggtgagccagctcctggacccccgcacctcagagttcactgcggcctttgtgggccgccttgtttccaccctcatctccaaggcagggcgggaactcggggagaatctagaccagattcttcgtgccatcctcagtaagatgcagcaggcagagacgctcagtgtcatgcagtccctgatcatggtgttcgctcatctggtgcacactcagctagaacctctcttggagttcctgtgtagcctcccaggacctactggcaaacctgctctagagtttgtgatggctgagtggacaagccgacagcacctgttctatggacagtatgaaggcaaagtcagctctgtggcactctgtaagctgctccagcatggcatcaatgcagatgacaaacggctacaggatatccgtgtgaagggagaggagatctacagcatggatgagggcatccgcacccgctctaagtcagccaaaaacccagaacgctggacaaacattcctttgctggtcaagatcctaaagctgatcatcaacgagctctccaacgtcatggaggctaatgccgctcgccaggccactcctgcagagtggagtcaagatgactccaatgatatgtgggaggaccaggaggaggaagaggaggaggaggaggatggtttagctggccaacttttatctgacattcttgctacaagtaaatatgaggaggattactacgaggatgatgaggaagatgaccctgatgccctgaaggatcctctctatcagattgatctgcaggcatatctcacagatttcctctgccagtttgctcagcagccctgctacataatgttttcaggccaccttaatgacaatgagaggcgagttctacagaccatcggcatctaaaaaggggagcctttctacatttgctccttctgggccagccgcaaaccattttgcagccctcactggccttgagatgcactttcttctcaacctaaagtggcatcttgacccttggcccttggcctcggcagtgacactgatgacaattcagaccaggctcaccggtgccgtcacttaggaatgctggaacaaaggacatttctcaaagttcccctgaagacatgccatctctagaaccttttttctccccgactctacccccacctctgttcctagagccctctgctggcgagtccagaaacattattgcccagaaggattataaaaaatacatagcaaaaaaaaaaaaaaaaaaaaaaaaaaaaaaaaacaaggaggggggaggcgggatcaggaatcccaaggagcgacatcgagaccaggaccgccgcatcattatcgtgggaacaaaggaaggcggcccccaataaatcgcaggctggatactatacatgagctcgaaggcagacggagcagcctggtcaatacatacaagcacagcgcagcacgaagagcggacataagcagagggcactgcacgcgagggaattccacaggcgcagggaaggaacccacgaaaggccctagggggggccgaggcgccaataaacatcccgcgtggaacagaggatctccccccaggagacacaagtatttaacagaccgccttgaccggggagaggaactatccatgtaagagcctttatgaccacagtggtatttctcctcggtctttaacaaacatgcaagccggcgcaagtgccttggcgagccgctgctaagagaaccagtaaactgtctgcggtcaacggaggggcgctacaagtatgctgtcgacacaacgtcttt

SEQ ID NO: 387510 - DNA, 2907 bp, Homo sapiens
  misc_feature (531)..(531): n is a, c, g, or t
atggcggcggcggcggcagctggtgcggcctccgggctgccgggtccagtggcacaaggattaaaggaagcgttagtggatacgctcaccgggatcctatccccagtacaggaggtgcgggcggctgctgaagaacagattaaggtgctggaggtgacggaggaatttggtgttcacttggcagaactgactgtagatccccagggggcactggcaatccgtcagctggcatcagtcatcttgaaacaatatgtggagactcactggtgtgcccaatcagagaaatttaggcctcctgaaactacagaaagggcaaaaattgttatccgggagctattgcctaatgggttgagagaatcgataagcaaagtgcgctccagtgtggcctatgcagtgtcagccattgcccactgggactggcctgaagcttggccccaactcttcaacctgctcatggagatgttggtgagcggagacttaaatgccgtccatggagccatgcgtgtgctgacagaattcactcgtgaagtnacagacacacagatgccacttgttgctcctgtcattctcccagagatgtataagatcttcaccatggctgaggtgtatggtattcgaacccgttcccgagccgtggagatttttaccacttgtgcccatatgatctgtaacatggaggagctggaaaagggtgcagccaaagtcctgatctttcccgtggtacagcagttcacagaggcctttgttcaggccctccagataccagatggccccacatctgacagtgggtttaagatggaggtcctaaaggcagtgacagccctagtgaaaaacttcccaaagcacatggtgtcctccatgcagcagattctgcctattgtttggaacaccctaaccgagagtgcagctttttatgtgaggacagaagtaaattacacagaagaagtagaagatcctgtggattctgatggtgaagtcctgggctttgaaaatctcgtctttagcatttttgaatttgtccatgctctactagaaaatagcaaattcaaaagcactgttaagaaagccttgcctgaattgatttattatattatcctgtacatgcaaatcactgaggagcagattaaagtatggacagccaacccccaacaatttgtagaagatgaagatgatgatacattctcctatactgttagaatagcagctcaagacttgttgctggctgtggccacagatttccagaatgaaagtgcagcagccctggctgctgcagccactcgacatttacaagaagctgagcaaaccaaaaacagtggcactgagcactggtggaagatccatgaggcatgcatgcttgccctaggctcagtgaaggccatcatcactgacagtgtgaaaaatggcaggattcattttgacatgcatgggttcctgaccaatgtcatccttgcagacctcaacctctcagtgtctcctttcctcttgggccgggcactttgggctgccagtcggttcactgttgctatgtcccctgaactgatccagcagttcctacaggcaacagttagtggtcttcacgagacacagcccccatcagttcgaatttctgcagtgagagccatctggggttattgtgaccaactgaaagtctcagagagtacccacgtgctccagcccttcctccccagcatccttgatggcttaattcacctagcagcccagttcagctcagaggtcctcaacctggtgatggagaccctgtgcatcgtttgtacagtagaccccgaattcacagcaagcatggaaagcaaaatctgccccttcaccatcgccattttcctaaagtacagtaatgatcccgtcgtcgcctcactggctcaggacatcttcaaggagctgtcccagattgaagcctgtcagggcccaatgcaaatgaggctgattcccactctggtcagcataatgcaggccccagcagacaagattcctgcagggctttgtgcgacagccattgatatcctgacaacagtagtacgaaatacaaagcctcccctttcccagcttctcatctgccaagctttccctgctgtggcacagtgtacccttcacacagatgacaatgccaccatgcagaatggcggagagtgcttgcgggcctatgtgtcagtgaccctggaacaagtagcccagtggcatgatgagcagggccacaatggactgtggtatgtgatgcaagtggtgagccagctcctggacccccgcacctcagagttcactgcggcctttgtgggccgccttgtttccaccctcatctccaaggcagggcgggaactcggggagaatctagaccagattcttcgtgccatcctcagtaagatgcagcaggcagagacgctcagtgtcatgcagtccctgatcatggtgttcgctcatctggtgcacactcagctagaacctctcttggagttcctgtgtagcctcccaggacctactggcaaacctgctctagagtttgtgatggctgagtggacaagccgacagcacctgttctatggacagtatgaaggcaaagtcagctctgtggcactctgtaagctgctccagcatggcatcaatgcagatgacaaacggctacaggatatccgtgtgaagggagaggagatctacagcatggatgagggcatccgcacccgctctaagtcagccaaaaacccagaacgctggacaaacattcctttgctggtcaagatcctaaagctgatcatcaacgagctctccaacgtcatggaggctaatgccgctcgccaggccactcctgcagagtggagtcaaggtgcaccaggcccttactcccaggagacttttagcctggcagatcaagttacaaattgtcaaattatcaacttg

SEQ ID NO: 387511 - DNA, 1420 bp, Homo sapiens
taagagcctgtcaacacttatatctccaggttctttcattgagactaaccaggagggtttggccatttctgattctctttcactggggactacaagccacattgcagaagcctttggggcccttctattctggcctatttggatttggggagggaaaatgcatgaatgtgctctagctctagctgcttttcatctccaagtagatgactccaatgatatgtgggaggaccaggaggaggaagaggaggaggaggaggatggtttagctggccaacttttatctgacattcttgctacaagtaaatatgaggaggattactacgaggatgatgaggaagatgaccctgatgccctgaaggatcctctctatcagattgatctgcaggcatatctcacagatttcctctgccagtttgctcagcagccctgctacataatgttttcaggccaccttaatgacaatgagaggcgagttctacagaccatcggcatctaaaaaggggagcctttctacatttgctccttctgggccagccgcaaaccattttgcagccctcactggccttgagatgcactttcttctcaacctaaagtggcatcttgacccttggcccttggcctcggcagtgacactgatgacaattcagaccaggctcaccggtgccgtcacttaggaatgctggaacaaaggacatttctcaaagttcccctgaagacatgccatctctagaaccttttttctccccgactctacccccacctctgttcctagagccctctgctggcgagtccagaaacattattgcccagaaggattatgtgtttatggattattttgccccgcctcaggagcgcaggaagtcactaccatttatattctaaaacagacctatctatgttcataggacttctgatgtgttcagataggaatcctcatgagagatcattatgctttgtgccctggaccactgctgctctgggttctcaggaggaacaggcaagagcagcttcattctaagcctttccagtgacctcagccttgcttctcttctacaacactaaggctcctctgtcagaggaggtcgtcttgtttttgcttcattgcatgacataacccttcccctcaagctgttcctatatatacatgcacacacaaaataagccagacagatggcaatttgatcttccttttttagaaaaaaaaaaaaaaaatggggaaaagggattttttttaaatccacctgacccaactatatttaatatgcctctcccacacattaccacagagtctgatattcaaaggttatcccctttccctcaggaagcctctaaagtgcttaagttgtagccctcaaatttgcaacatgtatttttctaggacagtaaagtaatctttacaaatgaatttagttgcatggta

SEQ ID NO: 387512 - DNA, 229 bp, Homo sapiens
ttacctagttttcaaattcctaggtttttattgcttttagtaaaaaaaaaaaaaaaaaaaatcactgggaaaacctatgtactgggttgaatcttttgtttagactgttttttttttttgcctttttgaaataaaatgtatatgatttaatgtgtagaagtggaaactagaaaaatattatgataaagacatgtgaatccatatattcaaaataaagcagaaaattata

SEQ ID NO: 387513 - DNA, 405 bp, Homo sapiens
ccggcctgtgcgcagttcccgtgccctaggagttggcggcggggcccagccgagaatcttcttcccttctggtctgactaggaaagccagagggagatggtgaaggagacacagagagagtaaaagaacagaccatgcccagcctctccactgcaggagcttggaatcagttcctttctcaggaacctgaccatcaggcctcccagaaagtatcgagaaactgaaacatctcagatcatggcatctggacaatgagacacacctgctgcctgttgaccaactccccttgcttaccccttcgtaactccccactatgtaaaccctttattttagttagcttagacttgtctcccatctctcagctgacatcatctgtaataaagcctttgatccctggcaaaaatt

SEQ ID NO: 387514 - DNA, 799 bp, Homo sapiens
  misc_feature (799)..(799): n is a, c, g, or t
ccggcctgtgcgcagttcccgtgccctaggagttggcggcggggcccagccgaggtataagttccacagcttcacccttgtcggtgtgatatgggcgtgaaagaagacataaaacaggcttcccgagtagaacctgccaccccgggctggtggggacgcggcaccaggccgggccgggggaagccgctcggacagtggtccttggtgaagcagagttgccagccatctatggatcctaactaaattggtccttgtaatactcggtattatttgccaagatattgaaaaacctctaaacagtgagaaggaacgaagacaaagatgactgcaattactgcttccattccacattgtactagaagtctggccagcgatttaacggtaagaaagagaaacaaaaggcagctatattgaaacgagaagaagtaacactgacttacttcaaaggcaacataattatttatctagaaaatcagatgaacatttgatctagtaaaaacactactataactaagaacctgttggccagtatacaagatactatctcagtatacaaatttaattttgcttctgtatagtagaaacaatcagagactaaaatacaaggtatagtttataataggataaaaatatgaaacctttaggaataaatttgacaaaattatgcaaaagctgtacatttgaaaactactaatggcgtccaggaaatgctacccccaaatatggcatcttgtcacttcagaaaagtaataaaacctaggaggatccctcttctgaaccttctccaggtcttctcccn

SEQ ID NO: 387515 - DNA, 556 bp, Homo sapiens
ccggcctgtgcgcagttcccgtgccctaggagttggcggcggggcccagccgaggtataagttccacagcttcacccttgtcggtgtgatatgggcgtgaaagaagacataaaacaggcttcccgagtagaacctgccaccccgggctggtggggacgcggcaccaggccgggccgggggaagccgctcggacagtggtccttggaatcttcttcccttctggtctgactaggaaagccagagggagatggtgaaggagacacagagagagtaaaagaacagaccatgcccagcctctccactgcaggagcttggaatcagttcctttctcaggaacctgaccatcaggcctcccagaaagtatcgagaaactgaaacatctcagatcatggcatctggacaatgagacacacctgctgcctgttgaccaactccccttgcttaccccttcgtaactccccactatgtaaaccctttattttagttagcttagacttgtctcccatctctcagctgacatcatctgtaataaagcctttgatccctggcaaaaatt

SEQ ID NO: 387516 - DNA, 248 bp, Homo sapiens
ttaactggggaaggtgtgctactggcatttagtgagtggaggccagggatgctgttaaacatcctacaatggataggatagacttccccacaacaaagaataggccagctcaaaatatcaatagtcgggaaaccctgtattagtctgttcttatgctgctgtgaagaaatacctcagactgggtaatttataaaggaaagaggtttaattgactcacagttctgcatggctggggaggcctcaggaaa

SEQ ID NO: 387517 - DNA, 3268 bp, Homo sapiens
taaaccaagaaggttatcctcaatcatctggtatcaatatataattatttttcacatttctgttactttttaatgagatttgaggttgttctgtgattgttatcagaattaccaatgcacaaaagccagaatgtatttggaaactagaagagctatttttgttttttggatttttctccaagttcaaggaaccaaagatatctccattaacatataccattctgaaactaaagacatagacaatcccccaagaaatgaaacaactgaaagtactgaaaaaatgtacaaaatgtcaactatgagacgaatattcgatttggcaaagcatcgaacaaaaagatccgcatttttcccaacgggggttaaagtctgtccacaggaatccatgaaacagattttagacagtcttcaagcttattatagattgagagtgtgtcaggaagcagtatgggaagcatatcggatctttctggatcgcatccctgacacaggggaatatcaggactgggtcagcatctgccagcaggagaccttctgcctctttgacattggaaaaaacttcagcaattcccaggagcacctggatcttctccagcagagaataaaacagagaagtttccctgacagaaaagatgaaatatctgcagagaagacattgggagagcctggtgaaaccattgtcatttcaacagatgttgccaacgtctcacttgggcctttccctctcactcctgatgacaccctcctcaatgaaattctcgataatacactcaacgacaccaagatgcctacaacagaaagagaaacagaattcgctgtgttggaggagcagagggtggagctcagcgtctctctggtaaaccagaagttcaaggcagagctcgctgactcccagtccccatattaccaggagctagcaggaaagtcccaacttcagatgcaaaagatatttaagaaacttccaggattcaaaaaaatccatgtgttaggatttagaccaaagaaagaaaaagatggctcaagctccacagagatgcaacttacggccatctttaagagacacagtgcagaagcaaaaagccctgcaagtgacctcctgtcttttgattccaacaaaattgaaagtgaggaagtctatcatggaaccatggaggaggacaagcaaccagaaatctatctcacagctacagacctcaaaaggctgatcagcaaagcactagaggaagaacaatctttggatgtggggacaattcagttcactgatgaaattgctggatcactgccagcctttggtcctgacacccaatcagagctgcccacatcttttgctgttataacagaggatgctactttgagtccagaacttcctcctgttgaaccccagcttgagacagtggacggagcagagcatggtctacctgacacttcttggtctccacctgctatggcctctacctccctgtcagaagctccacctttctttatggcatcaagcatcttctctctgactgatcaaggcaccacagatacaatggccactgaccagacaatgctagtaccagggctcaccatccccaccagtgattattctgcaatcagccaactggctctgggaatttcacatccacctgcatcttcagatgacagccgatcaagtgcaggtggcgaagatatggtcagacacctagatgaaatggatctgtctgacactcctgccccatctgaggtaccagagctcagcgaatatgtttctgtcccagatcatttcttggaggataccactcctgtctcagctttacagtatatcaccactagttctatgaccattgcccccaagggccgagagctggtagtgttcttcagtctgcgtgttgctaacatggccttctccaacgacctgttcaacaagagctctctggagtaccgagctctggagcaacaattcacacagctgctggttccatatctacgatccaatcttacaggatttaagcaacttgaaatacttaacttcagaaacgggagtgtgattgtgaatagcaaaatgaagtttgctaagtctgtgccgtataacctcaccaaggctgtgcacggggtcttggaggattttcgttctgctgcagcccaacaactccatctggaaatagacagctactctctcaacattgaaccagctgatcaagcagatccctgcaagttcctggcctgcggcgaatttgcccaatgtgtaaagaacgaacggactgaggaagcggagtgtcgctgcaaaccaggatatgacagccaggggagcctggacggtctggaaccaggcctctgtggccctggcacaaaggaatgcgaggtcctccagggaaagggagctccatgcaggttgccagatcactctgaaaatcaagcatacaaaactagtgttaaaaagttccaaaatcaacaaaataacaaggtaatcagtaaaagaaattctgaattactgaccgtagaatatgaagaatttaaccatcaagattgggaaggaaattaaaaactgaaaatgtacaattatcatttaggctatctcaagagagatgatttgccttctcaaggaaaatggagacaggcatattcatgggtcatcaaaatccagacatacagtcaacactgagaatcagcacacaccatatttcaaatatagaagagtcatgtacttggcaaccagtaaattctgaagaaaaagacacttacttattattaaaaccccaaatgcaatcagcgaaacatatttttactattcttggatgatagtcaaaatgatcataagccaggtttgcttccaccttccctgaaaattttactcacagatcatttgcaacaagcatagcttacttattgtttagggactgaacaatttattgggaagcaaactctttatatgctagaaagtacatttaaaagatgactacttacgcagggagatgcaggtctctctaaacgcatgaatgtatgtagtgtgtaggcactgtagtgagtgtatatatgctccacactacgtctgataaacacaaacctcagtattcagttattaggcacactagttttatacgcaactactgcttacatagtagactgttttgttgccaataatctttgaattgttctttaaaagaaactgaggttcagatacacataccatggaaaaatcttacttttcttgttactacacaaagctattttaaagaagatgctatgttgggagaagggcgaagttgtactatatgacataatcaat

SEQ ID NO: 387518 - DNA, 3214 bp, Homo sapiens
taaaccaagaaggttatcctcaatcatctggtatcaatatataattatttttcacatttctgttactttttaatgagatttgaggttgttctgtgattgttatcagaattaccaatgcacaaaagccagaatgtatttggaaactagaagagctatttttgttttttggatttttctccaagttcaaggaaccaaagatatctccattaacatataccattctgaaactaaagacatagacaatcccccaagaaatgaaacaactgaaagtactgaaaaaatgtacaaaatgtcaactatgagacgaatattcgatttggcaaagcatcgaacaaaaagatccgcatttttcccaacgggggttaaagtctgtccacaggaatccatgaaacagattttagacagtcttcaagcttattatagattgagagtgtgtcaggaagcagtatgggaagcatatcggatctttctggatcgcatccctgacacaggggaatatcaggactgggtcagcatctgccagcaggagaccttctgcctctttgacattggaaaaaacttcagcaattcccaggagcacctggatcttctccagcagagaataaaacagagaagtttccctgacagaaaagatgaaatatctgcagagaagacattgggagagcctggtgaaaccattgtcatttcaacagatgttgccaacgtctcacttgggcctttccctctcactcctgatgacaccctcctcaatgaaattctcgataatacactcaacgacaccaagatgcctacaacagaaagagaaacagaattcgctgtgttggaggagcagagggtggagctcagcgtctctctggtaaaccagaagttcaaggcagagctcgctgactcccagtccccatattaccaggagctagcaggaaagtcccaacttcagatgcaaaagatatttaagaaacttccaggattcaaaaaaatccatgtgttaggatttagaccaaagaaagaaaaagatggctcaagctccacagagatgcaacttacggccatctttaagagacacagtgcagaagcaaaaagccctgcaagtgacctcctgtcttttgattccaacaaaattgaaagtgaggaagtctatcatggaaccatggaggaggacaagcaaccagaaatctatctcacagctacagacctcaaaaggctgatcagcaaagcactagaggaagaacaatctttggatgtggggacaattcagttcactgatgaaattgctggatcactgccagcctttggtcctgacacccaatcagagctgcccacatcttttgctgttataacagaggatgctactttgagtccagaacttcctcctgttgaaccccagcttgagacagtggacggagcagagcatggtctacctgacacttcttggtctccacctgctatggcctctacctccctgtcagaagctccacctttctttatggcatcaagcatcttctctctgactgatcaaggcaccacagatacaatggccactgaccagacaatgctagtaccagggctcaccatccccaccagtgattattctgcaatcagccaactggctctgggaatttcacatccacctgcatcttcagatgacagccgatcaagtgcaggtggcgaagatatggtcagacacctagatgaaatggatctgtctgacactcctgccccatctgaggtaccagagctcagcgaatatgtttctgtcccagatcatttcttggaggataccactcctgtctcagctttacagtatatcaccactagttctatgaccattgcccccaagggccgagagctggtagtgttcttcagtctgcgtgttgctaacatggccttctccaacgacctgttcaacaagagctctctggagtaccgagctctggagcaacaattcacacagctgctggttccatatctacgatccaatcttacaggatttaagcaacttgaaatacttaacttcagaaacgggagtgtgattgtgaatagcaaaatgaagtttgctaagtctgtgccgtataacctcaccaaggctgtgcacggggtcttggaggattttcgttctgctgcagcccaacaactccatctggaaatagacagctactctctcaacattgaaccagctgatcaagcagatccctgcaagttcctggcctgcggcgaatttgcccaatgtgtaaagaacgaacggactgaggaagcggagtgtcgctgcaaaccaggatatgacagccaggggagcctggacggtctggaaccaggcctctgtggccctggcacaaaggaatgcgaggtcctccagggaaagggagctccatgcaggttgccagatcactctgaaaatcaagcatacaaaactagtgttaaaaagttccaaaatcaacaaaataacaaggtaatcagtaaaagaaattctgaattactgaccgtagaatatgaagaatttaaccatcaagattgggaaggaaattaaaaactgaaaatgtacaattatcatttaggctatctcaagagagatgatttgccttctcaaggaaaatggagacaggcatattcatgggtcatcaaaatccagacatacagtcaacactgagaatcagcacacaccatatttcaaatatagaagagtcatgtacttggcaaccagtaaattctgaagatactattcttggatgatagtcaaaatgatcataagccaggtttgcttccaccttccctgaaaattttactcacagatcatttgcaacaagcatagcttacttattgtttagggactgaacaatttattgggaagcaaactctttatatgctagaaagtacatttaaaagatgactacttacgcagggagatgcaggtctctctaaacgcatgaatgtatgtagtgtgtaggcactgtagtgagtgtatatatgctccacactacgtctgataaacacaaacctcagtattcagttattaggcacactagttttatacgcaactactgcttacatagtagactgttttgttgccaataatctttgaattgttctttaaaagaaactgaggttcagatacacataccatggaaaaatcttacttttcttgttactacacaaagctattttaaagaagatgctatgttgggagaagggcgaagttgtactatatgacataatcaat

SEQ ID NO: 387519 - DNA, 1221 bp, Homo sapiens
gagagacccaacgggacctcagcccagccagcccaggtgaagcctgaattttataggcaagctgagctgaaaccttgcccttggacaggatccaatcaaaggagatgtatcactttctgtccaacacctgatcaagcagatccctgcaagttcctggcctgcggcgaatttgcccaatgtgtaaagaacgaacggactgaggaagcggagtgtcgctgcaaaccaggatatgacagccaggggagcctggacggtctggaaccaggcctctgtggccctggcacaaaggaatgcgaggtcctccagggaaagggagctccatgcaggttgccagatcactctgaaaatcaagcatacaaaactagtgttaaaaagttccaaaatcaacaaaataacaaggtaatcagtaaaagaaattctgaattactgaccgtagaatatgaagaatttaaccatcaagattgggaaggaaattaaaaactgaaaatgtacaattatcatttaggctatctcaagagagatgatttgccttctcaaggaaaatggagacaggcatattcatgggtcatcaaaatccagacatacagtcaacactgagaatcagcacacaccatatttcaaatatagaagagtcatgtacttggcaaccagtaaattctgaagaaaaagacacttacttattattaaaaccccaaatgcaatcagcgaaacatatttttactattcttggatgatagtcaaaatgatcataagccaggtttgcttccaccttccctgaaaattttactcacagatcatttgcaacaagcatagcttacttattgtttagggactgaacaatttattgggaagcaaactctttatatgctagaaagtacatttaaaagatgactacttacgcagggagatgcaggtctctctaaacgcatgaatgtatgtagtgtgtaggcactgtagtgagtgtatatatgctccacactacgtctgataaacacaaacctcagtattcagttattaggcacactagttttatacgcaactactgcttacatagtagactgttttgttgccaataatctttgaattgttctttaaaagaaactgaggttcagatacacataccatggaaaaatcttacttttcttgttactacacaaagctattttaaagaagatgctatgttgggagaagggcgaagttgtactatatgacataatcaat

SEQ ID NO: 387520 - DNA, 1134 bp, Homo sapiens
  misc_feature (45)..(45): n is a, c, g, or t
  misc_feature (150)..(150): n is a, c, g, or t
  misc_feature (678)..(678): n is a, c, g, or t
cccagacccggctgacccacctacccgcgatcctgcccatggctnacgggctgtttcggcgcagaccctggggtctcgagcagattcgcccggaccccgagtccgaaggcctgtttgacaagcctcccccggaagaccctcccgctgccngcgggcccaggtcggcgtcggccgcgggcaagaaggctggtcggcgcgcgggcgggagggcgcaggggggccgcgccgggcagcccccgaaggccgcatcgcgccccccgcccaagaaggaggcgcctccactggacgagggctgctatctcgaccattttccgcacctctccatcttcatctacgcagccatcgccttctccatcacctcctgcatctttacctatatccatttacagcttgcctgagtggccagcgcgggacggggtgggcgcaggaccgagcggggagggaaagggaaaacggggctcggcattttgtgttttagaacagcgctgcacccccttcatgtagctttcgatgcttgtttctttccgtctttgttgtcactatctttgtctatcagtacgaaagtacaaagtagctgccggcaatgaaataggggtgctgtttgcacctgcaggttaggggtggaggcgtttagaattttggggtgtgattgagccccgtttataattagaatgcccntggacccctaccactctgtgacgtgggggcacgcgcagggatcccatcattttgtgtttggggagctcagagtgcgcccaatcttggaatctttaagggatgagccagacccagacccgcggccttctagagagggtccggcagggagggtcggcgccctggcccggctcacttctggagctgtgagacccaagacaaaaggggctgagggatttctcattgacaagagttcgtgcgggaaaaccacctgacccctagggatttgtcatcttagactcaaaaggcttaataccaggaaccaccttggcaagatatttacccaccggccatctctgtttactcatgaatgttaaatgttaaaacgcagcgctctaaccctgcatattatttacttgcaaatgtctgtaatctgtaattgtgatgcctctgatggaataaattatctttttcagtctc

SEQ ID NO: 387521 - DNA, 1482 bp, Homo sapiens
  misc_feature (45)..(45): n is a, c, g, or t
  misc_feature (150)..(150): n is a, c, g, or t
  misc_feature (678)..(678): n is a, c, g, or t
cccagacccggctgacccacctacccgcgatcctgcccatggctnacgggctgtttcggcgcagaccctggggtctcgagcagattcgcccggaccccgagtccgaaggcctgtttgacaagcctcccccggaagaccctcccgctgccngcgggcccaggtcggcgtcggccgcgggcaagaaggctggtcggcgcgcgggcgggagggcgcaggggggccgcgccgggcagcccccgaaggccgcatcgcgccccccgcccaagaaggaggcgcctccactggacgagggctgctatctcgaccattttccgcacctctccatcttcatctacgcagccatcgccttctccatcacctcctgcatctttacctatatccatttacagcttgcctgagtggccagcgcgggacggggtgggcgcaggaccgagcggggagggaaagggaaaacggggctcggcattttgtgttttagaacagcgctgcacccccttcatgtagctttcgatgcttgtttctttccgtctttgttgtcactatctttgtctatcagtacgaaagtacaaagtagctgccggcaatgaaataggggtgctgtttgcacctgcaggttaggggtggaggcgtttagaattttggggtgtgattgagccccgtttataattagaatgcccntggacccctaccactctgtgacgtgggggcacgcgcagggatcccatcattttgtgtttggggagctcagagtgcgcccaatcttggaatctttaagggatgagccagacccagacccgcggccttctagagagggtccggcagggagggtcggcgccctggcccggggtgggccggagccctgtgatgctgcatcgcccccaggaggagccagctgtgccccagagttggcgcggccgagagaggacaagagcgcgcagcaggcgaagctggagggcgggactcgactttgttgtcgctgcccggaggagtcgagactggtacccggaggagctgtctcaccaggagaccacgtcctggaagtgtccgggactcgcgggacctgtggctgcagaccccgccggcacgcaggcccagagctggcgcactcctgaggatgagactctgggggccctagccggggtccacgggagggctgtccttggggactctaggatggcttcgttctggcccggctcacttctggagctgtgagacccaagacaaaaggggctgagggatttctcattgacaagagttcgtgcgggaaaaccacctgacccctagggatttgtcatcttagactcaaaaggcttaataccaggaaccaccttggcaagatatttacccaccggccatctctgtttactcatgaatgttaaatgttaaaacgcagcgctctaaccctgcatattatttacttgcaaatgtctgtaatctgtaattgtgatgcctctgatggaataaattatctttttcagtctc

SEQ ID NO: 387522 - DNA, 348 bp, Homo sapiens
ccaagagttaaatcgacaaaacacagattaacatgagaaaagcatagacatttattcataaatgttttacatggcacaagagccctcataaagaaatgaagacccaaagaatcagttagagtcagttacttctatactggattgaacaaagaataataaactatgaaaatgtgactaaattatgtggggaagcttaaaaaatagaatttctaacaaggtctgtgcaatattctctaagttacctttccttctagtccctagagagtgtctttcacataggaattccatcttctcctcttaagaaacagcacaaaggtcaaagtgatattcttgtacctgctgtttttc

SEQ ID NO: 387523 - DNA, 169 bp, Homo sapiens
tctacaggagtctattactggcatttcgttactcttctgtattcttttcaggggctggttgtgggaagagaggtgatacaaggtgtcattccaggaaggaaagctaggcctaagttctctcctcttctcagtggagtgaggttgttttttgtcttggggtatgtaggca

SEQ ID NO: 387524 - DNA, 743 bp, Homo sapiens
gaaactttcttagatcatcttgttggaggctacgggcctattatggtaactcgcatcagtgttcatatacttgatacgtgaagatcattgctggatctgtaagactacgatgttggtttctacaaacatctataaaacactcacgagagactacgtgatgtattaaataactgccgaaacctgaacttgctatcggtcacttaacattgtgaatcttatccaaagagagttccgcagtctgtagactcagccttgtgcatattatccacgcagctcttttgtgtttgctttttaaaataaagtgctcgtatttgtattctccatattttggagtaattatctacatgatgtttatagttcctgtggtttttcacccaagaagcagaatctcattcagtacatttagttttataagagtcatgaagctaaatccttgggctatgtcagaggcacaaagtctagaatgtgtgtattcacaatggtgtatgtacattttgtgccttgattcacttagaagtgtctcagaaaacctggacagttcgcttctacacaagaattttatatgtatttatgaagatgattctgtaccctagtatatctttttgggcatggactaatttgtatctgtttaactcatattctgcacgatctgtatatagtacatcaaacttagaggtgtgaccttaaatttaactttttttaaaaactgggaggtcaataaaatttaaactgcttaactatga

SEQ ID NO: 387525 - DNA, 517 bp, Homo sapiens
aaatccttgggctatgtcagaggcacaaagtctagaatgttgtatgggtgtgtttaatatatacacaaggaaaatacactcactctataatttcttataaaatagcaagtaaggagtagaagtaggagatgtagaaggggaaagagaattcagaaagtcaatctcattcagtacatttagttttataagagtcatgaagctaaatccttgggctatgtcagaggcacaaagtctagaatgtgtgtattcacaatggtgtatgtacattttgtgccttgattcacttagaagtgtctcagaaaacctggacagttcgcttctacacaagaattttatatgtatttatgaagatgattctgtaccctagtatatctttttgggcatggactaatttgtatctgtttaactcatattctgcacgatctgtatatagtacatcaaacttagaggtgtgaccttaaatttaactttttttaaaaactgggaggtcaataaaatttaaactgcttaactatga

SEQ ID NO: 387526 - DNA, 482 bp, Homo sapiens
cctgggtaacatggcaagaccctgtctttactaaaaatacaaaaactagtagggcgtcatggtgtgagcctgtagttccagctaattgggaggctgaggtggaggattgcttgagcccaggaggttgaggctccagtgagccgcgatcaagccactgcactccagcctgggcgacagagaccctgtctcaaaataaaaaaataaaaaataaggcttatttgtacatcccttaaaattagtgctattatgcaacttagaaaatctagtattcttaagtgagacaaagacaaagggggaaggtacttaatttgttcataaaattattggtttgtgtgtttctttcttgacagggaaattgcaaagaagattctttggcaagttatgaattgatatgcagtttacagtccttaatcatttcggttgaacagctccaggctagttttctcttaaatccgaaagccctataatattttagggttttt

SEQ ID NO: 387527 - DNA, 3554 bp, Homo sapiens
  misc_feature (11)..(11): n is a, c, g, or t
ccgtctaggtncgaggctgggtggcgccaagttcccctcggtggcggagtgctaaagaccctagcggttcaggcgttcggcgagcggggccgctgcttgttgcgctcctggctctcccggggcgggcgcagatgggcgccgctcccgggatgtagttggtgttggtgcaaggcgggagcgagcggcggtcggggttcccgctcttgggagcggatggtcactcccccgcggggagggcgagccgaccagattttcctggggccggggacccggcgggctcggggcagggactcacctgtcgcacccacactcattcgggttggacttgccggcgtcaccgccgcggacttcgctttgggccatgaccagatataattggtgattacaactttcctctataaattaactcttgacactccttgggatttgaagaaaaaaatgcctggtgtcatacctagtgaaagtaatggactttcaagaggtagcccttcaaagaaaaacagactttccttaaagttttttcagaaaaaggaaactaagagagctttggatttcacagattctcaagaaaatgaagaaaaagcttctgaatatagagcatctgaaattgatcaagttgttcctgcagcacagtcttcacctataaactgtgagaagagagaaaacttgttaccatttgtgggactgaataatctcggcaatacttgctatcttaatagtatacttcaggtattatatttttgtcccggttttaaatctggagtaaagcacttatttaatattatttcaaggaagaaagaagctctaaaggatgaagccaatcaaaaagacaagggaaattgcaaagaagattctttggcaagttatgaattgatatgcagtttacagtccttaatcatttcggttgaacagctccaggctagttttctcttaaatccagagaaatatactgatgaacttgccactcagccaaggcgactgcttaacacactgagggaactcaaccctatgtatgaaggatatctacagcatgatgcacaggaagtattacaatgtattttgggaaacattcaagaaacatgccaactcctaaaaaaagaagaagtaaaaaatgtggcagaattacctactaaggtagaagaaatacctcatccgaaagaggaaatgaatggtattaacagcatagagatggacagtatgaggcattctgaagactttaaagagaaactcccaaaaggaaatgggaaaagaaaaagtgacactgaatttggtaacatgaagaaaaaagttaaattatccaaggaacaccagtcattggaagagaaccagagacaaactagatcaaaaagaaaagctacaagtgatacattagagagtcctcctaaaataattcccaagtatatttctgaaaatgagagtccaagaccctcacaaaagaaatcaagagttaaaataaattggttaaagtctgcaactaagcaacccagcattctttctaaattttgtagtctgggaaaaataacaacaaaccaaggagtcaaaggacaatctaaagaaaatgaatgtgatcctgaagaggacttggggaagtgtgaaagtgataacacaactaatggttgtggacttgaatctccaggaaatactgttacacctgtaaatgttaatgaagttaaacccataaacaaaggtgaagaacaaattggttttgagctagtggagaaattatttcaaggtcagctggtattaaggacgcgttgcttggaatgtgaaagtttaacagaaagaagagaagattttcaagacatcagtgtgccagtacaagaagatgagctttccaaagtagaggagagttctgaaatttctccagagccaaaaacagaaatgaagaccctgagatgggcaatttcacaatttgcttcagtagaaaggattgtaggagaagataaatatttctgtgaaaactgccatcattatactgaagctgaacgaagtcttttgtttgacaaaatgcctgaagttataactattcatttgaagtgctttgctgctagtggtttggagtttgattgttatggtggtggactttccaagatcaacactcctttattgacacctcttaaattgtcactagaagaatggagcacaaagccaactaacgacagctatggattatttgcggttgtgatgcatagtggcattacaattagtagtgggcattacactgcttctgttaaagtcactgaccttaacagtttagaactagataaaggaaattttgtggttgaccaaatgtgtgaaataggtaagccagaaccattgaatgaggaggaagcaaggggtgtggttgagaattataatgatgaagaagtgtcaattagagttggtggaaatacacagccaagtaaagttttgaacaaaaaaaatgtagaagctattggacttcttggaggacaaaagagcaaagcagattatgagctatacaacaaagcctctaatcctgataaggttgctagtacagcgtttgctgaaaatagaaattctgagactagtgatactactgggacccatgaatctgatagaaacaaggaatccagtgaccaaacaggcattaatattagtggatttgagaacaaaatttcatacgtagtgcaaagcttaaaggagtatgaggggaagtggttgctttttgatgattctgaagtcaaagttactgaagagaaggactttctgaattctctttccccttctacatctcctacttctactccttacttgctattttataagaaattatagagtgagtgtattttccttgtgtatatattaaacacacccatacaaacattggtaaagttgattacatcaaagaatctttagcttatcttttgaagctactggatattattggtctctctaggtttttatataaatagtgaaatttgaattactgaaaaccatgttaatttttagaactcattttcctcagtagagactagtgatgcattagcttctgggaacaaacttgtatcggttcttaattaaattatccaaaacggaggcatttaaacacttggatttacaccagtcttttgtgtttgctttttaaaataaagtgctcgtatttgtattctccatattttggagtaattatctacatgatgtttatagttcctgtggtttttcacccaagaagcagaatctcattcagtacatttagttttataagagtcatgaagctaaatccttgggctatgtcagaggcacaaagtctagaatgtgtgtattcacaatggtgtatgtacattttgtgccttgattcacttagaagtgtctcagaaaacctggacagttcgcttctacacaagaattttatatgtatttatgaagatgattctgtaccctagtatatctttttgggcatggactaatttgtatctgtttaactcatattctgcacgatctgtatatagtacatcaaacttagaggtgtgaccttaaatttaactttttttaaaaactgggaggtcaataaaatttaaactgcttaactatga

SEQ ID NO: 387528 - DNA, 3878 bp, Homo sapiens
gtggcccatcccgtctgctctctgtcccgtctcccgacccgtacgcttttccctcaactcgcgcgcacgaatggttaaaaaaagggtgtgaggctcgagcccgccagccaggccgctagcacctcgcgcgcgccctcagcgaggacccgcacgagctgcccggctctgtgcctgcgttgtttgaaactgtggaacccgttaggcttttggggaactacagtcccagctggctccggagcccgtgcgtgccaggggcgagtggccgtcgcgagacggctcctgcctttcgtgtctctgcagcgtggagactggaaccggcaatttcaaaggacgccacgttcaatcgcagcgctggcgcgggcggaggctaaaacacgggggtcctgagactgaggaaaacgcgccaagttcccctcggtggcggagtgctaaagaccctagcggttcaggcgttcggcgagcggggccgctgcttgttgcgctcctggctctcccggggcgggcgcagatgggcgccgctcccgggatgtagttggtgttggtgcaaggcgggagcgagcggcggtcggggttcccgctcttgggagcggatggtcactcccccgcggggagggcgagccgaccagattttcctggggccggggacccggcgggctcggggcagggactcacctgtcgcacccacactcattcgggttggacttgccggcgtcaccgccgcggacttcgctttgggccatgaccagatataattggtgattacaactttcctctataaattaactcttgacactccttgggatttgaagaaaaaaatgcctggtgtcatacctagtgaaagtaatggactttcaagaggtagcccttcaaagaaaaacagactttccttaaagttttttcagaaaaaggaaactaagagagctttggatttcacagattctcaagaaaatgaagaaaaagcttctgaatatagagcatctgaaattgatcaagttgttcctgcagcacagtcttcacctataaactgtgagaagagagaaaacttgttaccatttgtgggactgaataatctcggcaatacttgctatcttaatagtatacttcaggtattatatttttgtcccggttttaaatctggagtaaagcacttatttaatattatttcaaggaagaaagaagctctaaaggatgaagccaatcaaaaagacaagggaaattgcaaagaagattctttggcaagttatgaattgatatgcagtttacagtccttaatcatttcggttgaacagctccaggctagttttctcttaaatccagagaaatatactgatgaacttgccactcagccaaggcgactgcttaacacactgagggaactcaaccctatgtatgaaggatatctacagcatgatgcacaggaagtattacaatgtattttgggaaacattcaagaaacatgccaactcctaaaaaaagaagaagtaaaaaatgtggcagaattacctactaaggtagaagaaatacctcatccgaaagaggaaatgaatggtattaacagcatagagatggacagtatgaggcattctgaagactttaaagagaaactcccaaaaggaaatgggaaaagaaaaagtgacactgaatttggtaacatgaagaaaaaagttaaattatccaaggaacaccagtcattggaagagaaccagagacaaactagatcaaaaagaaaagctacaagtgatacattagagagtcctcctaaaataattcccaagtatatttctgaaaatgagagtccaagaccctcacaaaagaaatcaagagttaaaataaattggttaaagtctgcaactaagcaacccagcattctttctaaattttgtagtctgggaaaaataacaacaaaccaaggagtcaaaggacaatctaaaaactaatggttgtggacttgaatctccaggaaatactgttacacctgtaaatgttaatgaagttaaacccataaacaaaggtgaagaacaaattggttttgagctagtggagaaattatttcaaggtcagctggtattaaggacgcgttgcttggaatgtgaaagtttaacagaaagaagagaagattttcaagacatcagtgtgccagtacaagaagatgagctttccaaagtagaggagagttctgaaatttctccagagccaaaaacagaaatgaagaccctgagatgggcaatttcacaatttgcttcagtagaaaggattgtaggagaagataaatatttctgtgaaaactgccatcattatactgaagctgaacgaagtcttttgtttgacaaaatgcctgaagttataactattcatttgaagtgctttgctgctagtggtttggagtttgattgttatggtggtggactttccaagatcaacactcctttattgacacctcttaaattgtcactagaagaatggagcacaaagccaactaacgacagctatggattatttgcggttgtgatgcatagtggcattacaattagtagtgggcattacactgcttctgttaaagtcactgaccttaacagtttagaactagataaaggaaattttgtggttgaccaaatgtgtgaaataggtaagccagaaccattgaatgaggaggaagcaaggggtgtggttgagaattataatgatgaagaagtgtcaattagagttggtggaaatacacagccaagtaaagttttgaacaaaaaaaatgtagaagctattggacttcttggaggacaaaagagcaaagcagattatgagctatacaacaaagcctctaatcctgataaggttgctagtacagcgtttgctgaaaatagaaattctgagactagtgatactactgggacccatgaatctgatagaaacaaggaatccagtgaccaaacaggcattaatattagtggatttgagaacaaaatttcatacgtagtgcaaagcttaaaggagtatgaggggaagtggttgctttttgatgattctgaagtcaaagttactgaagagaaggactttctgaattctctttccccttctacatctcctacttctactccttacttgctattttataagaaattatagagtgagtgtattttccttgtgtatatattaaacacacccatacaaacattggtaaagttgattacatcaaagaatctttagcttatcttttgaagctactggatattattggtctctctaggtttttatataaatagtgaaatttgaattactgaaaaccatgttaatttttagaactcattttcctcagtagagactagtgatgcattagcttctgggaacaaacttgtatcggttcttaattaaattatccaaaacggaggcatttaaacacttggatttacaccagtcttttgtgtttgctttttaaaataaagtgctcgtatttgtattctccatattttggagtaattatctacatgatgtttatagttcctgtggtttttcacccaagaagcagaatctcattcagtacatttagttttataagagtcatgaagctaaatccttgggctatgtcagaggcacaaagtctagaatgtgtgtattcacaatggtgtatgtacattttgtgccttgattcacttagaagtgtctcagaaaacctggacagttcgcttctacacaagaattttatatgtatttatgaagatgattctgtaccctagtatatctttttgggcatggactaatttgtatctgtttaactcatattctgcacgatctgtatatagtacatcaaacttagaggtgtgaccttaaatttaactttttttaaaaactgggaggtcaataaaatttaaactgcttaactatga

SEQ ID NO: 387529 - DNA, 3877 bp, Homo sapiens
gtggcccatcccgtctgctctctgtcccgtctcccgacccgtacgcttttccctcaactcgcgcgcacgaatggttaaaaaaagggtgtgaggctcgagcccgccagccaggccgctagcacctcgcgcgcgccctcagcgaggacccgcacgagctgcccggctctgtgcctgcgttgtttgaaactgtggaacccgttaggcttttggggaactacagtcccagctggctccggagcccgtgcgtgccaggggcgagtggccgtcgcgagacggctcctgcctttcgtgtctctgcagcgtggagactggaaccggcaatttcaaaggacgccacgttcaatcgcagcgctggcgcgggcggaggctaaaacacgggggtcctgagactgaggaaaacgcgccaagttcccctcggtggcggagtgctaaagaccctagcggttcaggcgttcggcgagcggggccgctgcttgttgcgctcctggctctcccggggcgggcgcagatgggcgccgctcccgggatgtagttggtgttggtgcaaggcgggagcgagcggcggtcggggttcccgctcttgggagcggatggtcactcccccgcggggagggcgagccgaccagattttcctggggccggggacccggcgggctcggggcagggactcacctgtcgcacccacactcattcgggttggacttgccggcgtcaccgccgcggacttcgctttgggccatgaccagatataattggtgattacaactttcctctataaattaactcttgacactccttgggatttgaagaaaaaaatgcctggtgtcatacctagtgaaagtaatggactttcaagaggtagcccttcaaagaaaaacagactttccttaaagttttttcagaaaaaggaaactaagagagctttggatttcacagattctcaagaaaatgaagaaaaagcttctgaatatagagcatctgaaattgatcaagttgttcctgcagcacagtcttcacctataaactgtgagaagagagaaaacttgttaccatttgtgggactgaataatctcggcaatacttgctatcttaatagtatacttcaggtattatatttttgtcccggttttaaatctggagtaaagcacttatttaatattatttcaaggaagaaagaagctctaaaggatgaagccaatcaaaaagacaagggaaattgcaaagaagattctttggcaagttatgaattgatatgcagtttacagtccttaatcatttcggttgaacagctccaggctagttttctcttaaatccagagaaatatactgatgaacttgccactcagccaaggcgactgcttaacacactgagggaactcaaccctatgtatgaaggatatctacagcatgatgcacaggaagtattacaatgtattttgggaaacattcaagaaacatgccaactcctaaaaaaagaagaagtaaaaaatgtggcagaattacctactaaggtagaagaaatacctcattctgaagactttaaagagaaactcccaaaaggaaatgggaaaagaaaaagtgacactgaatttggtaacatgaagaaaaaagttaaattatccaaggaacaccagtcattggaagagaaccagagacaaactagatcaaaaagaaaagctacaagtgatacattagagagtcctcctaaaataattcccaagtatatttctgaaaatgagagtccaagaccctcacaaaagaaatcaagagttaaaataaattggttaaagtctgcaactaagcaacccagcattctttctaaattttgtagtctgggaaaaataacaacaaaccaaggagtcaaaggacaatctaaagaaaatgaatgtgatcctgaagaggacttggggaagtgtgaaagtgataacacaactaatggttgtggacttgaatctccaggaaatactgttacacctgtaaatgttaatgaagttaaacccataaacaaaggtgaagaacaaattggttttgagctagtggagaaattatttcaaggtcagctggtattaaggacgcgttgcttggaatgtgaaagtttaacagaaagaagagaagattttcaagacatcagtgtgccagtacaagaagatgagctttccaaagtagaggagagttctgaaatttctccagagccaaaaacagaaatgaagaccctgagatgggcaatttcacaatttgcttcagtagaaaggattgtaggagaagataaatatttctgtgaaaactgccatcattatactgaagctgaacgaagtcttttgtttgacaaaatgcctgaagttataactattcatttgaagtgctttgctgctagtggtttggagtttgattgttatggtggtggactttccaagatcaacactcctttattgacacctcttaaattgtcactagaagaatggagcacaaagccaactaacgacagctatggattatttgcggttgtgatgcatagtggcattacaattagtagtgggcattacactgcttctgttaaagtcactgaccttaacagtttagaactagataaaggaaattttgtggttgaccaaatgtgtgaaataggtaagccagaaccattgaatgaggaggaagcaaggggtgtggttgagaattataatgatgaagaagtgtcaattagagttggtggaaatacacagccaagtaaagttttgaacaaaaaaaatgtagaagctattggacttcttggaggacaaaagagcaaagcagattatgagctatacaacaaagcctctaatcctgataaggttgctagtacagcgtttgctgaaaatagaaattctgagactagtgatactactgggacccatgaatctgatagaaacaaggaatccagtgaccaaacaggcattaatattagtggatttgagaacaaaatttcatacgtagtgcaaagcttaaaggagtatgaggggaagtggttgctttttgatgattctgaagtcaaagttactgaagagaaggactttctgaattctctttccccttctacatctcctacttctactccttacttgctattttataagaaattatagagtgagtgtattttccttgtgtatatattaaacacacccatacaaacattggtaaagttgattacatcaaagaatctttagcttatcttttgaagctactggatattattggtctctctaggtttttatataaatagtgaaatttgaattactgaaaaccatgttaatttttagaactcattttcctcagtagagactagtgatgcattagcttctgggaacaaacttgtatcggttcttaattaaattatccaaaacggaggcatttaaacacttggatttacaccagtcttttgtgtttgctttttaaaataaagtgctcgtatttgtattctccatattttggagtaattatctacatgatgtttatagttcctgtggtttttcacccaagaagcagaatctcattcagtacatttagttttataagagtcatgaagctaaatccttgggctatgtcagaggcacaaagtctagaatgtgtgtattcacaatggtgtatgtacattttgtgccttgattcacttagaagtgtctcagaaaacctggacagttcgcttctacacaagaattttatatgtatttatgaagatgattctgtaccctagtatatctttttgggcatggactaatttgtatctgtttaactcatattctgcacgatctgtatatagtacatcaaacttagaggtgtgaccttaaatttaactttttttaaaaactgggaggtcaataaaatttaaactgcttaactatga

SEQ ID NO: 387530 - DNA, 3453 bp, Homo sapiens
aacggaggcggggcttaccgcgagggcctcgctccggaagccgcaccctccgcggcgtcccaccgtcgaggattaacaaaacgccaaacaagattttaacagtcggcagcgaaagcgcgcactcgagcgccaatgagagcggaaggaggggcaccgcgcctgaggaacactccgtatgtcgaacaatgattggctggagcccacctttcttcttttttgctattagatgggcttgctgctcccgcccatctaattggctttggtctagatataattggtgattacaactttcctctataaattaactcttgacactccttgggatttgaagaaaaaaatgcctggtgtcatacctagtgaaagtaatggactttcaagaggtagcccttcaaagaaaaacagactttccttaaagttttttcagaaaaaggaaactaagagagctttggatttcacagattctcaagaaaatgaagaaaaagcttctgaatatagagcatctgaaattgatcaagttgttcctgcagcacagtcttcacctataaactgtgagaagagagaaaacttgttaccatttgtgggactgaataatctcggcaatacttgctatcttaatagtatacttcaggtattatatttttgtcccggttttaaatctggagtaaagcacttatttaatattatttcaaggaagaaagaagctctaaaggatgaagccaatcaaaaagacaagggaaattgcaaagaagattctttggcaagttatgaattgatatgcagtttacagtccttaatcatttcggttgaacagctccaggctagttttctcttaaatccagagaaatatactgatgaacttgccactcagccaaggcgactgcttaacacactgagggaactcaaccctatgtatgaaggatatctacagcatgatgcacaggaagtattacaatgtattttgggaaacattcaagaaacatgccaactcctaaaaaaagaagaagtaaaaaatgtggcagaattacctactaaggtagaagaaatacctcatccgaaagaggaaatgaatggtattaacagcatagagatggacagtatgaggcattctgaagactttaaagagaaactcccaaaaggaaatgggaaaagaaaaagtgacactgaatttggtaacatgaagaaaaaagttaaattatccaaggaacaccagtcattggaagagaaccagagacaaactagatcaaaaagaaaagctacaagtgatacattagagagtcctcctaaaataattcccaagtatatttctgaaaatgagagtccaagaccctcacaaaagaaatcaagagttaaaataaattggttaaagtctgcaactaagcaacccagcattctttctaaattttgtagtctgggaaaaataacaacaaaccaaggagtcaaaggacaatctaaagaaaatgaatgtgatcctgaagaggacttggggaagtgtgaaagtgataacacaactaatggttgtggacttgaatctccaggaaatactgttacacctgtaaatgttaatgaagttaaacccataaacaaaggtgaagaacaaattggttttgagctagtggagaaattatttcaaggtcagctggtattaaggacgcgttgcttggaatgtgaaagtttaacagaaagaagagaagattttcaagacatcagtgtgccagtacaagaagatgagctttccaaagtagaggagagttctgaaatttctccagagccaaaaacagaaatgaagaccctgagatgggcaatttcacaatttgcttcagtagaaaggattgtaggagaagataaatatttctgtgaaaactgccatcattatactgaagctgaacgaagtcttttgtttgacaaaatgcctgaagttataactattcatttgaagtgctttgctgctagtggtttggagtttgattgttatggtggtggactttccaagatcaacactcctttattgacacctcttaaattgtcactagaagaatggagcacaaagccaactaacgacagctatggattatttgcggttgtgatgcatagtggcattacaattagtagtgggcattacactgcttctgttaaagtcactgaccttaacagtttagaactagataaaggaaattttgtggttgaccaaatgtgtgaaataggtaagccagaaccattgaatgaggaggaagcaaggggtgtggttgagaattataatgatgaagaagtgtcaattagagttggtggaaatacacagccaagtaaagttttgaacaaaaaaaatgtagaagctattggacttcttggaggacaaaagagcaaagcagattatgagctatacaacaaagcctctaatcctgataaggttgctagtacagcgtttgctgaaaatagaaattctgagactagtgatactactgggacccatgaatctgatagaaacaaggaatccagtgaccaaacaggcattaatattagtggatttgagaacaaaatttcatacgtagtgcaaagcttaaaggagtatgaggggaagtggttgctttttgatgattctgaagtcaaagttactgaagagaaggactttctgaattctctttccccttctacatctcctacttctactccttacttgctattttataagaaattatagagtgagtgtattttccttgtgtatatattaaacacacccatacaaacattggtaaagttgattacatcaaagaatctttagcttatcttttgaagctactggatattattggtctctctaggtttttatataaatagtgaaatttgaattactgaaaaccatgttaatttttagaactcattttcctcagtagagactagtgatgcattagcttctgggaacaaacttgtatcggttcttaattaaattatccaaaacggaggcatttaaacacttggatttacaccagtcttttgtgtttgctttttaaaataaagtgctcgtatttgtattctccatattttggagtaattatctacatgatgtttatagttcctgtggtttttcacccaagaagcagaatctcattcagtacatttagttttataagagtcatgaagctaaatccttgggctatgtcagaggcacaaagtctagaatgtgtgtattcacaatggtgtatgtacattttgtgccttgattcacttagaagtgtctcagaaaacctggacagttcgcttctacacaagaattttatatgtatttatgaagatgattctgtaccctagtatatctttttgggcatggactaatttgtatctgtttaactcatattctgcacgatctgtatatagtacatcaaacttagaggtgtgaccttaaatttaactttttttaaaaactgggaggtcaataaaatttaaactgcttaactatga

SEQ ID NO: 387531 - DNA, 3362 bp, Homo sapiens
aacggaggcggggcttaccgcgagggcctcgctccggaagccgcaccctccgcggcgtcccaccgtcgaggattaacaaaacgccaaacaagattttaacagtcggcagcgaaagcgcgcactcgagcgccaatgagagcggaaggaggggcaccgcgcctgaggaacactccgtatatataattggtgattacaactttcctctataaattaactcttgacactccttgggatttgaagaaaaaaatgcctggtgtcatacctagtgaaagtaatggactttcaagaggtagcccttcaaagaaaaacagactttccttaaagttttttcagaaaaaggaaactaagagagctttggatttcacagattctcaagaaaatgaagaaaaagcttctgaatatagagcatctgaaattgatcaagttgttcctgcagcacagtcttcacctataaactgtgagaagagagaaaacttgttaccatttgtgggactgaataatctcggcaatacttgctatcttaatagtatacttcaggtattatatttttgtcccggttttaaatctggagtaaagcacttatttaatattatttcaaggaagaaagaagctctaaaggatgaagccaatcaaaaagacaagggaaattgcaaagaagattctttggcaagttatgaattgatatgcagtttacagtccttaatcatttcggttgaacagctccaggctagttttctcttaaatccagagaaatatactgatgaacttgccactcagccaaggcgactgcttaacacactgagggaactcaaccctatgtatgaaggatatctacagcatgatgcacaggaagtattacaatgtattttgggaaacattcaagaaacatgccaactcctaaaaaaagaagaagtaaaaaatgtggcagaattacctactaaggtagaagaaatacctcatccgaaagaggaaatgaatggtattaacagcatagagatggacagtatgaggcattctgaagactttaaagagaaactcccaaaaggaaatgggaaaagaaaaagtgacactgaatttggtaacatgaagaaaaaagttaaattatccaaggaacaccagtcattggaagagaaccagagacaaactagatcaaaaagaaaagctacaagtgatacattagagagtcctcctaaaataattcccaagtatatttctgaaaatgagagtccaagaccctcacaaaagaaatcaagagttaaaataaattggttaaagtctgcaactaagcaacccagcattctttctaaattttgtagtctgggaaaaataacaacaaaccaaggagtcaaaggacaatctaaagaaaatgaatgtgatcctgaagaggacttggggaagtgtgaaagtgataacacaactaatggttgtggacttgaatctccaggaaatactgttacacctgtaaatgttaatgaagttaaacccataaacaaaggtgaagaacaaattggttttgagctagtggagaaattatttcaaggtcagctggtattaaggacgcgttgcttggaatgtgaaagtttaacagaaagaagagaagattttcaagacatcagtgtgccagtacaagaagatgagctttccaaagtagaggagagttctgaaatttctccagagccaaaaacagaaatgaagaccctgagatgggcaatttcacaatttgcttcagtagaaaggattgtaggagaagataaatatttctgtgaaaactgccatcattatactgaagctgaacgaagtcttttgtttgacaaaatgcctgaagttataactattcatttgaagtgctttgctgctagtggtttggagtttgattgttatggtggtggactttccaagatcaacactcctttattgacacctcttaaattgtcactagaagaatggagcacaaagccaactaacgacagctatggattatttgcggttgtgatgcatagtggcattacaattagtagtgggcattacactgcttctgttaaagtcactgaccttaacagtttagaactagataaaggaaattttgtggttgaccaaatgtgtgaaataggtaagccagaaccattgaatgaggaggaagcaaggggtgtggttgagaattataatgatgaagaagtgtcaattagagttggtggaaatacacagccaagtaaagttttgaacaaaaaaaatgtagaagctattggacttcttggaggacaaaagagcaaagcagattatgagctatacaacaaagcctctaatcctgataaggttgctagtacagcgtttgctgaaaatagaaattctgagactagtgatactactgggacccatgaatctgatagaaacaaggaatccagtgaccaaacaggcattaatattagtggatttgagaacaaaatttcatacgtagtgcaaagcttaaaggagtatgaggggaagtggttgctttttgatgattctgaagtcaaagttactgaagagaaggactttctgaattctctttccccttctacatctcctacttctactccttacttgctattttataagaaattatagagtgagtgtattttccttgtgtatatattaaacacacccatacaaacattggtaaagttgattacatcaaagaatctttagcttatcttttgaagctactggatattattggtctctctaggtttttatataaatagtgaaatttgaattactgaaaaccatgttaatttttagaactcattttcctcagtagagactagtgatgcattagcttctgggaacaaacttgtatcggttcttaattaaattatccaaaacggaggcatttaaacacttggatttacaccagtcttttgtgtttgctttttaaaataaagtgctcgtatttgtattctccatattttggagtaattatctacatgatgtttatagttcctgtggtttttcacccaagaagcagaatctcattcagtacatttagttttataagagtcatgaagctaaatccttgggctatgtcagaggcacaaagtctagaatgtgtgtattcacaatggtgtatgtacattttgtgccttgattcacttagaagtgtctcagaaaacctggacagttcgcttctacacaagaattttatatgtatttatgaagatgattctgtaccctagtatatctttttgggcatggactaatttgtatctgtttaactcatattctgcacgatctgtatatagtacatcaaacttagaggtgtgaccttaaatttaactttttttaaaaactgggaggtcaataaaatttaaactgcttaactatga

SEQ ID NO: 387532 - DNA, 2746 bp, Homo sapiens
gtggcccatcccgtctgctctctgtcccgtctcccgacccgtacgcttttccctcaactcgcgcgcacgaatggttaaaaaaagggtgtgaggctcgagcccgccagccaggccgctagcacctcgcgcgcgccctcagcgaggacccgcacgagctgcccggctctgtgcctgcgttgtttgaaactgtggaacccgttaggcttttggggaactacagtcccagctggctccggagcccgtgcgtgccaggggcgagtggccgtcgcgagacggctcctgcctttcgtgtctctgcagcgtggagactggaaccggcaatttcaaaggacgccacgttcaatcgcagcgctggcgcgggcggaggctaaaacacgggggtcctgagactgaggaaaacgcgccaagttcccctcggtggcggagtgctaaagaccctagcggttcaggcgttcggcgagcggggccgctgcttgttgcgctcctggctctcccggggcgggcgcagatgggcgccgctcccgggatgtagttggtgttggtgcaaggcgggagcgagcggcggtcggggttcccgctcttgggagcggatggtcactcccccgcggggagggcgagccgaccagattttcctggggccggggacccggcgggctcggggcagggactcacctgtcgcacccacactcattcgggttggacttgccggcgtcaccgccgcggacttcgctttgggccatgaccagatataattggtgattacaactttcctctataaattaactcttgacactccttgggatttgaagaaaaaaatgcctggtgtcatacctagtgaaagtaatggactttcaagaggtagcccttcaaagaaaaacagactttccttaaagttttttcagaaaaaggaaactaagagagctttggatttcacagattctcaagaaaatgaagaaaaagcttctgaatatagagcatctgaaattgatcaagttgttcctgcagcacagtcttcacctataaactgtgagaagagagaaaacttgttaccatttgtgggactgaataatctcggcaatacttgctatcttaatagtatacttcaggtattatatttttgtcccggttttaaatctggagtaaagcacttatttaatattatttcaaggaagaaagaagctctaaaggatgaagccaatcaaaaagacaagggaaattgcaaagaagattctttggcaagttatgaattgatatgcagtttacagtccttaatcatttcggttgaacagctccaggctagttttctcttaaatccagagaaatatactgatgaacttgccactcagccaaggcgactgcttaacacactgagggaactcaaccctatgtatgaaggatatctacagcatgatgcacaggaagtattacaatgtattttgggaaacattcaagaaacatgccaactcctaaaaaaagaagaagtaaaaaatgtggcagaattacctactaaggtagaagaaatacctcatccgaaagaggaaatgaatggtattaacagcatagagatggacagtatgaggcattctgaagactttaaagagaaactcccaaaaggaaatgggaaaagaaaaagtgacactgaatttggtaacatgaagaaaaaagttaaattatccaaggaacaccagtcattggaagagaaccagagacaaactagatcaaaaagaaaagctacaagtgatacattagagagtcctcctaaaataattcccaagtatatttctgaaaatgagagtccaagaccctcacaaaagaaatcaagagttaaaataaattggttaaagtctgcaactaagcaacccagcattctttctaaattttgtagtctgggaaaaataacaacaaaccaaggagtcaaaggacaatctaaagaaaatgaatgtgatcctgaagaggacttggggaagtgtgaaagtgataacacaactaatggttgtggacttgaatctccaggaaatactgttacacctgtaaatgttaatgaagttaaacccataaacaaaggtgaagaacaaattggttttgagctagtggagaaattatttcaaggtcagctggtattaaggacgcgttgcttggaatgtgaaagtttaacagaaagaagagaagattttcaagacatcagtgtgccagtacaagaagatgagctttccaaagtagaggagagttctgaaatttctccagagccaaaaacagaaatgaagaccctgagatgggcaatttcacaatttgcttcagtagaaaggattgtaggagaagataaatatttctgtgaaaactgccatcattatactgaagctgaacgaagtcttttgtttgacaaaatgcctgaagttataactattcatttgaagtgctttgctgctagtggtttggagtttgattgttatggtggtggactttccaagatcaacactcctttattgacacctcttaaattgtcactagaagaatggagcacaaagccaactaacgacagctatggattatttgcggttgtgatgcatagtggcattacaattagtagtgggcattacactgcttctgttaaagtcactgaccttaacagtttagaactagataaaggaaattttgtggttgaccaaatgtgtgaaataggtaagccagaaccattgaatgaggaggaagcggggtccgctgtctgagggtcctctagagcacaccc

SEQ ID NO: 387533 - DNA, 2055 bp, Homo sapiens
ccacctgagtcacaccacctgagtccacaccacctgagtcaaaggacaatctaaagaaaatgaatgtgatcctgaagaggacttggggaagtgtgaaagtgataacacaactaatggttgtggacttgaatctccaggaaatactgttacacctgtaaatgttaatgaagttaaacccataaacaaaggtgaagaacaaattggttttgagctagtggagaaattatttcaaggtcagctggtattaaggacgcgttgcttggaatgtgaaagtttaacagaaagaagagaagattttcaagacatcagtgtgccagtacaagaagatgagctttccaaagtagaggagagttctgaaatttctccagagccaaaaacagaaatgaagaccctgagatgggcaatttcacaatttgcttcagtagaaaggattgtaggagaagataaatatttctgtgaaaactgccatcattatactgaagctgaacgaagtcttttgtttgacaaaatgcctgaagttataactattcatttgaagtgctttgctgctagtggtttggagtttgattgttatggtggtggactttccaagatcaacactcctttattgacacctcttaaattgtcactagaagaatggagcacaaagccaactaacgacagctatggattatttgcggttgtgatgcatagtggcattacaattagtagtgggcattacactgcttctgttaaagtcactgaccttaacagtttagaactagataaaggaaattttgtggttgaccaaatgtgtgaaataggtaagccagaaccattgaatgaggaggaagcaaggggtgtggttgagaattataatgatgaagaagtgtcaattagagttggtggaaatacacagccaagtaaagttttgaacaaaaaaaatgtagaagctattggacttcttggaggacaaaagagcaaagcagattatgagctatacaacaaagcctctaatcctgataaggttgctagtacagcgtttgctgaaaatagaaattctgagactagtgatactactgggacccatgaatctgatagaaacaaggaatccagtgaccaaacaggcattaatattagtggatttgagaacaaaatttcatacgtagtgcaaagcttaaaggagtatgaggggaagtggttgctttttgatgattctgaagtcaaagttactgaagagaaggactttctgaattctctttccccttctacatctcctacttctactccttacttgctattttataagaaattatagagtgagtgtattttccttgtgtatatattaaacacacccatacaaacattggtaaagttgattacatcaaagaatctttagcttatcttttgaagctactggatattattggtctctctaggtttttatataaatagtgaaatttgaattactgaaaaccatgttaatttttagaactcattttcctcagtagagactagtgatgcattagcttctgggaacaaacttgtatcggttcttaattaaattatccaaaacggaggcatttaaacacttggatttacaccagtcttttgtgtttgctttttaaaataaagtgctcgtatttgtattctccatattttggagtaattatctacatgatgtttatagttcctgtggtttttcacccaagaagcagaatctcattcagtacatttagttttataagagtcatgaagctaaatccttgggctatgtcagaggcacaaagtctagaatgtgtgtattcacaatggtgtatgtacattttgtgccttgattcacttagaagtgtctcagaaaacctggacagttcgcttctacacaagaattttatatgtatttatgaagatgattctgtaccctagtatatctttttgggcatggactaatttgtatctgtttaactcatattctgcacgatctgtatatagtacatcaaacttagaggtgtgaccttaaatttaactttttttaaaaactgggaggtcaataaaatttaaactgcttaactatga

SEQ ID NO: 387534 - DNA, 2575 bp, Homo sapiens
gtggcccatcccgtctgctctctgtcccgtctcccgacccgtacgcttttccctcaactcgcgcgcacgaatggttaaaaaaagggtgtgaggctcgagcccgccagccaggccgctagcacctcgcgcgcgccctcagcgaggacccgcacgagctgcccggctctgtgcctgcgttgtttgaaactgtggaacccgttaggcttttggggaactacagtcccagctggctccggagcccgtgcgtgccaggggcgagtggccgtcgcgagacggctcctgcctttcgtgtctctgcagcgtggagactggaaccggcaatttcaaaggacgccacgttcaatcgcagcgctggcgcgggcggaggctaaaacacgggggtcctgagactgaggaaaacgcgccaagttcccctcggtggcggagtgctaaagaccctagcggttcaggcgttcggcgagcggggccgctgcttgttgcgctcctggctctcccggggcgggcgcagatgggcgccgctcccgggatgtagttggtgttggtgcaaggcgggagcgagcggcggtcggggttcccgctcttgggagcggatggtcactcccccgcggggagggcgagccgaccagattttcctggggccggggacccggcgggctcggggcagggactcacctgtcgcacccacactcattcgggttggacttgccggcgtcaccgccgcggacttcgctttgggccatgaccagatataattggtgattacaactttcctctataaattaactcttgacactccttgggatttgaagaaaaaaatgcctggtgtcatacctagtgaaagtaatggactttcaagaggtagcccttcaaagaaaaacagactttccttaaagttttttcagaaaaaggaaactaagagagctttggatttcacagattctcaagaaaatgaagaaaaagcttctgaatatagagcatctgaaattgatcaagttgttcctgcagcacagtcttcacctataaactgtgagaagagagaaaacttgttaccatttgtgggactgaataatctcggcaatacttgctatcttaatagtatacttcaggtattatatttttgtcccggttttaaatctggagtaaagcacttatttaatattatttcaaggaagaaagaagctctaaaggatgaagccaatcaaaaagacaagggaaattgcaaagaagattctttggcaagttatgaattgatatgcagtttacagtccttaatcatttcggttgaacagctccaggctagttttctcttaaatccagagaaatatactgatgaacttgccactcagccaaggcgactgcttaacacactgagggaactcaaccctatgtatgaaggatatctacagcatgatgcacaggaagtattacaatgtattttgggaaacattcaagaaacatgccaactcctaaaaaaagaagaagtaaaaaatgtggcagaattacctactaaggtagaagaaatacctcatccgaaagaggaaatgaatggtattaacagcatagagatggacagtatgaggcattctgaagactttaaagagaaactcccaaaaggaaatgggaaaagaaaaagtgacactgaatttggtaacatgaagaaaaaagttaaattatccaaggaacaccagtcattggaagagaaccagagacaaactagatcaaaaagaaaagctacaagtgatacattagagagtcctcctaaaataattcccaagtatatttctgaaaatgagagtccaagaccctcacaaaagaaatcaagagttaaaataaattggttaaagtctgcaactaagcaacccagcattctttctaaattttgtagtctgggaaaaataacaacaaaccaaggagtcaaaggacaatctaaagaaaatgaatgtgatcctgaagaggacttggggaagtgtgaaagtgataacacaactaatggttgtggacttgaatctccaggaaatactgttacacctgtaaatgttaatgaagttaaacccataaacaaaggtgaagaacaaattggttttgagctagtggagaaattatttcaaggtcagctggtattaaggacgcgttgcttggaatgtgaaagtttaacagaaagaagagaagattttcaagacatcagtgtgccagtacaagaagatgagctttccaaagtagaggagagttctgaaatttctccagagccaaaaacagaaatgaagaccctgagatgggcaatttcacaatttgcttcagtagaaaggattgtaggagaagataaatatttctgtgaaaactgccatcattatactgaagctgaacgaagtcttttgtttgacaaaatgcctgaagttataactattcatttgaagtgctttgctgctagtggtttggagtttgattgttatggtggtggactttccaagatcaacactcctttattgacacctcttaaattgtcactagaagaatggagcacaaagccaactaacgacagctatggatacacgtcgcgaggtaccggctcgatcta

SEQ ID NO: 387535 - DNA, 2014 bp, Homo sapiens
acatgacaaaaccctatctctacaaaaaatacacaaactggtttggcgtggtggcgggcacttgtggtcccaactgctcaggaggctgaggaggaggagcctgaggtgggaggatcacttgagtccagaaggagccatgattgcaccactgcagtcagcctgggtgacagaccctgccttaaaaaaaaaaaaacccaaaacgtaacatttttggttccggttcagtctatttaaaataccatttattttcttaactgcacaaaattaggaaaataaaggaaaaaatacaattatttcttccacagaaatgcctgaatattagcagttatttatttttttgtttctgcatatattataaatattattcaaagttggggtcttgttttgattctgcttttctgatatatgaacactggatattaagggttcattcagatttttacttggtttcagattggggtataacattttgaatttaaaatagaactgcaggaaaccttttctttttttcctcccaaaggtttgattgttatggtggtggactttccaagatcaacactcctttattgacacctcttaaattgtcactagaagaatggagcacaaagccaactaacgacagctatggattatttgcggttgtgatgcatagtggcattacaattagtagtgggcattacactgcttctgttaaagtcactgaccttaacagtttagaactagataaaggaaattttgtggttgaccaaatgtgtgaaataggtaagccagaaccattgaatgaggaggaagcaaggggtgtggttgagaattataatgatgaagaagtgtcaattagagttggtggaaatacacagccaagtaaagttttgaacaaaaaaaatgtagaagctattggacttcttggaggacaaaagagcaaagcagattatgagctatacaacaaagcctctaatcctgataaggttgctagtacagcgtttgctgaaaatagaaattctgagactagtgatactactgggacccatgaatctgatagaaacaaggaatccagtgaccaaacaggcattaatattagtggatttgagaacaaaatttcatacgtagtgcaaagcttaaaggagtatgaggggaagtggttgctttttgatgattctgaagtcaaagttactgaagagaaggactttctgaattctctttccccttctacatctcctacttctactccttacttgctattttataagaaattatagagtgagtgtattttccttgtgtatatattaaacacacccatacaaacattggtaaagttgattacatcaaagaatctttagcttatcttttgaagctactggatattattggtctctctaggtttttatataaatagtgaaatttgaattactgaaaaccatgttaatttttagaactcattttcctcagtagagactagtgatgcattagcttctgggaacaaacttgtatcggttcttaattaaattatccaaaacggaggcatttaaacacttggatttacaccagtcttttgtgtttgctttttaaaataaagtgctcgtatttgtattctccatattttggagtaattatctacatgatgtttatagttcctgtggtttttcacccaagaagcagaatctcattcagtacatttagttttataagagtcatgaagctaaatccttgggctatgtcagaggcacaaagtctagaatgtgtgtattcacaatggtgtatgtacattttgtgccttgattcacttagaagtgtctcagaaaacctggacagttcgcttctacacaagaattttatatgtatttatgaagatgattctgtaccctagtatatctttttgggcatggactaatttgtatctgtttaactcatattctgcacgatctgtatatagtacatcaaacttagaggtgtgaccttaaatttaactttttttaaaaactgggaggtcaataaaatttaaactgcttaactatga

SEQ ID NO: 387536 - DNA, 1575 bp, Homo sapiens
tgttaccaatctgaagtggaagcggccgctataagaaattatagagtgagtgtattttccttgtgtatatattaaacacacccatacaaacattggtaaagttgattacatcaaagaatctttagcttatcttttgaagctactggatattattggtctctctaggtttttatataaatagtgaaatttgaattactgaaaaccatgttaatttttagaactcattttcctcagtagagactagtgatgcattagcttctgggaacaaacttgtatcggttcttaattaaattatccaaaacggaggcatttaaacacttggatttacaccagtcttttgtgtttgctttttaaaataaagtgctcgtatttgtattctccatattttggagtaattatctacatgatgtttatagttcctgtggtttttcacccaagaagcagaatctcattcagtacatttagttttataagagtcatgaagctaaatccttgggctatgtcagaggcacaaagtctagaatgtgtgtattcacaatggtgtatgtacattttgtgccttgattcacttagaagtgtctcagaaaacctggacagttcgcttctacacaagaattttatatgtatttatgaagatgattctgtaccctagtatatctttttgggcatggactaatttgtatctgtttaactcatattctgcacgatctgtatatagtacatcaaacttagaggtgtgaccttaaatttaactttttttaaaaactgggaggtcaataaaatttaaactgcttaactatgaaaatgaatatttgaattttttacttgtatatttttataaatacagctgagttttcttaaagcgaataagtgtgtgtatatatatatgtatatatatgagagaataagcatgcataattacctttattactgaatactttctgacagtgcaggagtttttcaaagaggagaaattgtgcttagtccagccaagctgtcatacttaaaagaggtttataatgaaatctgttgcatctaattgtcctttaaagtagacatgatttaatggaatccaaaactggaaaagttaagatgatgctttgggcacacataaaaacttggttaaaatttcattttaaactagtatactgaagtggtaagtgatgaatgatttcatgacttgttaatggacattcttggtactaagtttttcctagaaatgattctaaatatgtaaatgctattggggtaacactttaataccccatttcaacaaggagtaccttctcaattaaaaaaaatcgcagtagccaccgcacccagatctggttagttcttaagtgattcatgtaactggtcagtagaagaaaaggattataaatgatgccattctgtaaactgcactactacccaaaaaccattgttctaaactgttctggaaatcattactatgcatcgttttggaaaaacttgccaagaattaaaatgttacttctcaaattttttttctgtatgacttgcatataattttagatgaattaaagcacctaattttactttttatatgcttctaaa

SEQ ID NO: 387537 - DNA, 1360 bp, Homo sapiens
aggatccccccaccggcaggttgtactccggcaggttgtacttctgggaacaaacttgtatcggttcttaattaaattatccaaaacggaggcatttaaacacttggatttacaccagtcttttgtgtttgctttttaaaataaagtgctcgtatttgtattctccatattttggagtaattatctacatgatgtttatagttcctgtggtttttcacccaagaagcagaatctcattcagtacatttagttttataagagtcatgaagctaaatccttgggctatgtcagaggcacaaagtctagaatgtgtgtattcacaatggtgtatgtacattttgtgccttgattcacttagaagtgtctcagaaaacctggacagttcgcttctacacaagaattttatatgtatttatgaagatgattctgtaccctagtatatctttttgggcatggactaatttgtatctgtttaactcatattctgcacgatctgtatatagtacatcaaacttagaggtgtgaccttaaatttaactttttttaaaaactgggaggtcaataaaatttaaactgcttaactatgaaaatgaatatttgaattttttacttgtatatttttataaatacagctgagttttcttaaagcgaataagtgtgtgtatatatatatgtatatatatgagagaataagcatgcataattacctttattactgaatactttctgacagtgcaggagtttttcaaagaggagaaattgtgcttagtccagccaagctgtcatacttaaaagaggtttataatgaaatctgttgcatctaattgtcctttaaagtagacatgatttaatggaatccaaaactggaaaagttaagatgatgctttgggcacacataaaaacttggttaaaatttcattttaaactagtatactgaagtggtaagtgatgaatgatttcatgacttgttaatggacattcttggtactaagtttttcctagaaatgattctaaatatgtaaatgctattggggtaacactttaataccccatttcaacaaggagtaccttctcaattaaaaaaaatcgcagtagccaccgcacccagatctggttagttcttaagtgattcatgtaactggtcagtagaagaaaaggattataaatgatgccattctgtaaactgcactactacccaaaaaccattgttctaaactgttctggaaatcattactatgcatcgttttggaaaaacttgccaagaattaaaatgttacttctcaaattttttttctgtatgacttgcatataattttagatgaattaaagcacctaattttactttttatatgcttctaaa

SEQ ID NO: 387538 - DNA, 3931 bp, Homo sapiens
gtggcccatcccgtctgctctctgtcccgtctcccgacccgtacgcttttccctcaactcgcgcgcacgaatggttaaaaaaagggtgtgaggctcgagcccgccagccaggccgctagcacctcgcgcgcgccctcagcgaggacccgcacgagctgcccggctctgtgcctgcgttgtttgaaactgtggaacccgttaggcttttggggaactacagtcccagctggctccggagcccgtgcgtgccaggggcgagtggccgtcgcgagacggctcctgcctttcgtgtctctgcagcgtggagactggaaccggcaatttcaaaggacgccacgttcaatcgcagcgctggcgcgggcggaggctaaaacacgggggtcctgagactgaggaaaacgcgccaagttcccctcggtggcggagtgctaaagaccctagcggttcaggcgttcggcgagcggggccgctgcttgttgcgctcctggctctcccggggcgggcgcagatgggcgccgctcccgggatgtagttggtgttggtgcaaggcgggagcgagcggcggtcggggttcccgctcttgggagcggatggtcactcccccgcggggagggcgagccgaccagattttcctggggccggggacccggcgggctcggggcagggactcacctgtcgcacccacactcattcgggttggacttgccggcgtcaccgccgcggacttcgctttgggccatgaccagatataattggtgattacaactttcctctataaattaactcttgacactccttgggatttgaagaaaaaaatgcctggtgtcatacctagtgaaagtaatggactttcaagaggtagcccttcaaagaaaaacagactttccttaaagttttttcagaaaaaggaaactaagagagctttggatttcacagattctcaagaaaatgaagaaaaagcttctgaatatagagcatctgaaattgatcaagttgttcctgcagcacagtcttcacctataaactgtgagaagagagaaaacttgttaccatttgtgggactgaataatctcggcaatacttgctatcttaatagtatacttcaggtattatatttttgtcccggttttaaatctggagtaaagcacttatttaatattatttcaaggaagaaagaagctctaaaggatgaagccaatcaaaaagacaagggaaattgcaaagaagattctttggcaagttatgaattgatatgcagtttacagtccttaatcatttcggttgaacagctccaggctagttttctcttaaatccagagaaatatactgatgaacttgccactcagccaaggcgactgcttaacacactgagggaactcaaccctatgtatgaaggatatctacagcatgatgcacaggaagtattacaatgtattttgggaaacattcaagaaacatgccaactcctaaaaaaagaagaagtaaaaaatgtggcagaattacctactaaggtagaagaaatacctcatccgaaagaggaaatgaatggtattaacagcatagagatggacagtatgaggcattctgaagactttaaagagaaactcccaaaaggaaatgggaaaagaaaaagtgacactgaatttggtaacatgaagaaaaaagttaaattatccaaggaacaccagtcattggaagagaaccagagacaaactagatcaaaaagaaaagctacaagtgatacattagagagtcctcctaaaataattcccaagtatatttctgaaaatgagagtccaagaccctcacaaaagaaatcaagagttaaaataaattggttaaagtctgcaactaagcaacccagcattctttctaaattttgtagtctgggaaaaataacaacaaaccaaggagtcaaaggacaatctaaagaaaatgaatgtgatcctgaagaggacttggggaagtgtgaaagtgataacacaactaatggttgtggacttgaatctccaggaaatactgttacacctgtaaatgttaatgaagttaaacccataaacaaaggtgaagaacaaattggttttgagctagtggagaaattatttcaaggtcagctggtattaaggacgcgttgcttggaatgtgaaagtttaacagaaagaagagaagattttcaagacatcagtgtgccagtacaagaagatgagctttccaaagtagaggagagttctgaaatttctccagagccaaaaacagaaatgaagaccctgagatgggcaatttcacaatttgcttcagtagaaaggattgtaggagaagataaatatttctgtgaaaactgccatcattatactgaagctgaacgaagtcttttgtttgacaaaatgcctgaagttataactattcatttgaagtgctttgctgctagtggtttggagtttgattgttatggtggtggactttccaagatcaacactcctttattgacacctcttaaattgtcactagaagaatggagcacaaagccaactaacgacagctatggattatttgcggttgtgatgcatagtggcattacaattagtagtgggcattacactgcttctgttaaagtcactgaccttaacagtttagaactagataaaggaaattttgtggttgaccaaatgtgtgaaataggtaagccagaaccattgaatgaggaggaagcaaggggtgtggttgagaattataatgatgaagaagtgtcaattagagttggtggaaatacacagccaagtaaagttttgaacaaaaaaaatgtagaagctattggacttcttggaggacaaaagagcaaagcagattatgagctatacaacaaagcctctaatcctgataaggttgctagtacagcgtttgctgaaaatagaaattctgagactagtgatactactgggacccatgaatctgatagaaacaaggaatccagtgaccaaacaggcattaatattagtggatttgagaacaaaatttcatacgtagtgcaaagcttaaaggagtatgaggggaagtggttgctttttgatgattctgaagtcaaagttactgaagagaaggactttctgaattctctttccccttctacatctcctacttctactccttacttgctattttataagaaattatagagtgagtgtattttccttgtgtatatattaaacacacccatacaaacattggtaaagttgattacatcaaagaatctttagcttatcttttgaagctactggatattattggtctctctaggtttttatataaatagtgaaatttgaattactgaaaaccatgttaatttttagaactcattttcctcagtagagactagtgatgcattagcttctgggaacaaacttgtatcggttcttaattaaattatccaaaacggaggcatttaaacacttggatttacaccagtcttttgtgtttgctttttaaaataaagtgctcgtatttgtattctccatattttggagtaattatctacatgatgtttatagttcctgtggtttttcacccaagaagcagaatctcattcagtacatttagttttataagagtcatgaagctaaatccttgggctatgtcagaggcacaaagtctagaatgtgtgtattcacaatggtgtatgtacattttgtgccttgattcacttagaagtgtctcagaaaacctggacagttcgcttctacacaagaattttatatgtatttatgaagatgattctgtaccctagtatatctttttgggcatggactaatttgtatctgtttaactcatattctgcacgatctgtatatagtacatcaaacttagaggtgtgaccttaaatttaactttttttaaaaactgggaggtcaataaaatttaaactgcttaactatga

SEQ ID NO: 387539 - DNA, 3566 bp, Homo sapiens
tctacttgggacttcgacggcccaaacaatgccgtgccactgtaaggcgttccgcaaacttccgtcgagagcggagcggttcaggcgttcggcgagcggggccgctgcttgttgcgctcctggctctcccggggcgggcgcagatgggcgccgctcccgggatgtagttggtgttggtgcaaggcgggagcgagcggcggtcggggttcccgctcttgggagcggatggtcactcccccgcggggagggcgagccgaccagattttcctggggccggggacccggcgggctcggggcagggactcacctgtcgcacccacactcattcgggttggacttgccggcgtcaccgccgcggacttcgctttgggccatgaccagatataattggtgattacaactttcctctataaattaactcttgacactccttgggatttgaagaaaaaaatgcctggtgtcatacctagtgaaagtaatggactttcaagaggtagcccttcaaagaaaaacagactttccttaaagttttttcagaaaaaggaaactaagagagctttggatttcacagattctcaagaaaatgaagaaaaagcttctgaatatagagcatctgaaattgatcaagttgttcctgcagcacagtcttcacctataaactgtgagaagagagaaaacttgttaccatttgtgggactgaataatctcggcaatacttgctatcttaatagtatacttcaggtattatatttttgtcccggttttaaatctggagtaaagcacttatttaatattatttcaaggaagaaagaagctctaaaggatgaagccaatcaaaaagacaagggaaattgcaaagaagattctttggcaagttatgaattgatatgcagtttacagtccttaatcatttcggttgaacagctccaggctagttttctcttaaatccagagaaatatactgatgaacttgccactcagccaaggcgactgcttaacacactgagggaactcaaccctatgtatgaaggatatctacagcatgatgcacaggaagtattacaatgtattttgggaaacattcaagaaacatgccaactcctaaaaaaagaagaagtaaaaaatgtggcagaattacctactaaggtagaagaaatacctcatccgaaagaggaaatgaatggtattaacagcatagagatggacagtatgaggcattctgaagactttaaagagaaactcccaaaaggaaatgggaaaagaaaaagtgacactgaatttggtaacatgaagaaaaaagttaaattatccaaggaacaccagtcattggaagagaaccagagacaaactagatcaaaaagaaaagctacaagtgatacattagagagtcctcctaaaataattcccaagtatatttctgaaaatgagagtccaagaccctcacaaaagaaatcaagagttaaaataaattggttaaagtctgcaactaagcaacccagcattctttctaaattttgtagtctgggaaaaataacaacaaaccaaggagtcaaaggacaatctaaagaaaatgaatgtgatcctgaagaggacttggggaagtgtgaaagtgataacacaactaatggttgtggacttgaatctccaggaaatactgttacacctgtaaatgttaatgaagttaaacccataaacaaaggtgaagaacaaattggttttgagctagtggagaaattatttcaaggtcagctggtattaaggacgcgttgcttggaatgtgaaagtttaacagaaagaagagaagattttcaagacatcagtgtgccagtacaagaagatgagctttccaaagtagaggagagttctgaaatttctccagagccaaaaacagaaatgaagaccctgagatgggcaatttcacaatttgcttcagtagaaaggattgtaggagaagataaatatttctgtgaaaactgccatcattatactgaagctgaacgaagtcttttgtttgacaaaatgcctgaagttataactattcatttgaagtgctttgctgctagtggtttggagtttgattgttatggtggtggactttccaagatcaacactcctttattgacacctcttaaattgtcactagaagaatggagcacaaagccaactaacgacagctatggattatttgcggttgtgatgcatagtggcattacaattagtagtgggcattacactgcttctgttaaagtcactgaccttaacagtttagaactagataaaggaaattttgtggttgaccaaatgtgtgaaataggtaagccagaaccattgaatgaggaggaagcaaggggtgtggttgagaattataatgatgaagaagtgtcaattagagttggtggaaatacacagccaagtaaagttttgaacaaaaaaaatgtagaagctattggacttcttggaggacaaaagagcaaagcagattatgagctatacaacaaagcctctaatcctgataaggttgctagtacagcgtttgctgaaaatagaaattctgagactagtgatactactgggacccatgaatctgatagaaacaaggaatccagtgaccaaacaggcattaatattagtggatttgagaacaaaatttcatacgtagtgcaaagcttaaaggagtatgaggggaagtggttgctttttgatgattctgaagtcaaagttactgaagagaaggactttctgaattctctttccccttctacatctcctacttctactccttacttgctattttataagaaattatagagtgagtgtattttccttgtgtatatattaaacacacccatacaaacattggtaaagttgattacatcaaagaatctttagcttatcttttgaagctactggatattattggtctctctaggtttttatataaatagtgaaatttgaattactgaaaaccatgttaatttttagaactcattttcctcagtagagactagtgatgcattagcttctgggaacaaacttgtatcggttcttaattaaattatccaaaacggaggcatttaaacacttggatttacaccagtcttttgtgtttgctttttaaaataaagtgctcgtatttgtattctccatattttggagtaattatctacatgatgtttatagttcctgtggtttttcacccaagaagcagaatctcattcagtacatttagttttataagagtcatgaagctaaatccttgggctatgtcagaggcacaaagtctagaatgtgtgtattcacaatggtgtatgtacattttgtgccttgattcacttagaagtgtctcagaaaacctggacagttcgcttctacacaagaattttatatgtatttatgaagatgattctgtaccctagtatatctttttgggcatggactaatttgtatctgtttaactcatattctgcacgatctgtatatagtacatcaaacttagaggtgtgaccttaaatttaactttttttaaaaactgggaggtcaataaaatttaaactgcttaactatga

SEQ ID NO: 387540 - DNA, 4704 bp, Homo sapiens
gtggcccatcccgtctgctctctgtcccgtctcccgacccgtacgcttttccctcaactcgcgcgcacgaatggttaaaaaaagggtgtgaggctcgagcccgccagccaggccgctagcacctcgcgcgcgccctcagcgaggacccgcacgagctgcccggctctgtgcctgcgttgtttgaaactgtggaacccgttaggcttttggggaactacagtcccagctggctccggagcccgtgcgtgccaggggcgagtggccgtcgcgagacggctcctgcctttcgtgtctctgcagcgtggagactggaaccggcaatttcaaaggacgccacgttcaatcgcagcgctggcgcgggcggaggctaaaacacgggggtcctgagactgaggaaaacgcgccaagttcccctcggtggcggagtgctaaagaccctagcggttcaggcgttcggcgagcggggccgctgcttgttgcgctcctggctctcccggggcgggcgcagatgggcgccgctcccgggatgtagttggtgttggtgcaaggcgggagcgagcggcggtcggggttcccgctcttgggagcggatggtcactcccccgcggggagggcgagccgaccagattttcctggggccggggacccggcgggctcggggcagggactcacctgtcgcacccacactcattcgggttggacttgccggcgtcaccgccgcggacttcgctttgggccatgaccagatataattggtgattacaactttcctctataaattaactcttgacactccttgggatttgaagaaaaaaatgcctggtgtcatacctagtgaaagtaatggactttcaagaggtagcccttcaaagaaaaacagactttccttaaagttttttcagaaaaaggaaactaagagagctttggatttcacagattctcaagaaaatgaagaaaaagcttctgaatatagagcatctgaaattgatcaagttgttcctgcagcacagtcttcacctataaactgtgagaagagagaaaacttgttaccatttgtgggactgaataatctcggcaatacttgctatcttaatagtatacttcaggtattatatttttgtcccggttttaaatctggagtaaagcacttatttaatattatttcaaggaagaaagaagctctaaaggatgaagccaatcaaaaagacaagggaaattgcaaagaagattctttggcaagttatgaattgatatgcagtttacagtccttaatcatttcggttgaacagctccaggctagttttctcttaaatccagagaaatatactgatgaacttgccactcagccaaggcgactgcttaacacactgagggaactcaaccctatgtatgaaggatatctacagcatgatgcacaggaagtattacaatgtattttgggaaacattcaagaaacatgccaactcctaaaaaaagaagaagtaaaaaatgtggcagaattacctactaaggtagaagaaatacctcatccgaaagaggaaatgaatggtattaacagcatagagatggacagtatgaggcattctgaagactttaaagagaaactcccaaaaggaaatgggaaaagaaaaagtgacactgaatttggtaacatgaagaaaaaagttaaattatccaaggaacaccagtcattggaagagaaccagagacaaactagatcaaaaagaaaagctacaagtgatacattagagagtcctcctaaaataattcccaagtatatttctgaaaatgagagtccaagaccctcacaaaagaaatcaagagttaaaataaattggttaaagtctgcaactaagcaacccagcattctttctaaattttgtagtctgggaaaaataacaacaaaccaaggagtcaaaggacaatctaaagaaaatgaatgtgatcctgaagaggacttggggaagtgtgaaagtgataacacaactaatggttgtggacttgaatctccaggaaatactgttacacctgtaaatgttaatgaagttaaacccataaacaaaggtgaagaacaaattggttttgagctagtggagaaattatttcaaggtcagctggtattaaggacgcgttgcttggaatgtgaaagtttaacagaaagaagagaagattttcaagacatcagtgtgccagtacaagaagatgagctttccaaagtagaggagagttctgaaatttctccagagccaaaaacagaaatgaagaccctgagatgggcaatttcacaatttgcttcagtagaaaggattgtaggagaagataaatatttctgtgaaaactgccatcattatactgaagctgaacgaagtcttttgtttgacaaaatgcctgaagttataactattcatttgaagtgctttgctgctagtggtttggagtttgattgttatggtggtggactttccaagatcaacactcctttattgacacctcttaaattgtcactagaagaatggagcacaaagccaactaacgacagctatggattatttgcggttgtgatgcatagtggcattacaattagtagtgggcattacactgcttctgttaaagtcactgaccttaacagtttagaactagataaaggaaattttgtggttgaccaaatgtgtgaaataggtaagccagaaccattgaatgaggaggaagcaaggggtgtggttgagaattataatgatgaagaagtgtcaattagagttggtggaaatacacagccaagtaaagttttgaacaaaaaaaatgtagaagctattggacttcttggaggacaaaagagcaaagcagattatgagctatacaacaaagcctctaatcctgataaggttgctagtacagcgtttgctgaaaatagaaattctgagactagtgatactactgggacccatgaatctgatagaaacaaggaatccagtgaccaaacaggcattaatattagtggatttgagaacaaaatttcatacgtagtgcaaagcttaaaggagtatgaggggaagtggttgctttttgatgattctgaagtcaaagttactgaagagaaggactttctgaattctctttccccttctacatctcctacttctactccttacttgctattttataagaaattatagagtgagtgtattttccttgtgtatatattaaacacacccatacaaacattggtaaagttgattacatcaaagaatctttagcttatcttttgaagctactggatattattggtctctctaggtttttatataaatagtgaaatttgaattactgaaaaccatgttaatttttagaactcattttcctcagtagagactagtgatgcattagcttctgggaacaaacttgtatcggttcttaattaaattatccaaaacggaggcatttaaacacttggatttacaccagtcttttgtgtttgctttttaaaataaagtgctcgtatttgtattctccatattttggagtaattatctacatgatgtttatagttcctgtggtttttcacccaagaagcagaatctcattcagtacatttagttttataagagtcatgaagctaaatccttgggctatgtcagaggcacaaagtctagaatgtgtgtattcacaatggtgtatgtacattttgtgccttgattcacttagaagtgtctcagaaaacctggacagttcgcttctacacaagaattttatatgtatttatgaagatgattctgtaccctagtatatctttttgggcatggactaatttgtatctgtttaactcatattctgcacgatctgtatatagtacatcaaacttagaggtgtgaccttaaatttaactttttttaaaaactgggaggtcaataaaatttaaactgcttaactatgaaaatgaatatttgaattttttacttgtatatttttataaatacagctgagttttcttaaagcgaataagtgtgtgtatatatatatgtatatatatgagagaataagcatgcataattacctttattactgaatactttctgacagtgcaggagtttttcaaagaggagaaattgtgcttagtccagccaagctgtcatacttaaaagaggtttataatgaaatctgttgcatctaattgtcctttaaagtagacatgatttaatggaatccaaaactggaaaagttaagatgatgctttgggcacacataaaaacttggttaaaatttcattttaaactagtatactgaagtggtaagtgatgaatgatttcatgacttgttaatggacattcttggtactaagtttttcctagaaatgattctaaatatgtaaatgctattggggtaacactttaataccccatttcaacaaggagtaccttctcaattaaaaaaaatcgcagtagccaccgcacccagatctggttagttcttaagtgattcatgtaactggtcagtagaagaaaaggattataaatgatgccattctgtaaactgcactactacccaaaaaccattgttctaaactgttctggaaatcattactatgcatcgttttggaaaaacttgccaagaattaaaatgttacttctcaaattttttttctgtatgacttgcatataattttagatgaattaaagcacctaattttactttttatatgcttctaaa

SEQ ID NO: 387541 - DNA, 4653 bp, Homo sapiens
gtggcccatcccgtctgctctctgtcccgtctcccgacccgtacgcttttccctcaactcgcgcgcacgaatggttaaaaaaagggtgtgaggctcgagcccgccagccaggccgctagcacctcgcgcgcgccctcagcgaggacccgcacgagctgcccggctctgtgcctgcgttgtttgaaactgtggaacccgttaggcttttggggaactacagtcccagctggctccggagcccgtgcgtgccaggggcgagtggccgtcgcgagacggctcctgcctttcgtgtctctgcagcgtggagactggaaccggcaatttcaaaggacgccacgttcaatcgcagcgctggcgcgggcggaggctaaaacacgggggtcctgagactgaggaaaacgcgccaagttcccctcggtggcggagtgctaaagaccctagcggttcaggcgttcggcgagcggggccgctgcttgttgcgctcctggctctcccggggcgggcgcagatgggcgccgctcccgggatgtagttggtgttggtgcaaggcgggagcgagcggcggtcggggttcccgctcttgggagcggatggtcactcccccgcggggagggcgagccgaccagattttcctggggccggggacccggcgggctcggggcagggactcacctgtcgcacccacactcattcgggttggacttgccggcgtcaccgccgcggacttcgctttgggccatgaccagatataattggtgattacaactttcctctataaattaactcttgacactccttgggatttgaagaaaaaaatgcctggtgtcatacctagtgaaagtaatggactttcaagaggtagcccttcaaagaaaaacagactttccttaaagttttttcagaaaaaggaaactaagagagctttggatttcacagattctcaagaaaatgaagaaaaagcttctgaatatagagcatctgaaattgatcaagttgttcctgcagcacagtcttcacctataaactgtgagaagagagaaaacttgttaccatttgtgggactgaataatctcggcaatacttgctatcttaatagtatacttcaggtattatatttttgtcccggttttaaatctggagtaaagcacttatttaatattatttcaaggaagaaagaagctctaaaggatgaagccaatcaaaaagacaagggaaattgcaaagaagattctttggcaagttatgaattgatatgcagtttacagtccttaatcatttcggttgaacagctccaggctagttttctcttaaatccagagaaatatactgatgaacttgccactcagccaaggcgactgcttaacacactgagggaactcaaccctatgtatgaaggatatctacagcatgatgcacaggaagtattacaatgtattttgggaaacattcaagaaacatgccaactcctaaaaaaagaagaagtaaaaaatgtggcagaattacctactaaggtagaagaaatacctcatccgaaagaggaaatgaatggtattaacagcatagagatggacagtatgaggcattctgaagactttaaagagaaactcccaaaaggaaatgggaaaagaaaaagtgacactgaatttggtaacatgaagaaaaaagttaaattatccaaggaacaccagtcattggaagagaaccagagacaaactagatcaaaaagaaaagctacaagtgatacattagagagtcctcctaaaataattcccaagtatatttctgaaaatgagagtccaagaccctcacaaaagaaatcaagagttaaaataaattggttaaagtctgcaactaagcaacccagcattctttctaaattttgtagtctgggaaaaataacaacaaaccaaggagtcaaaggacaatctaaagaaaatgaatgtgatcctgaagaggacttggggaagtgtgaaagtgataacacaactaatggttgtggacttgaatctccaggaaatactgttacacctgtaaatgttaatgaagttaaacccataaacaaaggtgaagaacaaattggttttgagctagtggagaaattatttcaaggtcagctggtattaaggacgcgttgcttggaatgtgaaagtttaacagaaagaagagaagattttcaagacatcagtgtgccagtacaagaagatgagctttccaaagtagaggagagttctgaaatttctccagagccaaaaacagaaatgaagaccctgagatgggcaatttcacaatttgcttcagtagaaaggattgtaggagaagataaatatttctgtgaaaactgccatcattatactgaagctgaacgaagtcttttgtttgacaaaatgcctgaagttataactattcatttgaagtgctttgctgctagtggtttggagtttgattgttatggtggtggactttccaagatcaacactcctttattgacacctcttaaattgtcactagaagaatggagcacaaagccaactaacgacagctatggattatttgcggttgtgatgcatagtggcattacaattagtagtgggcattacactgcttctgttaaagtcactgaccttaacagtttagaactagataaaggaaattttgtggttgaccaaatgtgtgaaataggtaagccagaaccattgaatgaggaggaagcaaggggtgtggttgagaattataatgatgaagaagtgtcaattagagttggtggaaatacacagccaagtaaagttttgaacaaaaaaaatgtagaagctattggacttcttggaggacaaaagagcaaagcagattatgagctatacaacaaagcctctaatcctgataaggttgctagtacagcgtttgctgaaaatagaaattctgagactagtgatactactgggacccatgaatctgatagaaacaaggaatccagtgaccaaacaggcattaatattagtggatttgagaacctttttgatgattctgaagtcaaagttactgaagagaaggactttctgaattctctttccccttctacatctcctacttctactccttacttgctattttataagaaattatagagtgagtgtattttccttgtgtatatattaaacacacccatacaaacattggtaaagttgattacatcaaagaatctttagcttatcttttgaagctactggatattattggtctctctaggtttttatataaatagtgaaatttgaattactgaaaaccatgttaatttttagaactcattttcctcagtagagactagtgatgcattagcttctgggaacaaacttgtatcggttcttaattaaattatccaaaacggaggcatttaaacacttggatttacaccagtcttttgtgtttgctttttaaaataaagtgctcgtatttgtattctccatattttggagtaattatctacatgatgtttatagttcctgtggtttttcacccaagaagcagaatctcattcagtacatttagttttataagagtcatgaagctaaatccttgggctatgtcagaggcacaaagtctagaatgtgtgtattcacaatggtgtatgtacattttgtgccttgattcacttagaagtgtctcagaaaacctggacagttcgcttctacacaagaattttatatgtatttatgaagatgattctgtaccctagtatatctttttgggcatggactaatttgtatctgtttaactcatattctgcacgatctgtatatagtacatcaaacttagaggtgtgaccttaaatttaactttttttaaaaactgggaggtcaataaaatttaaactgcttaactatgaaaatgaatatttgaattttttacttgtatatttttataaatacagctgagttttcttaaagcgaataagtgtgtgtatatatatatgtatatatatgagagaataagcatgcataattacctttattactgaatactttctgacagtgcaggagtttttcaaagaggagaaattgtgcttagtccagccaagctgtcatacttaaaagaggtttataatgaaatctgttgcatctaattgtcctttaaagtagacatgatttaatggaatccaaaactggaaaagttaagatgatgctttgggcacacataaaaacttggttaaaatttcattttaaactagtatactgaagtggtaagtgatgaatgatttcatgacttgttaatggacattcttggtactaagtttttcctagaaatgattctaaatatgtaaatgctattggggtaacactttaataccccatttcaacaaggagtaccttctcaattaaaaaaaatcgcagtagccaccgcacccagatctggttagttcttaagtgattcatgtaactggtcagtagaagaaaaggattataaatgatgccattctgtaaactgcactactacccaaaaaccattgttctaaactgttctggaaatcattactatgcatcgttttggaaaaacttgccaagaattaaaatgttacttctcaaattttttttctgtatgacttgcatataattttagatgaattaaagcacctaattttactttttatatgcttctaaa

SEQ ID NO: 387542 - DNA, 2761 bp, Homo sapiens
cccagtcttcgtcccatcaggaagccaatcaaaaagacaagggaaattgcaaagaagattctttggcaagttatgaattgatatgcagtttacagtccttaatcatttcggttgaacagctccaggctagttttctcttaaatccagagaaatatactgatgaacttgccactcagccaaggcgactgcttaacacactgagggaactcaaccctatgtatgaaggatatctacagcatgatgcacaggaagtattacaatgtattttgggaaacattcaagaaacatgccaactcctaaaaaaagaagaagtaaaaaatgtggcagaattacctactaaggtagaagaaatacctcatccgaaagaggaaatgaatggtattaacagcatagagatggacagtatgaggcattctgaagactttaaagagaaactcccaaaaggaaatgggaaaagaaaaagtgacactgaatttggtaacatgaagaaaaaagttaaattatccaaggaacaccagtcattggaagagaaccagagacaaactagatcaaaaagaaaagctacaagtgatacattagagagtcctcctaaaataattcccaagtatatttctgaaaatgagagtccaagaccctcacaaaagaaatcaagagttaaaataaattggttaaagtctgcaactaagcaacccagcattctttctaaattttgtagtctgggaaaaataacaacaaaccaaggagtcaaaggacaatctaaagaaaatgaatgtgatcctgaagaggacttggggaagtgtgaaagtgataacacaactaatggttgtggacttgaatctccaggaaatactgttacacctgtaaatgttaatgaagttaaacccataaacaaaggtgaagaacaaattggttttgagctagtggagaaattatttcaaggtcagctggtattaaggacgcgttgcttggaatgtgaaagtttaacagaaagaagagaagattttcaagacatcagtgtgccagtacaagaagatgagctttccaaagtagaggagagttctgaaatttctccagagccaaaaacagaaatgaagaccctgagatgggcaatttcacaatttgcttcagtagaaaggattgtaggagaagataaatatttctgtgaaaactgccatcattatactgaagctgaacgaagtcttttgtttgacaaaatgcctgaagttataactattcatttgaagtgctttgctgctagtggtttggagtttgattgttatggtggtggactttccaagatcaacactcctttattgacacctcttaaattgtcactagaagaatggagcacaaagccaactaacgacagctatggattatttgcggttgtgatgcatagtggcattacaattagtagtgggcattacactgcttctgttaaagtcactgaccttaacagtttagaactagataaaggaaattttgtggttgaccaaatgtgtgaaataggtaagccagaaccattgaatgaggaggaagcaaggggtgtggttgagaattataatgatgaagaagtgtcaattagagttggtggaaatacacagccaagtaaagttttgaacaaaaaaaatgtagaagctattggacttcttggaggacaaaagagcaaagcagattatgagctatacaacaaagcctctaatcctgataaggttgctagtacagcgtttgctgaaaatagaaattctgagactagtgatactactgggacccatgaatctgatagaaacaaggaatccagtgaccaaacaggcattaatattagtggatttgagaacaaaatttcatacgtagtgcaaagcttaaaggagtatgaggggaagtggttgctttttgatgattctgaagtcaaagttactgaagagaaggactttctgaattctctttccccttctacatctcctacttctactccttacttgctattttataagaaattatagagtgagtgtattttccttgtgtatatattaaacacacccatacaaacattggtaaagttgattacatcaaagaatctttagcttatcttttgaagctactggatattattggtctctctaggtttttatataaatagtgaaatttgaattactgaaaaccatgttaatttttagaactcattttcctcagtagagactagtgatgcattagcttctgggaacaaacttgtatcggttcttaattaaattatccaaaacggaggcatttaaacacttggatttacaccagtcttttgtgtttgctttttaaaataaagtgctcgtatttgtattctccatattttggagtaattatctacatgatgtttatagttcctgtggtttttcacccaagaagcagaatctcattcagtacatttagttttataagagtcatgaagctaaatccttgggctatgtcagaggcacaaagtctagaatgtgtgtattcacaatggtgtatgtacattttgtgccttgattcacttagaagtgtctcagaaaacctggacagttcgcttctacacaagaattttatatgtatttatgaagatgattctgtaccctagtatatctttttgggcatggactaatttgtatctgtttaactcatattctgcacgatctgtatatagtacatcaaacttagaggtgtgaccttaaatttaactttttttaaaaactgggaggtcaataaaatttaaactgcttaactatga

SEQ ID NO: 387543 - DNA, 2650 bp, Homo sapiens
gtggcccatcccgtctgctctctgtcccgtctcccgacccgtacgcttttccctcaactcgcgcgcacgaatggttaaaaaaagggtgtgaggctcgagcccgccagccaggccgctagcacctcgcgcgcgccctcagcgaggacccgcacgagctgcccggctctgtgcctgcgttgtttgaaactgtggaacccgttaggcttttggggaactacagtcccagctggctccggagcccgtgcgtgccaggggcgagtggccgtcgcgagacggctcctgcctttcgtgtctctgcagcgtggagactggaaccggcaatttcaaaggacgccacgttcaatcgcagcgctggcgcgggcggaggctaaaacacgggggtcctgagactgaggaaaacgcgccaagttcccctcggtggcggagtgctaaagaccctagcggttcaggcgttcggcgagcggggccgctgcttgttgcgctcctggctctcccggggcgggcgcagatgggcgccgctcccgggatgtagttggtgttggtgcaaggcgggagcgagcggcggtcggggttcccgctcttgggagcggatggtcactcccccgcggggagggcgagccgaccagattttcctggggccggggacccggcgggctcggggcagggactcacctgtcgcacccacactcattcgggttggacttgccggcgtcaccgccgcggacttcgctttgggccatgaccagatataattggtgattacaactttcctctataaattaactcttgacactccttgggatttgaagaaaaaaatgcctggtgtcatacctagtgaaagtaatggactttcaagaggtagcccttcaaagaaaaacagactttccttaaagttttttcagaaaaaggaaactaagagagctttggatttcacagattctcaagaaaatgaagaaaaagcttctgaatatagagcatctgaaattgatcaagttgttcctgcagcacagtcttcacctataaactgtgagaagagagaaaacttgttaccatttgtgggactgaataatctcggcaatacttgctatcttaatagtatacttcaggtattatatttttgtcccggttttaaatctggagtaaagcacttatttaatattatttcaaggaagaaagaagctctaaaggatgaagccaatcaaaaagacaagggaaattgcaaagaagattctttggcaagttatgaattgatatgcagtttacagtccttaatcatttcggttgaacagctccaggctagttttctcttaaatccagagaaatatactgatgaacttgccactcagccaaggcgactgcttaacacactgagggaactcaaccctatgtatgaaggatatctacagcatgatgcacaggaagtattacaatgtattttgggaaacattcaagaaacatgccaactcctaaaaaaagaagaagtaaaaaatgtggcagaattacctactaaggtagaagaaatacctcatccgaaagaggaaatgaatggtattaacagcatagagatggacagtatgaggcattctgaagactttaaagagaaactcccaaaaggaaatgggaaaagaaaaagtgacactgaatttggtaacatgaagaaaaaagttaaattatccaaggaacaccagtcattggaagagaaccagagacaaactagatcaaaaagaaaagctacaagtgatacattagagagtcctcctaaaataattcccaagtatatttctgaaaatgagagtccaagaccctcacaaaagaaatcaagagttaaaataaattggttaaagtctgcaactaagcaacccagcattctttctaaattttgtagtctgggaaaaataacaacaaaccaaggagtcaaaggacaatctaaatataagaaattatagagtgagtgtattttccttgtgtatatattaaacacacccatacaaacattggtaaagttgattacatcaaagaatctttagcttatcttttgaagctactggatattattggtctctctaggtttttatataaatagtgaaatttgaattactgaaaaccatgttaatttttagaactcattttcctcagtagagactagtgatgcattagcttctgggaacaaacttgtatcggttcttaattaaattatccaaaacggaggcatttaaacacttggatttacaccagtcttttgtgtttgctttttatgtttatagttcctgtggtttttcacccaagaagcagaatctcattcagtacatttagttttataagagtcatgaagctaaatccttgggctatgtcagaggcacaaagtctagaatgtgtgtattcacaatggtgtatgtacattttgtgccttgattcacttagaagtgtctcagaaaacctggacagttcgcttctacacaagaattttatatgtatttatgaagatgattctgtaccctagtatatctttttgggcatggactaatttgtatctgtttaactcatattctgcacgatctgtatatagtacatcaaacttagaggtgtgaccttaaatttaactttttttaaaaactgggaggtcaataaaatttaaactgcttaactatga

SEQ ID NO: 387544 - DNA, 697 bp, Homo sapiens
actcctcattggaatgtgagctccatgaggacagaaacttagttttgcttacttttgtttactgccatactcccagtatctaagctgcggtacacagtaggagctcaataaacattgtttgactcaacgaatgaattattaggtaaatagccactcccattattgttattctggcttgacaagggtctgtttcttcagaaatttagtgggtttctcttcaattaggtatctgctatgcccaaggcctctgctcagtgctgaggaaacaagcatggacaagatgtggcctccaccctgaggagctcctaaatctaggacagagtaaatctgttagaaatgtcttctctgcacataatttaagctctaccaactgttaacttcttttcatttatccaagttttgccaggtaccacaccaataaaaaaagactcagtccctcttccttcagatatctgaagctggtgatattctcctgggtcttctcttccccaggctaaacaaaaagacccagtgggattgcctgactcaggtctgccaactgggaacaaggaagacagactgtcggatagaggggcagaagagaagaggatccaggagtagagtgactccttcaaagaaaaaagagggagtccttagggaggactctgtggaattaggttggaggttgggtggggataccaggcctctgcttaattaa

SEQ ID NO: 387545 - DNA, 640 bp, Homo sapiens
cacaaaggtgaattcacttgctcaagatccaacacacacaaaatggaggtggttcaaacccaggtgtgtctgactgcagagcctgtgttcttcccagtagagatgtggatgcagcacaaatggtagaaaggacctgagacttagtcagaagacctcagttcacccaaggtatctgctatgcccaaggcctctgctcagtgctgaggaaacaagcatggacaagatgtggcctccaccctgaggagctcctaaatctaggacagagtaaatctgttagaaatgtcttctctgcacataatttaagctctaccaactgttaacttcttttcatttatccaagttttgccaggtaccacaccaataaaaaaagactcagtccctcttccttcagatatctgaagctggtgatattctcctgggtcttctcttccccaggctaaacaaaaagacccagtgggattgcctgactcaggtctgccaactgggaacaaggaagacagactgtcggatagaggggcagaagagaagaggatccaggagtagagtgactccttcaaagaaaaaagagggagtccttagggaggactctgtggaattaggttggaggttgggtggggataccaggcctctgcttaattaa

SEQ ID NO: 387546 - DNA, 618 bp, Homo sapiens
tgatgctgagtttctctctgttgcccaggctggagtgcagtcgcacgatcttggctcactgcaacctctgcctcccgggttcaagcgatttctggctaatttttgtattttcagtagagatgggctttcatcatgttggccaggctggtctcgaactccagacctcaagtgatccacctgcctcggcctcccaaagtgctaggattacaggcgtgagccactgtggctgacttctcccacccctccctttttgttcccagttctcattggtctacagtgtgagttcccaagctggaatttggaagaagcttggggctattggacataatgataataaaatagttaattgattaactataattaacatgaataatgaaatccaccattatatagcgctatctgtctggaacagtcgtgtggttggttccttttagctcttggattaaatgttgtatcttaggagagcccttcccagacctgaaattactttcttctccctcttcttcccccttatctatatcaccttatttatttatttttgagatagggtcttgctctgtctcccaggctggagtgcagtggtgccatttcagctcaccgcaccctcaacctcctggg

SEQ ID NO: 387547 - DNA, 192 bp, Homo sapiens
cctgcggctcacctcaggcagggcactgtttccctgggcccaaggaacacccagaagattcccgaacttgacacttgagctcattagcaggctcctcctcagcagcactacctgcagggagggagaccccaggggaagaggcagtgagtggacttctgggtgagtctgcatgcagtgagagaaagaatcaca

SEQ ID NO: 387548 - DNA, 311 bp, Homo sapiens
tgtaaaagaaacattttgcatcatttacttttcaccaatctgtttggcatgcctctaatgatatcagaatcacctggatcagtgtgcacatactctgcagtattttctgcacattgtgtccaattcaatattattgccactgtagtaatgaacaccacttttggccaacatggcacagtatcctattttggatttcctcaaagtggggcagttgttggtgagcataatcaatttcactttgccttgtctgatcacctttggagtttgcttgtaccccagcacatactttacactttctttgtttttgtttt
